United States Patent Application Publication US 2012/0005773 A1 - sequence listing, part 8

SEQ ID NO: 30877 - protein, 579 aa, Xanthomonas oryzae pv. oryzae KACC10331
MSETLATDATTPAEKKDFIRQIVREDLASGKHTVIRTRFPPEPNGYLHIGHAKAICLDFGLAAEFGGLCNLRLDDTNPAKEDPEFAAAIQDDVRWLGYDWAQLRHASDYFEVYYLAAQKLIRDGHAFVCDLSAEQVRQYRGTLTEPGRHSPFRERSVEENLDLFQRMRAGEFPDGARTLRAKIDMASGNINLRDPALYRIKHVEHQNTGNAWPIYPMYDFAHSLGDAVEGITHSLCTLEFEDHRPLYDWCVDKVDLVGHPELLQPLLDKGLPREAAKPRQIEFSRLNINYTVMSKRKLTALVEEQLVDGWDDPRMYTLQGLRRRGYTPAAMRLFVERVGISKQNSLIDFSVLEGCLREDLDAAAARRMAVIDPLKLVLTNLPEGHTETLQFSNHPKDESFGTREVPFARVLWIEREDFAEVPPKGWKRLVPGGEIRLRGAGIARVDEVIKNADGDIVALRGWLDPESRPGMEGANRKVKGTIHWVSAAHAVEAEIRLYDRLFSVEKPDDESEGKTYRDYLNPESKRNVRGYVEPSAALAAPEQAFQFERTGYFVADSRDHSASTPVFNRSVTLRDAWAK

SEQ ID NO: 30878 - protein, 406 aa, Xanthomonas oryzae pv. oryzae KACC10331
MCPRSWWFIIETMDSRLPYAGGYSRRSQDIAPFHVMSLLARANALEQAGHDVIHLEIGEPDFTTAAPIVAAGQAALAAGHTRYTAARGLPALREAIAGFYAQRYACNVDPERILITPGGSGALLLASSLLVDPGKHWLLADPGYPCNRHFLRLVEGAAQLVPVGADTDYQLTPALVETCWNSDSVGALVASPANPTGSVLSRSQLAALSQTLHARGGHLVVDEIYHGLTYGLDAHSVLEVDDSAFLLSSFSKYFGMTGWRLGWLIAPPDAVPELEKLAQNLYISASTIAQHAALACFTPESIAIFEARRAEFQQRRDYLLPALRALGFDIAVEPQGAFYLYANISGFSNDAQAFCAHFLETEHVAFTPGIDFGHSRANQHVRIAYTQSLPRLQQAVTRIARGLSRL

SEQ ID NO: 30879 - protein, 449 aa, Xanthomonas oryzae pv. oryzae KACC10331
MALARTDRGCAMSARQPAPDATGLVRVVSRWQIVGLSINDVIGSGIYLLPAATAALLGPMSLWAVMLAGLAVALLVLCYAQAASYFDTPGGSYLYTREAFGPFVGFQIGWMIWLTRISSAAALSNGLADAVARFWPTAATDNWARLMVVVGSLGLLTAINVIGVKSAAHTGIALVIGKLVPLLLFVAIGLFYVDWSWAFAGTTPDLRDLGNLGEAALLLLFAYAGFENIPAAAGEYRNPRRDVPFALITMIVTVTLIYAAVQVVAQGTLPNLAASPTPLADAASRFGSEALALILTVGATISILGTTSNTVMLGPRFLFALARDGYGPAFLARVHPRFHTPAAAVLIQGVLSLALALSGSFTQLALLSMVTRLFAYIGTAAAVIVLARRYRQRTDTLRLPGGPAIPIAALLLSLGLLASASWQNLAAAGLALVVGWLIYLLPRKQVENR

SEQ ID NO: 30880 - protein, 575 aa, Xanthomonas oryzae pv. oryzae KACC10331
MAKKRTLARFLAETLQSAGVERIWGVTGDSLNGVTDTLREMQTIEWMHVRHEEVAAFAAGAEAAVTGQLAVCAASCGPGNLHLINGLFDCHRSRQPVLAIAAHIPSSEIGLSYFQETHPQELFRECSHFVALVTNPAQLPEVLHRAMRSAILQQGVAVVVIPGDIALLEVDKHVSSEWPALRQPRVLPAAEDVQQFAALLQQSKAVTLLCGSGCAGAHDAVVALADTLGAPVVHALRGKEYVEWENPFDVGMTGLIGFSSGYHAMLNCDTLIMLGTDFPYRQFYPKDATIVQVDRDPGALGRRTPLQLGIAADVGETVAALLPQLQRREARGFLEKSLAHYRKAREGLDDLAVPADPGEPLHPQFVTRLISQIADQDAVFTCDVGTPTVWAARYLRMNGKRRLLGSFNHGSMANAMPQALGAQAAFPGRQVISLSGDGGFAMLMGDFISLAQLNLPVKVVVFNNASLGFVAMEMKAAGYLDTGTELRNPDFAAMSNAVGILGIRVDESSQLERALRQAFAHSGPALVDVRVATQELAVPPAIMLEQAKGMGLYLLKAVMSGRGDEVIELAKTNVR

SEQ ID NO: 30881 - protein, 364 aa, Xanthomonas oryzae pv. oryzae KACC10331
MRIVQPMNLAFSPKSTSPLPARLARRLVSPHLFDFWATRINPLWTLERPMARLVERSPASRDAVTLVLQPNSHWRGLQAGQHVSLGVEIDGRRLLRSYSPTVLVDGRLAITVKAIEGGLVSRFLTHDAALGTVVSLDPAFGDMLLPSTPTPLLLLAAGSGITPMRALLQAAAQAGMPMDVDLLYWVRQRDEACFVDEFAALAAAHPRLRVQLLTTREGEMPAARIDTYPLDQISALEQRHAMACGPGGFVQAARERLQGRVAAFQAEAFSVPALDESEAGQVQVQLSRSGRTLTLPRGQSLLEGLEAQGLRPNHGCRMGICNTCACARQSGTTRHLLTGERSNEPTAPVRLCISAPSTDLILDL

SEQ ID NO: 30882 - protein, 491 aa, Xanthomonas oryzae pv. oryzae KACC10331
MRSNPTSLGVRMKTALFAGWKARFYSACMLMLFSALIVGGMGSAQAQSTPQITPLPTAPVTTEPLPSAQPAAPPAAAVEAAPVVEKGDVAWMLTSTLLVLLMVVPGLALFYGGMVRAKNVLSVLIQVAVVFSLLIILWVLYGYSLAFSGGGAWIGNLDKALLKGVTIETLAATFTKGVSLPEYVFVVFQATFAGITGALIVGAFAERAKFGAVLLFSAIWFTFGYLPLAHMVWATGGYLFGLGALDFAGGTVVHINAGVAGLVGAYFVGKRAGLGREAIKPHNVTLTFIGASLLWVGWFGFNAGSNLEANAGAALAFLNTLLATAAAILGWSLTEKIIKGKSSALGVASGMVAGLVGITPACGTVGPFGAIVIGLAAGVLCVWGVTGLKRLLGADDSLDVFGVHGLGGIIGAILTGVFSAASLGGQKGGDYDIVHQVGIQALGVGITVGWIGVVSVVGFVVAKLVFGLRVSEEAEREGLDITSHGEAAYES

SEQ ID NO: 30883 - protein, 574 aa, Xanthomonas oryzae pv. oryzae KACC10331
MNQTRVFLIFAWLMVAALLWMEWGKEKAAANAPVAAATQSVPAARDLDAATPSAANVPAAQAIPQAGAPGKVPATSTTTATPAAAGTAPVVTLTSDVLRLKLDGRSVLDAELLQFPQTKDGTAPVSLLTEDAAHPYNATSGWASEHSPVPGVGGFRAEQPGTTFELAKGQNTLVVPFVWNGPNGVSIRRTFTLERGRYAISIKDEVINKSAAPWNGYVFRKLSRVPTILSRGMTNPDSFSFNGATWYSPQAGYERRAFKDYMDDGGLNRQITGGWIALLQHHFFTAWIPQNDQASLYVLNKDGPRDVAELRGPAFTVAPGQTATTEARLWVGPKLVSLIAKEDVKGLDRVIDYSRFSIMAIIGQGLFWVLSHLHSFLHNWGWAIVGLVVLLRLVLYPLSSAQYKSSAKMRKFQPRLAQLKERYGDDRVKYQQATMELFKKEKINPMGGCLPLLIQMPIFFALYWVLVESVELRQAPWLGWIQDLTARDPHFILPALNIAIMWATQKLTPTPGIDPMQAKMMQFMPLVFGAMMAFVPSGLVLYWVVNGGLNLLIQWWMIRQHGEKPSKIIRANAK

SEQ ID NO: 30884 - protein, 397 aa, Wolbachia endosymbiont strain TRS of Brugia malayi
MSDLAKRMLLIKPSPTIAVTDKANRLKDEGKKICILAAGEPDFDTPDHIKKVAIQAIDEGKTKYTAVDGTRELKEAIISKLKRDNNLEYALSQVCVGAGAKQVLFNLFMATVNPGDEAIIPAPYWVSYVDMVSLFGGLPVVIECGQGLKLTPELLKNKVTKKTKWLILNSPNNPAGVVYTYGELEGIAQVLLEYPHVNIITDDIYEHIIYDEKFFTIAQVEPKLYNRVFVVNGVSKAYAMTGWRIGYIAGRSDVVKAISTLQSQSTSNPNSIAQAAAVEALNGDHSFLKERMGIFKSRRDFVIEKLNSAPGLLASIPQGAFYLFVSCKDLLGKSTKSGKVINNDLDFAEYLLEDHLVAVIPGIAFGLKNFIRISYATSQEQLEIGCNSIIKACKMLS

SEQ ID NO: 30885 - protein, 386 aa, Wolbachia endosymbiont strain TRS of Brugia malayi
MANEHLNLFSLENSDYIYADYNATFPVSDSVKESILEVLSKQVLNPSSLHRKGQEARRILQDARDNIRSAIGVPSNKEIVFTSGATEANSLVMKGIAGFQHVISAVEHPSILNSACNPHIIPVNQGGIVDLLALERILSELKGNRVIVSVMMANNETGVVQPVKEIAEIAHKFETIYHTDAAQSVGKIKVNMEDLGMDLLTLSAHKFGGIAGSGVLIFNKDLVIEPIIVGGGQEKGLRGGTENIVAIAGLSAALQSISNLLSKMDEIKELRDQLEYELLNLASGIKIFGKNSKRLPNTSLIYMPGVKSDVQLMNFDLNNIAVSNGSACSSGKVEPSHVLLAMGATREQAECSIRVSIGPQTKPRDIRKIVDCWYNIYEKNILDMRK

SEQ ID NO: 30886 - protein, 423 aa, Wolbachia endosymbiont strain TRS of Brugia malayi
MLKTFILIMNMENEKAHITKVKLPIFLDYQSTTKVDPRVLEMMIPYFSEFSNAHSRSHSFGWAAEEVVEKARRHIADLVNADSKEIIFTSGATESNNMAIKGVAHFYKNKGDHIITVCTEHKCVLDSCRHLENEGFKVTYLPVKRNGIIDLSKLEEAITDRTILVSVMMVNNEIGVIQPVKEIGAICRRHNVFFHTDAAQSFGKVPVDVNGMNIDLMSLTSHKVYGPMGIGALYVRRKSPRVRLTPLISGGGQERGMRSGTVPTPLAVGFGEAARIAKEEMKKEASKLEELRDILYNKIKEAFPDVVLNGDYNNRIPGNLNLSFPYVEGESLIMAIKDLAVSSGSACTSASLEPSYVIRSLNSGYDLEHSSIRFGLGRFTTKDEILYAADLIAKNVGRLREMSPLWEMVQEGIDLNTVKWDSH

SEQ ID NO: 30887 - protein, 308 aa, Wolbachia endosymbiont strain TRS of Brugia malayi
MKIIIGNASKELGKLIANKLNVQPFSAQVSKFADGAINAEVESNLCSQEVYIIQSISPPVNDHLMELLFIIDAVKRSGTKRITTIIPYYGYSRQDRIIKNNNMQSALNAKLVANLIQTAGASSVAVIDLHSSQIEGFFDVPLTNLSCFEAFADSIHIENLAIVAPDVGAIGRARAFAKTLEKKYEIKLSDKIIIIDKYREKAGTSHVMNVIGEATNKNCVIVDDIVDSGGTLCNAALALKNRRARSVISCITHGVLSGNAIEKISSSSLDKLVTTDTIFHKLEKTDKIEIVSIANILTHFIQGGKDAS

SEQ ID NO: 30888 - protein, 340 aa, Wolbachia endosymbiont strain TRS of Brugia malayi
MDFIDEVKLYLKAGDGGDGCVSFRREKFVEFGGPNGGNGGKGGNIVFVSDANLNTLLNFRYRRHVKAGSGKSGASRDRSGTAGKNIVLKVPVGTQIIDEESEKIILDFNKPDMEFLIAQGGKGGLGNTNFKSSINRAPRHFTCGQFGEEKYVVLKLKVLSDVGIIGMPNAGKSKFLTRCSNADTKVGDYPFTTIKPHLGVAKVDNSEVVIVDIPGIITDAHLGIGLGHKFLKHVERCKILLHLIDVTHDNVVSAYNCMRNELELYNSDLVKKEEIIVLNKCDLLRKVEIFEKKNHLANYLNKEVLCLSIGEDLQPILRLLNEKLKKGSSKKVDVYDPFKR

SEQ ID NO: 30889 - protein, 853 aa, Wolbachia endosymbiont strain TRS of Brugia malayi
MDLNKFTEKAKSLIQSAQMKALGTGHQVFMPEHLLKVMLEDESGLVQDLIGACGGNAQSISDAVNNAIKKFPIVKGPGSNSLQLSREVAKVFEDSIGMARRNKDSFVTVERLLQGLTAQKNDTVGKILAENGITPQKLNSVITEMRKGSSADSPNSEENLNAAKKYTKDVTELAMQGKLDPVIGRDEEIRRTMQVSLRRTKNNPVLIGEPGVGKTAIVEGLANRIVANDVPLGLHDAKVLALDLGALIAGTKFRGEFEERLKAVINELAKAEGKIILFIDELHTLVGAGATSGAMDASNLLKPALARGEIRCIGATTLDEYREHIEKDPALARRFQPVFISQPTETDTVSILRGLKERYEVHHGIRITDGAIIAAAMLSNRYITDRFLPDKAIDLIDEAASRVRIEMDSKPEIIDELERKIVQLKIESEVLKKERDENSKQRLKKINEEIENLNSKFTDLNSKWQMEKNKIARIQETAEKLDNARKELELAQRSGKLEKAGELMYGVIPHLENELMNQEKVTDSFLKKEVTEDDIANIVSKWTGIPVDNMMHSEKEKLLSMENEIGKRVIGQKDAIEAISNAVRRSRSGVQDTNRPFGSFLFLGPTGVGKTELAKALAEFLFDDQSALLRFDMSEYMEKHSVSKLIGAPPGYVGYEQGGRLTEAVRRRPYQVILFDEIEKANPDIFNLLLQILDEGRLTDSHGKLIDFRNTILILTSNLGAEIMLKGVADFVKSEVMQIVKSAFRPEFLNRLDEIIIFHSLTKDDIYKIIDVQFLYLQKIIVKRKLSISLSQEAKELIAQAGYDPEYGVRPLKRVIQECIQNNLAKLVLSGEVAEGDKLIVYAFNNEILVKKV

SEQ ID NO: 30890 - protein, 572 aa, Wolbachia endosymbiont strain TRS of Brugia malayi
MSEARNLILAAILSILIIVSWRIIYDNFLNAEQDHPLIENIEHIESFNDLAPVIHQSRSEIINSTREQRINLTNNMVKGSISLKGARFDDLILTNYCLEPDPSSPQVVLLSPAESKDVYFAEFGWLDPNGKTKVPDSKTFWQAEKTELTNQKAVNLFWNNENGIVFRMKVSLDNNYMFKVEQIVENNTKDNVVLVPYGKINRKRDNINESYWISHEGILGAFDNKLEEWTYKNVAKKHLIKASTSKKNWFGFADKYWLTAIIPEKFDKTNVSIKHTNANNVDKFQVDFVKPYKNILPGTSASNVNYFFAGAKKLNLLDYYKSTLNIPLFDKAVDFGVLYFITKPVFLLLEYFNFVLKNFGLAILLLTLVIKLLMLPLSNRSYVSMFKMKSLQPEVARIKELYKNDSLKQHKETIALFKKNNVNPMSSILPILVQIPVFFALYKVLFVTIEMRHAPFCLWIKDLSTSDPTNIFTLFGLFNYNFPISIGILPIILGITMIIQQKIGEKGQTNKDDIQANVMKFFPYISIFIFSSFPAGLVIYWIFSNVITLIQQSLIKLFLTRKLGINVENTNS

SEQ ID NO: 30891 - protein, 568 aa, Wolbachia endosymbiont strain TRS of Brugia malayi
MRSNIRQLFYYIKPNLHYFIIAFIAVLSSALTILLFGRGLSNIIDSGAEHNFTTKLLVTIFIVLAISLTAFIRLYFIGIGSEKVIARIRYDLYGNITDLQPSFFENTSVQDVISALITDTSVLQSIMNSSLLTILRNFIILIGSVAMLLYTNLHLTTYAAAIIPMLLIIMTSLGKKVRNYARFAQNKLSELASFSEENFRSIVTIKSFVLEENEKIRFKEHLDSVSKSYVKLVFLRAILVTLVIACVIGSLVILLFFGIKEVLSNNITVGELSSFVFYSALAAGTVNNLSDNISDLQRGFGIVERLFEFKNMKSSIMDVDNPIKICGVKKGISFNGVTFFYESQPDKPALDNVSFSIETGQAVSIIGPSGSGKSTILKLLLRFHDPGKGSITIDGYNVKSIALSNLRSLFGLVPQDHIIFSCSIMENILYGKPGAEYEEVRQAAISAYAMEFIEKLPDKFDTFVGKRGLKLSEGQKQRIIIARAILKNPQILILDEATSALDYKSENLVQKALSKLMQNRTTIMITHRLSTALKTDKVIVVNHGKVEEVGTHDSLMSKGGLYAKLTKI

SEQ ID NO: 30892 - protein, 440 aa, Wolbachia endosymbiont strain TRS of Brugia malayi
MEYEQWKEILSAIDKETDLSKDNVIAKIKEKLKALDSSTYEEWKETNFDVNHLFAVKYGLLHLAVHNNLKNVVNALFGVEGIDVNAVDKDKHTSLHLAVEKGHIGIVNSLLEVKADVNVEDENGKTPLYTAVQFGCKGEIEVLIGKMMIGALIRAGANVNAEDKDKCTPLHFAARCGRKEIVQTLIEAGANVNAANEDKRTPSHIATQFCRKEIVKVLVEAGADVRAADKYGITPLHFADGAETVKTLIGAGANVNVVDKDKRTPLHWVKGAETAETLIEAGVNVNTIDKGKRNPLHMAARCSCEGVIKTLIGKRADLLSKNNDSKIPSNFNKSHYIIRRVKSLWSEERMKRLDQQSKVSFVVFGLTILFGTATATTLFVTETIAFGPYPIIGTVVIVAAAAWVVSCAADKILEPSTKIDEMKAVQVDENMQKAPLNLST

SEQ ID NO: 30893 - protein, 401 aa, Wolbachia endosymbiont strain TRS of Brugia malayi
MSTSAIFFSEGSYIVIMNNIIVKKFGGTSLTDLTRVANLIKKDVDKGYRIIVVVSAIAGLTDQMVFQARQTLNLSHKQALSEYDVMLSAGEQISCGLLAITLLSIGVNAKSWLAWQLPIITDNSYSESKIKTIKIDHLKRSFAEGYTVAIIAGFQGIYDDRITTFGRGGSDISAVALAVAFGVRVCEIFTDIDGIYTADPKIVPKARKLKSISYDEMLEMSSSGAKILHNRSVQLAMKHNIKVQVLSTFKEVEGTAVLHENDVLERHTITGITYSTNEALITFTNFANTLRTLKDMAGANIKIDMIHGSSIVISEFDIDLMKELLNKNEDYVINNNAAKISIIGIGVMSVMYHTLKFFSEKKIEILAITASEIKISIIVQRECAEALVRDLHTELMCTEGG

SEQ ID NO: 30894 - protein, 635 aa, Wolbachia endosymbiont strain TRS of Brugia malayi
MGRAIGIDLGTTNSCVAIQGKIIENKEGARTTPSVVAFTSSGERLIGAPAKRQATTNASNTFFATKRLIGRQYGDPEMKDLNVPYKVFAAKNGDAWIKTTDGKEYSPSQIGAFILQNLKEAAEAYLGEEVKDAVITVPAYFNDSQRQATKDAGKIAGLNVLRIVNEPTAAALAYGLDKKHGHTIVVYDLGGGTFDVSILEIGDGVFEVKATNGDTHLGGEDFDNAIVSYLLDEFKKSNGIGLKNDPMAMQRIKEAAEKAKIELSSAMETEINLPFITADANGPKHLNMKLTRAKLESLVNDLIERTMTPCKKALEDTGLSANQIGEVVLVGGMTRMPRVIEKVKEFFGKDPHRGVNPDEVVAIGAAIQAGIVQGDVRDVLLLDVTPLSLGIETLGGVFTPLIERNTTIPTKKSQVFSTAEDNQTAVTIKVHQGERKLAVDNKLLGQFSLEGIPPAPRGIPQIEVTFDIDANGIVHVSAKDKATGKEQKIRIQSSGGLSESEINRMIREAEEKAQEDEKRKKFVEVKNQADSLVHSTEKSLKEYGDKVSPEDKSAIENAVNELKEASKSDNIDDVDSIQQKITNLSQLSMKLGETIYKESQQQQGKESSAGSSTTNEEEKVVDSDYQDIDNKEENK

SEQ ID NO: 30895 - protein, 106 aa, Wolbachia endosymbiont strain TRS of Brugia malayi
MSNFEQIKKDITENDVVLYMKGTSDFPQCGFSGLVVSILKKLNVKFKYINVLENDEIRQSIKKFSNWPTIPQLYIKGEFIGGCDITREIYEKGELQSLLKEKKIVE

SEQ ID NO: 30896 - protein, 100 aa, Wolbachia endosymbiont strain TRS of Brugia malayi
MFAVIETGGKQYLVKKGSVIKVEKLEAEEGKEVEIDKAVCLSGNGLSYLTDATVKAEVLEQCRGEKIIIFKKKRRKNYRRKTGHRQYITVLRINEINLQK

SEQ ID NO: 30897 - protein, 416 aa, Heterocapsa triquetra
PAGAAALCGAHWAFVQPAAPAQGEVAAPRRLRASAGASAEGARFAGALPAATAIAVGSAVACCAAATKKKGVKVVHGKEIPWNIFMPKAPYTGKVVANDVHPQTLTEDTGDANWETTHLTFDHDGKVPYLEGQSIGIIAPGPDKKGETPAKIRLYSIASSAVGDDQTSKTVSLCVKRVVELDGKFANREVGEDKPDKAGTGYPKNKVYRGVCSNHICDMSVGDDVLITGPTGAEMLLPEDPKANIIMLATGTGIAPMRSYMRLLFHDKAGEAADGSRKFQGLAWLFMGVPYSKSLLYDDEHLAYVKNYPDQFRFDYAVSREQTNAAGQKMYIQTKMAEYTDELWELMQKENTHIYMCGLKGMEAGMEECFSAKAEAAGLVWKEFAKSMKKADRYHVEVYRGASTPSQWLLQHVQFS

SEQ ID NO: 30898 - protein, 367 aa, Isochrysis galbana
APLPVSRVAQSRLGGVRMASDEPWFEDCVSTTSIDKSAFEAAYATAMNAPAPAASTSGKQDFLEASPFWDQSNIPINTYKNKAPFTGKIISVKRIVGAAATGETCDIVMSHGGKMPYWEGQSYGVIPPGTNPKNGKPNSVRLYSIASSRYGDDMTGTTTTLCVRRATYWCPELKADDPAKKGVCSNFLCDSKPGDEVKLTGPSGKVMLIPEQDATADLIMVATGTGIAPYRSFIRRLFVEKTPYGEVYKGLAWLFLGVANKDALLYDDEWQSVLKSYPKNFRVDYALSREQTNKDGGKMYIQDKVAEYSDEIFTRMDNGAHMYFCGLKGMMPGITEMLEGVSKAKGIVWEDKLKEWKSKGQWHVEVY

SEQ ID NO: 30899 - protein, 391 aa, Azoarcus sp. EbN1
MRDVVIVEAVRTPVGKFRGGLKDVRADHLGALVLDEVIKRANLGAEVVDDVVFGCVTQVGEQCGNIARTSLLSAGWPETIPGMTVDRKCGSSEAAIHVAMGEIASGACDIVVAGGAENMSRVPMGGNRDVHGEPFGWRLRERFHLTSQGEAAERLCDLWGLSRDDIDDFAIESHRRAARAADAGWFEREIVPVPVAEICEQGVKIAVERVAADETIRRDTSREKLATLKTSFRPEGGRVTAGNASQISDGAAALLLMSADKAKALGLKPRARIRAVTTVGSDPELMLTGPIAATRRAVERAGLALGDIDLFEVNEAFAPVPMIWMRELGIGHDRLNVNGGAIALGHPLGGSGARIMTTLLHELERRGATFGAQAICCAGGLGTATVIERLG

SEQ ID NO: 30900 - protein, 395 aa, Azoarcus sp. EbN1
MTQREVVVVGAARTAIGTFGGSLRDVPLTRLGTVAVEAALKRSGVNPQEVGHVVMGNVIPTEPRDAYLSRVAAMDAGVPKETPAFNVNRLCGSALQAVVSAAQSILLSDTDIAIGGGAETMSRGAYLLPASRWGARMGDSQVVDYMNGILHDPWKRIHMGVTAENVAERYGITREMQDELALESQRRAANAIAAGYFKEQIVPVEVSSRRGAVLFDTDEHVRADMTAEALVKMKPVFKKEGGTVTAGNASGINDGAAALVLAEAGRAAALGLRPLARLVGYAHAGVEPEYMGIGPVPATQQVLKRCGLSIKDLDVIEANEAFAAQAYAVIRELDLDPAKVNPNGSGISLGHPVGATGAIIITKAIAELHRTGGRYALVTMCIGGGQGIAAIFERL

SEQ ID NO: 30901 - protein, 275 aa, Achromobacter xylosoxidans
MAQEISGVVGIIGIGQLGSAIASNLLDMGYRVVGYRRNRNEAQAFVDAGGELVDTPSLVVQQADFIFLCLPNESASNAVLEGVGGILPLLKDGKTVVEVGTYRKSFKLMQAEKIQATGANILEAELSGSPSLVLHAKRAFYVGGTDSVYEKCEPLLQAITDNRFFLGAFGTAVSMKLIANYLVTVNTLAAAEAMNLGTRAGFSPDLLARVLSVGAGASAMMSVRAPIMASRKFEPAPGSFITLEKYLDLGQELVSELGCSAPLYAAAVPVFQACY

SEQ ID NO: 30902 - protein, 755 aa, Ehrlichia ruminantium str. Gardel
MGDLENNGFDAKKREALEFHCKGLKPGKVSLMPTKPLLTQRDLSLAYSPGVAVPCLEIAENPDLVYKYTARGNYVAVISNGTAVLGLGNIGPLASKPVMEGKAVLFKRFADIDAIDLEVDTSDVDEFVNAIKYLGLSWGGINLEDIRAPECFIIEEKLSKIMDIPVFHDDQHGTAIIVSAGLIYALDITGKNIKDIKIVVNGAGAAGIAGLEMIKLIGVPAENITLCDQNGVIYKGRQLGMNEWKAKHAIDTKNRSLKDALVMADVFLGLSVKDVLSENMLLSMNKDPIIFALANPDPEINPDIARKIRPDAIIATGRSDYNNQINNVMGFPYIFRGALDVQARCVNSAMKVAAANAIAMLAREYVSDEVSDAYGGRKMNYGKDYIIPTPFDPRLITVVAPAVAKSAIESGVARRNIENWDEYIKQLESRLSSTSNVLNMMYSSVKRDPKKVIFSEGEEEKIIQAAVQWRNQGYGVPVLVGRIDKVHEGFERLGIKDMKGIEIANAAISENNNKYTDYLYKQLQREGYLYRSCVRDVKTDRNVFAACMLACGDGDILITGLTRGYTVSIHDVQKVIKPKGVMFGLSIIVMKERTIFIADTAIHESPTPEQVAEIAIQASMQARKMGHEPRVAFISSSNFGSHSQKDARRMRKAIEILDNCNVNFEYDGEMSIDVALNPELLTLYPFCRLTSSANVLIMPTLHSASISSKLLREATGVPVIGPILVGMEKPVQIVQMSSSVSEILNLTVLAPSINK

SEQ ID NO: 30903 - protein, 575 aa, Ehrlichia ruminantium str. Gardel
MLEIRNLVFAVVLSVLIMMGWRLVYEKFFTVQHVVEDEDSSSMIPEIDNVLTYRSRNEIIDSTQNLRVKLSNKEINGSISLKGAQLDDLVFKNYHITPDNSSDGIILLSPENTEGVYFIEFGWIDPQHKIVVPNQLSTWTSDKSVLSPNNTVTLTWNNQQGVIFQIKVTLDDYYMFKIEQIIINNTDNVVNLIPYGRINRARHTTEKSYWISHEGAVGSFGYTLKEWTYKNIIKERNIKISQQNTDDNQWVGIADKYWFTALIPNILQKKSKLSFHVKHGKYNNEDRFQVDFSHDSYSAYPNKTASSTSYLFAGAKELKLLDKYKKDLNISLFDKAVDFGILYFITKPVFLLLEYFYDLIGNFGLAILLLTIVIKLIMFPLSYKSYVSMFKLKYLQPEILKIKELYKNDNTKMSKEVSLLFKKNDVSPMSGFIPILIQIPVFFALYKVLFVTIEMRHAPFYLWVKDLSNFDTANVLTLFGLLNFNPPICIGILPVILGITMIIQQKMNTSTHSSQDQDKIQASFIKFLPYVFIFIFSSFPTGLIIYWICSNSITIIQQLIIKAYIGRKFNLKHDL

SEQ ID NO: 30904 - protein, 399 aa, Ehrlichia ruminantium str. Gardel
MSFLSKRMECIKPSPTLEIASQAQKLKMLGRDIISLSAGEPDFDTPEHIKQAAINALNLGKTKYTAVDGIIELKKAIISRLKQDHNLIYDVSQISVGNGAKQCIYNLFMSTLNDGDEVIIPAPYWVSYPDIVKIAGGNPVIIDCSNTSKLSAELLENAITDKTKWLILNSPNNPSGLVYTYDELKDIAQVLLKYSNVHIMTDDIYSKIVYDDLKFFTIAQVEEDLYSRVFLVNGVSKAYAMTGWRIGYIAGASEVIKAISVIQSQSTTNPNSVAQFAAVEALTGDQKFLEERNKVFIERRDIMLDMINNTPLLSAEKPQGAFYVFISCKELIGRTTKSGFCITSAMDFTKYLLEDYNIAVVPGEAFGVQGFFRVSYATSTQCVSEACDRILTACNELIY

SEQ ID NO: 30905 - protein, 1640 aa, Ehrlichia ruminantium str. Gardel
MADPKNTTQEGENKNPSAAVNPIPTVSQEVQHELENVNEELAQAPAVDPQAQAPVVDPQAQAPAVDPQAQAPAVDPQAQAPAVDPQAQAPAVDPQAQAPAVDPQAQAPAVDPQAQAPTPGVEHMEAPGGAVYAVSEGYHPHSEEEIEAAITAADAAPEIPSKQESIKQEVRKSQSVPNLSSMEKPVTEGMRRVSTIPKVSSMQETIDDAPGYAEIDESDLESDPGLVFKIDDLLPRDGVGEEGTPPPLPSRRPPVFSGASHLYEDPDGFDVGRESEYTLAQAEGQVSDVEGTPPPLPSRRPPVSPGAGHLYEDPDGFDVGREGEYTLAQAEGQISDVEGTPPPLPSRRPPVSPGAGHLYEDPDEFGVGGEDVYTLAQAEGQVPDAEDTPPPLPGRRPPVAPGEDNLYEDPDEFDVGTEDVYTFAQAADQELGRVDSVSWSSLRDDYLNNNELNEELLLREGPVREICDMIVQSHGNLSQRSVNKIVGMLQNGGEAISEQINEPLKVTHPDGNRDWPERVMPLLHAACLYNVNPEVVKAIANAGGNFGLGDASNKLPLHHAARYGSPSLIDLCLKNTNPSQMNVKDIYGDAPIICLSHNPKCSKENIDEAMRSGADLGTCDADGRLPFHHIAHTNTPAIINHALRRMEGSPMLRNRISDQDLSGNNVAHFAASNGNISEKFIKVLKNLGIDIHGQNISGRTPLSYAVCTGSQKVISELLSSSGSKVNTPDVDGCTPLHHAVKTNRLKSVKQIMGHPSVNPAAVDNRGCTAVHHAVIRGLESVLKELSSDRGKSRDVREGIRTSLLSKDALGNTPLHIACAPECVATIPRLLKAIEKYYGKDGVVHALQESNDGKDRVDLEGLKSDSVLTRPLAKILSTITNRDIPLSPLHKAIQESNITAVEKIIAATSPDILKQKTPQGLNSIQLAAMYANPEMVKYIAKRSSAADINDPGNAVPPLNLALLYGSPEHAKALLANKSVDCTQPMGDDQNTILHAAAFRGDVSLLKEVLKHPGVDVNAVNAQGKTALHIAVERGDLTAVDKLCRVKKCNVNVQDENGHTPLSMAISRDVSEKLGMAIIKLLLKTGADVTLDADYAIGEAVGTRSHDILSMLIDSGAKVSSTNQAPLECAVTRGDRSSIDKVVRGGGNVNHIVNNPNDEDHGLNLLMLAIKNEKLESVKSLIKNKCDVSKYNGDNTFTALHMLPFVQNQEFAVSVAKEILTSGSKKNQDILSKQDVNGNTPLHLMISSGRSDLCNTVMKRVSNQDLTKVSGIQNSEGNNLLHVAVEQGNADILSDILQLTNKSSRSNVVNAKNGEGNTPLHVAAKENKYDILKVMLKSLPNKSSVSNAFNVQDSKGQNLLHIAAERGDSRLFARGLRSMDSGSLTKALNARDNNGNTPVHLALAAGIKEVKSVIGLCNQETLLVPNNEGKLPSQCIEEGSIFASTRGFVTSRASIQQKLRKAEQKAFIRGPESSTPLVSESSSISSSSSSIDFPQEMGISQEIRGRRFRFISDSSDKSTTEVPEPPLRTQPQEYSINVFDDSVQRTRQFDTDPGTLSSSSSVRPKSLCSSFRPESSDLESQSTSSLEFDRMLSNDPNLQGEIAQIAEGMSDVVQSQSGMENERVSPASSQGTLQKKSSCMEK

SEQ ID NO: 30906 - protein, 394 aa, Ehrlichia ruminantium str. Gardel
MKKIVLAYSGGLDTSVILKWLQENYNCEVVVFTADIGQEDDMSVIQKKAAALNVKEIFIEDLKEEFVRDFVFPMFRANTIYEGYYLLGTSIARPLIAKRQIEIAHLTGADAVAHGATGKGNDQVRFEFGYYCCDPNIKVIAPWRQWELTSRHSLIEYARKNNINVPLDKVNEPPYSIDANLLHISYEGKSLEDPYVEPDYTMLSRSLTPELASSIPEYIEITFEQGDPIAINDIPLSPANLLHQLNKIGGKHGIGIVDIVENRYIGIKSRGIYETPGGTILLHAHRAIESITLDRESAHLKDEIMPKYAKLIYNGYWWTTERKMLQSLIDNHKKKFNGTVRIKLYKGSVVVVGRKSNNSLYSYNLASFDSESQGYDHKDAEGFIKVNSLRLKKS

SEQ ID NO: 30907 - protein, 526 aa, Ehrlichia ruminantium str. Gardel
MDIYMLITARLRYAIMFMVKLAHGLCTQQNKLQPVRMSYIASNQSLSEGYLEQVIVQLKKKGLINATKGPGGGYSLSIAPHLITLSLILESIGENIKITRCENNGPGCLSNNNRCVTHKLWDDIGNYIKDYLNNISLEDIVNNNFKSNIALHKDDKPYIYADYNSTSTILPEVKYQLNNLSYIKLYNPSSIHKLGQKTRSIIEEARNIAIKQLNAQYYDVVFTSSGTEANNLVINSTSDYKHLISSTEHLSIIKCATNAELIPVDSNGIICLNALSSLLHKFKDDKILVSVMTANNETGAIQPIKKIVELSHKFGALVHTDAIQACGKIHIDIEDLGVDLLTISSHKLGCIAGAGVLFFNSKKIKIKPMIIGGHQEKGLRAGTENVLAIYLLSISLSNLYKSITKMLLVEKLRNKLENEILSLVPDAQIFSRNVERLPNTSCISMPNVNSEIQVISFDIKNIAVGNGSACSTGVVEPSHVLSAMGVNQEIANNSIRISLSPDTTDEDIRTIVNCWYEIYTHNQVHK

SEQ ID NO: 30908 - protein, 413 aa, Ehrlichia ruminantium str. Gardel
MEKIKDIQRHINLPIFLDYQSTTKTDSRVLDAMIPYFQEFSNPHSRSHCFGWKAESAVELARERIASLINAESKEVIFTSGATESNNLAIKGVANFYKSKGNHIITVRTEHKCVLDSCRHLETEGFDVTYLDVQKNGILDLNLLKSAITDKTILVSVMMVNNEIGVIQPIEEIGKICHDHGVFFHTDAAQAFGKIPIDVNKMNIDLLSISGHKIYAPMGIGALYVRKRQPRIRLTPIINGGGQERGMRSGTIPTPLAVGLGEAAYIAQEVMEDEAIRIKELRDILYSEIKKHLPYVILNGDYEQRIAGNLNLSFPYVEGESIIMAINNLAVSSGSACTSASLEPSYVLRALNIDKDLEHSSIRFGIGRFTTKAEILYAADLIVNSIKKLREMSPLWEMVQEGINLNEIKWDVH

SEQ ID NO: 30909 - protein, 220 aa, Ehrlichia ruminantium str. Gardel
MKIFLDTIDISFLEEFCISGLIDGVTTNPSLFSKSELKCSDLIFKLCSLIKGPVSIEVISTSYKDMISEALEISKIAENIVIKLPLTYDGLIACKILSNEHNLKVNVTLCFSPAQAILAAKSGAYFISPFVGRLDDIGQMGMELIKDIREIYSKYHSFNTQILVASIRHPIHVVQAAKIGADIVTISPSIFKQMFVHPLTNKGLEDFLRNWNESGKKMFS

SEQ ID NO: 30910 - protein, 102 aa, Ehrlichia ruminantium str. Gardel
MFAIIETGGKQYKVKEHDIIRIEKLNASVGEEVTLSKVIALTGVDNEVIFTQNASVTASVLEQCRNDKVIIFKKKRRKNYRRKNGHRQYMTVLRITKINNME

SEQ ID NO: 30911 - protein, 340 aa, Ehrlichia ruminantium str. Gardel
MSFIDEAKVYLKAGKGGDGCSSFRREKFIEFGGPDGGNGGNGGSIIFIASHHVNTLIYFKYKQHIKAENGHPGLSKNKFGLSGRDITIEVPIGTQIYDEEGTLITDLNSENQKFIVAQGGKGGIGNSRYKTSTNRAPRYFTLGEQGEEKWIILKLKIISDVGIIGLPNAGKSSFLASCTNSKTKIANYPFTTLEPELGVAFINNTELVLADIPGLISGAHLGYGIGDKFLKHIERCSILLHIIDCTLEDIIDSYKCIRKELSLYSKALTEKTEFILLNKCDLLDKEEISIKKRLLAEHTKKEIFTSSIKKSKQHILSILIKHINKDCSINKPFIYDPFNT

SEQ ID NO: 30912 - protein, 296 aa, Ehrlichia ruminantium str. Gardel
MNHVGRKCSMSAIVGTTNAGKSTLVNVLVGQKVAAVTPKVQTTRVRMHAVSNHENVQLIFIDTPGIFSPKTKLEKFLVKHAWMSLKGIENVIVLVDVKNYLNQHLKKIIDRIKHSNLNAILVLNKIDIVHQSIVSEVIEYMYSLYKFSKAFTISALYGIGIDKLVDYLCETSPYGPWLYNDDQISDAPLKFFMAEITREKLFITLRHELPYSLSVVTELVEEKEDNSLIIKQVIYVTKDSHKTIILGKKGEMVKKISMESKSDLENILQVKVHLFLFVKVREFWQNHLNECVGYAE

SEQ ID NO: 30913 - protein, 645 aa, Ehrlichia ruminantium str. Gardel
MILCRGLFMAVIGIDLGTTNSCVAVMEGGDAKAIENSEGARTTPSIVAFTDSEVLVGDPAKRQATTNAKNTIYASKRLIGRRYQDTRDIKTSYDIVSAKNGDAWIKVRDKDYSPSQIGALILEKMKETAERHLGCKVEKAVITVPAYFDDAQRQATKDAGKIAGLDVIRIINEPTAAALAYGLNKSDKQKVIAVYDLGGGTFDVSILEIADGVFEVKSTNGDTMLGGEDFDHAIMEYLMDDFKKSTGIDLHSDAMAMQRIKEAAEKAKIELSSRMETDINLPFLSSDSTGPKHLSLKLTRATFENLVSDLVKRTIEPCKKALKDAGISADKIDEVVLVGGMTRVPKIIQTVKEFFGKEPHKGVNPDEVVAIGAAIQGGILAGDVRDVLLLDVTPLSLGIETLGGVFTPLIERNTTIPTKKSQVFSTAEDGQTAVTIKVFQGERKMANDNKLLGQFSLEGIPPAPRGMPQIEVTFDIDANGIVHVSAKDKASGKEQAIRIQSSGGLTDDEIQNMIKEAESKAEEDEKRKKFVEVKNNAENLVHSTEKSLKEHGDKISNADKLDIENAIRDLKDCISKDNIEDTDTMQNKLDHLMKVSMKLGEALYSNTNNATAGDNNTTDTGSSSNSDGSKVVDSDYQEIDKKDGK

SEQ ID NO: 30914 - protein, 863 aa, Ehrlichia ruminantium str. Gardel
MKLVMDLNKFTDISKNFIVQAQTSAVALGHQSLVPEHLLKVMLDDKDEIVEVLLTSCGCDVETLRNDVVSALNKLPVVSGPGSGHIHLSKEMAQVLQEAVNLAKRHQDSYVTVERLLQALTIIKDSNVSRILIAHGVTPQKLESLIVNMRNGAKADSVNSEQRFNALKKYAKDVTEVARAGKLDPVIGRDEEIRRTIQVLLRRTKNNPVLIGEPGVGKTAIIEGLAHKIVKGDVPIGLRDMRIMSLDLGMLVAGTKYRGEFEERLKAVVNEIVSSNGSIILFIDELHTLVGAGATDGAMDASNLLKPALARGEIHCIGATTLDEYRKHIEKDVALARRFQTIFISEPTCDDTISMLRGLKERYEGHHGIDIPDRSIIAAVALSQRYITDRYLPDKAIDLIDEAASRARMEIDSKPEVIDKLDRKIMQLKIEIGVLEKESDESSKQRLMKLKDELEKLNVQSAELSSKWQAEKMKMSKMKACKEKLDIARSDLERAQRSGDLAKAGELMYGVIPEIEKELKEHEKFTSSLFKKEITEHDIASIVSKWTGIPIENIMSSEREKLLRMEEEIGKTVIGQDSAVKAVSDAVRRSRAGVQDAQKPLGSFLFLGPTGVGKTELVKTLAEFLFCDKSALLRFDMSEFMEKHAVSRLIGAPPGYVGYDQGGALTEAVRRRPYQVILFDEIEKAHGDIFNILLQVLDEGRLTDNHGKLVDFRNTILVLTSNLGQEILMNNESGNINEESVKESITNVLRSHFRPEFLNRLDEIIIFHRLTKEHIERIIDVQFSILQKIVAQRKLEITLSSDAKTWLINNGYDSLYGARPLKRLIQQQIQNNLAKLILANQVAEGNKLRVDLLDDNLVIHKIS

SEQ ID NO: 30915 - protein, 583 aa, Ehrlichia ruminantium str. Gardel
MKILFQFVKPYLLYFIFAYLVVAVSSVTILAFGYGLHNLVDSWVTTSSVTSINNALLFLLIVVLIVGVTSFLRMWLTGYGSERVITGIRLNLYNRIIHFSPRFFENNSISSLVTRLMADTSALQVILSASMSTILRNATTLLGSIVMLVHTNFKLTTYTVVVIPVILVILTSLGKKVKLLSQKVRLKTDEITSFVEETYRGISVIQSFSKENTTKQKFSNLLGVSLNITNKYIILRALLVTLIITSAMTSIGLVLSLGIKEVLNNNITVGSLFSFIFYAAIAAGSVNNMGDNLHDIQKAVRISEDISKVLLMPLDIHEIENPKVVDELKDAILINNVTFSYPSKPNDPALKGVSFSIDKGQVVALVGPSGSGKSTITNILLRFYDITAGDVTIDGINIKDLSLSSLRSLFSVVPQNPVMFSGTILENITYGVSDATYEDVKNAAKTACILDFIESLPNKFSTFVGERGLCLSEGQKQRIAIARAVLKKDSGVLILDEATSSLDSKNEQLIHDALDNLKNNKTMLIIAHRLSTIVKADKIVVFNNGCIDDIGTHKSLIAKQDGLYSKLAKLQLSNENFSDGSSN

SEQ ID NO: 30916 - protein, 110 aa, Ehrlichia ruminantium str. Gardel
MTNNIMNRIKHDIETNDVVLYMKGDANMPQCGFSSVVVTILKKMNISFKSINVLEDQELREAIKEFTNWPTIPQLYVKGEFIGGCDIVKEMYHTGELQELFVKNNLITAN

SEQ ID NO: 30917 - protein, 415 aa, Ehrlichia ruminantium str. Gardel
MTKILVKKFGGTSLQNIKCINQVTEIIKQDVCSNHKVVVIVSAMGKFTDNIISQIKKISDVKSYNELSEYDLIISSGEQISCGMLSLALQKLGIKAQSWLGWQLPIVTTDDHTKARIMEINTSALQDFLANNDVAIIAGFQGMHKENRVTTLGRGGSDTSAVAIAAALGIDLCYIYTDVDGIYTSDPNIVPKARKLDYIAYDEMIEMASLGAKVLQVRSVELAMKYNIKLHVLSTFNSIKGTILCKKGEIKMESQLITGITYNSNTASITLKKVRALFGITTLFSIIADNGINVDMIIQNMDNNANDITFTIPEEDLSITETLLIKTKDKLMYEELIINPDVAKVSVIGVGMISHPGIAYKMFDTLTSNNITILAVTTSEIKISVLVLRKDGQLATQYLHSSFKLDSQSNLHTTS

SEQ ID NO: 30918 - protein, 318 aa, Ehrlichia ruminantium str. Gardel
MLISAGIHSTDLAKRISELTCIKLVKSYTSNFADQELNVEVEEIQSNKNKHIIIIHTIGFPVHDNLIELLLLIDALKRALSPNRITLIVPYCCYTRQDRVMYRNLNNINIVSALSAKVIANILNTINVNNMIFIDLHSNQLAGFFDTEITNLNPNSIFIDAIIEKFTMENLVIVSPDHGALNRTRTFAYTLAKQYNLKHEIQVAVIDKYRTKPGVSEVMNIIGNVENKECIIIDDIVDSGGTLCNAASALKNNGALQVNAYITHGVLSNNAIAKITNSQLNTLTITDSVNHCSINTPKIKVLSIDKFLSDYILHNLTN

SEQ ID NO: 30919 - protein, 1060 aa, Pichia pastoris
MPSISQRGSRNNSFSSETTVPSLAEASAVSPFGLPTDPESLYGTTLTSAHTVITTVPYYLSDRLFSYAAPGADGALDAAAHLWRTYLRPNAQGNVPHLTRFDIRSGASNAILGYLSGLEPSAVVPVLVPGAALTYMRPVLAERRDSPVPVAFNVSALDYDFETSTLVSNYVEPLNAARYLGYSVFTPLSKNEAQSIAILTHALANIEPTLNLYDGPSYLKQSGKIEGILTGEKLFQLYQKLLAEIPSWSKIESYKRPAAALASLSKLTGSRLKSFEYAGHNSPSTVFVIHGSVESELLLHTVERFAEKDVQIGAIAARVPLPFNIDEFASSFPSSTRRIVVIGQVQSSSSSSLKKDVTASLFWKLGASAPAVAEFVYEPSFNWSSDSLESIIASYEVLPKSTSATKGDYIFWTADNGRFAEVASKIAYSFSLRDDNKLSYRAKFDNINGAGVLQAQLRTNSLVATDIDAADIVFVEGFKLLQAFDVVSTAKEGATLIIASSDSIEDLDKVVESFPTTFKRDAATKNLKILLIDLASVGEQEGLGARTGPIACQAIFYRVAQPELADQLTRYLWEGAASETELLASVVAEVISKVEEVGIKELSVDKEWASLPTGEEEEVILPPRPLETSFEPNLRESAIVPPPAISSKLELSKKLVFKESYGLTNSLRPDLPVRNFIVKVKENRRLTPDDYSRNIFHIEFDVSGTGLTYDIGEALGIHGRNDPALVEEFIQWYGLNGEDLIDVPSRDDPNTLETRTIFQSLVENIDLFGKPPKRFYEALAPFALDSSEKAKLEKLASPEGAPLLKAYQEDEFYSFADILELFPSAKPTASDLVQIVSPLKRREYSIASSQKMHPNEVHLLIVVVDWIDKRGRQRFGQCSHYLSELSVGSELVVSVKPSVMKLPPLSTQPIVMAGLGTGLAPFKAFVEEKIWQKQQGMEIGEVYLYLGARHRKEEYLYGELWEAYMDAGIVTHVGAAFSRDQPHKIYIQDRIRENLKELTSAIADKNGSFYLCGPTWPVPDITACLQDIIESDAARRGVKVDADHEIEEMKESGRYILEVY

SEQ ID NO: 30920 - protein, 195 aa, Laccaria laccata
FGRVNDYKINPNQELIAIGVTNTIGSCFGAYPATGSFSRSALKSKSGVRTPLAGVYTAIVVIVALYGLTSAFFWIPTAALSAIIIHAVADLVASPAQVYSYWRVSPLEFCIWVAAVLVTIFSSIENGIYTSISASLALLLLRVARPRGAFLGKAAVRPSSGSTVDRDVYLPLTKDGITNPYVKVEAPSPGVLIYK

SEQ ID NO: 30921 - protein, 816 aa, Wolbachia endosymbiont of Drosophila simulans
MLEDESGLVQDLINACGGSVQSISDAVDSAIKKLPVIEGPGSGGLQLSREIAKVFEDSIGIARRNKDSFVAVERLLQGLTAQKDDTVGKILAENGVTLQKLNSVIAEMRQGSSADSPNSEEKLNAAKKYTKDVTELAMQGKLDPVIGRDEEIRRTMQVSLRRTKNNPVLIGEPGVGKTAIVEGLANRIVANDVPLGLHDAKVLALDLGALIAGTKFRGEFEERLKAVINEISRAEGKIILFIDELHTLVGAGATSGAMDASNLLKPALARGEIRCIGATTLDEYRQHIEKDPALARRFQPVFISQPTETDTISILRGLKERYEVHHGIRITDGAIIAAATLSNRYITDRFSPDKAIDLIDEAASRVRIEMDSKPEVIDELERKVIQLKIEAEALKKESDENSKQRLKKINEEIENLNSKFADLNSKWQMEKNKIARIQETAEKLDNARKELELAQRSGNLGKAGELMYGVIPQLENELKNQEKVTDSFLKKEVTGDDIANIVSKWTGIPVDNMMHSEKEKLLNMENEIGRRVIGQKDAIEAISNAVRRSRSGVQDTNRPFGSFLFLGPTGVGKTELAKALAEFLFDDQSALLRFDMSEYMEKHSVSKLIGAPPGYVGYEQGGRLTEAARRRPYQVILFDEIEKANPDIFNLLLQILDEGRLTDSHGKLIDFRNTILILTSNLGAEIMLKGNVDSVRNEVMQIVKSTFRPEFLNRLDEIIIFHSLTRDDIYKIIDVQFSYLQKTLAKRKLSISLSQEAKELIAQTGYDPEYGARPLKRVIQECIQNNLAKLVLSGEVVENDELIVYALDNEILVKKV

SEQ ID NO: 30922 - protein, 415 aa, Wolbachia endosymbiont of Drosophila simulans
MNVESKKIHDAKIKLPIFLDYQSTTKVDPRVLEVMIPYFGEFSNAHSRSHSFGWTAEEAVEKARKHIADLVNADSKEIIFTSGATESNNTAIKGVAHFYKNKGNHIITVCTEHKCVLDSCRHLENEGFKVTYLPVKQNGIIDLSKLEEAITDQTILVSVMMVNNEIGVIQPVKEIGVICRKHNIFFHTDAAQSFGKVPIDVNEMCIDLMSLSSHKIYGPMGIGALYVRRKNPRVRLIPLISGGGQERGMRSGTVPTPLAVGFGEAARIAREEMKKETTRVEELRDILYNKIKEAFPDIVLNGDYENRIPGNLNLSFPYIEGESLIMAIKDLAVSSGSACTSASLEPSYVVRSLNNGHDLEHSSIRFGLGRFTTKEEVLYAADLVAKNVGRLREMSPLWEMVQEGVDLNTVKWDSH

SEQ ID NO: 30923 - protein, 308 aa, Wolbachia endosymbiont of Drosophila simulans
MKIIIGNASKELGESVVNRLDVQPSSAWISKFTDGEVNVEVANDLYNQEVYIIQSLSPPVNDNLMELLLIIDAVNRLGAKRIVVIIPYYGYSRQDRIIKNNNMQSALSAKLVANLIQTAGASSVAVIDLHSSQIEGFFDVPITNLNCFEAFVDSIHTENLAIVAPDVGAIGRARAFAKTLEEKYKIGLSDKIIVVDKYREKAGTSQVMNIIGEVANKNCVIVDDIVDSGGTLCNAALALKSYGAKSVTSCITHGVLSGSAVEKISSSSLDKLVITDTILHKLEKTGKIEVVSVVNILTHFIQGGRNAS

SEQ ID NO: 30924 - protein, 390 aa, Wolbachia endosymbiont of Drosophila simulans
MFLIKPSPTIAVTDKANKLKNEGKKICVLAAGEPDFDTPDHIKKAAIQAISEGKTKYTAVDGTRELKEAIINKLRKDNNLEYTLNQICVGTGAKQVLFNLFMATINSGDEVIIPAPYWVSYVDMVSLFGGLPVVVECKQNFKLTAELLKSRITKKTKWLILNSPNNPAGAVYTCDELKDIAQILLEYPHMNVVTDDIYEHIIYDEKFFTIAQVEPKLYDRVFVVNGVSKAYAMTGWRIGYIAGRSDVVKAISTLQSQSTSNPNSIAQAAAAAALNGDHSFLKERTRIFKSRRDFMVKELNSAPGLSASVPQGAFYLFVSCEGLLSKSTKSGKIINNDLDFTEYLLGDHLVAVVPGIAFGLENFIRISYATSQEQLEIGCDSITKACQELK

SEQ ID NO: 30925 - protein, 552 aa, Wolbachia endosymbiont of Drosophila simulans
ILVIAFIAVLFSALTILLFGRGLSNIIDSGTEHDFTTKLLVAILIVLAISLTAFTRLYFIGIGSEKVIARIRYDLYSSITDLQPSFFENTGVQDVISALITDTSVLQSIINSSLLTILRNFVILIGSVAMLLYTNIQLTAYAAAIIPILLIIVTSLGKKVRSHARFAQDKLSELASFSEENFRSIVTIKSFVLEENEKTRFKEYLNSVSKSYVKLVLLRAILVTLVITCVIGSLVVLLFFGIKEVLSNNITIGELSSFVVYSALAAGAINNLSDNISDLQRGLGIVERLFEFKNMKSSIVDPDDPIKICSVQKGISFNGVTFFYESQSDKPALNNVSFSIEAGQAVSIVGPSGSGKSTILKLLLRFHDPNKGSITIDGHNIKSIALNDLRSLFGLVPQDHMIFSCSIIENILYGKPGAEYEEVRQAAIGAYAMEFIDKLPDKFDTFVGKRGLKLSEGQKQRIIIARAILKNPQVLILDEATSALDYKSENLVQKALSELMQNRTTIVITHRLSTALKTDKIIVINHGKVEEVGTHDSLISKDGLYAKLAKIQ

SEQ ID NO: 30926 - protein, 241 aa, Wolbachia endosymbiont of Drosophila simulans
MSPFSLENSGCVYADYNATAPISENVKKSIFEVLLKQTLNPSSLHKRGQEARKILQDARDNVRGAIGVSSDKEIVFTSGATEANNLVMRGIAGYLHVISAIEHPSILNSACNPYIIPVNQEGIVDFLELEKILSELKGNKAIVSVMMANNETGVIQPIEEIAEIAHKFGAICHTDTAQSVGKIKVNMEDLGVDLLTLSAHKFGGVAGSGVLIFNKELAIEPIIIGGGQEKGFRGGTENIVA

SEQ ID NO: 30927 - protein, 232 aa, Wolbachia endosymbiont of Drosophila simulans
MANNETGVIQPIEEIAEIAHKFGAICHTDTAQSVGKIKVNMEDLGVDLLTLSAHKFGGVAGSGVLIFNKELAIEPIIIGGGQEKGFRGGTENIVAIAGLSAALQNIPDLLSKMDEVKELRDQLECELLNFASDIRIFGKNSKRLPNTSFIYMPGVKSDVQLMHFDLNYIAVSNGSACSSGKVEPSHVLLAMGATKEQAECSIRISIGPETKPQDIKKIVDCWYNIYKQNTLV

SEQ ID NO: 30928 - protein, 298 aa, Wolbachia endosymbiont of Drosophila simulans
MGFIDEVKLCLKAGDGGDGCASFRREKFVEFGGPNGGNGGKGGNIVFISDANLNTLLHFRYRRHIKADSGKNGAGRDRSGTAGKDVILKVPVGAQIIDEESEEIIVDLDKPGMEFQVAQGGKGGLGNTNFKSSTNKAPRHFTYGQPGEEKHVLLKLKVLSDVGIIGMPNAGKSKFLTRCSNSDTKVGDYPFTTVRPHLGMVKVDDSEVVIADIPGIITDAHLGVGLGHKFLKHIERCQILLHLIDVTHDDVVSAYSCIHNELELYNSDLVEKEEIVVLNKCDLLREAEILEKKNHLAN

SEQ ID NO: 30929 - protein, 866 aa, Wolbachia endosymbiont of Drosophila ananassae
MLYTSANTNLTGVMDLNKFTEKAKSLIQSAQMKALGAGHQIFMPEHLLKVMLEDESGLVQDLINACGGSVQSISDAVDSAIKKLPVIEGPGSGGLQLSREIAKVFEDSIGIARRNKDSFVAVERLLQGLTAQKDDTVGKILAENGVTLQKLNSVIAEMRQGSSADSPNSEEKLNAAKKYTKDVTELAMQGKLDPVIGRDEEIRRTMQVSLRRTKNNPVLIGEPGVGKTAIVEGLANRIVANDVPLGLHDAKVLALDLGALIAGTKFRGEFEERLKAVINEISRAEGKIILFIDELHTLVGAGATSGAMDASNLLKPALARGEIRCIGATTLDEYRQHIEKDPALARRFQPVFISQPTETDTISILRGLKERYEVHHGIRITDGAIIAAATLSNRYITDRFSPDKAIDLIDEAASRVRIEMDSKPEVIDELERKVIQLKIEAEALKKESDENSKQRLKKINEEIENLNSKFADLNSKWQMEKNKIARIQETAEKLDNARKELELAQRSGNLGKAGELMYGVIPQLENELKNQEKVTDSFLKKEVTGDDIANIVSKWTGIPVDNMMHSEKEKLLNMENEIGRRVIGQKDAIEAISNAVRRSRSGVQDTNRPFGSFLFLGPTGVGKTELAKALAEFLFDDQSALLRFDMSEYMEKHSVSKLIGAPPGYVGYEQGGRLTEAARRRPYQVILFDEIEKANPDIFNLLLQILDEGRLTDSHGKLIDFRNTILILTSNLGAEIMLKGNVDSVRNEVMQIVKSTFRPEFLNRLDEIIIFHSLTRDDIYKIIDVQFSYLQKTLAKRKLSISLSQEAKELIAQTGYDPEYGARPLKRVIQECIQNNLAKLVLSGEVVENDELIVYALDNEILVKKV

SEQ ID NO: 30930 - protein, 100 aa, Wolbachia endosymbiont of Drosophila ananassae
MFAVIETGGKQYLVKEGSIIKVEKLEAEEKKEVEINKVICISNNGLSYSSNATVKAEVLEQCRGEKIIIFKKKRRKNYRRKTGHRQYITVLRINEISLQK

SEQ ID NO: 30931 - protein, 622 aa, Wolbachia endosymbiont of Drosophila ananassae
MQGKDTKVIENKEGARTTPSIVALTSSGERLIGAPAKRQATTNASNTFFATKRLIGRQYSDPEMKNLSVPYKVFAAKSGDAWVKTTDNKEYSPSQIGAFILQNMKEAAEAYLGEEVKDAVITVPAYFNDSQRQATKDAGKIAGLNVLRIVNEPTAAALAYGLDKKHGHTIVVYDLGGGTFDVSILEIGDGVFEVKATNGDTHLGGEDFDNGVVSYLLDEFKKSNGIDLKNDPMAMQRIKEAAEKAKIELSSAMETEINLPFITADASGPKHLNMKLTRAKLESLVNDLIERTMAPCKKALEDAGLSASQIGEVVLVGGMTRMPKVIEKVKEFFGKDPHRGVNPDEVVAIGAAIQAGIIQGDVRDVLLLDVTPLSLGIETLGGVFTPLIERNTTIPTKKSQVFSTAEDNQTAVTIKVHQGERKLAVDNKLLGQFSLEGIPPAPRGRPQIEVTFDIDANGIAHVSAKDKATGKEQKIRIQSSGGLSDDEINRMVKEAEEKAQEDEKRKKFIEVKNQADSLVHSTEKSLTEYGDKVSPEDRSAIENAVNELKEVSKSDNIDDADSIQQKVTNLSQLSMKLGEAMYQASQQNSAENGFSSEGNPNDKEEKVVDSDYQDIDNKEENK

SEQ ID NO: 30932 - protein, 569 aa, Wolbachia endosymbiont of Drosophila ananassae
MRSNIRQLFYYIKPNLSYFVIAFIAVLFSALTILLFGRGLSNIIDSGTEHDFTTKLLVAILIVLAISLTAFTRLYFIGIGSEKVIARIRYDLYSSITDLQPSFFENTGVQDVISALITDTSVLQSIINSSLLTILRNFVILIGSVAMLLYTNIQLTAYAAAIIPILLIIVTSLGKKVRSHARFAQDKLSELASFSEENFRSIVTIKSFVLEENEKTRFKEYLNSVSKSYVKLVLLRAILVTLVITCVIGSLVVLLFFGIKEVLSNNITIGELSSFVVYSALAAGAINNLSDNISDLQRGLGIVERLFEFKNMKSSIVDPDDPIKICSVQKGISFNGVTFFYESQSDKPALNNVSFSIEAGQAVSIVGPSGSGKSTILKLLLRFHDPNKGSITIDGHNIKSIALNDLRSLFGLVPQDHMIFSCSIIENILYGKPGAEYEEVRQAAIGAYAMEFIDKLPDKFDTFVGKRGLKLSEGQKQRIIIARAILKNPQVLILDEATSALDYKSENLVQKALSELMQNRTTIVITHRLSTALKTDKIIVINHGKVEEVGTHDSLISKDGLYAKLAKIQ

SEQ ID NO: 30933 - protein, 340 aa, Wolbachia endosymbiont of Drosophila ananassae
MGFIDEVKLCLKAGDGGDGCASFRREKFVEFGGPNGGNGGKGGNIVFISDANLNTLLHFRYRRHIKADSGKNGAGRDRSGTAGKDVILKVPVGAQIIDEESEEIIVDLDKPGMEFQVAQGGKGGLGNTNFKSSTNKAPRHFTYGQPGEEKHVLLKLKVLSDVGIIGMPNAGKSKFLTRCSNSDTKVGDYPFTTVRPHLGMVKVDDSEVVIADIPGIITDAHLGVGLGHKFLKHIERCQILLHLIDVTHDDVVSAYSCIHNELELYNSDLVEKEEIVVLNKCDLLREAEILEKKNHLANYLNKEVLCLSINGDLQPILRLLSEKLKKSNSKEIDVYDPFKA

SEQ ID NO: 30934 - protein, 378 aa, Wolbachia endosymbiont of Drosophila ananassae
MSPFSLENSGCVYADYNATAPISENVKKSIFEVLLKQTLNPSSLHKRGQEARKILQDARDNVRGAIGVSSDKEIVFTSGATEANNLVMRGIAGYLHVISAIEHPSILNSACNPYIIPVNQEGIVDFLELEKILSELKGNKAIVSVMMANNETGVIQPIEEIAEIAHKFGAICHTDTAQSVGKIKVNMEDLGVDLLTLSAHKFGGVAGSGVLIFNKELAIEPIIIGGGQEKGFRGGTENIVAIAGLSAALQNIPDLLSKMDEVKELRDQLECELLNFASDIRIFGKNSKRLPNTSFIYMPGVKSDVQLMHFDLNYIAVSNGSACSSGKVEPSHVLLAMGATKEQAECSIRISIGPETKPQDIKKIVDCWYNIYKQNTLV

SEQ ID NO: 30935 - protein, 549 aa, Wolbachia endosymbiont of Drosophila ananassae
MVSWRIIYDNFFSTNQNQPLIEHIESFNDLAPIIHQNRSEIINSTREQRVSLTNNMIKGSISLKGARFDDLILTNYHLEPSSSSPQVVLLSPAESKDVYFAEFGWLDPSNKIKVPDSKAVWRADKLNQKEVNLSWDNENGILFRMKINLDDNYMFKVEQVVENNTKDNVVLVPYGKINRKRDNINESYWISHEGVLGAFDNKLEEWTYKDISKKHLIKANTSEKNWFGFADKYWLTVIIPEKSDKINVSIKHTNANDIDKFQVDFVKSYKSILPGASTSNVNYFFAGAKKLNLLDSYKDTLNIPLFDKAVDFGVLYFITKPVFLLLEYFNFVLKNFGLAILLLTLVIKLLMLPLSNRSYVSMFKVKSLQPELTRVKELYKNDSLKQHKETIALFKRNNVNPMSSIFPMLIQIPVFFALYKVLFVTIEMRHAPFFLWIKDLSAPDPTNIFTLFGLFNYNFPISIGILPIIFGATMIIQQKLSEKDQTSKDDIQVNVMKFLPYISVFIFSSFPAGLVIYWIFSNIITLIQQSLIKLFLTKKVVVNVENTNS

SEQ ID NO: 30936 - protein, 128 aa, Wolbachia endosymbiont of Drosophila ananassae
MKEQKCLFVTIAGLPNAGKSTLINSIIGKKIAIVTPKVQTTRTQIRGVATCNNTQVVFTDSPGIFSAETKLEKALVKSAWSAVKDSDITLLLVDVSNYLKNIERIKTIFMRLQRTKGRCILVINKTDC

SEQ ID NO: 30937 - protein, 213 aa, Wolbachia endosymbiont of Drosophila ananassae
MEIFLDSVDLNEIKGLKEFIDGITTNPSLIAKSGRKDKYEDLVREICSIIKGPVSVEVVADSHEEMITEGLNLAKIADNVVIKLPLTHEGLISCKKLWTEHKIPVNITLCFSPGQALLAAKVGACFISPFVGRLDDISYDGLSLIEDICTIYSNYGFDTKVLVASVRSPAHVIEAARLGADSITVPAKVLRQLINHPLTDQGLAIFEKDWGVK

SEQ ID NO: 30938 - protein, 263 aa, Brassica oleracea
MANFENLSSEFQTIAVDIYSSMNQAADLNNNNNISSNLQFQTFPPFSTSLDSLFLHHRHPQQLHDLPGKYPGSDNNLSATSTLYHSSHNNVDETKKRKALLQPLSSSENSSVSDQLNINTTKTGCSRRGKRLKKKNQEEEKEREVVHVRARRGQATDSHSLAERVRRGKINERLRCLQDIVPGCYKSMGMATMLDEIINYVQSLQNQVELLSMKLTAASSFYDFNSETDAVDSMQRAKAREAVEMGRQTRDGNPVLHLSAWSL

SEQ ID NO: 30939 - protein, 519 aa, Arabidopsis thaliana
MSGAITCSAADLATLLGPNATAAADYICGQLGTVNNKFTDAAFAIDNTYLLFSAYLVFAMQLGFAMLCAGSVRAKNTMNIMLTNVLDAAAGGLFYYLFGYAFAFGGSSEGFIGRHNFALRDFPTPTADYSFFLYQWAFAIAAAGITSGSIAERTQFVAYLIYSSFLTGFVYPVVSHWFWSPDGWASPFRSADDRLFSTGAIDFAGSGVVHMVGGIAGLWGALIEGPRRGRFEKGGRAIALRGHSASLVVLGTFLLWFGWYGFNPGSFTKILVPYNSGSNYGQWSGIGRTAVNTTLSGCTAALTTLFGKRLLSGHWNVTDVCNGLLGGFAAITAGCSVVEPWAAIVCGFMASVVLIGCNKLAELVQYDDPLEAAQLHGGCGAWGLIFVGLFAKEKYLNEVYGATPGRPYGLFMGGGGKLLGAQLVQILVIVGWVSATMGTLFFILKRLNLLRISEQHEMQGMDMTRHGGFAYIYHDNDDESHRVDPGSPFPRSALLLAFNFQLFGNLLPFKYCLGFGFEI

SEQ ID NO: 30940 - protein, 234 aa, Beta vulgaris
YDGSSTGQAPGEDSEVILYPQAIFKDPFRGGNNILVICDAYTPAGEPIPTNKRHKAAEIFSNPKVASEVPWFGIEQEYTLLQPNVQWPLGWPVGAYPGPQGPYYCGVGADKSFGRDISDAHYKACLYAGINISGTNGEVMPGQWEFQVGPSVGIEAGDHIWCARYLLERITEQAGVVLTLDPKPIEGDWNGAGCHTNYSTKTMREDGGFEVIKKAILNLSLRHKEHISAYGEGN

SEQ ID NO: 30941 - protein, 639 aa, Agrobacterium rhizogenes
MAKVIGIDLGTTNSCVAVMDGKDAKVIENAEGARTTPSMVAFTEDGERLVGQPAKRQAVTNPTNTLFAVKRLIGRRYEDPTVEKDKHLVPFNIVKGDNGDAWVEAHGKGYSPAQVSAMILQKMKETAEAYLGEKVEKAVITVPAYFNDAQRQATKDAGRIAGLEVLRIINEPTAAALAYGLDKKDGKTIAVYDLGGGTFDISILEIGDGVFEVKSTNGDTFLGGEDFDMRLVEYLVAEFKKDNGIDLKGDKLALQRLKEAAEKAKIELSSAQQTEINLPFITADATGPKHLTLKLTRAKLESLVDDLVQRAIAPCKAALKDAGVTAAEIDEVVLVGGMSRMPKVQEVVKQLFGKEPHKGVNPDEVVALGAAIQAGVLQGDVKDVLLLDVTPLSLGIETLGGVFTRLIERNTTIPTKKSQTFSTAGDNQSAVTIRVSQGEREMAADNKLLGQFDLVGLPPAPRGMPQIEVTFDIDANGIVQVSAKDKGTGKEQQIRIQASGGLSDADIEKMVKDAESHAAEDKKRREGVEAKNQAESLIHSSEKSLKDFGDKVTEADRNAISEAIAALKTATEASEPDAEDIKAKTQTLMEVSMKLGQAIYEAQQSEAPSADASAGGHHDDVVDADYEEIKDEDDRKRSA

SEQ ID NO: 30942 - protein, 634 aa, Agrobacterium rubi
MAKVIGIDLGTTNSCVAVMDGKDTKVIENAEGARTTPSMVAFSDDGERLVGQPAKRQAVTNPTNTLFAVKRLIGRRYEDPTVEKDKGLVPFEIVKGDNGDAWVQAQGKGYSPSQISAMILQKMKETAESYLGEKVEKAVITVPAYFNDAQRQATKDAGRIAGLEVLRIINEPTAAALAYGLDKTEGKTIAVYDLGGGTFDISVLEIGDGVFEVKSTNGDTFLGGEDFDMRLVEYLAGEFKKDQGIDLKGDKLALQRLKEAAEKAKIELSSSQQTEINLPFITADATGPKHLTLKLTRAKFESLVDDLVQRTVAPCKAALKDAGVTAAEIDEVVLVGGMSRMPKVQEVVKQLFGKEPHKGVNPDEVVAMGAAIQAGVLQGDVKDVLLLDVTPLSLGIETLGGVFTRLIDRNTTIPTKKSQTFSTAEDNQSAVTIRVSQGEREMAQDNKLLGQFDLVGLPPSPRGVPQIEVTFDIDANGIVQVSAKDKGTGKEQQIRIQASGGLSDADIDKMVKDAEANAEADKKRRAGVEAKNQAESLIHSSEKSVKEYGDKVSETDRKAIEDAIAALKTSVEASEPDADDIQAKTQTLMEVSMKLGQAVYEAQQAESGEGAAEGHKDDVVDADYEEIKDDKKSA

SEQ ID NO: 30943 - protein, 638 aa, Agrobacterium vitis
MAKVIGIDLGTTNSCVSVMDGKDAKVIENSEGARTTPSMVAFSDDGERLVGQPAKRQAVTNPTNTLFAVKRLIGRRYEDPTVEKDKGLVPFPIIKGDNGDAWVEAQGKGYSPAQISAMILQKMKETAEAYLGEKVEKAVITVPAYFNDAQRQATKDAGRIAGLEVLRIINEPTAAALAYGLDKTEGKTIAVYDLGGGTFDISVLEIGDGVFEVKSTNGDTFLGGEDFDMRLVEYLAAEFKKEQGIELKNDKLALQRLKEAAEKAKIELSSSQQTEINLPFITADASGPKHLTMKLTRAKFENLVDDLVQRTVAPCKAALKDAGVSAADIDEVVLVGGMSRMPKVQEVVKQLFGKEPHKGVNPDEVVAMGAAIQAGVLQGDVKDVLLLDVTPLSLGIETLGGVFTRLIDRNTTIPTKKSQVFSTADDNQQAVTIRVSQGEREMAQDNKLLGQFDLVGLPPAPRGVPQIEVTFDIDANGIVQVSAKDKGTGKEQQIRIQASGGLSDADIEKMVKDAEANAEADKNRRAVVEAKNQAESLIHSTEKSVKDYGDKVSADDRKAIEDAIAALKSSVETSEPNAEDIQAKTQTLMEVSMKLGQAIYESQQAEGGAEGGPSGHHDDGIVDADYEEVKDDNTKKSA

SEQ ID NO: 30944 - protein, 638 aa, Mesorhizobium ciceri
MAKVIGIDLGTTNSCIAIMDGKEPKVIENAEGARTTPSIVAISGDDERLVGQPAKRQAVTNPENTIFAVKRLIGRRYDDPVTEKDKKLVPYKIVKGDNGDAWVEAGGRKQSPSQISAMILQKMKETAEAYLGEKVEKAVITVPAYFNDAQRQATKDAGKIAGLEVLRIINEPTAAALAYGLDKKEGKTIAVYDLGGGTFDISVLEIGDGVFEVKSTNGDTFLGGEDFDMRLVEYLAAEFKKEQGIDLKNDKLALQRLKEAAEKAKIELSSTTQTEINLPFITADATGPKHLTLKLTRAKFEQLVDDLVQRTIAPCKAALKDAGLKAGEIDEVVLVGGMTRMPKIQEIVKQFFGKEPHKGVNPDEVVALGAAIQAGVLQGDVKDVLLLDVTPLSLGIETLGGVFTRLIERNTTIPTKKSQVFSTAEDSQSAVTIRVFQGEREMAADNKALGQFDLVGIPPAPRGVPQIEVTFDIDANGIVNVSAKDKGTGKEHQIRIQASGGLSDADIEKMVKDAEANAETDKKRRALVEARNQAEALLHSSEKSLKEYGDKVSEGERTAISDAIAALKTATEGDDAADIEAKSQALAEASMKLGQAMYEASQKEAAEADAKADAAKDSDVVDADFEEIDEDDDKKKSA

SEQ ID NO: 30945 - protein, 638 aa, Mesorhizobium loti
MAKVIGIDLGTTNSCIAIMDGKEPKVIENAEGARTTPSIVAISGDDERLVGQPAKRQAVTNPENTIFAVKRLIGRRYDDPVTEKDKKLVPYKIVKGDNGDAWVEAGGRKQSPSQISAMILQKMKETAEAYLGEKVEKAVITVPAYFNDAQRQATKDAGKIAGLEVLRIINEPTAAALAYGLDKKEGKTIAVYDLGGGTFDISVLEIGDGVFEVKSTNGDTFLGGEDFDMRLVEYLAAEFKKEQGIDLKNDKLALQRLKEAAEKAKIELSSTTQTEINLPFITADATGPKHLTLKLTRAKFEQLVDDLVQRTIAPCKAALKDAGLKAGEIDEVVLVGGMTRMPKIQEIVKQFFGKEPHKGVNPDEVVALGAAIQAGVLQGDVKDVLLLDVTPLSLGIETLGGVFTRLIERNTTIPTKKSQVFSTAEDSQSAVTIRVFQGEREMAADNKALGQFDLVGIPPAPRGVPQIEVTFDIDANGIVNVSAKDKGTGKEHQIRIQASGGLSDADIEKMVKDAEANAETDKKRRALVEARNQAEALLHSSEKSLKEYGDKVSETERTAISDAIAALKTAAEGDDAADIEAKSQALAEASMKLGQAMYEASQKEAAEADAKADAAKDSDVVDADFEEIDEDDDKKKSA

SEQ ID NO: 30946 - protein, 634 aa, Rhizobium galegae
MAKVIGIDLGTTNSCVAIMDGKDAKVIENAEGARTTPSMVAFSDDGERLVGQPAKRQAVTNPTNTLFAVKRLIGRRHEDPTVQKDRGLVPFDIVKGDNGDAWVKAQGKAYSPAQISAMILQKMKETAESYLGEKVEKAVITVPAYFNDAQRQATKDAGRIAGLEVLRIINEPTAAALAYGLDKKDGKTIAVYDLGGGTFDISVLEIGDGVFEVKSTNGDTFLGGEDFDMRLVEYLAAEFKKDNGIDLKNDKLALQRLKEAAEKAKIELSSSQQTEINLPFITADASGPKHLTLKLTRAKFESLVDDLVQRTIAPCKAALKDAGVTAAEIDEVVLVGGMSRMPKVQEVVKQLFGKEPHKGVNPDEVVALGAAIQAGVLQGDVKDVLLLDVTPLSLGIETLGGVFTRLIDRNTTIPTKKSQTFSTAEDNQQAVTIRVSQGEREMAQDNKLLGQFDLVGLPPSPRGMPQIEVTFDIDANGIVQVSAKDKGTGKEQQIRIQASGGLSDAEIEKMVKDAEANAEADKKRRAGVEAKNQAESLVHSSEKSLKEYGDKVSETDRKAIEDAIASLKTAIEAPEPDADDIQAKTQVLMEVSMKLGQAIYEAQQAEGEGSEGGKDDIVDADYEEIKDEDRKRSA

SEQ ID NO: 30947 - protein, 638 aa, Rhizobium leguminosarum
MAKVIGIDLGTTNSCVAVMDGKDAKVIENAEGARTTPSMVAFSDDGERLVGQPAKRQAVTNPTNTLFAVKRLIGRRYEDPTVEKDKHLVPFTIVKGDNGDAWVEANGKGYSPAQISAMILQKMKETAESYLGEKVEKAVITVPAYFNDAQRQATKDAGRIAGLEVLRIINEPTAAALAYGLDKKEGKTIAVYDLGGGTFDISILEIGDGVFEVKSTNGDTFLGGEDFDMRLVEYLVAEFKRDNGIDLKNDKLALQRLKEAAEKAKIELSSSQQTEINLPFITADASGPKHLTLKLTRAKLESLVDDLVQRTIAPCKAALKDAGVTAAEIDEVVLVGGMSRMPKVQEVVKQLFGKEPHKGVNPDEVVALGAAIQAGVLQGDVKDVLLLDVTPLSLGIETLGGVFTRLIERNTTIPTKKSQTFSTAEDNQQAVTIRVSQGEREMAADNKLLGQFDLVGLPPSPRGMPQIEVTFDIDANGIVQVSAKDKGTGKEQQIRIQASGGLSDADIEKMVKDAEAHATEDKKRREAVEARNQAESLIHSSEKSLKDYGDKVSEADRTAISDAIAALKTASEASEPDADDIKAKTQTLMEVSMKLGQAIYEAQQAESGAAGDASAEGGDNVVDADYEEIKDDDRKKSA

SEQ ID NO: 30948 - protein, 639 aa, Rhizobium tropici
MAKVIGIDLGTTNSCVAVMDGKDAKVIENAEGARTTPSMVAFTDDGERLVGQPAKRQAVTNPTNTLFAVKRLIGRRYEDPTVEKDKHLVPFNIVRGDNGDAWVEANGKGYSPAQISAMILQKMKETAESYLGEKVEKAVITVPAYFNDAQRQATKDAGKIAGLEVLRIINEPTAAALAYGLDKKDGKTIAVYDLGGGTFDISILEIGDGVFEVKSTNGDTFLGGEDFDMRLVEYLVAEFKKDNGIDLKGDKLALQRLKEAAEKAKIELSSAQQTEINLPFITADATGPKHLTLKLTRAKLESLVDDLVQRTIAPCKAALKDAGVTAAEIDEVVLVGGMSRMPKVQEVVKQLFGKEPHKGVNPDEVVALGAAIQAGVLQGDVKDVLLLDVTPLSLGIETLGGVFTRLIERNTTIPTKKSQTFSTADDNQSAVTIRVSQGEREMAADNKLLGQFDLVGLPPAPRGVPQIEVTFDIDANGIVQVSAKDKGTGKEQQIRIQASGGLSDADIEKMVKDAEAHAAEDKKRREGVEAKNQAESLIHSSEKSLKDYGDKVTEADRTAISDAIAALKAATEASEPDAEDIKAKTQTLMEVSMKLGQAIYESQQAEAGSGDASAAGGKDDVVDADYEEIKDEGDHKRSA

SEQ ID NO: 30949 - protein, 455 aa, Aspergillus niger
  misc_feature (72)..(72): Xaa can be any naturally occurring amino acid
  unsure (1)..(455): unsure at all Xaa locations
MDRRVTIASQVAIAAVAGYCIYKAFNARQQQKSLKDAVPKSSAAPLTPEQIKIIKATVPVLQEYGTKITTAXYMNMSTVHPELNAVFNTANQVKGHQARALAGALFAYASHIDDLGALGPAVELICNKHASLYIQADEYKIVGKYLLEAMKEVLGDACTDDILDAWGAAYWALADIMINREAALYKQSQGWTNWRQFRISKKVPESDEITSFYLEPVDGKPLPAFRPGQYISVSVQVPEEDPQARQYSLSDTSRSDYYRISVKKETGLDPRAPGAKRHPGYVSNVLHDMIKEGDLIDVSHPYGDFFLSTAEATHPIVLLSAGVGMTPMMSILNTITKKSNRKIHFIHGSRTTEARAFKSHVQKLEKEIPNMQVTYFLSRPGDSDQLGVDYHHAGRIDLQKLDGPSHLYLDNPSTEYYICGPDTFMTQMEEALKAYGVGDDRIKMELFGTGGVPHN

SEQ ID NO: 30950 - protein, 312 aa, Geobacillus stearothermophilus
MSFFIFLIKILLFKEGKVMQTTKVKYIKSPLNYTGGKFKLLDQILPKFPKRIDTFVDLFCGGCNVGINVNANKIICNDIIDYLIQLLKYFQTHSIDHILSHIETRIQEYNLSKSNKEGYLALRDYYNKHRFILDLYVLTCYSFNHVIRFNSKHEFNAPFGQNRSHFNDTLKKKLVDFVNEIHSKNIVFTNNDFEISLDEFGPNDFFYCDPPYLISQGVYNDGKRGFKGWDEEQEIRLLNFLDRLNEKGIKFALSNVFENKGLRNDLLIQWCERNEYFVYPISSNYSNSSYHRKDRNTSLEVLITNYDVRSIN

SEQ ID NO: 30951 - protein, 660 aa, Capsicum annuum
MYASSARDGIPGKWCNARRKQLPLLISKDFPAELYHSLPCKSLENGHIKKVKGVKATLAEAPATPTEKSNSEVPQKKLKVLVAGGGIGGLVFALAGKKRGFDVLVFERDISAIRGEGQYRGPIQIQSNALAALEAIDMDVAEEIMNAGCITGQRINGLVDGISGNWYCKFDTFTPAVERGLPVTRVISRMTLQQILARLQGEDVIMNESHVVNFADDGETVTVNPELCQQYTGDLLVGADGIRSKVRTNLFGPSELTYSGYTCYTGIADFVPADIDTAGYRVFLGHKQYFVSSDVGGGKMQWYAFHNEPAGGVDAPNGKKERLLKIFGGWCDNVIDLSVATDEDAILRRDIYDRPPTFSWGKGRVTLLGDSVHAMQPNLGQGGCMAIEDSYQLALELEKAWSRSAESGSPMDVISSLRSYESARKLRVGVIHGLARMAAIMASAYKAYLGVGLGPLSFITKFRIPHPGRVGGRFFIDLGMPLMLSWVLGGNGEKLEGRIQHCRLSEKANDQLRNWFEDDDALERATDAEWLLLPAGNSNAALETLVLSRDENMPCTIGSVSHANIPGKSVVIPLSQVSDMHARISYNGGAFLGTAFRSDHGTWFIDNEGRRYRVSPNFPMRFHSSDVIVFGSDKAAFRIKAMKFAPKTAAKEDRQAVGAA

SEQ ID NO: 30952 - protein, 669 aa, Solanum lycopersicum
MYSTVFYTSVHPSTSVLSRKQLPLLISKDFSAELYHSLPCRSLENGHINKVKGVKVKATIAEAPVTPTEKTDSGANGDLKVPQKKLKVLVAGGGIGGLVFALAAKKRGFDVLVFERDLSAIRGEGQYRGPIQIQSNALAALEAIDLDVAEDIMNAGCITGQRINGLVDGISGNWYCKFDTFTPAVERGLPVTRVISRMTLQQILARAVGEEIIMNESNVVDFEDDGEKVTVVLENGQRFTGDLLVGADGIRSKVRTNLFGPSEATYSGYTCYTGIADFVPADIDTVGYRVFLGHKQYFVSSDVGGGKMQWYAFYNEPAGGADAPNGKKERLLKIFGGWCDNVIDLLVATDEDAILRRDIYDRPPTFSWGRGRVTLLGDSVHAMQPNLGQGGCMAIEDSYQLALELEKACSRSAEFGSPVDIISSLRSYESARKLRVGVIHGLARMAAIMASTYKAYLGVGLGPLSFLTQYRIPHPGRVGGRVFIDLGMPLMLSWVLGGNGDKLEGRIKHCRLSEKANDQLRKWFEDDDALERATDAEWLLLPAGNGSSGLEAIVLSRDEDVPCTVGSISHTNIPGKSIVLPLPQVSEMHARISCKDGAFFVTDLRSEHGTWVTDNEGRRYRTSPNFPTRFHPSDVIEFGSDKAAFRVKAMKFPLKTSERKEEREAVEAA

SEQ ID NO: 30953 - protein, 663 aa, Nicotiana plumbaginifolia
MYSTVFYTSVHPSTSAFSRKQLPLLISKDFPTELYHSLPCSRSLENGQIKKVKGVVKATIAEAPATIPPTDLKKVPQKKLKVLVAGGGIGGLVFALAAKKRGFDVLVFERDLSAIRGEGQYRGPIQIQSNALAALEAIDMDVAEDIMNAGCITGQRINGLVDGVSGNWYCKFDTFTPAVERGLPVTRVISRMTLQQNLARAVGEDIIMNESNVVNFEDDGEKVTVTLEDGQQYTGDLLVGADGIRSKVRTNLFGPSDVTYSGYTCYTGIADFVPADIETVGYRVFLGHKQYFVSSDVGGGKMQWYAFHNEPAGGVDDPNGKKARLLKIFEGWCDNVIDLLVATDEDAILRRDIYDRPPTFSWGKGRVTLLGDSVHAMQPNLGQGGCMAIEDSYQLALELDKALSRSAESGTPVDIISSLRSYESSRKLRVGVIHGLARMAAIMASTYKAYLGVGLGPLSFLTKFRIPHPGRVGGRFFIDLGMPLMLSWVLGGNGEKLEGRIQHCRLSEKANDQLRNWFEDDDALERATDAEWLLLPAGNSNAALETLVLSRDENMPCNIGSVSHANIPGKSVVIPLPQVSEMHARISYKGGAFFVTDLRSEHGTWITDNEGRRYRASPNFPTRFHPSDIIEFGSDKKAAFRVKVMKFPPKTAAKEERQAVGAA

SEQ ID NO: 30954 - protein, 661 aa, Prunus armeniaca
MASTLFYNSMNLSAAVFSRTHFPIPINKDFPLEFSPCIHTDYHLRSRTRSGQKKCLTEVRATVASPTEVPSAPASTQPKKLRILVAGGGIGGLVFALAAKKKGFDVVVFEKDLSAVRGEGQYRGPIQIQSNALAALEAIDMDVAEEVMRVGCVTGDRINGLVDGVSGTWYVKFDTFTPAVERGLPVTRVISRIALQQILARAVGEEIIINDSNVVNFEDLGDKVNVILENGQRYEGDMLVGADGIWSKVRKNLFGLNEAVYSGYTCYTGIADFVPADINSVGYRVFLGHKQYFVSSDVGGGKMQWYAFHKESPGGVDSPNGKKERLLKIFEGWCDNVIDLLLATEEDAILRRDIYDRTPILTWGKGHVTLLGDSVHAMQPNMGQGGCMAIEDGYQLALELDKAWKKSSETGTPVDVASSLRSYENSRRLRVAIIHGMARMAALMASTYKAYLGVGLGPLSFLTKFRIPHPGRVGGRVFIDKAMPLMLSWVLGGNSSKLEGRSPSCRLSDKASDQLRNWFEDDDALERAIDGEWYLIPCGQDNDASQLICLNRDEKNPCIIGSAPHGDVSGISIAIPKPQVSEMHARISYKDGAFYLTDLRSEHGTWIADIEGKRYRVPPNFPARFRPSDAIEIGSQKVAFRVKVMKSSPGSVEKEGILQAA

SEQ ID NO: 30955 - protein, 113 aa, Pelargonium zonale
WSKYGQKMAKGNPCPRAYYRCTMAAGCPVRKQVQRCAEDRTILITTYEGNHNHPLPPAAMAMASTTSSAARMLLSGSMPSADGIMNSNFLTRTLLPCSSSMATISASAPFPTV

SEQ ID NO: 30956 - protein, 586 aa, Triphysaria versicolor
MCGILAVLGCSDDSQAKRVRVLELSRRLKHRGPDWSGIHHHGDCYLAHQRLAIVDPASGDQPLFNEDKRIAVTVNGEIYNHEELRALLPNHKFRTGSDCDVIAHLYEEYGENFVEMLDGMFSFVLLDSRDNTFIAARDAFGITSLYIGWGLDGSVWISSELKGLHDECENFEVFPPGHVYSSKTEGFRRWYNPPWFSEAIPSTPYDPLVLRGAFEQAVIKRLMTDVPFGVLLSGGLDSSLVAAVTARHLAGTKAAKRWGSQLHSFCVGLEGSPDLKAGKEVADYLGTVHHEFLFTVQDGIDAIEDVIYHIETYDVTTIRASTPMFLMSRKIKSLGVKMVISGEGSDEIFGGYLYFHKAPNKEEFHRETCRKIKALHQYDCLRANKATSAWGLEARVPFLDKEFVNLAMSIDPEAKMIKPDQGRIEKWILRKAFDDEERPYLPKHILYRQKEQFSDGVGYSWIDGLKAHAEQHVTDKMMLNAGHIFPHNTPTTKEGYYYRMIFERFFPQNSAKLTVPGGPSVACSTATAVAWDASWSKNLDPSGRAATGVHDLAYENHVPIGNLKSKKMDSVSLGNAVGPQELTIRS

SEQ ID NO: 30957 - protein, 510 aa, Eustoma grandiflorum
MAVGNGVLLHIARSLMLFFHVQKLVQYLWMNSRRHRLPPGPIGWPVLGALPLLGTMPHVALANMAKKYGPVMYLKVGSCGLAVASTPEAAKAFLKTLDMNFSNRPPNAGATHLAYNAQDMVFADYGPRWKLLRKLSNIHILGGKALQGWEEVRKKELGYMLYAMAESGRHGQPVVVSEMLTYAMANMLGQVMLSKRVFGSQGSESNEFKDMVVELMTVAGYFNIGDFIPSIAWMDLQGIQGGMKRLHKKFDALLTRLLEEHTASAHERKGSPDFLDFVVANRDNSEGERLHTVNIKALLLNMFTAGTDTSSSVIEWALAELLKNPIILKRAQEEMDGVIGRDRRFLEADISKLPYLQAICKEAFRKHPSTPLNLPRIASQACEVNGHYIPKGTRLSVNIWAIGRDPSLWENPNEFNPDRFLERKNAKIDPRGNDFELIPFGAGRRICAGTRLGILLVEYILGTLVHSFDWELPSSVIELNMDEPFGLALQKAVPLAAMVTPRLPLHIYCP

SEQ ID NO: 30958 - protein, 523 aa, Campanula medium
MSIDISTLFYELVAAISLYLATYSFIRFLFKPSHHHHLPPGPTGWPIIGALPLLGTMPHVSLADMAVKYGPIMYLKLGSKGTVVASNPKAARAFLKTHDANFSNRPIDGGPTYLAYNAQDMVFAEYGPKWKLLRKLCSLHMLGPKALEDWAHVKVSEVGHMLKEMYEQSSKSVPVPVVVPEMLTYAMANMIGRIILSRRPFVITSKLDSSASASASVSEFQYMVMELMRMAGLFNIGDFIPYIAWMDLQGIQRDMKVIQKKFDVLLNKMIKEHTESAHDRKDNPDFLDILMAATQENTEGIQLNLVNVKALLLDLFTAGTDTSSSVIEWALAEMLNHRQILNRAHEEMDQVIGRNRRLEQSDIPNLPYFQAICKETFRKHPSTPLNLPRISTEACEVDGFHIPKNTRLIVNIWAIGRDPKVWENPLDFTPERFLSEKHAKIDPRGNHFELIPFGAGRRICAGARMGAASVEYILGTLVHSFDWKLPDGVVEVNMEESFGIALQKKVPLSAIVTPRLPPSSYTV

SEQ ID NO: 30959 - protein, 510 aa, Eustoma grandiflorum
MAVGNGVLLHIAASLMLFFHVQKLVQYLWMNSRRHRLPPGPIGWPVLGALRLLGTMPHVALANMAKKYGPVMYLKVGSCGLAVASTPEAAKAFLKTLDMNFSNRPPNAGATHLAYNAQDMVFADYGPRWKLLRKLSNIHILGGKALQGWEEVRKKELGYMLYAMAESGRHGQPVVVSEMLTYAMANMLGQVMLSKRVFGSQGSESNEFKDMVVELMTVAGYFNIGDFIPSIAWMDLQGIQGGMKRLHKKFDALLTRLLEEHTASAHERKGSPDFLDFVVANGDNSEGERLQTVNIKALLLNMFTAGTDTSSSVIEWALAELLKNPIILRRAQEEMDGVIGRDRRFLEADISKLPYLQAICKEAFRKHPSTPLNLPRIASQACEVNGHYIPKGTRLSVNIWAIGRDPSVWENPNEFNPDRFLERKNAKIDPRGNDFELIPFGAGRRICAGTRLGILLVEYILGTLVHSFVWELPSSVIELNMDESFGLALQKAVPLAAMVTPRLPLHIYSP

SEQ ID NO: 30960 - protein, 514 aa, Petroselinum crispum
MSSSLGDLLAQPNNDDFGSNWGFENQKTKSFANQSLPFSPPPVSPSSYFSFLDSPIQNNNYTIVSSSGNGTMNAQSFKEENQNFSDFSFPAQTRPASSTSSSFIPANTNLVEDSLKRKQGGWNFEEPAKKNDFLMDNASVTSDIATLQRISPEMTMNHANMQSNAALQSNLNNYAQSSQSSQTNRDQSKLDDGYNWRKYGQKQVKGSENPRSYYKCTYLNCPTKKKVETTFDGHITEIVYKGNHNHPKPQSTKRSSSQSYQNSIGTMPESSLLENGRSEPVTTPENSSLSFGEDDLFEQGSMNKPGDDDENEPDSKRWKGEYESNEPMSSLGSRTVREPRIVVQTTSDIDILDDGYRWRKYGQKVVKGNPNPRSYYKCTQVGCPVRKHVERASHDLRAVITTYEGKHNHDVPAPRGSGSYPAVNRPSDNTTSAPTAIRPTTNYLNPLQNPRAQPANGQAPFTLEMLQRPRSYEFSGFTNTSNTYAINQNQQASGQFSTAKDEPDVDSFFDSFLA

SEQ ID NO: 30961 - protein, 275 aa, Mortierella alpina
MVSNNYIDITSEDDFAQVFQPSSSTVYALNFWAAWAPPCVQMNEVFEELAAKNANVNFLKIEAEKFPDISEDYEIAAVPSFVIVKEGTVVDRVEGANAPELAKVIAKYSKSTSSPLPTQSSTMAAAGHAAPSVAPPTMSPEEMNARLKELTSSSSVMAFIKGTPTAPRCQFSRQLLEILTAQNIRFSSFNILADDEVRQAMKTFSDWPTFPQVYVKGEFVGGLDVVKELVASGEFQALVPAEKDLKTRMDELIRKAPVMIFIKGSPETPRCGFSK

SEQ ID NO: 30962 - protein, 321 aa, Tulipa gesneriana
MAAFSYKQQQHQSNLLLDSTDHHHLSFQFQDLMTNSTSPFLYYPMPTSATNSTLDSASDNQKDCSSSVAEPQSSTEIRKRKDKSDGSCMTSVQSKGTKRETKSRKSQKKPKANESDEMKERTQEEEEAPVGYIHVRARRGQATDSHSLAERVRREKISERMKLLQALVPGCDKVTGKAVMLDEIINYVQSLQNQVEFLSMKLATVSPMLYEFGLDIEGQMNDLERVGSFPQDSQLLVPKTIPFQHRVCEEDTRSYSIGETSAPFLLHDQGPLSFSGVPFSVEMGTKHKAFSVNFCSTTSHLPTIENRRADKGRWGYGRKST

SEQ ID NO: 30963 - protein, 257 aa, Antirrhinum majus
FPFSSSSLNGLNFGKKIYFENVGSSGLQSSPSKKGRSGGVVQGGQPPRCQVEGCKIDLSDAKAYYSRHKVCGMHSKSPKVIVAGIEQRFCQQCSRFHQLPEFDQGKRSCRRRLAGHNERRRKPPPVSTISPRYGSLSPTIFDNYSKPGGFVLDFSSSHPNLTGKDSWANTSSERGLGNQLSWQSNSQNPLPDFLQGSSTSSRPSYSGHGVSSVECFGGVSSDSSGALSLLSNQPWGSRTRASSLGLNNFLGTTTNGE

SEQ ID NO: 30964 - protein, 323 aa, Antirrhinum majus
SAAGGAEESLNGLKFGKKIYFEEAKAKKGKSTGGVVRCQVEGCEVDLSDAKAYYLRHKVCSMHSKSPKVIVAGIEQRFCQQCSRFHQLPEFDQGKRSCRRRLAGHNERRRKPSPGSMMSPYYGSLSPTLFDNQNRTGGFLMDFSTYPNLAGKDSWPNTIPERGLGGPASPWQSDMQNPVPEFLRGTTNRPSFSGLGVSSEECFSGVSNSSTALSLLSNQSWGSRNSNNFLGTNGNGPTIVQPSINPGATIGQFTCPSWGFGGNPADNTSHDMPPNLNLGQFSHSSNSHYTGEPGVVQLSHGQFQDLDHSRGYDSSVQDMHWSL

SEQ ID NO: 30965 - protein, 579 aa, Zymomonas mobilis subsp. mobilis ZM4
MDDKHQQRNLVIVTILSALILFGWSFVTKHWLSTPPAPTQQGKNQPKAELTAEESGDKPLKPVDQVLQETPRLPILTESVEGSVNLKGLRLDDLTLIRHRETLAKNSPAVRLFSPAGTENAWFTSFGWTGENVALPNADSLWKADSDKLTADHPVNFYWNNQQGQILRITLCVDHDYMFNATESVINRGNSPVIVQPYVLTNHQGVFKTASSWTLHTGPIGVFNGSVNYHVDFADIDKATNNSIRNNTQGGWIGFSDKYWLTALAPHNQKIAIDTDFRSSSNHHYQADFTVAPVVVAAGKTASTSVDVFAGAKEVRVLDRYRDQLHLPHFDKAIDWGWFAIIEKVFFYYLDWLFLHVGNYGLAIILMVFTIRALIFPIANKQYASMASMRRLQPKMQAVRERYKNDEARMRQELVTLYQKEKVNPFAGCLPMFIQFPIFIALYKTLLVTIESRHQPFILWIKDLSAPDPLTPFNLFGLLHFTPPHFLMIGVLPIILGITMWLQFRASPQQLEPAQQQIMSFLPLISVIFMAPLAAGLQVYYIFNNLISLAQMMWLQHRHSTPEERQDRAERKRPSKKKA

SEQ ID NO: 30966 - protein, 1545 aa, Zymomonas mobilis subsp. mobilis ZM4
MSIKSSADSFDVFAERERLAKEGMYRPEFETDACGVGLVAATDGKASRRVVTAAIDALKAVWHRGAVDADGKTGDGAGIHVDLPASFFDDAIAHAGHAPLPNRLAVGMVFLPRTDLSALYTCRTIVESEIIDFGYRIYGWRQVPVDISVIGEKAMRTRPEIEQIMIAGPHPDEMSAAEFEKNLYLIRRRIEKKVIAAQINDFYICSLSCRSIVYKGLFLAEALSIFYPDLQDERFVSRVAVFHQRYSTNTFPQWWLAQPFRMLAHNGEINTIRGNRNWMKSHEIKMASLAFGEHSEDIKPLIPAGASDTAALDAVFETICRAGRHAPAAKLMLIPEAWQHNPDMPNAHRDMYSYLDSVMEPWDGPGALAITDGSWAVAGVDRNALRPLRTVRTKDNLLIVGSESGMVVVPENNVIAKGQLGPGQMIAVNLDEGRFYEERPLKDLIASERPYGEWIKDFKKLSDLDLKSYDPVIPYDRDELIKRQVSAGLTLEDMDLVLSPQAETGKEAMGSMGDDTPLAVLTEKPRLTSQFFRQNFSQVTNPPIDSLRETQVMALTTRFGNLGNILDSENKQKQILTLDTPYLKTSEWCQLKDHFGEQAVEIDCTFSPDDGADALRHAISNLRTQAENAVRSGHSELFLTDEHIGSDRVAVAMILATAAVHTHLIRKGLRSYASINVRASECIDPHYVAVLIGVGATTVNAYLAESAIAYRHSQGLFGTMTLEQCLDNHHHAICNGLLKIMAKMGIAVVSSYRGAYNFEAVGLSRALVNDLFPGMTAKISGEGYASLQRSALLRHQNAFAANKKALDVGGFYRQRASGDSHAYTAELMRKLQKAVSSDSYTTYLEFSKEVHQLPPVYLRDLLGFNWSKQPIPIEEVEPITEIRRRFITPGMSLGALSPEAHETLAIAMNRIGAKSVSGEGGEAPERFHPYENGDNANSPIKQVASGRFGVTAAYLGACEEIEIKVAQGAKPGEGGQLPGFKVTDMIAKLRHSTPGVTLISPPPHHDIYSIEDLAQLIYDLKKINPNARVGVKLVSSAGIGTIAAGVAKAHADSIMISGNVGGTGASPLTSIKYAGTPWEMGLSEANQVLTLNGLRHRVKLRTDGGLKTGRDIVIAAILGAEEFGIGTLSLIAMGCLMVRQCHSNKCPVGICTQDKATAAEIYRNAGTVINLMTFIAEEVREILAKLGVRSLKEIIGQTDLLSQVNRGADHLDDLDLNPVLAKVDANTEARYFQIDGFRNPVPDSLDAQMLQDAQAVFTRREKTQLTYSVRNTQRAIGTRFSAEITRNFGMDSLADGHVHVRLRGSAGQSLGAFSVKGLTLEVFGDANDYVGKGLSGATIIVRPTVSSPIDGHTNTIIGNTVLYGATAGKLFAAGRAGERFAVRNSGAETVIEGCGANGCEYMTGGLAVILGSVGPNFGAGMTGGMAFVLDEDNSFERHANPDNIIWQRLASSHWETVLRSMIADHAVKTDSPWAHRVLDEWDLWSQKFWQICPKEMLGRLEYPLDDKKNTEDHPFYCRSGKNHPYSSAYDRNDQQTGSDKSPDLA

SEQ ID NO: 30967 - protein, 397 aa, Zymomonas mobilis subsp. mobilis ZM4
MKPKLPLNRRQNPVRIMFLRLLSEQPQVKRRPLSRPMISQQQWPNWMLPRRLWQPMMINMLSVLSVMIELKSKGVDIITLGAGEPDFETPEFIKEAAIQAIHDGKTRYTNVDGTAELKEAIVGKFRRDNHLEYRTDQISVGSGGKHVLFNALTATIDQGDEVIIPAPYWVSYPDIVRFCGGTPVFIQATIDQDYKITAEQLEKAITQKTRWFIFNSPSNPTGAAYSADEIKSLAEVLRRHPHVWILSDDIYEHIVFDNFRFATIAEVAPDLFDRTLTANGCSKAYAMTGWRIGFAGGPTPLIKAMAKLQSQSTSNPCSISQAAAVAALNGPQDFLQGWSDDFARRRNLVVDGLNAIEGISCPKPQVPSMSIRAFPSLLARKPHQVKSLKKTWISQAI

SEQ ID NO: 30968 - protein, 193 aa, Nicotiana tabacum
MAFAGTTQKCMACDKTAYLVDKLTADNRIYHKACFRCHHCKGTLKLGNYNSFEGVLYCRPHFDQLFKQTGSLDKSFEGTPKIVKPQKPIDSGKPQVAKVTSMFGGTREKCFGCKKTVYPTEKVSVNGTPYHKSCFKCSHGGCVISPSNYIAHEGRLYCKHHHIQLIKEKGNLSKLEGDHEMNSTTTTEVTAES

SEQ ID NO: 30969 - protein, 214 aa, Helianthus annuus
MKSFTGTTQKCTVCEKTVYLVDKLVANQRVYHKACFRCHHCNSTLKLSNFNSFDGVVYCRHHFDQLFKRTGSLEKSFDGTPKFKPERTFSQETQSANRLSSFFEGTRDKCNACAKIVYPIERVKVDGTAYHRACFKCCHGGCTISPSNYIAHEGRLYCKHHHIQLFKKKGNYSQLEVEETVAAPAESETQNAETQNAETQNADTQNTDTQNAAV

SEQ ID NO: 30970 - protein, 188 aa, Helianthus annuus
MAFAGTTQKCMACDKTVYLVDKLTADNRVFHKACFRCHHCNGTLKLSNYNSFEGVLYCRPHFDQLFKKTGSLDKSFEGTPNIVKQPKTIDGEKPMANKVSSMFVGTKDKCLGCKNTVYPTEKVSVNGTAYHKSCFKCSHGGCTISPSNYIAHEGHLYCRHHHTQLIKEKGNLSQLEGERSARVGETAP

SEQ ID NO: 30971 - protein, 383 aa, Umbellularia californica
MVTTSLASAFFSMKAVMLAPDGSGIKPRSSGLQVRAGKEQNSCKMINGTKVKDTEGLKGRSTLHGWSMPLELITTIFSAAEKQWTNLVSKPPQLLDDHLGLHGLVFRRTFAIRCSEVGPDRSTSIVAVMNYLQEAACNHAESLGLLGDGFGETLEMSRRDLIWVVRRTHVVVERYPAWGDTVEVEAWIGAAGNIGMRRHFLVRDCKTGHILARCTSVSVMMNMRTRRLSKIPQEVRGEIDPLFIEKFAVKEGEIKKLQKFNDSTADYIQGGWTPRWNDLDVNQHVNNIKYVGWIFKSVPDSIYENHHLSSITLEYRRECTRGRALQSLTTVCGGSSEAGIICEHLLQLEDGSEVLRGRTDWRPKRTDSFEGISERFPQQEPHN

SEQ ID NO: 30972 - protein, 556 aa, Cicer arietinum
MGCQGSKEKNKPTPDFTARHHGSSATAASASGVATNNHQYHSVQPSSTHVQTPPPKPDSNPKPTVTTQNVKTVHKTDTTILGKPFDDIKKHYTLGQELGRGQFGITYFCTENSTGNTYACKSILKRKLVSKSDREDIKREIQILQHLSGQPNIVEFKGAYEDRFSVHLVMELCAGGELFDRIIAQGHYSERAAASICRAVVNVVHICHFMGVLHRDLKPENFLLSSKDEGATLKATDFGLSVFIEEGKVYRDMVGSAYYVAPEVLRRSYGKEIDIWSAGIILYILLSGVPPFWAETEKGIFNAILEGELDFASEPWPSISDSAKDLVRKMLNHDPKKRITSAQVLEHPWMREGGEASDKPIDSAVLSRMKQFRAMNKLKKLALKIIAENLSEEEIKGLKAMFANMDTDNSGTITYEELKTGLARIGSRLSETEVKQLMELADVDGNGSIDYLEFISATMHRHRLERDEHLYKAFQYFDKDNSGHITREELETAMTQHGMGDEATIKDIISEVDTDHDGRINYEEFCAMMRSGMPPPGTTIINLQSEFDFICSCNSL

SEQ ID NO: 30973 - protein, 540 aa, Cicer arietinum
MGNCCATPPVTGEETNNNKKKNNKKPKKENPFAIDYNFNANNTNSKLTVLKDPTGREIEVRYELGRELGRGEFGITYLCTDKENGEELACKSISKKKLRTLVDIEDVRREVEIMKHMPKHPNIVTLKDTYEDDNAVHLVMELCEGGELFDRIVARGHYTERAAAAVTKTIVEVVQMCHKHGVMHRDLKPENFLFANKKETAALKAIDFGLSVFFTPGEKFNEIVGSPYYMAPEVLKRNYGPEVDIWSAGVILYILLCGVPPFWAETEQGVAQAIIRSVVDFKRDPWPKVSDNAKDLVKRMLNPDPKRRLTAQEVLDHPWLQNAKKAPNVSLGETVRARLKQFSVMNKLKKRALRVIAEHLSVEEAAGLKEGFKLMDTSNKGKINIDELRIGLHKLGHQIPDADVQILMEAGDVDRDGHLDYGEYVAISVHLRKMGNDEHLHKAFDFFDQNQTGYIEIEELRNALSDEIETNSEEVISAIMHDVDTDKDGKISYEEFASMMKLGTDWRKASRQYSRERFNSLSLKLMRDGSLQLTNENQCQ

SEQ ID NO: 30974 - protein, 541 aa, Vibrio fischeri ES114
MDTQRNILLLALALVSFLLFQQWQVETNPQQPATVSTVQQTQTDGDVPTSSTANSDTPADSAQSDKLITITTDVLTLKVDTLGGDIIESVLNKYDAELGSKAKFVLLKNDATHSYVAQSGLIGPQGIDSNSGRAQFTAQKTDYVLAEGQNELRVPLTLVKDGITYTKTLILKRDSYAIDVDYTVDNQSSAPATVEMYTNLKQNLMDDGGSLTMPTYRGAAYSTEDTRYKKYSFDDMEDKNLSIDMTNGQGWAGMLQHYFASAWIPRNVNDAKLTSRVAGDYGYIGVRMPSVTIPAGQEATLSATLWTGPKLQKEMAATAPYLDLTVDYGWLWFIASPLHKLLSFIQGIVVNWGLAIIVLTFIVRGAMYPLTKAQYTSMAKMRMLQPKLTAMRERIGDDRQRMSQEMMELYKKEKVNPLGGCLPILLQMPIFISLYWALMESVELRHTPFFGWITDLSAQDPYYILPLLMGASMFLIQKMSPTTVTDPMQQKIMTFMPVMFTVFFLWFPSGLVLYWLVSNIVTLIQQTLIYRALEKKGLHSK

SEQ ID NO: 30975 - protein, 310 aa, Vibrio fischeri ES114
MASSIDIAKQVIQTEIEGLDYMAKRLGSEFEVAINAIINTKGRTIICGMGKSGIIGKKIAASFASTGTPSFFMHPGEAFHGDLGMVKPEDVFIAISNSGETDEVLKLLPFLRDNGNFVIAITGKENSTLATNSHCHLDISVPKEACPLQLAPTSSTTATLVMGDALTVALMDVREFQPENFARFHPGGSLGRRLLSKVQDEMFSDNIPSVASDADFTSIIHKISSSHLGLTLVNLKDDSLAIITDGDLRRAMESKGRDAFDLVAKDIASINPASISPESNIQKAYEIMESKGITSLIVVESNSVVGILKK

SEQ ID NO: 30976 - protein, 103 aa, Vibrio fischeri ES114
MYAVFQSGGKQHRVSEGQTLRLEKLDVETGATVEFDNVLMIANGEEITVGAPLVAGGKVTAEVVQHGRGDKVKIVKFRRRKHSRKQQGHRQWFTEVKITGISA

SEQ ID NO: 30977 - protein, 390 aa, Vibrio fischeri ES114
MKFVDEATIKVDAGDGGNGVVSFWREKFVAKGGPDGGDGGDGGDVYLEADENLNTLIDYRFNRFYNAERGKNGSGGNCTGKRGEDITLKVPVGTRAIDIDTGEKVAELMTHGMKQMVAKGGWHGLGNTRFKSSVNRAPRQKTLGTKGEVRELRLELLLLADVGMLGLPNAGKSTFIRAVSAAKPKVADYPFTTLIPSLGVVRARGNKSFVVADIPGLIEGAADGAGLGVRFLKHLERCRVLLHVIDILPIDGSDPVQNALTIIDELEQYSEKVASKPRWLLFNKTDLLLEEEADEKINEILEALAWEDRYFKIAAVSRTGTQELCDELADFMDTLPKEIQTEEEKAANKVDFMWDDYHKDAMSGKDVVTEDDWDDWDDEEDDGHVIYVRD

SEQ ID NO: 30978 - protein, 450 aa, Vibrio fischeri ES114
MNPINVAKFGGTSVANFEAMTKSASVIEQNPNTHLVVISACSGVTNLLVELANGVQDNHRKKAILEGLKTIHFSVLDQLADPLIPEQAILDILDDIEKTAETAASQSNDKLTDHLVSCGELMSTHLFTQLLIERGNPAVRFDIRTVLRTDSRFGKGEPQLNDISRLAQKKLTPLCQQQIVVTQGFIGSDSEGNTTTLGRGGSDYSAALIAESVDACGLEIWTDVPGIYTTDPRIAPKASPIPEISFSEASEMANYGAKILHPSTLLPALRHQIPVFVGSSKEPEKGGTWIKEKVDSTPLFRALTLRCNQTMVTLHSPSMFHAYGFLAEVFKILAKYQISVDLITTSEVSVALTLDQTNTNGKAPELPLEAQQELEELCTVEVEHNLCLIALIGNKMSHSKGSAKQVFGTLEEFNLRMICYGASQHNLCFLLHESESKQAVKILHKELFEQ

SEQ ID NO: 30979 - protein, 324 aa, Vibrio fischeri ES114
MATQFDFCKAGKNVLQIEIDALTQLSNYINDDFTKACQLMLECKQKVVVMGMGKSGHIGNKIAATLASTGTPSFFVHPGEASHGDLGMIEKGDIVIAISNSGEASEILALLPVIKRLGITLITMTGKPESSMAKVADVNLQITVPQEACPLGLAPTSSTTATLAMGDAFAVALLQARGFTADDFALSHPGGALGRKLLLLLSDIMHTGDELPMVTADALIKTALLEVSEKGLGMTAIVDNEQKVIGIFTDGDLRRLLDNKIDIHTQTIGEVMTHSPAVANPNLLAVEGLNLMQDKKINGLLLCDETHRLVGALNMHDLLKAGVM

SEQ ID NO: 30980 - protein, 657 aa, Vibrio fischeri ES114
MAKNLILWLVIAVVLMSVFQSFGPGDSSGRSIDYTTFVKEVGNSQVQEATFNNREIKVMKRDGTRYVTYMPVFQDPKLLDDLINQNVIVKGTPPEEQSLLESIFISWFPMILLIGVWIFFMRQMQGGGGKGAMSFGKSKAKMMTEEQIKTTFDDVAGCDEAKEDVKELVDYLREPSRFQKLGGKIPTGVLLVGPPGTGKTLIAKAIAGEAKVPFFSISGSDFVEMFVGVGASRVRDMFEQAKKSSPCIIFIDEIDAVGRQRGAGVGGGNDEREQTLNQMLVEMDGFEGNEGIIVIAATNRPDVLDAALLRPGRFDRQVVVGLPDIRGREQILQVHMRKVPLGAGVEPSLIARGTPGFSGADLANLVNEAALFAARGNKRVVSMVEFELAKDKIMMGAERKSMVMSEETKESTAYHEAGHAIVGRLVPEHDPVYKVSIIPRGRALGVTMYLPEQDRISMNRQHLESMISSLYGGRLAEELIYGVDKVSTGASNDIERATDIARKMVTQWGFSDALGPLLYAEDQGDPFSGHGGSHQPKHVSPETLQLIDAEIRTIIDRNYARARQILEDNMDIMHAMKDALMKFETIDAGQIDDLMDRKADIREPQGWGDNNPQPQAKTEAPVEKEETESKAEEKVEETKEQPTSTDETKNDSESSEK

SEQ ID NO: 30981 - protein, 861 aa, Vibrio fischeri ES114
MRLDRFTSKFQMAISDAQSLALGQDHQYIEPTHLMVALLNQDGSTIRPLLTLLNVDVTQLRSKLTEILDKTPKVTGIGGDVQLSSNMGVIFNLCDKVAQKRKDAYISSEIFMLAAIEDKGPLGNLLRELGLTEPKISKSIDEIRGGEKVNDQNAEEKRQALEKFTVDLTERAEQGKLDPVIGRDDEIRRTIQVLQRRTKNNPVIIGQPGVGKTAIVEGLAQRIINGEVPEGLKNKRVLSLDIGALVAGAKFRGEFEERLKAVLNELAKEEGSVILFIDEVHTMVGAGKGEGSMDAGNMLKPALARGELHCVGATTLDEYRQYIEKDPALERRFQKVLVDEPTVEDTVAILRGLKERYEIHHHVEITDPAIVAAASLSHRYISDRQLPDKAIDLIDEAASSIRMEIDSKPESLDKLDRKIIQLKIEQQALVKESDDASLKRLDSLNLELMQKEREYAELEEVWKAEKAALSGTQHIKTELETARSNMEIARRAGDLNRMSELQYGRIPELEKQLDLAAQAEMQEMSLLKNKVTDAEIAEVLSRQTGIPVNKMLEGERDKLLKMEEVLHHRVIGQAEAVEAVSNAIRRSRAGLSDPNRPIGSFLFLGPTGVGKTELCKSLANFMFDSEDAMVRIDMSEFMEKHSVARLVGAPPGYVGYEEGGYLTEAVRRKPYSVLLLDEVEKAHPDVFNILLQVLDDGRLTDGQGRTVDFKNTVIIMTSNLGSEKIQQHFGELNYAGIKEVVMDVVSQHFRPEFLNRVDETVVFHPLAQEHIKNIASIQLQRLEKRLNEKDYQLQVTDEALNLIAEAGFDPVYGARPLKRAIQTYIENPLAQDILSGKLRVGEVIKLKVKNEQLIATQNDDF

SEQ ID NO: 30982 - protein, 419 aa, Vibrio fischeri ES114
MSVLNGQTSVFLEMKMKLPIYFDYSATCPVDKRVADKMVQYMTMDGYFGNPASRSHRYGWQAEEAVDTARENIADLLNADPREIVFTSGATESDNLAIKGAAHFYNKKGKHIITCKTEHKAVLDPCRQLEREGYEVTYLEPESNGLIDLAKLEAAMRDDTVLVSIMHVNNEIGVIQDIAAIGELCRSRKIIFHVDAAQSAGKIPLDVQEIKVDLISLSAHKIYGPKGIGALYVRRKPRIRLEAQMHGGGHERGFRSGTLATHQIVGMGEACRIAKEEMQKDYDHCLAMRDRLLDGIKDMEAVHINGDLDQRVPSNLNISFEFVEGESLLMALKDLAVSSGSACTSASLEPSYVLRALGLNDELAHSSIRFSFGRYTTAEEIDHAVSQISQAVNKLRDMSPLWDMYKEGIDLNTVEWAHH

SEQ ID NO: 30983 - protein, 183 aa, Vibrio fischeri ES114
MSKPAVFIDRDGVINVDHGYVHKRDDFEYIDGVFEATKKLKEMGYLLVLVTNQSGIARGMFTEDQFEILTEWMDWNFADNGVDFDGIYYCPHHPEATVEKYKEACDCRKPNPGMLVSAQRFLDIDMENSIMIGDKKEDMMAAQAASVGTRILVRTGKPVTEEGEALATAVLDSVADVPKFLSA

SEQ ID NO: 30984 - protein, 408 aa, Vibrio fischeri ES114
MQSIILGVAMFTIIVLALVLVILFAKSKLVPSGDITISVNGDADKAIITQPGGKLLSALGSAGIFVSSACGGGGSCGQCRVKVKSGGGDILPTELDHISKGEAREGERLACQVSMKTDMEIELPEEIFGVKKWECTVISNDNEATFIKELALAIPEGEEVPFRAGGYIQIEAEPHHIKYSDFDIPEEYRGDWDKFNLFRYESIVNEHSIRAYSMASYPEEKGIIKLNVRIATPPPNNPDVPPGVMSSYIWSLKAGDKCTISGPFGEFFAKDTDNEMVFIGGGAGMAPMRSHIFDQLLRLKSKRKMSYWYGARSKREMFYVEDFDGLAADNENFVWHCALSDPMPEDNWDGYTGFIHNVLYENYLRDHEAPEDCEYYMCGPPMMNAAVIGMLKDLGVEDENILLDDFGG

SEQ ID NO: 30985 - protein, 332 aa, Vibrio fischeri ES114
MQNIKFSQFGRNPEVSTVPDMKLFAGNATPELAQRIADRLYISLGDATVDRFSDGEVAVQINENVRGSDVFIIQSTCAPTNDNIMELVVMIDALRRASAGRITAVIPYFGYARQDRRVRSARVPITAKVIADMLSNVGVDRVLTIDLHAEQIQGFFDVPVDNIFGTPVLLDDMRTRGLENPVVVSPDLGGVVRARATAKALGDVDIAIVDKRRPRANVSEVMNLIGDVDGRDCVIVDDMIDTGGTLCKAAEALKERGAKRVFAYATHAVFSGSAPQNIANSVLDQVIVTDSITLSKEMAATGKVTELSLSRMLAEAIRRISNEESISAMFDH

SEQ ID NO: 30986 - protein, 269 aa, Vibrio fischeri ES114
MSYNKPSEFVQTMIDVGEAKIKTSSRDLILRGTMAGIILSLAVVVAITTIVQTGVGIVGALVFPVGFCILSLMGYDLVTGVFGLAPLAKFENRKGVSWGRVFRCWGLVGLGNLIGSLIVAALIALSLTMNFSVEPNAVGQKFMAVATARTVGFENLGMDGWITCFVRGILCNLMVCLGVIGNMTARSVAGKIAAMWLPIFIFFALVFEHAVVNMFLFPLGMMLGADFGITTWLSYNLIPTILGNIVGGLLFTCIPLYLTHVKTAPSLDA

SEQ ID NO: 30987 - protein, 555 aa, Vibrio fischeri ES114
MCSIFGILDIKSDPTPLRTTALEMSKKLRHRGPDWSGIYSSDKAILAHERLAIVGLNSGAQPLYSEDKKHILAVNGEIYNHKELREKYADNYTFQTDSDCEVILALYREKGADLLEDLNGIFAFILYDEEKDEYLIGRDHIGIIPMYHGYDEHGNYYVASEMKALVPVCKSISEFPPGHFYSSKDTEPTRYYLRDWMDYDAVKDNPTSKEDLTQALEDAVKRQLMTDVPYGVLLSGGLDSSITSAVAKRFAAMRIEDDEKSEAWWPQLHSFAVGLEGAPDLKAAREVADKLGTVHHEMTYTIQEGLDAIRDVIYHIETYDVTTIRASTPMFLMGRKIKAMGIKMVLSGEGADEIFGGYLYFHKAPNKKEFHEETVRKLLALNMFDCARANKSLAAWGVEGRVPFLDKEFIDVAMRLNPQDKMCGNGKMEKHILRECFEHYLPEAIAWRQKEQFSDGVGYSWIDTLRETAEAKVTDQQMESAKFRFPYNTPTTKEAYVYREIFEELFPLEDAAKCVPGGPSVACSSAKAIEWDESFQNCVDPSGRAVQAVHNEAYD

SEQ ID NO: 30988 - protein, 552 aa, Vibrio fischeri ES114
MSETETRPTNFIRQIIDEDLKSGKHSSVHTRFPPEPNGYLHIGHAKSICLNFGIAQDYQGQCNLRFDDTNPEKEDIEYVESIKNDVNWLGFQWSGDIQYSSNYFDKLYGYAVELIEKGLAYVDELTPEQMREYRGSLKEPGKNSPYRDRSVEENLALFEQMRDGKFKEGTICLRAKIDMASSFIVLRDPVIYRVRFATHHQTGDKWCIYPMYDFTHCISDALEGITHSICTLEFQDNRRLYDWVLENITIDCQPRQYEFSRLNLEYTVMSKRKLNQLVTEKLVNGWDDPRMPTVSGLRRRGFTSASIREFCKRIGVTKQENMIEFSSLESCIRDDLNESAPRAMAVLEPVKLVIENYEEGKVETLNIANHPNKPEMGTREVPFTREVYIEQDDFREEANKKYKRLVLGKEVRLRGAYVIQANRIEKDEAGNITTIFCSYDEDTLGKNPADGRKVKGVIHWVSADKALPAEIRLYDRLFTVPNPGAADDFAATINPESLVVKNGFVEPSLATAEAEVGYQFERTGYFCADNKDSSADALVFNRTVGLRDTWAG

SEQ ID NO: 30989 - protein, 721 aa, Vibrio fischeri ES114
MSRTIMLVPISAGVGLTSASLGVLRSMERKGVSVSFYKPISQPRHGGDQPDLTTSIVTSSSDIKAAEPTTISRAEELLRNEQSDVLLEEIVARYKSISQGTDVTLIEGLVPTRKHPFANQLNGEIAKTLGAEIVFVATPGTDNPSQLKERIEVACSNFGGTKNKQIAGVIINKLNAPVDEAGRTRPDLSEIFDDADATTKTNLEVMQIFNSSPIRVLGCVPWKVDLIATRAIDMAKHLNAEIINEGDIATRRIKSITFCARSLPHMIEHFKPGSLLVTSADRPDVIVAACLAAMNGVEIGAILLTGGYEIPQSIAELCKPALESGLPIFTAQGNTWQTSLNLQSFSLEVPADDKERIEFVNEHVASHIDGPWIDSLSEGTEGIRRLSPPAFRYQLTEFARKAAKRIVLPEGDEPRTVKAAAICAERGIATCVLLGNPEEIRRVAAQQGVELGAGVEIIDSDSVRENYVARLVELRGAKGMTEVVAREKLQDSVFLGTMMLEAGEVDGLVSGAVHTTANTIVPPFQIIKTAPDASIVSSIFFMLLPDQVLVYGDCAINPDPTAEQLAEIAIQSADSAMAFGIDPRVAMISYSTGESGKGADVDKVREATKIAQEKRPDLVIDGPLQYDAAIMENVAASKAPNSPVAGKATVFVFPDLNTGNTTYKAVQRSADLVSIGPMLQGMRKPVNDLSRGALVDDIVYTVALTAIQADQAAQAEEKVIN

SEQ ID NO: 30990 - protein, 398 aa, Vibrio fischeri ES114
MSKLVLVLNCGSSSLKFAVVDAESGAEHLTGLAECLGLPEARMKWKLDGKHEAQLGAGAAHVEALSFMVETILASKPELKANLGAIGHRIVHGGEQFTKSALITDEVLKGIQDAATFAPLHNPAHIIGIEAAKANFPGLKNVAVFDTAFHQTMPEESYLYALPYNLYKEHGIRRYGMHGTSHLFITREVAGLLNKPVEEVNIINCHLGNGASVCAIKNGESVDTSMGLTPLEGLVMGTRCGDIDPAIVFHLHDALGYSVEQINNMLTKESGLQGLTQVTSDCRFVEDNYGEKEEATRAMDVFCHRLAKYVAGYTATLEGRLDAITFTGGIGENSAPIREMVLNRLGIFGIEVDGEANLKARFGGEGTITTANSRIPAMVISTNEELVIAEDTAKLAGL

SEQ ID NO: 30991 - protein, 372 aa, Vibrio fischeri ES114
MIIGVPKEIKNHEYRVGMIPASVRELISHGHTVFVETKAGSGIGFTDEDYIAVGASILPTAEDVFAKAEMIIKVKEPQAVERAMLREGQILFTYLHLAPDLPQTKDLIKSKAVCIAYETVTDNMGRLPLLAPMSEVAGRMSIQAGAQTLEKSNGGRGLLLGGVPGVEPAKVVIVGGGVVGANAARMAVGMRADVTILDRNIDTLRHLDEEFQGRAKVVYSTVDAIEKHVLEADLVVGAVLIPGAAAPKLITAEHIKRMKPGAAVVDVAIDQGGCFETSHATTHADPTYIVDDVVHYCVANMPGAVARTSTFALNNATLPYIIKLADKGYKAALLEDKGFLGGLNVIHGKVTCKEVAESFDLEYVAPETAISA

SEQ ID NO: 30992 - protein, 111 aa, Vibrio fischeri ES114
METIDKIKQQISENHILLYMKGSPKLPSCGFSSQAAQALMNCGEKFAYVDILQNPDIRAELPAYAQWPTFPQLWVEGELVGGCDIIIEMFQKGELQPLIKEAAERNAPAAE

SEQ ID NO: 30993 - protein, 860 aa, Vibrio fischeri ES114
MINVELPQLIKTLDKESHLALEQAAQLCVTRGGNEVLCEDFILAALNNPQSFWNKACQQYNVSTDVLIEALQHGRKSTSSESNHPVLSTALIEWLQESYLFSMLEMQLSEVLAANLLLTLLSHPNKYGHTPYYRELSVIPVASLKQQVEGLVSCANRDSHSSAEHQNALDAYTTNYTQLAKDNKIDPVLCRDSEIRQMIDILARRRKNNPMIVGEAGVGKTALVEGLAIKIAQGEVPDMLENVALLSLDLGLLQAGASIKGEFERRLNLVITAVQESPTPIILFIDEAHTLIGAGGQAGSNDAANLLKPALARGELRTIGATTWSEYKKYIEKDPALARRFQPVKVNEPNVTQAITILRGLAERYEESHGVYVRDDAIIAAAELSARYISGRQLPDKAIDLLDTACARVKINLKAKPESLERLLHIIAITQRELDCVLRDQQAGINIEENTITLLKEKLSQTHLDAEQLEQEWQTQKELAEALLTSRIDIAQCNDEEEKHRLICNQQEIHQALSDAQHTHSLVNYETCPSLVAEVVSHWTGIPMSTLQRGQATQVLTIKSKLKEQIKGQDQAVIALEKAIQATAAGLNNPNSPTGVFLFVGPSGVGKTQTAQAIADLMYGGEQFLTTINMSEFQEKHTVSRLIGSPPGYVGYGEGGVLTEAVRQRPYSVVLLDEVEKADPEIMNLFYQIFDKGVANDGEGREINFKQTLIIMTSNLASDQIEALCNQEEKPTTDALTKAIRPTLNQYFKPALVGRMTVVPFFPLDMESMEALVDIRLKQLTEQLSLQQITLHYDEAIIQHIAQSCTLTETGARNIDAIINGQLKPAFSSQILLALARKEPLTSISLCIDENGQVFCEFED

SEQ ID NO: 30994 - protein, 357 aa, Vibrio fischeri ES114
MSKQQKILFIDRDGTLIVEPPVDFQVDRLDKLKFEPLVIPSLLSLQDAGYRLVMVTNQDGLGTDSYPQDEFDAPHNMMMEFFESQGVKFDDVLICPHFEEDNCSCRKPKLGMVKEYLQGGRVDFQHSVVIGDRQTDLQLAENMAIRGIQYHPETMNWPAILKDLTVNARTAEVIRTTKETDIKVFVNLDEQGGNEITTGLGFFDHMLDQIATHGGFQMKINVEGDLHIDDHHTIEDTALALGEALKEALGDKRGIGRFGFSLPMDECLAQCALDLSGRPYLKFDAEFSREQVGDLSTEMVVHFFRSLTDTLACTLHLSSSGYNDHHIIESLFKAFGRTLRQAIKVEGNELPSSKGVL

SEQ ID NO: 30995 - protein, 650 aa, Vibrio fischeri ES114
MKKHFELIDKPTFFGAILLLCAVVVPLLVFPAEGAEWIAVAKTFMTDKLGFAYLGLGLAAFFFMIYIVFSDIGQIKLGDPDEKPEFALASWAAMLFCGGIGASILYWGTIEWAYYYQNPPFQLEAGSEEAVRWAATYGLFHWGPIAWCIYMIPAIPIAYFFYVRKQPVLKVSAALMPVIGEANSFGKLGKVIDVLFIFGLLGGAATTLGLAAPLINEGISYLFGIPATTGSQILVLMVCTAIFAYSSYMGMDKGIKILSNINFWGALGLLLFVLVCGPTIFMLETGLDSIGRMLSNFFVMATWAEPFGGMGTFADTHFPQDWTIFYWAWWLVFAPSMGLFVARISRGRTIKQMVSGAVFFGSLGCAMYFIILGNYGLSLQLSGELDVVGILNSEGATRAIFSVLEQLPFSTFVIAVFTLLCVIFTATTFDSISYILASVVQTNVTEDPMRWNRLFWAFTLSFMPSALMFMGGLATLQTAAIVGGLPLLVIAIMLMISGVKAAMLDLSHQDNYVDPVINISDLPDVDPWSKEGQALARFEQLRDNAIEAADLEREANDAIWMLKKQLRKEALARGESSVDLGDAPDEIIEKLRQLTDDSTNAKEAKLAASELAQEARVAFDALMRQKVEEETLQANEEAKLAIKTRLNTPS

SEQ ID NO: 30996 - protein, 193 aa, Vibrio fischeri ES114
MDTHLLSHLLLHKPINYSSSLLSHPLLKNGHFKSAAVLVPIVKRETGYHLILTQRAPHLRHHPSQISFPGGKVEPDDLSLIHTAIRETNEEIGINPAHIKPLVKLNTIPTISGYKVTPIVALIDENYTTAIDYGEVSSTFEAPINHLINPKNTYNHHVFNKKHTYNLIFIPFDKKLIWGVTAEIIHAMNYITA

SEQ ID NO: 30997 - protein, 518 aa, Vibrio fischeri ES114
MSTNSKQTSDKLVPTLTIGFILLFLLAAFVDLSAFTATIQSLFMSVSTMFGYWWQWLMIITFVLAFIIAMSSYGKIKMGSESKPTIGTFRWVAMIMCTLLAGGGVFWSAAEPIFHFITPSPSFSDVKGGTLAAVAPALSQSFLHWGFLAWAVLGTLSTIVLMYAHYNCGVKLRPRALLYPILGDKLENHWIGSVIDACSIIAVAAGTIGPIGFLATQLSYSLTVLTGLESSLMSQIIILTVIVSIYSVSAFSGMDKGLQWLSRMNVIGAVALLVAILVLGPTGFIFKEFGMAFGTYIQHLPEMSLSTADPSWNSWWTWFFWGWFIGFAPMMAIFIARISQGRSIRELIITVAIIAPIATNFWFSSLGGTGIFLELQTPGSISQPLQEAGLPAVLLASLAQLPFSFLLIPAFLVLTTTFVATTGDSMAYSIAMAVEGTDTPSRYQRLFWAVMMGVVAGVLLIAGDGGLNALQSFIVITAVPVSFLVGVTFITGPIAVLRMKSAELESKSSVDCTKSVTV

SEQ ID NO: 30998 - protein, 632 aa, Vibrio fischeri ES114
MGKIIGIDLGTTNSCVAVLDGDTPRILENAEGERTTASVIAYTDGETLVGQPAKRQAITNPQNTLFAIKRLIGRRFEDEEVQRDIEIMPYKIIKADNGDAWVEAKGQKMAAPQVSAEILKKMKKTAEDFLGEEVTGAVVTVPAYFNDAQRQATKDAGRIAGLDVKRIINEPTAAALAYGLDKKGGDRTIAVYDLGGGTFDISIIEIDNVDGEQTFEVLATNGDTHLGGEDFDNRLINFLVDEFKKEQGFDLKNDPLAMQRVKEAAEKAKIELSSAQQTDVNLPYVTADATGPKHMNIKVTRAKLESLVEDLVVRTLEPLKVALADADLTIDGITDVILVGGQTRMPMVQAKVAEFFGKEARRDVNPDEAVAMGAAVQGGVLAGDVKDVLLLDVTPLSFGIETMGGVMTKLIEKNTTIPTKADQTFSTAEDNQSAVTIHVLQGERKQASYNKSLGQFNLEGIQAAPRGMPQIEVTFDLDADGILNVSAKDKSTGKEQKITIQASGGLTDEEIEAMVQEAEANKDADKKFEELVTARNQADQMIHGTKKQIEEAGDDLPTDEKEKIEAAITALEGVKSGDDKEAIDAKTQELMQAAQKLMEIAQQKAQAQQGAQAGEQPKQEDDVVDAEFEEVK

SEQ ID NO: 30999 - protein, 404 aa, Vibrio fischeri ES114
MQNIGMSSKLSSVCYDIRGPVLKHAKRMEEEGHKILKLNIGNPAPFGFDAPDEILVDVIKNLPTSQGYCDSKGIYSARKAVVQHYQRRGLLDLDVEDVYIGNGASELIVMAMQALLNNGDEMLVPAPDYPLWTAAVSLSGGKPVHYMCDEGADWYPDLDDIKKKITPNTKGIVLINPNNPTGAVYSRDFLLQVVEIARQNNLIIFADEIYDKVLYDGAVHTTLATLAPDILTVTFNGLSKAYRVCGFRGGWMFLNGPKDHAQGYIAGLDMLASMRLCANVPMQHAIQTALGGYQSINELLLPGGRLLEQRDKAYDLITQIPGVSCVKPKGAMYLFPKLDPKMYKIKDDQKFVLDFLIKEKVLLVQGTGFNWPTPDHFRIVTLPRVDDLETAIGRLERFLHTYKQ

SEQ ID NO: 31000 - protein, 73 aa, Vibrio fischeri ES114
MATGTVKWFNNAKGFGFICPEGEDGDIFAHYSTIEMEGYRTLKAGQAVTYEIHEGPKGFHASEIKLLEGENAK

SEQ ID NO: 31001 - protein, 477 aa, Vibrio fischeri ES114
MAQSKVLIVEDDEGLREALIDTLELAGYEWVEADSAETALLILKKEPVDIVVSDVQMAGMGGLALLRSIKLNWPNLPVLLMTAYANIEDAVSAMKDGAIDYMAKPFAPEVLLNMVSRYAPVKTEQTGDAIVADEKSLKLLKLADKVARTDANVMVLGPSGSGKEVMSRYIHNNSQRSEGPFVAINCAAIPDNMLEATLFGYEKGAFTGAVQACPGKFEQAQGGTILLDEISEMDLNLQAKLLRVLQEREVERLGGRKSIKLDVRILATSNRDLKKYVEEGNFREDLYYRLNVFPIAWPPLKDRKGDIAPIAQHLVERHCQKQGLPVPSFSAEATQKLEAYPWPGNVRELDNVVQRALILAEEHTITADDVLLEGVDWADADGLQQVVSGEAPTIRPEQQVPSINETGAPATSEESEVLVASSGLGGELREQEFIIILETIKACDGKRKDVAEKLGISPRTLRYKLAKMRDAGIDIPS

SEQ ID NO: 31002 - protein, 634 aa, Vibrio fischeri ES114
MGKIIGIDLGTTNSCVAVLDGDTPRVLENAEGERTTASVIAYTDGETLVGQPAKRQAVTNPQNTLFAIKRLIGRRFEDEEVQRDIEIMPFKIVKADNGDAWVEAKGQKMAAPQVSAEVLKKMKKTAEDFLGEEVTGAVVTVPAYFNDAQRQATKDAGRIAGLDVKRIINEPTAAALAYGLDKKGGDRTIAVYDLGGGTFDISIIEIDNVDGEQTFEVLATNGDTHLGGEDFDNRLINYLVSEFEKEQGINLKNDPLAMQRVKEAAEKAKIELSSAQQTDVNLPYVTADATGPKHMNVKVTRAKLESLVEDLVLRSLEPLKVALADADLSVDEITDVILVGGQTRMPMVQAKVAEFFGKEARRDVNPDEAVAMGAAVQGGVLAGDVKDVLLLDVTPLSFGIETMGGVMTKLIEKNTTIPTKADQTFSTAEDNQSAVTIHVLQGERKQATYNKSLGQFNLEGIQPAPRGMPQIEVTFDLDADGILNVSAKDKATGKEQKITIQASGGLTDEEIEAMVQEAEANKDADKKFEELVTARNQADQMIHGTQKQIEEAGDALPADEKEKIEAAIKALEEVKSGNDKEAIDAKTQELMQAAQKLMEIAQQKAQAQQGADAGEQPKQDDDVVDAEFEEVKDK

SEQ ID NO: 31003 - protein, 321 aa, Vibrio fischeri ES114
MSDEKEFDLDAYFASEKKSEVSDNQHCGFIAIVGRPNVGKSTLLNQILGQKISITSRKPQTTRHRIMGVDTDGDYQAIYVDTPGLHIEEKRAINRLMNRAANSSLSDVNLVLFLVDGTHWTPDDEMVLNKLKKSEFPTVLLVNKVDNVKDKKDVMTHLQEMTEKMDFVDVVPISAKTGSNVDVVHKLVREYLPKAVHHFPEEYVTDRSQRFMASEIIREKLMRFTGEELPYSVTVEIERFDYNPKMDGFHINGLILVERHGQKKMVIGKNGEKIKTIGREARIDMEGLFDRKVYLELWVKVKSGWADDERALRSLGYIDDL

SEQ ID NO: 31004 - protein, 805 aa, Vibrio fischeri ES114
MTIPCSRQLHKFGGSSLADPECYRRVATILKEYSNEHDLIVVSAAGNTTNRILEWIDDLSKDGRLAHETLESLRTYQQGLITELLSAENAEPLLTVLYQELIAIGQLHAPLTEVQQADVLGHGEVWSSRLLSAYLNQIDLQAAPLDSRTFLRAERAAQPEVDRVQSWPLFKEQVAQHPHGRIVITGFMARNQRGETVLLGRNGSDYSATMIGVLGEVSCVTIWSDVAGVFSADPRKVEDACLLPLLRLDEASELARLAAPVLHSRTLQPVAQSALDLSLRCSYQPESGSTRIERVLASGRGAKIVTSLEDVYLIQLGFGRGQYFERAQQEVLSLLTRSQLQPLALEPQADQFTLLLAYTSEVVNEALEVLQNSAVHAEIKLKEGYSMVAAVGAGVTANAIHSHGFYHQLKNCPLEFVYASESGLSLVAILRKVDTSSIINAIHNSLFQAQKRVGLILCGHGNIGSQWLSLFTQQKRQLEKRHGMQFSLIGVVDRERCWLDFDGLNSTEVVAKFDDEATNYTDFDWIEKVGAVQGYDDVVVLDVTASADLANRYSKIAEQGMHLISANKVAGSAPSADYQAVIDAFAKTSRHWLYNATVGAGLPINHTVRDLRESGDEIIALSGIFSGTLSWLFQQYNGDVPFTELVDLAWQQGLTEPDPRHDLDGSDVMRKLVILAREAGLHIEPNQVKVESLVPSELLETCLDDFLSQGEVINELLLERLTKAQKEQKVLRYVARLNKDGSATVGIEALPEYHALANLLPCDNIFAIESKWYKDNPLVIRGPGAGREVTAGAIQSDLNRIASLF

SEQ ID NO: 31005 - protein, 276 aa, Vibrio fischeri ES114
MKKHRAFLKWAGGKYSLVEEIQRHLPDARKLIEPFVGAGSVFLNTDYDHYLLADINPDLINLYNHLKDEPERFIEDARALFQPEYNKKEVYLALRVEFNQCTDTYRRSLLFLYMNRHGFNGLCRYNKKGGFNVPFGSYKKPYFPEKEMVFFAEKAKKATFVCEGYMDTFKRARKGAVVYCDPPYAPLSTTANFTSYAGNGFSLDDQAALADIAEKAAFERDIPVLISNHDTTLTRRLYHGATLNTIKVKRTISRNGAGRNKVDELMALFHAPKCTE

SEQ ID NO: 31006 - protein, 403 aa, Vibrio fischeri ES114
MSKKVEVNKVVVAYSGGLDTSVIIPWLKENYNCEVIAFVADVGQGEEELEGIEAKAIASGATECYVVDLKEEMVSEYIFPTLKTGALYEGKYLLGTSMARPIIAKAQVEVARNVGADALCHGCTGKGNDQIRFEGAFAALAPDLHVIAPWREWDLVSREECLDYLAERNIPCTASLTKIYSRDANAWHISTEGGVLEETWNAPNDDCWAWTVDPEQAPNESETISLKVEKGAVVAVDGKAMTPYEVVVYLNEKGAKHGVGRIDIVENRLVGMKSRGCYETPGGTIINEALRAVEQLVLDKTSFEFREELGIKASHLVYDGRWFTPLCKSILAASEELAKDVNGEVVIKLYKGHATVIQKRSDNSLYSEEFATFGADEVYDQSHAEGFIRLYSLSSRIRALNSK

SEQ ID NO: 31007 - protein, 394 aa, Vibrio fischeri ES114
MLNKNTIDIVKSTIPLLAETGPALTAHFYDRMFTHNPELKDIFNMSNQRNGDQREALFNAICAYAGNIENLEVLLPAVEKIAHKHTSFMITAEQYNIVGGHLLATLDEMFSPGQEVLDAWGEAYGVLANVFIQREEQIYQENNNQEGGWRGLREFELIAKEKESELITSFTFIPTDDQPVSRFKPGQYLGIYLTPEEFENQEIRQYSLSSAPQEKTYRISVKREDGGKASNYLHDQLNIGDKVNLAAPAGDFFLDVEASTPVTLISAGVGLTPTLSMLETLTEHNANVSWLHATENGTQHAFREHVNTLAEAHSHISTYTWYNQPQEVDKLNQHFDFSGFMNLSEVKDEIITDNGHYYFCGPVGFMQHVAKQLVELGVSEDRIHYECFGPHKVL

SEQ ID NO: 31008 - protein, 526 aa, Vibrio fischeri ES114
MSRNKDKYSIDNTDYTVGQDNVQKWGFDVHNPVFGISAGLIALFLVAVAVTDPESAKTVLDGFKWKIINAFDGLFMWSANIFVIFCLALIVSPFGKIRLGGDKAKPDYSMVSWIAMLFAAGMGIGLMFWGVAEPVAYFTGWFETPLGVEANTPEAAKLALGATMFHWGLHPWAIYGVVALSLAFFAYNKGLPLSMRSIFYPILGDRTWGWPGHVVDILAVLATLFGLATSLGLGAQQAASGFHHVFGMDGGLGLQVAIIFVVTLLAVVSVMRGIDGGVKVISNINMLIAIVLLAFVALVTFAISMGTIPTTVMGYVENIIPLSNPHGRVDEAWMHGWTVFYWSWWISWSPFVGMFIARVSRGRTVREFITAVLIVPTLFTVLWMSIFGGVAIDQVVNNIGTLGSKGLTDVSLAMFEMFDALPMGNILSMIAVVLVLVFFITSSDSGSLVIDSITAGGKVDAPMPQRVFWAFMEGAIAVALLWVGGTEAIQALQAGAISTALPFTLILLAMCVSLLMGMRTEKYNRS

SEQ ID NO: 31009 - protein, 69 aa, Vibrio fischeri ES114
MSKSTGIVKWFNEEKGFGFITQDNGGADVFVHFRAIATEGFKTLKEGQAVTFTVEQGQKGPQAADVTPA

SEQ ID NO: 31010 - protein, 293 aa, Vibrio fischeri ES114
MEITNVSFIGLGVMGYPMARHLQNAGYSTTVYNRTEAKAKQWAAEYKGQSASTPREASEGSDIVFVCVGNDDDVRSVIYGDDGILAGLKPGAILVDNTTTSATLAIELAKACEVQGNHFIDAPVSGGQAGAENGVLTVMCGGNEDAFDIAKPVIQSFAKAITLLGENGQGQRCKMANQICIAGVLKGLSEALILAEKANLDIDLVVETLKHGAAGSWQMENRASTMAQDKFDFGFAIDWMRKDLGICLDEAKVHDIKLPLTEEVDQEYQNLQEQGLGRMDTSVLIKAIKQKTN

SEQ ID NO: 31011 - protein, 226 aa, Vibrio fischeri ES114
MKLLIIEDETKTGEYLKKGLTESGYTVDLSQDGADGLYNATTNQYDLIILDVMLPKLNGWQILQTLRNCENDTPIIMLTAKDQIDDRVKGFELGANDYLIKPFAFAELKARVENALRAKSVISQPSSNELVLHDLKLDLLKRTATRNQDNITLTAKEFSLLELFMRKQGEVLSRTTIASLIWDMNFDSDTNVIDVAVKRLRSKIDKPYDTPLIHTVRGMGYKMDEC

SEQ ID NO: 31012 - protein, 533 aa, Vibrio fischeri ES114
MSTTDKYSIDSTDYEVGQDNIQKWGFDIHNQVFGISAGSIILFLTVLLVMDPTEAKSLLDGVKWQIINNFDGLFMWSSNIFLIFCLALIISPFGKIRIGGDKAKPEHSTISWMAMLFAAGMGIGLMFYGVAEPLAYFTDWYGTPLDVEPFTEEAKKLALGGTMYHWGIHPWAIYGLVALSLAFFTFNKGLPLSMRSVFYPILGDRTWGWFGHIIDILTVLATLFGLATSLGLGAQQAAGGINHVFGTDGGVNMQIGVIIFVTMLAMISVIRGIDGGVKLLSNVNMLVAVALLFFIIFIGFSDVMSALPLTVTGYIENIIPLSNPHGREDEGWMHGWTVFYWAWWISWSPFVGMFIARVSKGRTVRQFLISVMIIPTLATALWMSAFGGIAIEQVVNKVGELGENGLQDITMALFNMYDAIPMSTALSVISIVLIMVFFVTSSDSGSLVIDSITAGGKVDAPVPQRIFWATVQGSIAAVLLWVGGTEAMQALQAGTVSTALPFTFILLMMCVSLIKGFSTEKFGTTPNMGKAKA

SEQ ID NO: 31013 - protein, 634 aa, Vibrio fischeri ES114
MSESITEFRQLALDESILSALDDMGFVAPTPIQAASIPLLLEGRDALGKAQTGTGKTAAFSLPLLNKINLKQHNPQAIIMAPTRELAIQVAAEVKNLGRNIKGLKVLEIYGGASIVDQMRALSRGAHIIVGTPGRVKDLLNRDRLNLGEVHTFILDEADEMLKMGFVDDVTWILEKAPDTAQRILFSATMPPMVKTIVDRYLREPARVDVAGTNHTVDKVEQNFWVVKGVEKDEAMSRLLETEETDASIVFVRTRQDTERLADWLSARGFKAAALHGDIPQSQRERTVDNIKNGVIDILVATDVVARGLDVPRITHVFNYDIPFDVESYIHRIGRTGRAGRKGKAILLVRTNQMRMLRTIERVTKSTMEEIQLPHRDQVAECRLAALAAELQADKEFVALDAFTDLINKLQETLEIDATTIAAMLLKRQQGKRPLFYKGPDPMIAAMERAKNRRSDRGERGERGGRGDRPERGERRQYNNDDFDTYQLEVGREQGVQVKDIVGALANELGFTKGSIGAIKLAPGHTYVQLPKKMSADVAGKLKKLRIRQNETKAVVVEGVDLTIERRPRTGGGRDDNRGGNGRGGYRGNRENREGGRGGERRFDRNKGGDHRGSHRGERAPGGRGRGRSERSEG

SEQ ID NO: 31014 - protein, 487 aa, Vibrio fischeri ES114
MSSNLSPNTTGQFNPSEMMEQAAYYALAKSKKPTSMVIGLAIMAGVFIGIAFIFYTTVTTGNTETGWGISRFAGGLAFSLGLILVVIGGGELFTSSVLSAIAVANRQISFGKMLGIWGKVYIGNFIGAGLLLALVVSAGMYQNDGGQWGLNALNIAQHKLHHQPLEAFALGILCNLLVCLAVWLTFCSTNMLTKAVMVILPVAMFVSSGFEHCVANMFMVPLGIAIQQLAPPEFWLAVSATPEQYADLNIVNFITANLIPVTLGNIVGGAGLVGLAYWSIFTRPQLKAVETSQITPLFTDSDSKEMIKMNANKTVNQFMDVNTYVLQPEMPVEVALDNLLDRHLSGAIVVNSHSEVVGFFSEHDVLVELWCEDYLPEKGRTVADLMKTDITSISPKDTLLQLAEFYAIDKPKLYPTTDMGIATSYSTLSINDRARDMRVSKPRILPVIENNQLVGVVTREDVVSQLRSIYGERMEAVKAEEVDAIVA

SEQ ID NO: 31015 - protein, 269 aa, Vibrio fischeri ES114
MKHLLLSFFGLSLLFSSSAFSATTIDSTPNLDKIQERGTLKVGLSTFVPWAMRNQQGELIGFEVDVAKRLAADSGLKVEFIPTAWDGIIPSLISGKFDVIIGGLTITDERSKSVLFTVPYSHSGVQVAANKELTDGFTREDFNSRRVKFAARRGSITVAAIKEHFPKAKVLQFDDEAQAFQEVLNGNAHAVAASTPKPEFDTLKHADILYLPFKERLSQGNEAFAVRLGEEDKKAYFDEWIKARTDDGWLKERYDYWFTSLDWQSQTAK

SEQ ID NO: 31016 - protein, 582 aa, Vibrio fischeri ES114
MTIEKDESTWATFKRLWPHISLYKAGLGVAVVALVINALSDTYMISLLKPLLDEGFGSADSDFLKKMPFIILAMMFIRGLSGFVSGYCMSWVASNVVMRIRRQIFNHFMHMPVSYFDQESTGRLLSRITYDSEQVAAATSKALVNIVRESASIIGLLGLMFWNSWQLSLVLVVIAPVVAFAISNVSKRFRKISKNMQTAMGSLTATSEQMLKGHKVVLSYGGQKVESERFDNISNHMRQQNMKMVVAQGLANPIIQMIASFALVTVLYLASVDSIKETLTPGTFTVVFSAMFGLLRPLKGLTSVTSDFQRGMAACQTLFELMDMDKEKDDGTIEKDTVKGDIKVDNVTFTYPTADGPALRNVSFDLPAGKTIALVGRSGSGKSTIANLFTRFYDVDSGEISLDGDKIEDYRLPNLRKHFALVSQNVHLFNDTVANNIAYASEGKFTRLEIEKAAELAYASDFINKMDDGFDTMIGENGASLSGGQRQRIAIARALLQNAPVLILDEATSALDTESEKAIQSALDELQKDKTVLVIAHRLSTIEDADQILVVDEGEVVERGNHAELIAHDGAYAQLHRIQFGD

SEQ ID NO: 31017 - protein, 407 aa, Vibrio fischeri ES114
MTNSLSIGALESFLIAIAVLFLGHFINSKIDLFKKYNIPEPIVGGLIVAFAITALHFQGISLEFSLPLQNTFMLMFFSTVGLAANYTQLLKGGTKVFLFLAVASFYIIIQNAVGVGLASAMGLDPLLGLIAGSITLSGGHGTGAAWSQTFADAYQLNTLELAMASATFGLIMGGLIGSPIAQRLIQKHKLESEYGAGTNTHDRFPELITYNEREEDKVTAKKVIEILFILLICVTGSKHLSNFVNSFDIAWLKIPDFVYALFIGVFITNICEVTKVKKIDNETVDILGTVSLSLFLAMALMSLKLWNIFDLAIPFLIILTIQTIVLALFSYFITFRVMGSNYDAAVMVGGHCGFGLGATPTAVMNMGSLVSRFGPSPQAFMVVPIVGAFFIDITNLIILQAYISFIG

SEQ ID NO: 31018 - protein, 407 aa, Vibrio fischeri ES114
MSHTLSIGALESFLIAIAVLFLGHLINSKVVLFKKYNIPEPIVGGLIVAFFITILHFQGINLKFSLPLQSTFMLMFFSTVGLAANYKQLIKGGSKVFIFLAVASVYIIIQNGIGVSLASLMGLDPLMGLIAGSITLSGGHGTGAAWSHTFAETYHLNTLELAMASATFGLIMGGLIGSPIAQKLIHKHNLESEYGTGIDTHSRFPEVVTYNEREEEKVTAKKVIETLFVLLLCVVGAGHLGDFIATFDIAWLKIPDFVYALFIGVFITNITEVTKVHKIDTETVDILGTVSLALFLAMALMSLKLWNIFDLAIPLLIILSIQTVVLALFSYFVTFRVMGSNYDAAVMAGGHCGFGLGATPTAVMNMGSLVSRFGPSPQAFMVVPIVGAFFIDIVNLIILQTYISFIG

SEQ ID NO: 31019 - protein, 518 aa, Vibrio fischeri ES114
MQIGVPREVFAGETRVAATPKTVEQLIKLGFTVAVESNAGILASFDDSAFEQAGATVVSTDDVWKSELILKVNAPQVNEATGVDEFDLIQDGASLISFIWPAQNEELLAKLATKNINVLAMDSVPRISRAQALDALSSMANIAGYRAVVEAAHEFGRFFTGQITAAGKVPPAKVLVAGAGVAGLAAIGAAGSLGAIVRAFDVRPEVKEQVQSMGAEFLEVDFKENSGSGDGYAKEMSDEFNKKAEELYAAQAKDVDIIITTALIPGRPAPKLITKEMVDSMKAGSVIVDLAAANGGNCEYTVKDEVFVTENGVKIVGYTDMVGRLPTQSSQLYGTNLVNLLKLLCKEKDGNINIDFEDVVLRGVTVVKEGEVTWPAPPIQVSAQPQAKAAPKAKVEPKVEEPTSPIKKFAMIGAGIAAFGWVASVAPAAFLAHFTVFVLACVVGYYVVWNVSHSLHTPLMSVTNAISGIIIVGALLQVGQGNGVVSFLAFIAVLIASINIFGGFAVTKRMLEMFRKDK

SEQ ID NO: 31020 - protein, 68 aa, Vibrio fischeri ES114
MAKATGTVKWFNEEKGFGFIAQENGPDVFAHFSQIQSEGFKTLKEGQAVSFDVEQGQKGPQAANIVAL

SEQ ID NO: 31021 - protein, 398 aa, Vibrio fischeri ES114
MMNNEYVLVINSGSSSLKFAVIDSVSGDAVLSGLGECFGLEDARMSWKYQGQKTEIAIEGNENHHKIAIGKLVGLTEELGFTDGIVAIGHRIVHGGEKFTKTVRINEEVTKEIESLSDLAPLHNPAGAIGIRAAVEAFPSLPQFAVFDTAFHQTMPKRAYTGAIAKELYTDFGVRRYGFHGTSHYFVSREAAKMINKPIEESNFISVHLGNGASVCAIKDGNSVDTSMGFTPLSGLMMGTRCGDLDPGIIEYLLKKGWSQEQVFNSLNKESGFLGVSGLTSDARGILEAMEEGHEGATLAFQVFTYRVAKYVASYLAALDSLDGIIFTGGIGENSLPIRREILSNLKILGFVEDVAGNEGARFGADGIIAKSEMLNAVAMVIPTNEEFVIAQQSVELL

SEQ ID NO: 31022 - protein, 282 aa, Vibrio fischeri ES114
MNQFDSLLPPQMAERAAEVGVAKATKDPFKSFLLAITAGIHIGIAFIFYTTVTTGAESMPWGMSHFVGGLAFSLGLILVVVTGGELFTSSVLTLVARASGKISWKNLCANWAVVYVGNFIGAMLLVGIMLVAKQYMNDGGTVGINTMKIAQHKLHHGFWQAIALGLMCNVLVCVGVWMTFSGRTLTDKILVMILPVAMFVSAGFEHCIANMFQIPMAIGIKTFASPEFWAASGYSALDFADLTLHNFVINNLIPVTIGNIIGGGIFVGMGYWIIYLREPNHH

SEQ ID NO: 31023 - protein, 498 aa, Vibrio fischeri ES114
MIENNFAITGTFIAYLIMMLAIGVYAYKRTSSSSDYFLGGRTLGPWPAALSAGASDMSGWLLLGLPGYAYAAGLESLWLAGGLLVGTWLNWLICAKRLRTYSMTTDDSLTLPEFLSRRFNDKSKLIQTISALFILLFFLFYTSSGLVAGGKLFETVFGLDYKVAVVIGTLCVVSYTLFGGFLAVAWTDLVQGLLMSAALMIVPIAAMQGGFGQLSSELVAINPELMTLWTGMDGKPLSAIAIISLVAWGLGYFGQPHILARFQASRTNKDLTTARRIAVAWTALSMFGAVLVGLVGLLYVTGSMPGETIDGEKVFMLLVNAIFHPVVAGILLAAILAAIMSTADSQLLVSSSALSEDLYKQLVKKDATSKEIVNVGRFAVVALSVIALLLAMNPDSSVLGLVSYAWAGFGAAFGPAIVLSLYWKGMNRNGALAGIIVGGVTIVVWKQLTGGLFDVYEIVPGIIFATIAIIVVSKLTGKPEDKVLKQHEEFERNLVEFE

SEQ ID NO: 31024 - protein, 308 aa, Vibrio fischeri ES114
MNDLFTKKDYSLYSNAMTFMRRPLVQNPIDNDADIVVLGAPLDMATSGRPGARLGPDAIRRASVNLAWEGKKFPWDFNVFDHTKVIDSGDLVFDTGDAEDLTVRLEAAADAILNSGKTLLGLGGDHFITLPLLRAYGKKYGEMALIHFDAHTDTYSHGSRYDHGTMFYHAPNEGLISPEHSVQIGIRTEYDQKDHGFNVINAMQANDMSVDAIIEQVKGIVGDKPVYLTFDIDCLDPAFAPGTGTPVCGGLNSDKILKIIRGLQGINMVGMDVVEVSPAYDQSDITALAGATIALELLYVWTANRLNK

SEQ ID NO: 31025 - protein, 343 aa, Vibrio fischeri ES114
MTQFIWPTTPVQLRCDKKWQETDDTISLQLISEHKETFDFKPGQFVSIGIEIEGKMEYRAYSISSVPNQDFLQLTIKRVEGGKVSNYLIDQLNEGDEVAVLAPTGPFNSIDCKPRKKVALLSAGCGITPVMSMAKSWIAQNKDIDITFIHMEKSPEHTIYFDELQYLNKQHANFNLKLLLKNPQFTDYPQGRLDQEWLVTLCPDLVERTVFLCGPTNFMQDMKKYVEAIGLDMAHFFQESFTPIEPEIMETVENSGVVQFDVPAFGVSKEIDKGATLADVLEESGVPIIIACRSGMCGSCKCKVTKGDVSRTSTETLSEEDIAQGYTLACSSQVQSDVEVSLV

SEQ ID NO: 31026 - protein, 69 aa, Vibrio fischeri ES114
MSKTTGIVKWFNEEKGFGFITQDNGGADVFVHFRAIASEGFKTLAEGQKVSFEVEQGQKGPQAANVVAL

SEQ ID NO: 31027 - protein, 1131 aa, Solanum lycopersicum
MASGSRTKHSYHNSSQGQAQSSGTSNMNYKDSISKAIAQYTADARLHAVFEQSGESGKSFDYSQSVKTTTQSVPERQITAYLTKIQRGGHIQPFGCMIAVDEASFRIIAYSENACEMLSLTPQSVPSLDKSEILTVGTDVRTLFTPSSSVLLERAFGAREITLLNPIWIHSKNSGKPFYAILHRVDVGIVIDLEPARTEDPALSIAGAVQSQKLAVRAISHLQSLPGGDIKLLCDTVVESVRELTGYDRVMVYKFHEDEHGEVVAESKRSDLEPYIGLHYPATDIPQASRFLFKQNRVRMIVDCHATPVRVTQDESLMQPLCLVGSTLRAPHGCHAQYMANMGSIASLTLAVIINGNDEEAVGGGRNSMRLWGLVVGHHTSVRSIPFPLRYACEFLMQAFGLQLNMELQLASQLSEKHVLRTQTLLCDMLLRDSPPGIVTQSPSIMDLVKCDGAALYYQRKYYPLGVTPTEAQIKDIVEWLLAYHGDSTGLSTDSLADAGYPGAASLGDAVCGMAVAYITSKDFLFWFRSHTAKEIKWGGAKHHPEDKDDGQRMHPRSSFKAFLEVVKSRSSPWENAEMDAIHSLQLILRDSFKDAEASNSKAIVHALGEMELQGIDELSSVAREMVRLIETATAPIFGVDVNGRINGWNEKVVELTGLSAEEAKGKSLVHDLLYKESQESAEKLLYNALRGVEGKNVEIKLRTFGAEQVEKAVFLVVNACSSRDYTNSIVGVSFVGQDVTGEKIVMDKFIHIQGDYKAIVHSPNPLIPPIFASDENTSCSEWNTAMEKLSGWSREEIVGKMLVGEIFGSCCRLKGPDAMTKFMIVLHNAIGGQDTDKFPFSFFDRNGKYVQALLTANKRVNMEGDTIGAFCFIQIASPELQQALRVQRQQEKKCYSQMKELAYICQEVKSPLNGIRFTNSLLEATNLTEYQKQYLETSAACERQMSKIIRDVDLENIEDGSLTLEKEDFFLGSVIDAVVSQVMLLLREKGVQLIRDIPEEIKTLTVHGDQVRIQQVLADFLLNMVRYAPSPDGWVEIQLRPSMMPISDGATVVHIELRIICPGEGLPPELVQDMFHSSRWVTQEGLGLSMCRKMLKLMNGEIQYIRESERCYFMIILDLPMTRKGPKSVG

SEQ ID NO: 31028 - protein, 819 aa, Neurospora crassa
MASTSTAGDRIKKFLGIPADERLNDTACYVDGSFVESEPTTQDFLNEIRPTVQGTLNYLRELFPFVNWIFHYNLTWLLGDFIAGVTVGFVVVPQGMAYAKLANLAPEYGLYTSFVGFVLYWAFATSKDITIGAVAVMSTIVGNIIANVQKDHPDFDAGDIARTLAFISGAMLLFLGLIRFGFIVEFIPIVAISAFMTGSAISIAAGQVSTLMGIPNINSREETYKVIINTLKGLPNTHLDAAMGLTALFGLYFIRWFCTQMGKRYPRQQRAWFFVSTLRMVFIIILYILVSWLVNRHVKDPKKAHFKILGHVPSGFQHKGAPRLDNEILSAISGDIPTTILVLLIEHIAISKSFGRVNNYIINPSQELVAIGFTNLLGPFLGGYPATGSFSRTAIKAKAGVRTPLAGIFTAVLVLLALYALTSVFFYIPNSALAAMIIHAVGDLITPPREVYKFWLTSPLEVVIFFAGVFVSIFTSIENGIYVTVAASGAVLLWRIAKSPGKFLGQTEIYTAPRELVRGSKDSGLTQSLLQKSEHHTAFLSLDRDDLSNPELQISTPWPGIFVYRFGEGLNYVNSAKHLDNLTIHVFKHTRRTELNKFEKLGDRPWNDPGPRRGQAFLTDELVSRPTLRAIILDFSAVNCIDVTAAQALQDLRNQFDRYAHPDKVEWHFAGVSNRWTKRALVASGFGVDSLRTAKVQRENHKGGVQEVDQGPLVAIGPSVSASDIEAVPVGTSGSGSTDEKRPEGEGGATNGGMEKGSANGEDISTVPTATSADACALARDAGGKRLVPVFGINRPFFHIDVATALKSAVRNTGVVAAE

SEQ ID NO: 31029 - protein, 179 aa, Gossypium hirsutum
MLVFGYLRDALTVGWAPSDHSSPTFPPIKPEPQEIPTETAVKEVPTVANAAVPTVVPAKGKHYRGVRQRPWGKFAAEIRDPAKNGARVWLGTFETAEDAALAYDKAAYRMRGSRALLNFPLRVNSGEPDPVRITSKRATPEPSTSSSSGSENGSPKRRRKVGSAAPVVAQAGLNMGFGA

SEQ ID NO: 31030 - protein, 262 aa, Gossypium hirsutum
MCGGAIISDFVAPKYDRKLTGDDLWSELDIFSDLLGFDNNGKSFVNHQFHNNNNNKLINPKDNQLNKERSETIQKTSQVTKKVEKTQRTRKNFYRGIRQRPWGKWAAEIRDPQKGVRVWLGTYNTAEEAARAYYEAAKRIRGDKAKLNFPQTPTKNQAASPALTQLPPAKKRCIVPELTQPSFQTDSPPYPMGLGYGRSEDYKPIEVVESELELKEQIWSLESFLGLETNHETMTQLSGNGGTDSLELWTLDDLVTQYKQRR

SEQ ID NO: 31031 - protein, 500 aa, Neisseria gonorrhoeae FA 1090
MAKVLVVPVSAGLNTSAAAQAFAKALDAQVFQAVDATAETLLAQGKSDDWFDALVGKVAALDAANLVIEGIAPDADKIYLAGKNVELALSLDAAAVFAVRSDNTDADALAHQLNLAKQFFAAAPGVLEGFVVDGAAASVAEAAAEKTGLTFFGSSDALKDVSVLAGREAKRLSPAQFRYNLIDFARQAGKRIVLPEGAEPRTVQAAAICHEKGIARCVLLAKREEVEAVAKERGISLPDSLEIIDPASLVEQYVEPMCELRKSKGLTPEDARKQLQDTVVLGTMMMAQNDVDGLVSGAVHTTANTIRPALQLIKTAPGASLVSSVFFMLLPNQVLVFGDCAVNPNPTAQQLADIAIQSADSAKAFGIDPKVAMISYSTVNSGSGPDVDTVIEATKLAREKRPDLAIDGPLQYDAATVPGVGKSKAPGSPVAGQATVLVFPDLNTGNCTYKAVQRSANVLSVGPLLQGLRKPVNDLSRGALVEDIVFTIALTAVQAKQMEG

SEQ ID NO: 31032 - protein, 311 aa, Neisseria gonorrhoeae FA 1090
MKANMDIETFLAGERAAGGYRCGFVAIVGRPNVGKSTLMNHLIGQKISITSKKAQTTRNRVTGIYTDDTAQFVFVDTPGFQTDHRNALNDRLNQNVTEALGGVDVVVFVVEAMRLTDADRVVLKQLPKHTPVILVINKIDKDKAKDRYALEAFVAQVRAEFEFAAAEAVSAKHGLRIANLLELLKPYLPESVPMYPEDMVTDKSARFLAMEIVREKLFRYLGEELPYAMNVEVEQFEEGDGLNRIYIAVLVDKESQKAILIGKGGERLKKISTEARLDMEKLFDNKVFLKVWVKVKSGWADDIRFLRELGL

SEQ ID NO: 31033 - protein, 103 aa, Neisseria gonorrhoeae FA 1090
MASIHDQIKEVVTTHRVVLFMKGTKQFPQCGFSSRAVQILNAAGCTDYVAVNVLENPEVRQGIKEYSDWPTIPQLYVNGEFVGGSDILMEMYEAGELQELLKA

SEQ ID NO: 31034 - protein, 655 aa, Neisseria gonorrhoeae FA 1090
MGNTFKSILVWVALGIGLMAAFNALDGKKEDNGQIEYSQFIRQVNNGEVSGVNIEGSVVSGYLIKGERTDKSTFFTNAPLDDNLIQTLLNKNVRVKVTPEEKPSALTALFYSLLPVLLLIGAWFYFMRMQAGGGGKGGAFSFGKSRARLLDKDANKVTFADVAGCDEAKEEVQEIVDYLKAPNRYQSLGGRVPRGILLAGSPGTGKTLLAKAIAGEAGVPFFSISGSDFVEMFVGVGASRVRDMFEQAKKNAPCIIFIDEIDAVGRQRGAGLGGGNDEREQTLNQLLVEMDGFESNQTVIVIAATNRPDVLDPALQRPGRFDRQVVVPLPDIRGREQILNVHSKKVPLDESVDLLSLARGTPGFSGADLANLVNEAALFAGRRNKVKVDQSDFEDAKDKIYMGPERRSMVMHEDEKRATAYHESGHAIVAESLPFTDPVHKVTIMPRGRALGLTWQLPERDRISMYKDQMLSQLSILFGGRIAEDIFVGRISTGASNDFERATQMAREMVTRYGMSDKMGVMVYAENEGEVFLGRSVTRSQNISEKTQQDIDAEIRRILDEQYQVAYKILDENRDKMETMCKALMEWETIDRDQVLEIMAGKQPSPPKDYSHNLRENADAAEDNAPHAPTREKTEAPAPADTASTESGQQPENKA

SEQ ID NO: 31035 - protein, 327 aa, Neisseria gonorrhoeae FA 1090
MAAYDSLMVFTGNANPELAQRVVRHLDISLGNASVSKFSDGEVAVELLENVRGRDVFILQPTCAPTNDNLMEILTMADALKRASAGRITTAIPYFGYARQDRRPRSVRVPISAKLVANMLYSAGIDRVLTVDLHADQIQGFFDIPVDNIYATPILLNDIKQQRIENLTVVSPDIGGVVRARAVAKSLNADLAIIDKRRPKANVAEVMNIIGDIQGKTCLIVDDMIDTANTLCKAAVALKERGAERVLAYASHAVFSGEAVSRIASSEIDQVVVTDTIPLSEAAKNCDRIRQVTIAGLLAETVRRISNEESVSYLFNEEVMTGSMLLP

SEQ ID NO: 31036 - protein, 660 aa, Neisseria gonorrhoeae FA 1090
MVILTTLFFVCVLVVLVLTVPDQVQMWLDRAKEVIFTEFSWFYVLTFSIFLGFLLILSVSGLGNIRLGRDEDVPEFGFLSWLAMLFAAGMGVGLMFFGVAEPLMHYFSDITVGAPEHRQQQALLHTVFHWGVHAWSVYGTIALALAYFGFRYKLPLALRSCFYPLLKEKISGRFGDAIDIMALLATFFGIITTLGFGASQLGAGLQEMGWIAENSFGVQVLIIAAVMSLAVVSAISGVGKGVKVLSELNLGLAFLLLFFVLAADPTVYLLSAFGDNIGNYLGNLVRLSLKTYAYEREHKPWFESWTVLYWAWWCSWAPFVGLFIARISKGRTIREFVFGVLLIPGLFGVLWFTVFGNTAIWLNDGVAGGMLEKMTSSPETLLFKFFNYLPLPELTSIVSLLVISLFFVTSADSGIYVLNNITSRDKGLSAPRWQAVMWGVLMSAVAVLLMRSGGLGNLQSMTLIVSLPFALLMLIMCFSLWKGLSADKKYFETRVNPTSVFWTGGKWKERLVRIMSQTQEQDILKFLKHTASPAMHELQRELSEEYGLSVRVDKMFHQDEPAIEFVIRKETMRDFMYGIKSVGQDVSDQLINDGKLPHIRHQTTYKPYAYFFDGRVGYDVQYMNKDELIADILKNYERYLMLLDDVGQELMAHEQVELAE

SEQ ID NO: 31037 - protein, 127 aa, Neisseria gonorrhoeae FA 1090
MFRTILGGKIHRATVTEADLNYVGSITVDQDLLDAAGICPNEKVAIVNNNNGERFETYTIAGKRGSGVICLNGAAARLVQKGDIVIIMSYIQLSEPEIAAHEPKVVLVDGNNKIRDIISYEPPHTVL

SEQ ID NO: 31038 - protein, 404 aa, Neisseria gonorrhoeae FA 1090
MTVKTPVYLDYAATTPVDKRVAEKMIPYLTETFGNPASNSHAFGWTAEEAVEKARADIAALINADPKEIVFTSGATESDNLAIKGAANFYKTKGKHLITVKTEHKAVLDTMRELERQGFEVTYLGVQENGLIDLEELKAAIRDDTILISIMWVNNEIGVVQNIPAIGEICRERKIAFHVDAAQACGKVPVDVEAAKIDLLSMSAHKVYGPKGIGALYVRRKPRVRLEAQMHGGGHERGFRSGTLPTHQIVGMGEAFRIAKEELAQDTAHYLKLRDIFLKGIEGIEEVYINGDLEHRAPNNLNVSFNFVEGESLIMAVKELAVSSGSACTSASLEPSYVLRALGRNDELAHSSLRITFGRMTTEEEVQFAAELIKSKIGKLRELSPLWEMFKDGIDLNSIEWAAH

SEQ ID NO: 31039 - protein, 462 aa, Neisseria gonorrhoeae FA 1090
MSIKFADLNLDKNILSAVSSEGYESPTPIQAQAIPFALEGCDIMASAQTGSGKTAAFLLPTLQRLTKRSEKPGKGPRALVLAPTRELAAQVEKNALAYAKNMRWFRTVSIVGGTSFGYQTRALSKPVDLIVATPGRLTDLMQSGKVDFERLEVLILDEADRMLDMGFIDDIETIVEATPADRQTLLFSATWDGAVGKLARKLTKDSEIIEVERVDGQGKIEEQLLYCDDMRHKNRLLDHILRDANIDQCVIFTSTKAMTEVIADELYEKGFAANCLHGDMPQGWRNRTLTDLRKGRCKILVATDVAARGIDVPTITHVINYDLPKQAEDYVHRIGRTGRAGRTGIAITFAEVNEYVKVHKIEKYINRKLPELTIEGMEPARKRKSAGGKPKGKGGWGDRKSGGRRGDHKPGKEGFGGKTRGEGFKKEGFKKDSFKKTGEGFKGKRKAGDSFAGKSERRYKDR

SEQ ID NO: 31040 - protein, 563 aa, Neisseria gonorrhoeae FA 1090
MNASQLISSLTQTVGEKYIITDPAKTEQYRQGYRFGEGKALAVVRPGSILEMWKILQACVEADVIVITQAANTGLTGGSTPDGNDYDRDIVIVNTMRMNIIQTINNNEQVVCLPGSTLNQLELLLKPLGREPHSVIGSSCIGASVLGGVCNNSGGALVQRGPAYTEMALFAQINEEGRLELVNHLGIDLGDTPEEILTNLQGHHYQKKDIKQDAGKGHDHAYCEHVRQVDEPTAARFNADPARHYEASGCAGKLMVFAVRLDTFPQEKQTAVFYIGTNDINELTDIRRAALGEFESLPVSGEYIHRHAFDIADVYGKDTFYVIKKFGTHQLPKLFDLKARVDRFGKKVSFLPKHFSDKAMQFVSKFLPDHLPKSMRDYRDKYEHHLILKMGGKGVDEARAFLKEYFSHHGGAFFECNAEETQAAMLHRFAVASAAIRYRSVHDDEVEDLVALDIALRRDDRDWFEKLPPEIDNKIIHKLYYGHFMCHVFHQDYIIKKGNGCMALEHEMLHLLDQRGAQYPAEHNVGHLYEAKPALKQFYRKLDPTNSFNPGIGKTSKKKNWAE

SEQ ID NO: 31041 - protein, 405 aa, Neisseria gonorrhoeae FA 1090
MALIVHKYGGTSVGSPERIKNVAKRVAKARAEGHDIVVVVSAMSGETNRLVALAHEMQEHPDPRELDVVLATGEQVTIGLLAMALKDIGVDAKSYTGWQVSLKTDTAHTKARIESIDDEKMRADLAAGKVVIVAGFQGISSEGNISTLGRGGSDTSAVALAAALKADECQIYTDVDGVYTTDPRVVPEARRMDTVTFEEMIELASLGSKVLQIRSVEFAGKYKVRLRVLSSLQDGGNGTLITFEEDDNMERAAVTGIAFDKNQARINVRGVPDKPGVAYQILGAVADANIEVDMIIQNVGSEGTTDFSFTVPRGDYKQTLEILSERKDSIGAASIDGDDTVCKVSAVGLGMRSHVGVAAKIFRTLAEEGINIQMISTSEIKVSVLIDEKYMELATRVLHKAFDLG

SEQ ID NO: 31042 - protein, 408 aa, Neisseria gonorrhoeae FA 1090
MPSETFRSKKMSQKLILVLNCGSSSLKGAVLDNGSGEVLLSCLAEKLNLPDAYITFKVNGEKHKVDLSAHPDHTGAVEALMEELEAHGLDSRIGAIGHRVVSGGELYNESILVDDEVIAGIEKCIPLAPLHNPAHLLGLRAAQSIFKGLPNVVVFDTSFHQTMPEVAYKYAVPQELYEKYGLRRYGAHGTSYRFVADETAHFLGKDKKDLRMVIAHLGNGASITAVANGESRDTSMGLTPLEGLVMGTRSGDIDPSVFGFLAENANMTIAQITDMLNKKSGLLGISGLSNDCRTIEEEAAKGHKGAKLALDMFIYRLAKYIGSMAVAAGGLDALVFTGGIGENSDIIRERVIGYLGFLGLNIDQEANLKARFGNAGVITTADSKAVAVVIPTNEELMIAHDTARLSGL

SEQ ID NO: 31043 - protein, 859 aa, Neisseria gonorrhoeae FA 1090
MRYDKLTAKFQQALAEAQSLALAADSSYLEAGFVLKALLDDQNSGAAALLAHAGVNVPQVKQRLQQHLNSLPKVSGQGGEILPSRELQAVLNLMDKAATKRGDAYIASELFLLALVQQNDAAGKILKEAGATEQNINAAIDAVRGGQNVNDANAEDQRDALKKYTLDLTQRARDGKLDPVIGRDDEIRRAIQVLQRRTKNNPVLIGEPGVGKTAIVEGLAQRIVNGEVPESLRNKRLLVLDLAALIAGAKYRGEFEERLKGVLNDLAKDDGNTLIFIDEIHTLVGAGKTDGAMDAGNMLKPALARGELHCIGATTLDEYRQYIEKDAALERRFQKVLVGEPSVEDTIAILRGLQERYEIHHGIDITDPAIVAAAELSDRYITDRFLPDKAIDLIDEAASRVKMEKETKPEAMDKIDRRLIQLRMEKAHVEKEKDDASKKRLELIDEEIDGLQKEYADLDEIWKAEKAISDGAANIKKQIDEVKIKIEQAKRQGDLALASKLMYEDLEHLEKQRAAAERADTDSTKPANKLLRNNVGAEEIAEVVSRMTGIPVSKMMEGERDKLLKMEEVLHRRVVGQNEAVRAVSDAIRRSRSGLADPNKPYGSFLFLGPTGVGKTELCKALAGFLFDSEDHLIRIDMSEYMEKHAVARLIGAPPGYVGYEEGGYLTEQVRRKPYSVILLDEVEKAHPDVFNILLQVLDDGRLTDGQGRTVDFKNTVIVMTSNIGSQHIQQMGTQDYEAVKEVVMEDVKEHFRPEMINRIDEVVVFHGLDQANIRSIAKIQLKGLEKRLEKQNLRLTVSDAALDIIAKAGFDPIYGARPLKRAIQSEIENPLAKALLAGNYAPESEIKVEADGDRLKFA

SEQ ID NO: 31044 - protein, 573 aa, Neisseria gonorrhoeae FA 1090
MPSEAICLKKTMLNKDQFADNHFIRTIIEDDLKSGKHEAVQTRFPPEPNGYLHIGHAKSICLNFGLAYIYDGLCNLRFDDTNPEKENDEYVNAIKEDVEWLGFHWAGEPRFASDYFDRLYDYAVGLIKDGKAYVDDLTPEEMREYRGTLTEAGKNSPYRDRSIEENLDLFTRMKNGEFPDGSKTLRLKIDMAAGNINMRDPVIYRIRRAHHHNTGDKWCIYPMYDYTHCISDAIEGITHSLCTLEFEAHRPLYDWVLDNIPALHATRPRQYEFSRLELLYTITSKRKLNQLVVEKHVSGWDDPRMPTISGMRRRGYTPEGVRLFAKRAGISKSENIVDMSVLEGAIREELENSAPRLMAVLNPLKVTLTNFQAGKTQSRRAAFHPNHEEMGDREVPVSQTIYIEADDFAENPPKGFKRLIPGGEVRLRHGYVIKCGEVVKDEAGNVVELKCSIDHDTLGKNPEGRKVKGVIHWVSAEHAAEIKVRLYDRLFTVERPGAVRGEDGEYLPFTDFLNPESVKEITAYAEPAAKDLPAESRWQFERIGYFVTDRQDHGKDTPVFNRTVTLKDSWQPK

SEQ ID NO: 31045 - protein, 575 aa, Neisseria gonorrhoeae FA 1090
MQLSGAQIIVQSLKAEGVEYVFGYPGGAVIEIYDALFQLNKFKHILTRHEQAAVHAADAYARVSGKVGVALVTSGPGVTNALTGIATAYTDSIPMVVISGQVGNSLIGTDAFQEVDTVGITRPCVKHNFLVTDINELVETIKKAFQIAASGRPGPVVLDVPKDVTQAMAKFSYPQEDIFIRSYQPVVQGHIGQIKKAVQMLASAKRPVVYFGGGVVLGNASEELTRFVRMTGAPCTGTLMGLGAYPSGDRQFLGMLGMHGTYEANLAMQNADVVLAVGARFDDRVVSVPSKFFEKAKKVIHIDVDPSSIAKRVKADIPIVGDVKNILSEMVALWQKQESVPSEDALGKWWKTIEEWRSRDCLWFDNGSEIIKPQYVIQKLAEITGNSAIITSDVGQHQMFAAQYYPFERPRQWLNSGGLGTMGVGLPYAIGAKLAAPDQDVFCITGDGSIQMNIQELSTCFQYRIPVNVITLNNGYLGMVRQWQEIYYGGRESETYFDSLPDFVKLAEAYGHIGIRVDNKSDVEGALLEALNQKDRLVFIDFLTDQKQNVMPMVGNGKGLDEMVLPPHMRTDGKA

SEQ ID NO: 31046 - protein, 289 aa, Neisseria gonorrhoeae FA 1090
MSAETYTQIGWVGLGQMGLPMVTRLLDGGIEVGVYNRSPDKTAPISAKGAKVYGSTAELVRACPVIFLMVSDYAAVCDILNGVRDGLAGKIIVNMSTISPTENLAVKALVEAAGGQFAEAPVSGSVGPATNGTLLILFGGSEAVLNPLQKIFSLVGKKTFHFGDVGKGSGAKLVLNSLLGIFGEAYSEAMLMARQFGIDTDTIVEAIGGSAMDSPMFQTKKSLWANREFPPAFALKHASKDLNLAVKELEQAGNTLPAVETVAASYRKAVEAGYGEQDVSGVYLKLAEH

SEQ ID NO: 31047 - protein, 405 aa, Neisseria gonorrhoeae FA 1090
MEIILGIVMFTVIVLALALMILFAKSKLVSEGDITIKVNDEKELTMPAGGKLLGALASQGIFVPSACGGGGSCGQCRVVVKSGGGDILPTELSHISKREAREGCRLSCQVNVKTDMDIEVPEEVFGVKKWECTVISNDNKATFIKELKLAIPEGEEVPFRAGGYIQIEAPPHTVAYKDFDIPKEYHEDWDKYNLWQYVSKVNEPILRAYSMASYPEEKGIIMLNVRIATPPPRVPNAPPGQMSSYIWSLKPGDKVTISGPFGEFFAKDTDAEMVFIGGGAGMAPMRSHIFDQLKRLHSKRKITFWYGARSKREMFYVEDFDQLAAEFPNFTWHVALSDPLPEDNWDGYTGFIHNVVYENHLKNHEAPEDCEFYMCGPPIMNQSVIKMLKDLGVEDENILLDDFGG

SEQ ID NO: 31048 - protein, 642 aa, Neisseria gonorrhoeae FA 1090
MAKVIGIDLGTTNSCLAISENGQTKVIENAEGARTTPSIIAYLDGGEILVGAPAKRQAVTNAKNTIYAAKRLIGHKFEDKEVQRDIESMPFEIIKADNGDAWVKAQGKELSPPQISAEVLRKMKEAAEAYLGEKVTEAVITVPAYFNDSQRQATKDAGRIAGLDVKRIINEPTAAALAFGMDKGDNKDRKIAVYDLGGGTFDISIIEIANLDGDKQFEVLATNGDTFLGGEDFDQRLIDYIIDEFKKEQGIDLKQDVMALQRLKEAAEKAKIELSSGQQTEINLPYITMDATGPKHLAMKITRAKFESLVEDLIARSIEPCRTALKDAGLSTGDIDDVILVGGQSRMPKVQEAVKDFFGKEPRKDVNPDEAVAVGAAIQGEVLSGGRSDVLLLDVTPLSLGIETMGGVMTKLIQKNTTIPTKASQVFSTAEDNQSAVTIHVLQGERERASANKSLGQFNLGDIAPAPRGMPQIEVTFDIDANGILHVSAKDKGTGKAANITIQGSSGLSEEEIERMVKDAEANAEEDKKLTELVASRNQAEALIHSVKKSLADYGDKLDAAEKEKIEAALKEAEEAVKGDDKTAIDAKAEALGTASQKLGEMVYAQAQAEAQAGEGAQANASAKKDDDVVDADFEEVKDDKK

SEQ ID NO: 31049 - protein, 512 aa, Neisseria gonorrhoeae FA 1090
MKIGIPRESLSGETRVACTPATVALLGKLGFETVVESGAGLAASLDDAAYQTAGATVADKAAVWACPLIYKVNAPSEGELPLLKEGQTIVSFLWPRQNEALVEALRAKKVNALAMDMVPRISRAQALDALSSMANISGYRAVIEAANAFGRFFTGQITAAGKVPPAQVLVIGAGVAGLAAIGTANSLGAVVRAFDTRLEVAEQIESMGGKFLKLDFLQESGGSGDGYAKVMSDEFIAAEMKLFAEQAKEVDIIITTAAIPGKPAPKLITKEMVESMKSGSVIVDLAATGGNCELTRPGELSVTGNGVKIIGYTDMANRLAGQSSQLYATNLVNLTKLLSPNKDGEITLDFEDVIIRNMTVTRDGEITFPPPPIQVSARPQQTPSEKAAPAAKPEPKPVPLWKKLAPAAIAAVLVLWVRAVAPAAFLNHFIVFVLACVIGYHVVWNVSHSLHTPLMSVTNAISGIIVVGALLQIGQGNGFVSLLSFVAILIAGINIFGGFAVTRRMLNMFKKG

SEQ ID NO: 31050 - protein, 307 aa, Neisseria gonorrhoeae FA 1090
MQYSTLAGQTDNSLVSNNFGFLRLPLNFMPYESHADWVITGVPYDMAVSGRSGARFGPEAIRRASVNLAWEHRRFPWTFDVRERLNIIDCGDLVFSFGDSRDFVEKMEAHAGKLLSFGKRCLSLGGDHFITLPLLRAHARYFGKLALIHFDAHTDTYDNGSEYDHGTMFYTAPKEGLIDPSRSVQIGIRTEHSKKLPFTVLSAPKVNEDSVEETVRKIKETVGNMPVYLTFDIDCLDPSFAPGTGTPVCGGLSSDRALKILRGLTDLDIVGMDVVEVAPSYDQSDITALAGATIALEMLYLQGAKKD

SEQ ID NO: 31051 - protein, 399 aa, Neisseria gonorrhoeae FA 1090
MSDQLILVLNCVSSSLKGAVIDRKSGSVVLSCLGERLTTPEAVITFNKDGNKRQVPLSGRNCHAGAVGMLLNELEKHGLHDRIKAIGRRIAHGGEKYHESVLIDQDVLDELKACIPFAPLHNPANISGILAAQEHFPGLPNVGVMDTSFHQTMPERAYTYAVPRELRKKYAFRRYGFHGTGMRYVAPEAARILGKPLEDIRMIIAHLGNGASITAVKNGKSVDTGMGFTPIEGLVMGTRCGDTDPGVYSYPTFHAGMDVAQVDEMLNEKSGFPGISELPNDCRTLEIAADEGREGARLALEVMTCRLAKYIASMAVACGSVDALVFTGGIGENSRNIRAKTVSYLDFLGLHIDTKANMEKRYGNSGIISPTDSSPAVLVVPTNEELMIACDTAELAGIL

SEQ ID NO: 31052 - protein, 351 aa, Neisseria gonorrhoeae FA 1090
MDGRGLKAYATPIRKFWVVLLQQRRMAMAENEKYLDWAREVLHTEAEGLREIAAELDENFVLAADALLHCKGRVVITGMGKSGHIGRKMAATMASTGTPAFFVHPAEAAHGDLGMIVDNDVVAAISNSGESDEITAIIPALKRKDITLVCITARPDSTMARHADIHITASVSQEACPLGLAPTTSTTAVMALGDALAVVLLRARAFTPDDFALIHPAGSLGKRLLLRVADIMHKGGGLPAVRLGTPLKGAIVSMSEKGLGMLAVTDGQGCLKGVFTDGDLRRLFQECDNFTGLSIDEVMHTHPKTISAERLATEALKVMQANHVNGLLVTDADGVLTGALNMHDLLAARIV

SEQ ID NO: 31053 - protein, 102 aa, Neisseria gonorrhoeae FA 1090
MYAVVKTGGKQYKVSVGEKLKVEQIPAQLDSQIELTEVLMIADGESVKVGAPFIEGAKVTAKVVAHGRGEKVRIFKMRRRKHYQKRQGHRQNFTQIEIVAIA

SEQ ID NO: 31054 - protein, 404 aa, Neisseria gonorrhoeae FA 1090
MEWAFNSYYTLIAATLVLLVGKVLVKKIKILRDFNIPEPVAGGLIAAIILFALHEAYGVSFKFEKPLQNAFMLIFFTSIGLSADFSRLKAGGLPLVVFTAIVGGFILVQNFVGVGLATALGLDPLIGLITGSVSLTGGHGTSGAWGPNFETQYGLVGATGLGIASVTFGLVFGGLIGGPVARRLINKMGRKPVENTKQDQDDNADDVFEQAKRTRLITAESAVETLAMFAACLAFAEIMDGFDKEYLFDLPKFVWCLFGGVVIRNILTAAFKVNMFDRAIDVFGNASLSLFLAMALLNLKLWELTGLAGSVTVILAVQTAVMVLYATFVTYVFMGRDYDAAVLAAGHCGFGLGATPTAVANMQSVTHTFGASHKAFLIVPMVGAFFVDLINAAILTGFVNFFKG

SEQ ID NO: 31055 - protein, 447 aa, Neisseria gonorrhoeae FA 1090
MNQNHTILQNLPVGQKVGIAFSGGLDTSAALLWMKLKGALPYAYTANLGQPDEDDYNAIPKKAMEYGAENARLIDCRAQLAHEGIAAIQCGAFHVSTGGIAYFNTTPLGRAVTGTMLVSAMKEDDVNIWGDGSTYKGNDIERFYRYGLLTNPALKIYKPWLDQQFIDELGGRHEMSEFLIANGFNYKMSVEKAYSTDSNMLGATHEAKDLEFLNSGIKIVKPIMGVAFWDENVEIEPEEVSVRFEEGVPVALNGKEYADPVELFLEANRIGGRHGLGMSDQIENRIIEAKSRGIYEAPGMALFHIAYERLVTGIHNEDTIEQYRINGLRLGRLLYQGRWFDSQALMLRETAQRWVAKAVTGEVTLELRRGNDYSILNTESPNLTYQPERLSMEKVEGAAFTPLDRIGQLTMRNLDITDTRAKLGIYSQSGLLSLGEGSVLPQLGNKQ

SEQ ID NO: 31056 - protein, 384 aa, Neisseria gonorrhoeae FA 1090
MKFIDEAKIEVAAGKGGNGATSFRREKFVPRGGPDGGDGGKGGSVWAEADENTNTLVEYRFVKRYQAKNGEKGHGSDRYGAGADDIVLKMPVGTLIRDLDTDEIVADLTYHGQRVCLAKGGKGGLGNIHFKSSVNRAPKQSTPGEEGETRSLQLELKVLADVGLLGMPNAGKSTLITAVSAARPKIANYPFTTLHPNLGVVRIDENHSFVMADIPGLIEGAAEGAGLGHRFLKHLSRTGLLLHVVDLAPFDETVNPAEEALAIINELRKYDEELYGKPRWLVLNKLDMLDEEEARARTAAFLEAVGWDYPEPDDRFQFDMETPRLFQISALTHQGTQELVHQINQYLAEKKRIEAEKAEAEKAAANVEIIEQQPKTDTGVFKPE

SEQ ID NO: 31057 - protein, 284 aa, Neisseria gonorrhoeae FA 1090
MKLNAKLKALLASAAIAVGLTACGGGSGDAQSSQSSGAATVAAIKEKGVIRIGVFGDKPPFGYVDANGKNQGFDVEIAKDLAKDLLGSPDKVEFVLTEAANRVEYVRSGKVDLILANFTQTPERAEAVDFADPYMKVALGVVSPKNKPITDMAQLKDQTLLVNKGTTADAFFTKSHPEVKLLKFDQNTETFDALKDGRGVALAHDNALLWAWAKENPNFEVAIGNLGPAEFIAPAVQKGNADLLNWVNGEIAAMKKDGRLKAAYEKTLLPVYGEKVKPEALLAE

SEQ ID NO: 31058 - protein, 187 aa, Neisseria gonorrhoeae FA 1090
MKLIILDRDGVINRDRDDFVKSADEWIPVEGSMDAVAFLTQAGCTVAVATNQSGIGRKYFTVQDLTEMHAKMHRLIRQAGGEIDGIWFCPHTGADGCNCRKPKPGMIEDILERFNAQASETWLVGDSLRDLQAIDAVGGKPALVLTGKGKKTLSQHGHELPGHTQVFDTLLDFSQYIMQENAAPQAD

SEQ ID NO: 31059 - protein, 545 aa, Neisseria gonorrhoeae FA 1090
MDFKRLTAFFAIALVIMIGWEKMFPTPKPVPAPQQAAQKQAATASAEAALAPATPITVTTDTVQAVIDEKSGDLRRLTLLKYKATGDENKPFVLFGDGKEYTYVAQSELLDAQGNNILKGIGFSAPKKQYTLNGDTVEVRLSAPETNGLKIDKVYTFTKDSYLVNVRFDIANGSGQTANLSADYRIVRDHSEPEGQGYFTHSYVGPVVYTPEGNFQKVSFSDLDDDAKSGKSEAEYIRKTPTGWLGMIEHHFMSTWILQPKGGQSVCAAGDCRIDIKRRSDKLYSASVSVPLAAIQAGAKAETAVNLYAGPQTTSVIANIADNLQLAKDYGKVHWFASPLFWLLNQLHNIIGNWGWAIVVLTIIVKAVLYPLTNASYRSMAKMRAAAPKLQTIKEKYGDDRMAQQQAMMQLYKDEKINPLGGCLPMLLQIPVFIGLYWALFASVELRQAPWLGWITDLSRADPYYILPIIMAATMFAQTYLNPPPTDPMQAKMMKIMPLVFSVMFFFFPAGLVLYWVVNNLLTIAQQWHINRSIEKQRAQGEVVS

SEQ ID NO: 31060 - protein, 279 aa, Gemmata sp. Wa1-1
MESGPEPRVVLNGDGGPVWALTFLDNERLAMGLESGVVKIWDWQKATPRNSLEQKDSNGGNIWSASMSPDGKYLMTASDDSAVTFWNLRTMSAELSFPESVSTKTAAFSPDGRHLATGNRNSKVRIWDWTGQVPLVELRHRGTVHSLTYNPDGSRLASAGSDGKVRVWNVKNVGVTRDAPVELLMELSEHRRAVYSVAYNPDGSKLASSGWDGYVRIWDAATGTQLQSIKGHDGDAWSVAFSNCGKWVASAGSDGFVKVWEIETGKEVFAYRGVAGLFM

SEQ ID NO: 31061 - protein, 306 aa, Magnaporthe grisea
MGMPPFVVDFLMGGVSAAVSKTAAAPIERVKLLVQNQEEMIRAGRLDRRYDGIVDCFKRTSQAEGVMSLWRGNTANVIRYFPTQALNFAFRDKFKAMFGYKKDKDGYAKWMAGNLASGGAAGATSLLFVYSLDYARTRLANDAKSAKGGGDRQFNGLVDVYRKTLASDGIAGLYRGFGPSVAGIVVYRGLYFGMYDSIKPVLLTGSLETNFFASFALGWCVTTGAGIASYPLDTVRRRMMMTSGEAVKYSSSFDAFKQIVAKEGVKSLFRGAGANILRGVAGAGVLSIYDQLQLIMFGKAFKGGSG

SEQ ID NO: 31062 - protein, 911 aa, Vitis vinifera
MNPEKFTHKTNETLAGAHELAMNSGHAQLTPLHVAVALITDHNGILRQAIIGAGGNEEAANSVERVFNKALKKLPTQSPPPDEIPVSTTLIKVVRRAQSSQKSRGDTHLAVDQLILGLLEDSQIGDLLKEAGVSTSRVKSEVEKLRGKEGKKVESASGDTTFQALKTYGRDLVEQAGKLDPVIGRDEEIRRVIRILSRRTKNNPVLIGEPGVGKTAVVEGLAQRIVRGDVPSNLAEVRLIALDMGALVAGAKYRGEFEERLKSVLKEVEEAEGKVILFIDEIHLVLGAGRTEGSMDAANLFKPMLARGQLRCIGATTLEEYRKYVEKDAAFERRFQQVYVAEPSVPDTISILRGLKERYEGHHGVRIQDRALVVAAQLSSRYITGRHLPDKAIDLVDEACANVRVQLDSQPEEIDNLERKRMQLEVELHALEKEKDKASKARLVEVRRELDDLRDKLQPLMMKYKKEKERIDELRRLKQKREELLFALQEAERRYDLARAADLRYGAIQEVEAAIANLEGTTDENMMLTETVGPEQIAEVVSRWTGIPVTRLGQNDKERLIGLAERLHQRVVGQDQAVSAVAEAVLRSRAGLGRPQQPTGSFLFLGPTGVGKTELAKALAEQLFDDENLLVRIDMSEYMEQHSVSRLIGAPPGYVGHDEGGQLTEAVRRRPYSVVLFDEVEKAHIAVFNTLLQVLDDGRLTDGQGRTVDFTNTVIIMTSNLGAEHLLSGLVGKCTMQDARDRVMQEVRRHFRPELLNRLDEIVVFDPLSHDQLRKVARLQMKDVASRLAERGIALAVTDAALDVVLAESYDPVYGARPIRRWLEKKVVTELSKMLIREEIDENSTVYIDAGVSGKGLAYRVENNGGLVNASTGQKSDVLIRIPNGQRSDAAQAVKKMKIEEIEDEEDEMDL

SEQ ID NO: 31063 - protein, 492 aa, Pinus pinaster
MMSASFKCPVSLSGVENICNGDKAIPGINSRTLFTGSSFLQRHHSANKIFFRTCGKKGSCCLFNIRAMAETDSGNGVPQLDISLSPRVAALKPSKTMAITDLATALKQAGVPVIGLAAGEPDFNTPDAVAEAGIKAIQDGYTRYTPNAGTMEIRTAICHKLKEENGLSYTPDQILVSNGAKQCIMAAAVLAVCSPGDEVIIPAPFWVSYTEMARLADATPVIIPTLLSDDFLLNPEVFSSKLNENSRLLILCSPSNPTGSVYPRELLEEIAKIVAKHPKLLVLSDEIYEHIMYPPAKHTSFASLPGMWERTLTVNGFSKAFAMTGWRLGYLAGPKHFVTACGRIQSQSTSGASSISQKAGVAALALGYAGSEAVSTMVKAYRERRDFLVQRLQAMEGVKLPVPQGAFYLFPDFSSYYGTEVEDFGVINGSEALCRFFLEKAQVALVPGDAFGNDDCIRISYAASLDTLRTAINNIEKSLLLLRPAAAASKAS

SEQ ID NO: 31064 - protein, 326 aa, Oryza sativa Japonica Group
MEYSYSYRFMLVCSVLVLCLNTRGARCQLSDDFYDYICPDVYTVLQQHVYAAMRTEMRMGASLLRLHFHDCFVNGCDGSILLDGDDGEKFALPNKNSVRGFEVIDAIKEDLENICPEVVSCADIVALAAGYGVLFSGGPYYDVLLGRRDGLVANQSGADNGLPSPFEPIKSIIQKFNDVGLDTTDVVVLSGGHTIGRARCTLFSNRLSTTSSSADPTLDATMAANLQSLCAGGDGNETTVLDITSAYVFDNRYYQNLLNQKGLLSSDQGLFSSDDGIANTKELVETYSADAHKFFWDFGRSMVKMGNISPLTGDDGQIRKNCRVVN

SEQ ID NO: 31065 - protein, 359 aa, Ipomoea batatas
MASIVSRLSLALSLIALALAGYSIYQHTQSAMESQPIKALPAWLQLPTFQSANVLSYYPSGRKSSPAGMLSDEACVFSAVKEVVDAAIDNETRMGASLIRLFFHDCFVDGCDAGLLLNDTATFTGEQTAFGNLNSVRGFEVIEQAKQNAVAKCADTPVSCADILSIAARDSFERFSGATYTVTLGRLDARTANLTGANTQLVGPSENLTEQVRKFGIKGFNERELVALLGSHTLGFARCPVLCDNRNINPVRVPGLQCNCPVTNTDPGLVGLDPTPDTFDQRYYSDLVSGQGLLFSDQQLMNSTTTSDAVTTYRDSIDTFLADFAAAMVKMSNLPPSAGVELEIRDVCSRVNDVSVASV

SEQ ID NO: 31066 - protein, 351 aa, Ipomoea batatas
MASFMKQLSLVLSFIALALAGCAVYQNTQTAMKDQLKVTPTWLDRTIKSTNLLSLGLGKPSGGKLSDEACIFSAVKEVVDAAIDAEARMGASLIRLFFHDCFVDGCDAGLLLNDTANFTGEQTAGNNNSVRGFGVIEQAKQNAITKCPDTPVSCADILSIAARDSFEKFTGETYTVTLGRLDARTANSTGANTQLVGPSEIASQSAKFAAKGFNETEMGALLGSHTIGFARCPLLCVSAFINPARVSTLNCNCSGTVNTTGLVGLDPTPTTWDQRYFSDVADGQGLLFSDNELITGNTTSAAVHRYRDAMDAFLSDFAAAMVKMSNLPPSPGVALESHVCSEVNANTVASM

SEQ ID NO: 31067 - protein, 350 aa, Helianthus annuus
MADSGRFVAADLPPIHLGGKEHIIQTGCGSVSVTVYGDQQKPPLITYPDLGLNHTSCFEGLFISPESASLLLNNFCIYHITPPGHESGAATISKDEPVLSVVDLCDQILVILNHFRLGSVMCMGAMAGAYILTLFSIKYSERVSGLILVSPICRAASWNEWFYNKFMSKLLQYCGMCDMFKELLNPRYFSKAGCEVPESEIVRACRKFLNERDSINVRRYLQALDRRHDMSKELETLECKSIIFVGDKSPFLDDALHMKTILGKRCSAFVEVHPCGSMVTEEQPHAMLIPLELFLKGFGFYRPCQFNDSPRSPLDSCCVDPSLLYPKQMGLKLRPIKTRVSPPQPRAKHS

SEQ ID NO: 31068 - protein, 318 aa, Arabidopsis thaliana
MDSRVSILFVCAIAVSCFTSGSASSPVDFSVCNYEFELFRFDLEAKCPPSLYPTPPIEVDGDSLDRLMASQHGNAYMSVLFYASWCPFSRAVRPKFDMLSSMFPQIQHLAVEHSQALPSVFSRYGIHSLPSILMVNQTLNARYHGRKDLISLIEFYEEATAHFGWIDLEITGCCSGFPGLQPVQYVAEGEPTGLNAGDGNLITWLRKGTSIREIFKQDPFLVLSLLFICLQMAILVFPIAESRMRALWASYVANLNLGRFGEISQLFNRGIHMVDVRRLWLKLSLVKTRNFHERAKNAQAWASSLASVSLGQTSSDQS

SEQ ID NO: 31069 - protein, 337 aa, Microcystis aeruginosa PCC 7806
MTTTSPKTLTMDIQKPRVLLIGKMYDEAGQKLLEESTNIEILSNPTPEEINEAIQEVSGVFVRYPNNLEASSIRLAKHLKVISTSGFGTDSIDIMAATEQGVIVVNNPGMSTTAVAEHTLSMILALAKKLPFLDHCVKKGNYLIRNQMQPIQLENKTLGIVGLGRIGTLVAHKCNLALGMRVLAYDPYVPASKAETVGATLLKDLDVLLAESDFVSLHTELTSETREMFNISVFKKMKPTAFLINTSRGKVVCEKDLGIALNQKLISGCALDVFEPEPPALDNPLYNFENVILSPHLAGVTPEASLAAAVSAANQILQVLRGEKPPYMINPEAWNLF

SEQ ID NO: 31070 - protein, 355 aa, Triticum aestivum
MCGGAILSDIIPPPRRATGGNVWRADKKRRARPDAAAGRPRRVPEEEFQEEEGDAEFEADFEGFVEAEEESDGEAKPFPVRRTGFSGDGLKATAAGDDDCASGSAKRKRKSQFRGIRRRPWGKWAAEIRDPRKGVRVWLGTYNSAEEAARAYDVEARRIRGKKAKVNFPEEAPMDPQQRCATSVKVPEFNTEQKPVLNTMGNTDVYSCPAVDYTLNQQFVQPQNMSFVPTVNAVEAPFMNFSSDQGSNSFSCSDFSWENDIKTPDITSVLASIPTSTEVNESAFLQNNGINSTVPPVMGDANVDLADLEPYMKFLMDDGSDESIDSILSCDVPQDVVGNMGLWTFDDMPLSAGFY

SEQ ID NO: 31071 - protein, 223 aa, Lotus japonicus
MGRGKIEIKRIENTTNRQVTFCKRRNGLLKKAYELSVLCDAEVALIVFSSRGRLYEYSNNNIRSTIERYKKACSDHSSTSTTTEINAQYYQQESAKLRQQIQMLQNSNRHLMGDALSTLTVKELKQLENRLERGITRIRSKKHEMLLAEIEYFQKREIELENENLCLRTKITDVERIQQVNMVSGQELNAIQALASRNFFNPPMIEDGTSYPQQPDKKILHLG

SEQ ID NO: 31072 - protein, 281 aa, Vigna radiata
GSSTDQAPGDDSEVILYPQAIFKDPFRRGNNILVICDVYTPAGEPLQTNKRYDAAKIFSHPDVVAEVPWYGIEQEYTLLQKDVNWPLGWPLGGFPGPRDPYYCSAGADRSFGRDISDAHYKACLFAGINISGINGEVMPGQWEFQVGPAVGISAGDELWVARYILERITEIAGVVLSFDPKPIKGDWNGAGAHTNYSTKTMRNDGGYEVIKSAIEKLGKRHKEHIAAYGEGNERRLTGRHETADINTFLWGVANRGASIRVGRDTEKAGKGYFEDRRPASN

SEQ ID NO: 31073 - protein, 281 aa, Vigna radiata
GSSTGQAPGEDSEVIIYPQAIFKDPFRRGNNILVICDAYTPAGEPIPTNKRHNAAKIFSHPDVVAEVPWYGIEQEYTLLQKDVNWPLGWPVGGFPGPQGPYYCGAGADKAFGRDIVDAHYKACLYAGINISGINGEVMPGQWEFQVGPAVGISAGDELWVARYILERITEIAGVVLSFDPKPIKGDWNGAGAHTNYSTKTMRNDGGYEVIKSAIEKLGKRHKEHIAAYGEGNERRLTGRHETADINTFLWGVANRGASIRVGRDTEKAGKGYFEDRRPASN

SEQ ID NO: 31074 - protein, 579 aa, Phaseolus vulgaris
MCGILAVLGCSDSSQAKRVRVLELSRRLKHRGPDWSGLHQYGDCYLAHQRLAIVDPASGDQPLFNEDKTIAVTVNGEIYNHEELRKQLPNHTFRTGSDCDVIAHLYEEHGENFVDMLDGIFSFVLLDTRDNSFIVARDAIGVTSLYIGWGLDGSVWISSELKGLNGDCEHFESFPPGHLYSSKEREFRRWYNPPWFSEAIPSAPYDPLALRHAFEKAVIKRLMTDVPFGVLLSGGLDSSLVAAVTARYLEGTNAAKHWGTKLHSFCVGLEGAPDLKAAREVADYIGTVHHEFHYSVQDGIDAIEDVIYHIETYDVTTIRASIPMFLMSRKIKSLGVKWDICGEGSDEIYGGYLYFHKAPNKEEFHQETCRKIKALHKYDCLRANKSTFAWGLEARVPFLDKEFIEVAMNVNPEYKMIKKEEGRIEKWVLRRAFDDGEHPYLPKHILYRQKEQFSDGVGYGWIDGLKGHAEKHVTDRMMLNAANIFPFNTPTTKEAYYYRMIFERFFPQDSARLSVPGGPSVACSTAKAVEWDAAWSNNLDPSGRAALGVHASAYGNQVKAVEPEKTIPKMEVSPLGVAI

SEQ ID NO: 31075 - protein, 644 aa, Oryza sativa
MATTAAAAAATLSAAATAKTGRKNHQRHHVLPARGRVGAAAVRCSAVSPVTPPSPAPPATPLRPWGPAEPRKGADILVEALERCGVSDVFAYPGGASMEIHQALTRSPVITNHLFRHEQGEAFAASGYARASGRVGVCVATSGPGATNLVSALADALLDSVPMVAITGQVPRRMIGTDAFQETPIVEVTRSITKHNYLVLDVEDIPRVIQEAFFLASSGRPGPVLVDIPKDIQQQMAVPVWDTSMNLPGYIARLPKPPATELLEQVLRLVGESRRPILYVGGGCSASGDELRRFVELTGIPVTTTLMGLGNFPSDDPLSLRMLGMHGTVYANYAVDKADLLLAFGVRFDDRVTGKIEAFASRAKIVHIDIDPAEIGKNKQPHVSICADVKLALQGLNALLDQSTTKTSSDFSAWHNELDQQKREFPLGYKTFGEEIPPQYAIQVLDELTKGEAIIATGVGQHQMWAAQYYTYKRPRQWLSSAGLGAMGFGLPAAAGASVANPGVTVVDIDGDGSFLMNIQELALIRIENLPVKVMVLNNQHLGMVVQWEDRFYKANRAHTYLGNPECESEIYPDFVTIAKGFNIPAVRVTKKSEVRAAIKKMLDTPGPYLLDIIVPHQEHVLPMIPSGGAFKDMILDGDGRTVY

SEQ ID NO: 31076 - protein, 644 aa, Oryza sativa Japonica Group
MATTAAAAAATLSAAATAKTGRKNHQRHHVLPARGRVGAAAVRCSAVSPVTPPSPAPPATPLRPWGPAEPRKGADILVEALERCGVSDVFAYPGGASMEIHQALTRSPVITNHLFRHEQGEAFAASGYARASGRVGVCVATSGPGATNLVSALADALLDSVPMVAITGQVPRRMIGTDAFQETPIVEVTRSITKHNYLVLDVEDIPRVIQEAFFLASSGRPGPVLVDIPKDIQQQMAVPVWDTSMNLPGYIARLPKPPATELLEQVLRLVGESRRPILYVGGGCSASGDELRRFVELTGIPVTTTLMGLGNFPSDDPLSLRMLGMHGTVYANYAVDKADLLLAFGVRFDDRVTGKIEAFASRAKIVHIDIDPAEIGKNKQPHVSICADVKLALQGLNALLDQSTTKTSSDFSAWHNELDQQKREFPLGYKTFGEEIPPQYAIQVLDELTKGEAIIATGVGQHQMWAAQYYTYKRPRQWLSSAGLGAMGFGLPAAAGASVANPGVTVVDIDGDGSFLMNIQELALIRIENLPVKVMVLNNQHLGMVVQWEDRFYKANRAHTYLGNPECESEIYPDFVTIAKGFNIPAVRVTKKSEVRAAIKKMLETPGPYLLDIIVPHQEHVLPMIPSGGAFKDMILDGDGRTVY

SEQ ID NO: 31077 - protein, 644 aa, Oryza sativa
MATTAAAAAATLSAAATAKTGRKNHQRHHVLPARGRVGAAAVRCSAVSPVTPPSPAPPATPLRPWGPAEPRKGADILVEALERCGVSDVFAYPGGASMEIHQALTRSPVITNHLFRHEQGEAFAASGYARASGRVGVCVATSGPGATNLVSALADALLDPVPMVAITGQVPRRMIGTDAFQETPIVEVTRSITKHNYLVLDVEDIPRVIQEAFFLASSGRPGPVLVDIPKDIQQQMAVPVWDTSMNLPGYIARLPKPPATELLEQVLRLVGESRRPILYVGGGCSASGDELRRFVELTGIPVTTTLMGLGNFPSDDPLSLRMLGMHGTVYANYAVDKADLLLAFGVRFDDRVTGKIEAFASRAKIVHIDIDPAEIGKNKQPHVSICADVELALQGLNALLDQSTTKTSSDFSAWHNELDQQKREFPLGYKTFGEEIPPQYAIQVLDELTKGEAIIATGVGQHQMWAAQYYTYKRPRQWLSSAGLGAMGFGLPAAAGASVANPGVTVVDIDGDGSFLMNIQELALIRIENLPVKVMVLNNQHLGMVVQWEDRFYKANRAHTYLGNPECESEIYPDFVTIAKGFNIPAVRVTKKSEVRAAIKKMLETPGPYLLDIIVPHQEHVLPMIPNGGAFKDMIPDGDGRTVY

SEQ ID NO: 31078 - protein, 206 aa, Dichelobacter nodosus
IQHIDDGAIYRALSAGKVVIVAGFQGVDEAGDITTLGRGGSDTTAVALAAVLKADECQIYTDVDGVYTTDPRIEPRARKLEQISFVEMLEMASLGSKVLQIRSVEFAGKYHVPVRVLSSFSDDETGTLISSVEGAIIEATHVTGIAFTRDEVMIQLMHLPDDMNTLYQILRPIGCADISLDMVRKRAMMMVQLILVLLCLIKKKIG

SEQ ID NO: 31079 - protein, 333 aa, Methylocystis sp. WI14
  misc_feature (231)..(231): Xaa can be any naturally occurring amino acid
  unsure (1)..(333): unsure at all Xaa locations
MYQIVIETEDGETCSFECGPSEDVISAGLRQSVILLASCRAGGCATCKADCTDGDYELIDVKVQALPPDEEEDGKVLLCRTFPRSDLHIVVPYTYDRISFQAIQTNWLAEITECDRVSSNVVRLVLQPLTADGAAPISLNFMPGQFVDIEIPGTHTRRSYSMASVAEDGSLEFFIRLLPDGAFSNYLRSQARVGQRVALRGPAGSFSLHKSERPRFFVAGGTGLSPVLSMXRQLKKESDPLPATLFFGVTNYDELFYVEELKALQHAMPSLDVQIAVVNVSEGNGVAKGTVIDLLQDELGRRAEKPDIYLCGPPGMIDAAFAAASSAGVPKEQ

SEQ ID NO: 31080 - protein, 913 aa, Triticum aestivum
MNPDKFTHKTNEALAAAHEMASEAGHAQLTPLHLAAALAADRSGILRQAIAHASGGNDAAAESFERVASAALKRLPSQSPPPDTVPASTSLVKAVRRAQSAQKSRGDSHLAVDQLLMGLLEDPQISDALKEAGISAARVKAEVEKLRGGDNRRVESASGDTNFQALKTYGRDLVEVAGKLDPVIGRDEEIRRVVRILSRRTKNNPVLIGEPGVGKTAVVEGLAQRVVRGDVPSNLLDVRLVALDMGALVAGAKYRGEFEERLKAVLKEVEEAEGKVILFIDEIHLVLGAGRTEGSMDAANLFKPMLARGQLRCIGATTLEEYRKYVEKDAAFERRFQQVFVAEPSVPDTVSILRGLKEKYEGHHGVRIQDRALVIAAQLSSRYIMGRHLPDKAIDLVDEACANVRVQLDSQPEEIDNLERKRIQLEVELHALEKEKDKASKARLVDVRKELDDLRDKLQPLQMKYRKEKERIDEIRSLKQRREELQFTLQEAERRMDLARVADLRYGALQEVDAAIAKLEGETGENLMLTETVGPDQIAEVVSRWTGIPVTRLGQNEKARLIGLADRLHQRVVGQYEAVNAVGEAVLRSRAGLGRPQQPTGSFLFLGPTGVGKTELAKALAEQLFDDENLLVRIDMSEYMEQHSVARLIGAPPGYVGHEEGGQLTEQVRRRPYSVILFDEVEKAHVAVFNTLLQVLDDGRLTDGQGRTVDFRNTVIIMTSNLGAEHLLAGMVGNSMKVARDLVMQEVRRHFRPELLNRLDEIVIFDPLSHEQLRKVARLQMKDVAVRLAERGVALAVTDAALDVILSLSYDPVYGARPIRRWIEKRIVTELSKMLIREEIDENSTVYIDAAPSKDELTYGVDKHGGLVNARTGHKSDILIQVPSGAVGGDAAHAVKKMKIMQDSGEVDDMEEE

SEQ ID NO: 31081 - protein, 357 aa, Pisum sativum
MSSLSDLINFNLSDSTEKIIAEYIWVGGSGIDIRSKARTLPGPVSDPAKLPKWNYDGSSTDQAPGKDSEVILYPQAIFKDPFRRGNNILVICDVYTPAGEPLPTNKRYNAAKIFSHPDVAAEVPWYGIEQEYTLLQKDINWPLGWPIGGYPGKQGPYYCGIGADKAYGRDIVDAHYKACLFAGINISGINGEVMPGQWEFQVGPSVGISAGDEIWAARYILERITEISGVVVSFDPKPIPGDWNGAGAHANFSTKSMRENGGYEVIKKAIEKLGLRHKEHIAAYGEGNERRLTGKHETADINVFSWGVANRGSSIRVGRDTEKDGKGYFEDRRPASNMDPYVVTSMIAETTILWKKS

SEQ ID NO: 31082 - protein, 1174 aa, Cochliobolus heterostrophus
MANVEETVANVQRKIDREKALINAANAMRQSTNNPAVLSRLDGQIKDGRRNIDYFESKLRDLDLQRTTSGVDNMSLQPGRSPTNPLTPPPKDNWDGYAQQDQGGYGGPQSQYSQLSGGEALQPPRAPFAAPPPATANKRPNYSKLDLIKYDTPHLGPRIQLMLTQLEFKLSVEKQYKDGIEKMVRLYQMEGDRKSKQDAEAKRIESNQKIQLLKHSLKRYEDLHVDIDGDGDDNDSLDIPSQRKPLSGQLSLRIHAVADVDHAATGRFSRGPETFVNIKVEDTIKGRTKPTRNDRWTDEVHDFSIDKANEIEITVYDKTGDHLLPIGMLWVRISDIAEEMRRKKLETELANSGWVAADKMGGHTGIQPDMQFQPPPGQSPAGGPGGGPTPAGVRPPGAPQPQTGPIMIDDWFSLEPVGRIHLTMSFIKNTGNKQPFDLGLGRKGAVRQRKEDVVEQYGHKFVQQQFYNVMRCALCAEFLKYAAGMQCSDCNYTCHKKCYPKVVTKCITQSNAETDPDEAKLNHRIPHRFENFSNMGANWCCHCGYVLPLGRKQTKKCNECGLTCHAHCVHFVPDFCGMSMEVANQILMEIKRTRRGQSSSGPGMSQRTLRPQSAAKPLPPTQPQSPGQPGQESPTQSDRYSYGKEQMSPPPGPPRQPSYPSSATSVDAARASYSTTGTASTGAPTSPTSGSRPPSGPRTQSSVAAAAAAMNKATQPGYGRSNTDYSPQSGRSSGSGYPTEQRMSQQQAPQPAAYDPSVYANIPSYPPSHQQPAPVPSYPTKSSYPLPQPPPPQSPPQHPQQPTPSQQKMPEQQALTQQPPSAVGEVPGKKVTPAANTQGTGKRIGLDHFNFLAVLGKGNFGKVMLAETKTTKQLYAIKVLKKEFIIENDEVESTRSEKRVFLIANKERHPFLLNLHACFQTETRVYFVMEYISGGDLMLHIQRGQFGTKRAQFYAAEVCLALKYFHENGVIYRDLKLDNIMLTLDGHIKVADYGLCKEEMWYGSTTSTFCGTPEFMAPEILLDKKYGRAVDWWAFGVLIYQMLLQQSPFRGEDEDEIYDAILADEPLYPIHMPRDSVSILQKLLTREPEMRLGSGPTDAQEIMSHAFFRNINWDDIYHKRVQPPFIPQITSPTDTSNFDTEFTSVTPVLTPVQSVLSQAMQEEFRGFSYSADFA

SEQ ID NO: 31083 - protein, 288 aa, Glycine max
MTDRPFFQALEKEENCDEDYEGCFHQPGKKRRLTSEQVQFLERNFEVENKLEPERKVQLAKELGLQPRQVAIWFQNRRARFKTKQLEKDYGVLKASYDRLKSDYESLVQENDKLKAEVNSLESKLILRDKEKEENSDDKSSPDDAVNSSSPHNNKEPMDLLIISKNATTTTTSENGTKVLSPLPLPIMVTCCKQEDANSAKSDVLDSDSPHCTSFVEPADSSHAFEPEDHSEDFSQDEEDNLSENLLMTFPSSCCLPKVEEHCYDGPPENSCNFGFQVEDQTFCFWPY

SEQ ID NO: 31084 - protein, 713 aa, Escherichia coli
MSRIIMLIPTGTSVGLTSVAWRDPCNGTQRRSSERFQTYRSAAYRWRCADQTTTIVRANSSTTTAAEPLKMSYVEGLLSSNQKDVLMEEIVANYHANTKDAEVVLVEGLVPTRKHQFAQSLNYEIAKTLNAEIVFVMSQGTDTPEQLKERIELTRNSFGGAKNTNITGVIVNKLNAPVDEQGRTRPDLSEIFDDSSKAKVNNVDPANVQESSPLPVLGAVPWSFDLIATRAIDMARHLNATIINEGDINTRRVKSVTFCARQHSAHAGALRAGSLLVTSADRPDVLVAACLAAMNGVEIGALLLTGGYEMDARISKLCERAFATGLPVFMVNTNTWQTSLSLQSFNLEVPVDDHERIEKVQEYVANYINADWIESLTATSERSRRLSPPAFRYQLTELARKAGKRIVLPEGDEPRTVKAAAICAERGIATCVLLGNPAEINRVAASQGVELGAGIEIVDPEVVRESYVGRLVELRKNKGMTETVAREQLEDNVVLGTLMLEQDEVDGLVSGAVHTTANTIRPPLQLIKTAPGSSLVSSVFFMLLPEQVYVYGDCAINPDPTAEQLAEIAIQSADSAAAFGIEPRVAMLSYSTGTSGAGSDVEKVREATRLAQEKRPDLMIDGPLQYDAAVMADVAKSKAPNSPVAGRATVFIFPDLNTGNTTYKAVQRSADLISIGPMLQGMRKPVNDLSRGALVDDIVYTIALTAIQSAQQQ

SEQ ID NO: 31085 - protein, 243 aa, Amborella trichopoda
MGRGRVELKRIENKINRQVTFAKRRNGLLKKAYELSVLCDAEVALIIFSNRGKLYEFCSTSSMVKTLERYQKCNYGALETNVPTRETQSSYQEYLKLKARVESLQRSQRNLLGEDLGPLSSKELEQLEQQLEMSLKQIRSTKTQCMFDQLADLRRRELALQETNKALKRKLEGASASNPPQLAWENNGQNIHYNRQPAHTEGFFHPLECDSTLQIGYHPSCPDQMPVAAPVQNVNAFLPGWLV

SEQ ID NO: 31086 - protein, 241 aa, Eschscholzia californica
MGRGRVELKRIENKINRQVTFAKRRNGLLKKAYELSVLCDAEVALIIFSNRGKLYEFCSSSSMFKTLERYQKSNYGAPETNVSVRESQEHSSHQEYLKLKARVEALQRSQRNLLGEDLGPLSGKELESLERQLDMSLKQIRSTRTQYMLDQLTDLQRREQMLSDANKTLRRRLEEGTVTCHQWEQNMQYGQQQAHAQGEGFFHPIECEPTLQMGYQQDQITVAAAAGPSMTMNSYMPGPGW

SEQ ID NO: 31087 - protein, 248 aa, Eschscholzia californica
MGRGRVELKRIENKINRQVTFAKRRNGILKKAFELSVLCDAEVALIIFSSRGKLYEFCSSSSILKTLERYQRCSSNASQASRSIKDNDETYQNYLKLKSRVEVLQQNQRNLLGLDLEPLSLKELDQLESQLEVSLKQVTSTKTQFMLDNLSDLQTKEEVLQEANRSLNRKMEENMAEIPQQLRWEAGDGHNIPYNRHIPITDGFYQPLECNPTFQIGSSSMKSFDHLTDPPPTVQNLLGYFPSWSFET

SEQ ID NO: 31088 - protein, 242 aa, Liriodendron tulipifera
MGRGRVELKRIENKINRQVTFAKRRNGLLKKAYELSVLCDAEVALIIFSNRGKLYEFCSTSSMFKTLERYQKCNYGAPEAAVTTREIQSSHQEYLKLKARVEALQRSQRNLLGEDLGPLNGKELDTLERQLDVSLKQIRSTRTQYMLDQLTDLQRREQMLSEANKALKRRLDEGMQANPHQGWNHNPHAMEYVRQQGPPQGDGFFHPLDCEPTLQIGYQTDQITMSTAPGPSLNNYMPGWLA

SEQ ID NO: 31089 - protein, 191 aa, Nuphar advena
DEFCSTSSMLKTLERYQKCNYGSIEASVPSRETQNSYQEYLKLKSKVEALQHSQRNLLGEDLGPLNSKELEHLEQQLEVSLKHVRSTKTQFMLDQLSDLKGKEQILQDANMALVRKLEGAAGSANHQQLSWENGGQHLQYGRHSGPQKDGFYHPLECDSTLQIGYNPTAQEQITVAAPAHNVNGFIPSWLV

SEQ ID NO: 31090 - protein, 237 aa, Acorus americanus
MGRGRVELKRIENNINRQVTFAKRRNGLLKKAYELSVLCDAEVALIIFSNRGRLFEFCSSSSMLKTLDRYQKCSFHAAESSAPSRELQSSYQEYLKLKAKVEALQRSQRNLLGEDLGPLNSKELEQLESQLEMSLKQVRSTKTQYMLDQLCDLKRKEQMLQEANKSLKRKLDEYNSENPLQLSWDNGGSNVPYGRQPTHSEDFFQPLSVDPSLHIGYQVNAAATGQNVNGFIPGWMT

SEQ ID NO: 31091 - protein, 248 aa, Silene latifolia subsp. alba
MEFSSQITREEGSPSSQRKLGRGKIEIKRIENTTNRQVTFCKRRNGLLKKAYELSVLCDAEVALIVFSSRGRLYEYANHSVKGTIDRYKKASSDNSGASSAAEANAQYYQQEAAKLRNQIRTVTENNRHLMGEGLSSLNMKDLKSLENKLERGISRIRSKKNELLFAEIEFMQKREVELHNNNQYLRAKIAENERAQQSMSLMPGGSSEYELAPPPQSFDSRNYFQVNALQPNNTHYSRPDQTTLQLN

SEQ ID NO: 31092 - protein, 281 aa, Glycine max
GSSTGQAPGEDSEVIIYPQAIFRDPFRRGNNILVICDTYTPAGEPIPTNKRHDAAKVFSHPDVVAEETWYGIEQEYTLLQKDIQWPLGWPVGGFPGPQGPYYCGVGADKAFGRDIVDAHYKACLYAGINISGINGEVMPGQWEYQVGPSVGIEAGDHIWASRYILERITEQAGVVLSLDPKPIEGDWNGAGCYTNYSTKSMREDGGFEVIKKAILNLSLRHKDHISAYGEGNERRLTGKHETASINTFSWGVANRGCSIRVGRDTEKNGKGYLEDRRPASN

SEQ ID NO: 31093 - protein, 281 aa, Glycine max
GSSTGQAPGEDSEVILYPQAIFRDPFRRGNNILVICDAYTPAGEPIPTNKRHAAAKVFSHPDVVAEVPWYGIEQEYTLLQKDIQWPLGWPVGGFPGPQGPYYCGVGADKAFGRDIVDAHYKACIYAGINISGINGEVMPGQWEYQVGPSVGIEAGDHIWASRYILERITEQAGVVLSLDPKPIEGDWNGAGCHTNYSTKSMREDGGFEVIKKAILNLSLRHKDRISAYGEGNERRLTGKHETASINTFSWGVANRGCSIRVGRDTEKNGKGYLEDRRPASN

SEQ ID NO: 31094 - protein, 475 aa, Bacillus subtilis
MNLQENSSQQLKRTMKSRHLFMISLGGVIGTGLFLSTGYTLHQAGPGGTILAYVIGGLMMYLVMQCLGELSVANAVTGSFQKYATTFIGPSTGFMVGIMYWINWVVTVGSEFTASGILMQRWFPDSSVWMWSAIFAALLFICNAFSVKLFAETEFWFSSVKIVTIILFIILGGAAMFGLISLNGTADAPMLSNFTDHGGLFPNGFLAVFIAMISVSFAFSGTELIGVTAGESANPQKDIPRSIRNVAWRTVIFFIGAVFILSGLISWKDAGVIESPFVAVFAEIGIPYAADIMNFVILTALLSVANSGLYASTRMMWSLANENMISSRFKKVTSKGIPLNALMISMAVSCLSLVSSIVAPGTVYVVMVAIAGFAGVVVWMSIALSQLLFRKRFLKKGGDVKDLTFRTPLYPLMPIAALLLCSASCIGLAFDPNQRIALFCGVPCIILCYLIYHFKRNVTKAKKISQEEYPADHIL

SEQ ID NO: 31095 - protein, 407 aa, Mannheimia succiniciproducens MBEL55E
MSQKLVLILNCGSSSLKFSILDPKTGEEKLSGLAEAFYLDDARIKWKLHGEKGNAELGKGAAHSEALNFIVNNIFPLDPTLKDGIVAIGHRIVHGGEKFTSSVIVTDEVVKGIEDAIQFAPLHNPAHLIGIKEAFKIFPHLKDKNVVVFDTAFHQTMPEEAYLYALPYSLYKEHGVRRYGAHGTSHYFVSREAAKRLGVAEDKVNVITCHLGNGGSVSAVRHGQCIDTSMGLTPLEGLVMGTRCGDIDPAIMFYMHDTLGMSVEEINTTLTKKSGLLGLTEVTSDCRFAEDNYDNEDESLRVPAKRAMDVYCYRLAKYIGSYMAVIGERLDAIVFTGGIGENSAHVREITLNHLKLFGYQLDQEKNLAARFGNEGIITADNTPIAMVIPTNEELVIAQDTARLCIKD

SEQ ID NO: 31096 - protein, 397 aa, Photobacterium profundum
MSNSLVLVINSGSSSLKFALIDTVSGEATLNGIGECFGLADANVSWKIDGKKHEFQLSDNGNHHKQAIDRIVALLEEQGIKQDIVAVGHRVVHGGEKFTQTVKIDETVLQEIENLSDLAPLHNPAHVVGMRAAIAAFPALSQYAVFDTAFHQTMPAKAFTGAISSKLYDDYGIRRYGFHGTSHYFVSREAAKVINKPIEKSSFISVHLGNGASVCAIKDGQSVDTSMGFTPLSGLMMGTRCGDLDPGIIEFLLKKGWSTEQVFKELNSNSGFLGVSGLTSDCRGVIEAMEEGHAGATLAFEIFTYRVAKYIASYMVALDELDGIIFTGGIGENSLPIRRQILKSLKIFGYREDEVANADARFGKGGVITQANTPIAMVIPTNEEWVIAKESMALLHA

SEQ ID NO: 31097 - protein, 147 aa, Aspergillus oryzae
MPLSPEQIQLIKATVPVLQQHGTTITTVFYNNMLTAHPELNAVFNNANKVNGHQPRALAGALFAYASHIDDLGALGPAVELICNKHASLYIQPEQYQIVGKFLLEAMGEVLGDALTPEILDAWATAYWQLADLMIGREAELYKQADG

SEQ ID NO: 31098 - protein, 147 aa, Aspergillus niger
  misc_feature (29)..(29): Xaa can be any naturally occurring amino acid
  unsure (1)..(147): unsure at all Xaa locations
MPLTPEQIKIIKATVPVLQEYGTKITTAXYMNMSTVHPELNAVFNTANQVKGHQARALAGALFAYASHIDDLGALGPAVELICNKHASLYIQADEYKIVGKYLLEAMKEVLGDACTDDILDAWGAAYWALADIMINREAALYKQSQG

SEQ ID NO: 31099 - protein, 412 aa, Aspergillus niger
  misc_feature (29)..(29): Xaa can be any naturally occurring amino acid
  unsure (1)..(412): unsure at all Xaa locations
MPLTPEQIKIIKATVPVLQEYGTKITTAXYMNMSTVHPELNAVFNTANQVKGHQARALAGALFAYASHIDDLGALGPAVELICNKHASLYIQADEYKIVGKYLLEAMKEVLGDACTDDILDAWGAAYWALADIMINREAALYKQSQGWTNWRQFRISKKVPESDEITSFYLEPVDGKPLPAFRPGQYISVSVQVPEEDPQARQYSLSDTSRSDYYRISVKKETGLDPRAPGAKRHPGYVSNVLHDMIKEGDLIDVSHPYGDFFLSTAEATHPIVLLSAGVGMTPMMSILNTITKKSNRKIHFIHGSRTTEARAFKSHVQKLEKEIPNMQVTYFLSRPGDSDQLGVDYHHAGRIDLQKLDGPSHLYLDNPSTEYYICGPDTFMTQMEEALKAYGVGDDRIKMELFGTGGVPHN

SEQ ID NO: 31100 - protein, 227 aa, Glomus mosseae
RDGMNTTSLEYIMCQQENHGPLILSEFTGMAGSLGTAIMVNPWDYDGVAKTINDALSLPAEEKKAKHMQLYKHVTVHTAQFWAKSFTKELVASLNNHNQSSITPYLDMDYLQKKYKSAKKRLLLFDYDGTLTPIVRTPSAAVPPPRMLEALDELTNDPNNTTWVVSGRDSTTLENWLGSVKKLGFSAEHGSFLKNPDGDKWINLTEDIDMSWKNDVLEIFTYYTERT

SEQ ID NO: 31101 - protein, 396 aa, Gossypium hirsutum
MCGGAIISDFIPPARSRLVTANYLWPDLKKSGSKKRSGRKHSKKPAVGFEDDFEADFQVFKDEDSDVDDFNDDVDDVLADVKSFAFSATKKPSPAVSHGSNSIKSVEFSGQAEKSAKRKRKNQYRGIRQRPWGKWAAEIRDPRKGVRVWLGTFNTAEEAARAYDAEALRIRGKKAKVNFPDETPRTTPKHAVKMNSQKPLSGSNLSSVQSSLNPDFSYSNKLEQGYYDTVGFIEEKSLMDQFAYADPVRAAVDDGLKPFADPENTASFFISDPGSNNFDSSDLVWGDQGAKTPEISSSLEPTLEVNEFLDNANPTKKLKLSLNNVMPTGGDNSVKSLSDELLAMDNQVNYFQTPFIDENWNVSMDDFLNGDATQVGGNEMGFWSFDDFPSIDGGIF

SEQ ID NO: 31102 - protein, 433 aa, Streptomyces clavuligerus
MMLTRPLKVALLGCGVVGSEVARIMTTHGDDHAARIGAPVELAGVAVRRPSKVRAGIPQELITTDATALVKRGDIDVVIEVIGGIEPARTLITTAFEHGASVVSANKALLAEDGATLYAAAERHGRDLYFEAAVAGAIPLIRPLRESSPGNKVNRVLGIVNGTTNFILDRMDSSGAGYTEALDEATALGYAEADPTADVEGFDAAAKAAILAGIAFHTRVRLDDVHREGLTEVTAADMASARRMGCTVKLLAICERAADGRSVTARVHPAMIPLSHPLASVREAYNAVFVESEAAGQLMFYGPGAGGAPTASAVLGDLVAVCRNKLAGATGPGESAYTQLPVSPMGEVVTRYHISLDVADKPGVLAQVATVFAEHGVSIDTVRQQGRQDSSGEASLVVVTHRAPDAALQGTVEALRSLDTVRGVASIMRVEGE

SEQ ID NO: 31103 - protein, 211 aa, Capsicum annuum
MALKSKVSSNGSENAKVNGVKEVHYRGVRKRPWGRYAAEIRDPGKKSRVWLGTFDTAEEAAKAYDAAARDFRGPKAKTNFPSPFPLETLNQSPSNSSTLESSSGETGVHAPMEVDLTRRLGAVAPVFHQQPTVAVLPNGQPVLLFDSLWRPGVVVDKAQLSYQVAPMAIEFTGAAGGVSSVSDSSSVVEENQYVGKKGLDLDLNLAPPMEI

SEQ ID NO: 31104 - protein, 276 aa, Capsicum annuum
MDTSSLDLIRQHLLDDDVVFMENYCTSSETTSTLYSQSSSSSESLESFVSELKTESNFSFYPESSNLEFCSFFNNNSKMEFNPSEFQVKPQKKKSFNERKPLLNISIPSVKKTDESKTGENSEKKRYRGVRQRPWGKFAAEIRDPNRKGTRVWLGTFDTAVDAAMAYDRAAFKLRGSKAILNFPLEVSNFRQENNEIEKKVNLNSCGKRAREEIENEDQVVMKKEVKREQMVATPLTPSSWAPIWDCGNAKGIFEVPPLSPLSPHPSFGFSQLLVS

SEQ ID NO: 31105 - protein, 273 aa, Capsicum annuum
MTTQDEGLTLELIRRHLLEDFTNTESFINSLNSCFSDHMSPVFITSIVKTEPSTSTSLSDSPNSSYLNEPNSPISRYFNLHSDFPEFKIDSDIILSPTYSSAVSSSTKENKNNELKTAFKTDSDNILSPTYNSSAVSSSTNKNKNNEHKNAFQTDADNILNPTHDNNCAISSSIKENKSTETKKNYRGVRRRPWGKYAAEIRDPSRKGSRIWLGTFDTDVDAARAYDCAAFKMRGRKAVLNFPLDAGKSGAPANIGRRRRRDSKMELMEVLNF

SEQ ID NO: 31106 - protein, 272 aa, Capsicum annuum
MGSPQENCSFDMIRQHLDDISLMEYYCPENTLYSQSCESLDQTSVSFETSSNLDDISSFFSSSKTDFGCFEFETKPITSAATSISSNSPKKRSFNERKPSLNIAVPVKPVVVQKVEVVREKKHYRGVRQRPWGKFAAEIRDPNRKGTRVWLGTFDTAVDAAKAYDRAAFKLRGSKAILNFPLEVANFKQQNSTVEVPQQVNSSGSKRAREKEELAINKEMKIEEEERVAQTAPLTPSNWSTIWDSGNGKGIFEVPPLSPLSPHMSYSQLVMI

SEQ ID NO: 31107 - protein, 205 aa, Capsicum annuum
MESAYIRSNFLIGFLILVALTTSSNYLASVSAARPAVGETNTEFIRTSCKSTSYPNLCFSSLSSRASAIGVSPQLLAHESLTVSLETAQSTSAMMLKLAHGQGMTPREVGAMHDCVEELSDTVAGLRKSLGEMKQLRGKDFDLKINDIQTWVSAALTDEDTCTEGFDGKVMNGKVKTVVRGKILEVAHLTSNALALINSLASLHG

SEQ ID NO: 31108 - protein, 339 aa, Gossypium hirsutum
MTTVYDPSHHLTSKKLCFKDLEIPPRKKQLHCCHNAAAMELPHHEARLHKYLPSNEDDDGTDDPYGTDHFRMYEFKVRRCTRSRSHDWTDCPFAHPGEKARRRDPTRYQYSSTICSDFRRGGGCPRGDDCEFAHGVFECWLHPTRYRTEACKDGKNCKRKVCFFAHSSRELRLLPESQPPYKNSDKNYNHCCLFCRSVTSSSSLSPTSTLLGLSHFSRSPSLSPPLSPLKHQQRTPRYGGDRISKFGTEMTSSYDDVLLKEVMSYLGTMNLSEVSSPMATTANTNIPWFDVSFKGAPSTVSPSGSGEYFNGGGDDEKNNGNGVVLDHDLDLGWVNELLM

SEQ ID NO: 31109 - protein, 390 aa, Bacteroides fragilis NCTC 9343
MVMAESNFVDYVKIYCRSGKGGRGSTHMRREKYTPNGGPDGGDGGRGGHVILRGNRNYWTLLHLRYDRHAMAGHGESGSKNRSFGKDGADKIIEVPCGTVVYNAETGEYVCDVTEHGQEVILLKGGRGGLGNWHFKTATRQAPRFAQPGEPMQEMTVILELKLLADVGLVGFPNAGKSTLLSAISAAKPKIADYPFTTLEPNLGIVSYRDGQSFVMADIPGIIEGASEGKGLGLRFLRHIERNSLLLFMIPADSDDIRKDYEVLLNELKTFNPEMLDKQRVLAITKSDMLDQELMDEIEPTLPEGIPHVFISSVSGLGISVLKDILWTELNKESNKIEAIVHRPKDVSRLQQELKDMGEDEELDYEYEDDGDGDEDDLDYEYEEEDWEDK

SEQ ID NO: 31110 - protein, 591 aa, Helianthus annuus
MCGILAVLGCSDDSQAKRVRVLELSRRLKHRGPDWSGLYQHGDNYLSHQRLAIIDPASGDQPLFNEDQTIVVTVNGEIYNHEELRKRLTAAGHKFRTGSDCDVIAHLYEEHGEDFVDMLDGMFSFVLLDTRNNTYIAARDAIGITSLYIGWGLDGSVWISSELKGLNDDCEHFEVFPPGHLYSSKTGGFKRWYNPLWFAETIPSTPYDPLVLRCAFENAVIKRLMTDVPFGVLLSGGLDSSLVASITARYLAGTKAAKQWGAQLHSFCVGLEGSPDLKAAREVADYLGTVHHEFHFTVQDGIDAIEDVIYHIETYDVTTIRASTPMFLMSRKIKSLGVKMVISGEGSDEIFGGYLYFHKALNREEFHQETCRKIKALHQYDCLRANKSTSAWGLEARVPFLDKEFINVAMSIDPEAKMINMDQKRIEKWVLRRAFEDEEHPYLPKHILYRQKEQFSDGVGYSWIDGLKAHAELHVTDKMMLHAEHIFPHNTPVTKEAYYYRMIFERLFPQNSAKLTVPGGASIACSTAKAIEWDASWSNNLDPSGRAALGAHNAAYKKNMGPVGQVKLGPNIIDNVPRMMDISASELVIQG

SEQ ID NO: 31111 - protein, 558 aa, Helianthus annuus
MCGILAVFGCVDCSQAKRARILELSSRLRHRGPDWSGLHSEEDCYLAHQRLAIVDPASGDQPLYNEDKSIIVTVNGEIYNHKEFREQLKSHKFNTGSDCEVIAHLYEEHGEDFVHMLDGMFSFVLLDTRNKSYIAARDAIGITPLYIGWGLDGSVWFASEMKALSDDCEQFMSFLPGHIYSSKNGGLRRWYNPPWWSELVPSTPYDPLVLRNAFEKAVIKRLMTDVPFGVLLSGGLDSSLVAAVASRHLVDSEAYCQWGSQLHTFCIGLKGSPDLVAAREVADYLGTRHHEFYFTVQEGIDALEEVIYHIETYDVTTIRASTPMFLMSRKIKSLGVKMVLSGEGSDEIFGGYLYFHKAPNKEEFHEETCRKIKALHLYDCLRANKSTSAWGLEARVPFLDKEFINVAMSIDPKWKMIDRDNGRIEKWVLRNAFDDDEKPYLPKHILYRQKEQFSDGVGYSWIDGLRDHANKQVTDSMLANANFVYPENTPATKEAYYYRKIFEKFFPKNAARLTVPGGPSVACSTAKAVEWDASWSKNLDPSGRAALGVHAAAYEDAK

SEQ ID NO: 31112 - protein, 641 aa, Pseudomonas putida
MGKIIGIDLGTTNSCVSILENGNVKVIENAEGARTTPSIVAYANDGEILVGQSAKRQAVTNPHNTLFAVKRLIGRRFEEQVVQKDIELVPYKIAKADNGDAWVEVNGQKMAPPQISAEVLKKMKKTAEDYLGEPVTEAVITVTAYFSDSQRQATKDAGRIAGLDVKRIINEPTAAALAYGMDKAKGDHTVIVYDLGGGTFDVSVIEIAEVDGEHQFEVLATNGDTFLGGEDFDMLLIDYLVEEFKKESGMNLKGDPLAMQRLKEAAEKAKIELSCRAADRRYITADATGRKHLNVKISRAKLESLVEGLVQRTIEPCRIALKDAGIDASKIDDVILVGGQTRMPLVQKTVADFFGKEARKDVNPDEAVATGAAIQGAVLAGDVKDVLLLDVSPLTLGIETMGGVMTALIEKNTTIPTKKSQVFSTADDNQSAVTIHVLQGERKQASSNKSLGKFDLAEIPPAPRGVPQIEVTFDIDANGILHVGAKDKATGKTQSIVIKANSGLSDDEIERMVRDAEANAEEDRKFEELAAARNQGDAGDALVHSTRKMVADAGDKVTAEEKTAIEAAVVALEAAVKGDDKAAIEAKVEELSKVSAPVAQKMYAEQQAEQPQGGAQQAEPEAKHDDVVDAEFEEVKGDDKK

SEQ ID NO: 31113 - protein, 250 aa, Propionibacterium acidipropionici
WIHRVVHGDEIFNDSAVVNDQVLAQIEDLAELAPLHNRANATGIRAFRAVLPDVVQVAVFDTAFHQTMPESAFLYSLPYAYYEKYRIRKYGFHGTSHKYVAMRAAELLGRPIEQLRLISCHLGNGASIAAIQGGRSIDTSMGFTPLAGVTMGTRSGNIDPALIPFIMEKTGKTAEEVLEVLNKESGLLGISGVSSDLRDIQVAAELERNKRAELALDIFASRIHKYIGSYAAKMASVDAIIFTAGIGEDP

SEQ ID NO: 31114 - protein, 504 aa, Pericallis cruenta
MSILTLICTFITGLMFYGLVNLLSRRASRLPPGPTPWPIIGNLMHLGKLPHHSLADLAKKYGPLIHVRLGSVDVVVASSASVAGQFLKVHDANFANRPPNSGAKHMAYNYHDMVFAPYGPRWRMLRKMCSMHLFSAKALADFRQVRQEEVMILTRVLAGTEQSAVKLDQQLNVCFANTLSRMMLDRRVFGDGDPKADDYKDMVVELMTLAGQFNIGDYIPWLDLLDLQGIVKRMKKVHSQFDSFLDTIIDEHTIGTGRHVDMLSTMISLKDNADGEGGKLSFIEIKALLLNLFSAGTDTSSSTVEWGIAELIRHPQLMKQAQEEMDIVIGKNRLVTEMDISQLTFLQAIVKETFRLHPATPLSLPRIASESCEVKGYHVPKGSILFVNVWAIARQSELWTDPLEFRPGRFLIPGEKPNVEVKPNDFEIVPFGGGRRICAGMSLGLRMVNLLIATLVQAFDWELANGLELEKLNMEEVFGISLQRVQPLLVHPRPRLARHVYGTG

SEQ ID NO: 31115 - protein, 327 aa, Arabidopsis thaliana
MSSGTVRRVSRQDIQLVQNLIERCLQLYMNQKEVVDTLLEQAKIEPGFTELVWQKLEEENREFFKAYYLRLMVKHQIMEFNKLLEQQVHHMRQMHPTGVASVQNTNGSHLQSSKILNQKQLCYPSEHTDQSLKSESAHHPMASSLSNAFLNGSSTLNTNVPSSINISTHARRVDASPNMLSSQTTNMPMMQGMNGGMIKSETAFTNPASFMYGGERNALEGHSAVGDTSIPNFSNESNNQPLSDPLLEAEASTFGFLGQIPRNFSLSDLTADFSQSSEILESYDRSPFLVPNAENFLDSRDRGEYQGDNKRLDTISEGFSYDNIGSE

SEQ ID NO: 31116 - protein, 399 aa, Methanosarcina thermophila
MKVLVINAGSSSLKYQLIDMTNESALAVGLCERIGIDNSIITQKKFDGKKLEKLTDLPTHKDALEEVVKALTDDEFGVIKDMGEINAVGHRVVHGGEKFTTSALYDEGVEKAIKDCFELAPLHNPPNMMGISACAEIMPGTPMVIVFDTAFHQTMPPYAYMYALPYDLYEKHGVRKYGFHGTSHKYVAERAALMLGKPAEETKIITCHLGNGSSITAVEGGKSVETSMGFTPLEGLAMGTRCGSIDPAIVPFLMEKEGLTTREIDTLMNKKSGVLGVSGLSNDFRDLDEAASKGNRKAELALEIFAYKVKKFIGEYSAVLNGADAVVFTAGIGENSASIRKRILTGLDGIGIKIDDEKNKIRGQEIDISTPDAKVRVFVIPTNEELAIARETKEIVETE

SEQ ID NO: 31117 - protein, 529 aa, Mycobacterium tuberculosis
MVSLPVVLIADKLAPSTVAALGDQVEVRWVDGPDRDKLLAAVPEADALLVRSATTVDAEVLAAAPKLKIVARAGVGLDNVDVDAATARGVLVVNAPTSNIHSAAEHALALLLAASRQIPAADASLREHTWKRSSFSGTEIFGKTVGVVGLGRIGQLVAQRIAAFGAYVVAYDPYVSPARAAQLGIELLSLDDLLARADFISVHLPKTPETAGLIDKEALAKTKPGVIIVNAARGGLVDEAALADAITGGHVRAAGLDVFATEPCTDSPLFELAQVVVTPHLGASTAEAQDRAGTDVAESVRLALAGEFVPDAVNVGGGVVNEEVAPWLDLVRKLGVLAGVLSDELPVSLSVQVRGELAAEEVEVLRLSALRGLFSAVIEDAVTFVNAPALAAERGVTAEICKASESPNHRSVVDVRAVGADGSVVTVSGTLYGPQLSQKIVQINGRHFDLRAQGINLIIHYVDRPGALGKIGTLLGTAGVNIQAAQLSEDAEGPGATILLRLDQDVPDDVRTAIAAAVDAYKLEVVDLS

SEQ ID NO: 31118 - protein, 183 aa, Aegiceras corniculatum
SKIEKAEYSCPPWFPVGAKSLIQQILDPNPGTRIRIEEIRNDEWFSRGYVPVKLIEYEDVNLDDVNSFFDDPETGEERTEQLYKNEDMGPLSLNAFDMIILSEGLNLSALFDRRQDPVKKQTRFVSQKPAKVVLSSMEVVAQSMGFKTHIRNFKMRIEGLSANKTSHFSAMLEVFQVAPTFYI

SEQ ID NO: 31119 - protein, 588 aa, Petunia x hybrida
MAGVANGGTKCIQDSSSASAIANAEATLGRHLARRLVEIGIEDVFSVPGDFNLTLLDHLIAEPKLKNIGCCNELNAGYAADGYARERGIGACVVTFTVGGLSVLNAIAGAYSENLPVICIVGGPNTNDYGTNRILHHTIGLPDFSQELRCFQTVTCYQAVVNHLDDAHEQIDKAISTALKESKPVYISISCNLPAIPHPTFSRDPIPFSISPRLSNKRGLEAAVDATVAFLRQAVKPVMIGGPKLRVAKALNAFVEFADSSGYAMAVMPSAKGLVPEQHPHFIGTYWGAVGTSYCGEIVESADAYLFAGPIFNDYSSVGYSLLIKKEKSIIVQPDRVVIGNGPAFGCVLMKDFLTELAKRIQKNTTAYENYRRIFVPEGTPPKSEPNEPLRVNVMFQHIQKMLSDETAVIAETGDSWFNCQKLKLPKGCGYEFQMQYGSIGWSVGATLGYAQSVPKKRVISCIGDGSFQVTAQDVSTMIRCDQKNIIFLINNGGYTIEVEIHDGPYNVIKNWNYTGLVEAIHNGEGNCWTQKVRTEEELTDAIATATGEKKDCLCFIEVIVHKDDTSKELLEWGSRVCSANGRPPNPQ

SEQ ID NO: 31120 - protein, 507 aa, Petunia x hybrida
MDAKIGSIDTCKPTTNNVATLPTNNTVTISTHTPSTTIIPCNSTTDSTLGRHLARRLVQVGITDVFGVPGDFNLTLLDHLISEPNLEFIGCCNELNAGYAADGYARPRGVGACVVTFTVGGLSVLNAIAGAYSENLPLICIVGGPNSNDYGTSGVLHHTIGLPDFSQELRCFQTVTCYQAVVNNLEDAHEMIDTAISTALKESKPVYISISCNLPAIPHPTFSREPVPFSLSPRLSNQMGLEAAVEAAAEFLNKAVKPVVVGGPKLRVAKASDAFVELMDASGYAVAVMPSAKGMVPEHHPHFIGTYWGAVSTAFCAEIVESADAYLFAGPIFNDYSSVGYSLLLKKDKAIIVQPDRVTIGNGPAFGCVLMKDFLAALAKRLKHNPTAHENYRRIYVPEGHPLKCEPNEALRVNVLFEHIQRMVSADTAVIAETGDSWFNCQKLKLPEGCGYEFQMQYGSIGWSVGATLGYAQAARDKRVLAFIGDGSFQVTAQDISTMLRCGQRTI

SEQ ID NO: 31121 - protein, 247 aa, Pyrococcus furiosus
MVITMLKVENLWVKVEDKEILKGINLNIGENELHVVMGPNGSGKSTLALTIAGHPKYKVIQGSILFEGEEITSLPPEERVKKGIFLSFQHPVEVDGVKIIHFLQRILKNLKGMDEIKAYEAIYTAIKELGLDESILTRFLNVGFSGGERKKLEMLQAYLVEPKLLILDEPDSGVDVDSLKTIAKIIRRLYERGTSVLLITHYGRILEYLNPTKVHVIKNGKIVASGSIDLVKIIEERGYSAVGDNEE

SEQ ID NO: 31122 - protein, 171 aa, Pisum sativum
SFLSSRGKLYEFSSSCMQDTIERYRRNTRSAQPLQRSDEQNMQNLKQETASLMKKIELLEASKRKLMGVGLGSCSLEVLQQIEQQLEKCVSTVRARKYQVYKYQIEQLKEKEKVLLAENSRLSKQPQPQLLQLPPPPPPNDHPRENQPYAESSSPSSDVVTELFIGLHRSS

SEQ ID NO: 31123 - protein, 196 aa, Pisum sativum
VEVNGLMKKAFELSILCDAEVALIVFSPRGRLYEFASSSIQETIERYRSHSRINNTQTTCESAENTQHLKEEAENMMKRIDLLETSKRKLLGEGLGTCSIEELQKIEQQLERSITKIRAKKTQVFREQIGHLKEKEKTLIAENVMLSEKYDKYSSQQAKKDDRKNIAEGEAFAASSDVETELFIGLPETRTRISPA

SEQ ID NO: 31124 - protein, 647 aa, Bacteroides fragilis NCTC 9343
MHPKIKIYRDLMKTFEELGVSPEIRKAIEEMGYENPMPVQEEVIPYLLGENNDVVALAQTGTGKTAAFGLPLIQKINVKNRIPQSLVLCPTRELCLQIAGDLNDYSKYIDGLKVLPVYGGSSIDSQIRSLKRGVHIIVATPGRLLDLMERKTVSLATVTNVVMDEADEMLNMGFTDSINAILADVPQERNTLLFSATMSPEIARISKNYLHNAKEITIGRKNESTSNVKHVVYTVHAKDKYAALKRIVDYYPQIYGIIFCRTRKETQEIADKLMQEGYNADSLHGELSQAQRDTVMQKFRIRNIQILVATDVAARGLDVDDLTHVINYGLPDDTESYTHRSGRTGRAGKTGTSIAIINLREKGKMREIERIIGKKFIAGEMPTGKQICEKQLLKVIDDLEKVKVNEEDINDFMPEIYRKLEWLSKEDLIKRMVSHEFNRFVDYYRNREEIEVPTDSRSERAGKSREGKSSRQAEPGYTRLFINLGKMDNFFPHELITLLNNNTRGRVELGRIDLMKNFSFFEVEEKQAQNVVKALNRTNWNGRKVTVEVAGEEASTEHKGRGKRNEGNDQGGRGRSSAPSADRKERGKGSKDSKQADSRKGKKPSREERGYSAARGPKGKDEWKQFFKDAEPDFSEEGWARRKPKKS

SEQ ID NO: 31125 - protein, 401 aa, Bacteroides fragilis NCTC 9343
MEQKKKVVVAFSGGLDTSFTVMYLAKEKGYEVYAACANTGGFSEEQLKQNEENAYKLGAVKYVTLDVTQEYYEKSLKYMIFGNVLRNGTYPISVSSERIFQALAIARYAKEIGAEAIAHGSTGAGNDQIRFDMTFLVMTPGIEIITLTRDMALSRQEEIDYLNKNGFEADFTKLKYSYNVGLWGTSICGGEILDSAQGLPETAYLKQVTKEGSELLRLEFKNGELHAVNGEVFEDKIAAIQKVEEIGAAYGIGRDMHVGDTIIGIKGRVGFEAAAPMLIIGAHRFLEKYTLSKWQQYWKDQVANWYGMFLHESQYLEPVMRDIEAMLQESQRNVNGTAILELRPLSFSTVGVESQDDLVKTKFGEYGEMQKGWTAEDAKGFIKVTSTPLRVYYANHKDEEV

SEQ ID NO: 31126 - protein, 811 aa, Bacteroides fragilis NCTC 9343
MKVMKFGGTSVGSVNSILSVKKIVESAGEPVIVVVSALGGITDQLISTSRMAAMGDAAYEGAYREIVRRHEEMVQGVIPAGETQTLLHYQVNELLDELKDIFQGIYLIKDLSPKTSDTIVSYGERLSSLIASRLIQGAVWFDSRTFIKTEKKHNKHTLDTELTNRLVREAFKEIPRVSLVPGFISSDKVSGDVTNLGRGGSDYTAAVIAAALDADSLEIWTDVDGFMTADPRVISTAYTISELTYVEATELCNFGAKVVYPPTIYPVCHKNIPILIKNTFNPDAQGTVIKQHVDHTKSKAIKGISSINDTSLITVQGLGMVGVIGVNYRIFKALAKNGISVFLVSQASSENSTSIGVRNADADLACEVLNEEFAKEIEMGEISPIQAEKNLATVAIVGENMKHTPGIAGKLFGTLGRNGINVIACAQGASETNISFVVDSKSLRKSLNVIHDSFFLSEYQVLNLFICGVGTVGGSLVEQIRQQQKKLMVENGLKLHVVGIIDATKAMFSRAGFDLANYREELKEKGVDSSLDTIRDEIIGMNIFNSVFVDCTASPDIASLYKDFLQHNISVVAANKIAASSAYENYRELKLIARQRGVKYLFETNVGAGLPIINTINDLIHSGDKILKIEAVLSGTLNYIFNKISADVPFSRTIKMAQEERYSEPDPRIDLSGKDVIRKLVILAREAGYKLEQEDVEKNLFVPNDFFEGSLEDFWKKVPSLDADFEARRKVLESENKHWRFVAKLENGKASVGLQEVDRNHPFYGLEGSNNIILLTTERYKEYPMMIQGYGAGAGVTAAGVFADIMSIANV

SEQ ID NO: 31127 - protein, 555 aa, Bacteroides fragilis NCTC 9343
MGLFIKKPFEALLAEANVSGSKSLKRVLGPWSLVALGVGVIIGAGLFSITGTVAAGYTGPAITLSFAIAALGCCFAGLCYAEFASMIPVAGSAYTYSYATMGELIAWIIGWDLVLEYTVAATTVSISWSRYLVVFLEGLDIHLPQALTACPWDGGIVNIPAFLIVVLMSIFLIRGTEGSSIFNGIVVFLKVSVIAIFVVLGWKYINADNYTPYIPANTGTLGEYGLSGVLRGAAIVFFAFLGFDAVSTAAQETKNPKRNMPIGILVSLLVCTVLYMLFAHVMTGVAHYTEFSGQQGIAPVAIAIEHMGHADATGIIHPDYPWLNRAIVLAILFGYCSVIMVTLLGQSRVFLSMSHDGLLPPFFSHINEKFRTPARSNLLFMLIVGLLAAFVPARLAGEMTSIGTLMAFTLVCAAVLVVRKTMPNIPRSFKTPFVPLVPILGILTCLCMMLFLPADTWIRLVLWMLIGLDIYVGYGMKHSKLEHGVKNRRGQSALNMIGIALSLLCVITGLWHQQTVGWNESKALLIISFVFAFTHCAYYMMRIWKGTTKQTNDNG

SEQ ID NO: 31128 - protein, 862 aa, Bacteroides fragilis NCTC 9343
MNFNNFTIKSQEAVQEAINLAQSRGQQAIETAHILYGVMKVGENVTNFIFQKLGLNGQQISLVLDKQIDSFPKVSGGEPYLSREANEVFQKATQYSKEMGDEFVSLEHLLLALLTVKSTVSTILKDAGMTEKELRGAISELRKGEKVTSQSSEDNYQSLEKYAINLNEAARSGKLDPVIGRDEEIRRVLQILSRRTKNNPILIGEPGTGKTAIVEGLAHRILRGDVPENLKNKQVYSLDMGALVAGAKYKGEFEERLKSVVNEVKKSEGNIILFIDEIHTLVGAGKGEGAMDAANILKPALARGELRSIGATTLDEYQKYFEKDKALERRFQIVQVDEPDNLSTISILRGLKERYENHHHVRIKDDAIIAAVELSSRYITDRFLPDKAIDLMDEAAAKLRMEVDSVPEGLDEISRKIKQLEIEREAIKRENDEPKLQTIGKELAELKEQEKSYKAKWQSEKSLMDIIQQNKVEIENLKFEADKAEREGNYGKVAEIRYGKLQELHKEIEDTQKKLHEMQGDTAMIKEEVDAEDIADVVSRWTGIPVSKMMQSEKDKLLHLEEELHQRVIGQDEAIAAVSDAVRRSRAGLQDPKRPIGSFIFLGTTGVGKTELAKALAEFLFDDETMMTRIDMSEYQEKHSVSRLVGAPPGYVGYDEGGQLTEAIRRKPYSVVLFDEIEKAHPDVFNILLQVLDDGRLTDNKGRVVNFKNTIIIMTSNMGSSYIQSQMEKLNGANNEEVVEETKKEVMNMLKKTIRPEFLNRIDETIMFLPLTEKDIKQIVLLQIKSVQKMLAGNGIELELTDAALDFLSQVGYDPEFGARPVKRAIQRYLLNDLSKKLLAQEVDRSKAIIVDAQGDGLVFRN

SEQ ID NO: 31129 - protein, 305 aa, Bacteroides fragilis NCTC 9343
MVFSGTNSRYLAEKICASLNCPLGNMNITHFADGEFAVSYEESIRGAHVFLVQSTFPNSDNLMELLLMIDAAKRASAKSVVAVIPYFGWARQDRKDKPRVSIGAKLVADLLSVAGIDRLITMDLHADQIQGFFNIPVDHLYASAVFLPYIQSLKLDELVIATPDVGGSKRASTFSKYLGVPLVLCNKSREKANEVASMQIIGDVKGKNVVLIDDIVDTAGTITKAANIMLEAGANSVRAIASHCVMSDPASFRVQESGLTEMVFTDSIPYSKKCAKVKQLSIADMFAETIKRVMNNESISSQYII

SEQ ID NO: 31130 - protein, 618 aa, Bacteroides fragilis NCTC 9343
MDKNTITGLVLIGILLVGFSFLSRPSEEQIAAQKRYYDSIAVVQQQEEALRAKTEAALANEKEETAADSASLFFSATKGKEAFTTIQNNLVEITLDNKGGRVYSALLKNYMGQDKKPVVLFNGSDASMNFNFYNKKGALQTKDFYFEAVNKTDSSVTMRLAADSASYIDFIYTLKPDNYLMSFVIKATGMDGKLAASTNYVDISWSQRARQIEKGYTYENRLADLTYKYTGDDVDNLSASKDDEKSVSERLDWIAFKNQFFSSVFIAEQDFEKTTVKSKMEKQGSGYIKDYSAEMSTFFDPTGKQPTDMYFYFGPNHYKTLTALDKGREEKWELNNLVYLGWPLIRWINKWITINVFDWLSGWGLSMGIVLLLLTIMVKIVVFPATWKTYMSSAKMRVLKPKIDEINKKYPKQEDAMKKQQEVMGLYSQYGVSPMGGCLPMLLQFPILMALFMFVPSAIELRQQSFLWADDLSTYDAFITFPFHIPFLGNHLSLFCLLMTVTNILNTKYTMQQQDTGAQPQMAAMKWMMYLMPIMFLFVLNDYPSGLNYYYFISTLISVVTMIILRRTTDENKLLTELEAKKKDPKQMKKTGFAARLEAMQKQQEQLAKERANKQNKK

SEQ ID NO: 31131 - protein, 558 aa, Bacteroides fragilis NCTC 9343
MCGIAGIFNIKIQSRELRNKALRMARKIRHRGPDWSGMYCGGSAILAHERLSIVDPQSGGQPLYSSDRKQVLAVNGEIYNHRDIRAQYAGRYEFRTGSDCEVILALYRDKGIHFLEELNGIFAFALYDEEKDEYLIARDPIGVIPLYIGKDAEGHVYFGSELKALEGFCDEYEPFLPGHYYHSKEGTMKRWYTRDWMEYKEENDKQADSRSPTRQIQDALENAVHRQLMSDVPYGVLLSGGLDSSVISAIAKKYAAKRIETDGASDAWWPQLHSFAIGLKGAPDLIKAREVAEYIGTVHHEINYTLQEGLDAIRDVIYFIETYDVTTVRASTPMYLLARVIKSMGIKMVLSGEGADEIFGGYLYFHKAPDARAFHEETVRKLSKLHLYDCLRANKSLAAWGVEGRVPFLDKEFLDVAMQLDPEIKMAPGKVIEKKVLREAFADMLPSGIAWRQKEQFSDGVGYSWIDTLKEITATAVSDEQMAHAAERFPIHTPMNKEEYYYRSIFEEHFPSESAARSVPSIPSVACSTAEALAWDTAFKNLNDPSGRAVKGVHEEAY

SEQ ID NO: 31132 - protein, 218 aa, Bacteroides fragilis NCTC 9343
MKFFIDTANLDQIREAHDLGVLDGVTTNPSLMAKEGIKGVENQRRHYVEICNIVQGDVSAEVIATDYEGMVREGKELAALNPHIVVKVPCIADGIKAIKHFSGQGIRTNCTLVFSTGQALLAAKAGATYVSPFVGRLDDICEDGVGLVADIVRMYRFYNYPTQVLAASIRSSKHIMECVEAGADVATCPLSAIKGLLNHPLTDAGLKKFLEDYKKVNE

SEQ ID NO: 31133 - protein, 391 aa, Bacteroides fragilis NCTC 9343
MKTSPRSNRLHIALFGKRNSGKSSLINALTNQNAALVSDIAGTTTDPVYQPMEIHGIGPCVFIDTAGFDDEGELGSLRIERTLQAADKADIALMVCCDTELSEEQRWIELLKERNIPYLLVLNKADLLEKPDEVADKLEQQTGQHPLIVSAKEKTGIDSIRQSILHRLPELNEQPDIVGDLANEGDVVLLVMPQDIQAPKGRLILPQVQTLRELLDKKCITLSCTTDQLDNALKALSVPPSLIITDSQVFRTVYEKKPPQSRLTSFSVLFARYKGDIDYYTEGAYIIDQLTENSRVLIAEACTHAPLSEDIGRVKLPRMLRKRIGEKLHIDIVSGNDFPKDLNCYDLIIHCGACMFNRKHVLNRIVKAKAQGVPMTNYGIVIAYINGIPFH

SEQ ID NO: 31134 - protein, 397 aa, Bacteroides fragilis NCTC 9343
MNQVSSHVTRLSPSATLLMSQKSAELKAKGVDVINMSVGEPDFNTPGHIKKAAIEAIEQNYSYYSPVMGFLSLREAIANKLNNENGVNYSASQIICSNGAKQSVCNAILAVVNPGDEVIIPAPYWVSYPEMVKLAEGVPVVVPTEIEQDFKITPSQLEAVITSKTRAIILSSPNNPTGTVYSRQELQELANVLSKHEHVLILSDEIYEHVNYVDKHESIAQFPTIKERVIIINGVSKAYAMTGWRIGFVAGPEWVVKGCSKLQGQYTSGPCSISQKAAEAAYRGLQNCVEEMRLAFERRRDLVVRLGKEIAGLEVNIPEGAFYLFPKCSSFFGKRYKDWVINNSTDLVMYLLEVGHVAAVSGDAFGAPGYFRISYATSDENIVEAMKRIKSALELLV

SEQ ID NO: 31135 - protein, 305 aa, Bacteroides fragilis NCTC 9343
MRFFVSINKWKTMHKAGFVNIVGNPNVGKSTLMNVLVGERISIATFKAQTTRHRIMGIYNTDDMQIVFSDTPGVLKPNYKLQESMLNFSTSALADADVLLYVTDVIETPDKNNEFIQKVRQQSAPILLLINKIDLTDQEKLVKLVEEWKELLPQAEIIPISAATKFNVDYVMKRIKDLLPDSPPYFDKDQWTDKPARFFVNEIIREKILLYYDKEIPYSVEVVVEEFKEDAKKIHIHAVIYVERDSQKGIIIGKQGKALKKVATEARRDLERFFGKTVFLETYVKVDKDWRSSDKELRNFGYQLD

SEQ ID NO: 31136 - protein, 300 aa, Bacteroides fragilis NCTC 9343
MNWNKIVECVPNFSEGRDLEKIDRIVAPFRARSGVKLLDYSNDEDHNRLVVTLIGEPEALRDAVIEAIGVAVELIDLNHHRGQHPRMGAVDVVPFIPIKNVTMDEAVSLSREIGEKVAGLYHLPVFLYEKSATAPHRENLAAVRKGEFEGMAEKMKLPEWHPDYGPAGCHPTAGVVAIGARMPLVAYNINLSTDNLEIATKIAKNIRHINGGLRYVKAMGVELKERNITQVSINITDYTRTALYRAFELVRIEARRYGVTILGSEIVGLVPMEALIDTASYYLGLENFSMRQVLESRIME

SEQ ID NO: 31137 - protein, 371 aa, Bacteroides fragilis NCTC 9343
MDKLNINSTPSSVKNGRGERLLVINPGSTSTKIAVYENETPLLVRNIRHTVEELSAFPRVIDQFEFRKSLVLRELEVNDIPFRFDAVIGRGGLVKPIPGGVYEVNEAMKRDTLHAMRTHACNLGGLIADELAAALPGCRAFIADPGVVDELEEVARITGSPLMPRITIWHALNQKAIARRYAAERGTRYEDLDLIVCHLGGGISVAVHRHGRAVDANNALDGEGPFSPERAGTLPAGQLIDLCFSGKFTKDELKKRISGRAGLTAHLGTTDIPAIIQFIEAGDDHARLVLDAMIYNVAKSIGAASTVLCGKVDAILLTGGIAYSDYVISRLRERISFLAPVFVYPGEDEMEALALNALGALRGELPVQVYQ

SEQ ID NO: 31138 - protein, 432 aa, Cucumis melo
  misc_feature (205)..(205): Xaa can be any naturally occurring amino acid
  misc_feature (215)..(215): Xaa can be any naturally occurring amino acid
  unsure (1)..(432): unsure at all Xaa locations
MAQILAPSTQWQLRTKLTSMSSSPITPKMWSSILLKQNKKGAVKSSSKYRVLSVKSVGGTINRMEDLLNLDVTPYTDKIIAEYIWIGGSGIDLRSKSRTISKPVEHPSELPKWNYDGSSTGQAPGEDSEVILYPQAIFKDPFRGGNNILVICDAYTPAGVPIPTNKRHRAAEIFSNKKVVDEIPWYGIEQEYTLLQTNVKWPLGXPVGAYPGPQXPYYCGVGADKSFGRDISDAHYKACLYAGINISGTNGEVMPGQWEYQVGPSVGIEAGDHIWCSRYILERITEQAGVVLSLDPKPIEGDWNGAGCHTNYSTKSMREEGGFEVIKKAILNLSLRHKDHISAYGEGNERRLTGKHETASINTFSWGVANRGCSIRVGRDTEKQGKGYLEDRRPASNMDPYVVTSLLAETTILWEPTLEAEALAAQKLSLKV

SEQ ID NO: 31139 - protein, 275 aa, Glycine max
MLEGLDEEGCVEEPGHHSEKKRRLSVDQVKALEKNFEVENKLEPDRKLKLAQELGLQPRQVAVWFQNRRARWKTKQLERDYGVLKANYESLKLNYDTLQQDHEALLKEIKELKSRLVQEENNNNTESDVSVKEEMLTTTLCETAIPGSDTKELSYECFNKSDEVGGGSSVFHVDFKDGSSDSDSSAILNEENNNHSPNNNAAISSCGVLQSHGLLLSPSSSSMNNCFQFQKQYQTTTTQYVKMEEHNFLSADEACNFFSDEQAPTLQWYCSEEWS

SEQ ID NO: 31140 - protein, 288 aa, Porphyromonas gingivalis
MNDSKILHQMAKNKLIAPFLKWVGGKRQLIPEIKNLLPKGILSHPYYEPFIGGGALLFELQPKNATINDYNEELINVYKVIRDNPHELIEDLKKHKNTAEYFYEIRAIDRNPLFINLTDIERASRIIYLNKTCYNGLYRVNNAGEFNSPFGKYKNPNIVNEPVIKAVSKYLNTAKIQIFNGDYQTILKDIPRSSFVYLDPPYHPISQSANFTGYVQGGWDEKDQIRLRNVCNTLNERGIKFLLSNSSSDFIKEIYSDYNIYVVQATRAVNSDSSKRGQVSEFLINNYE

SEQ ID NO: 31141 - protein, 400 aa, Pseudomonas putida
MRDVFICDAIRTPIGRFGGALAGVRADDLAAVPLKALIEPNPAVQWDQVDEVFFGCANQAGEDNRNVARMALLLAGLPESIPGVTLNRLCASGMDAIGTAFRAIASGEMELAIAGGVESMSRAPFVMGKAESGYSRNMKLEDTTIGWRFINPLMKSQYGVDSMPETADNVADDYQVSRADQDAFALRSQQKAAAAQAAGFFAEEIVPVRIAHKKGETIVERDEHLRPETTLEALTKLKPVNGPDKTVTAGNASGVNDGAAALILASAEAVKKHGLTPRARVLGMASGGVAPRVMGIGPVPAVRKLTERLGVAVSDFDVIELNEAFASQGLAVLRELGVADDAPQVNPNGGAIALGHPLGMSGARLVLTALHQLEKSGGRKGLATMCVGVGQGLALAIERV

SEQ ID NO: 31142 - protein, 316 aa, Arachis hypogaea
MALPISKVDFLIFMCLIGLGSAQLSSNFYATKCPNALSTIKSAVNSAVAKEARMGASLLRLHFHDCFVQGCDASVLLDDTSNFTGEKTAGPNANSIRGFEVIDTIKSQVESLCPGVVSCADILAVAARDSVVALGGASWNVLLGRRDSTTASLSSANSDLPAPFFNLSGLISAFSNKGFTTKELVTLSGAHTIGQAQCTAFRTRIYNESNIDPTYAKSLQANCPSVGGDTNLSPFDVTTPNKFDNAYYINLRNKKGLLHSDQQLFNGVSTDSQVTAYSNNAATFNTDFGNAMIKMGNLSPLTGTSGQIRTNCRKTN

SEQ ID NO: 31143 - protein, 581 aa, Phaseolus vulgaris
MDTIKSFKGYGKVNELEQQAYEKKTRKRLIIIAVSSIVLIAVIIAAVAGVVIHNRNSESSPSSDSVPQTELSPAASLKAVCDTTRYPSSCFSSISSLPESNTTDPELLFKLSLRVAIDELSSFPSKLRANAEQDARLQKAIDVCSSVFGDALDRLNDSISALGTVAGRIASSASVSNVETWLSAALTDQDTCLDAVGELNSTAARGALQEIETAMRNSTEFASNSLAIVTKILGLLSRFETPIHHRRLLGFPEWLGAAERRLLEEKNNDSTPDAVVAKDGSGQFKTIGEALKLVKKKSEERFSVYVKEGRYVENIDLDKNTWNVMIYGDGKDKTFVVGSRNFMDGTPTFETATFAVKGKGFIAKDIGFVNNAGASKHQAVALRSGSDRSVFFRCSFDGFQDTLYAHSNRQFYRDCDITGTIDFIFGNAAVVFQSCKIMPRQPLPNQFNTITAQGKKDPNQNTGIIIQKSTITPFGNNLTAPTYLGRPWKDFSTTVIMQSDIGALLNPVGWMSWVPNVEPPTTIFYAEYQNSGPGADVSQRVKWAGYKPTITDRNAEEFTVQSFIQGPEWLPNAAVQFDSTL

SEQ ID NO: 31144 - protein, 583 aa, Solanum lycopersicum
MTRVEDFFSKQIDFCKRKKKIYLAIVASVLLVAAVIGVVAGVKSHSKNSDDHADIMAISSSAHAIVKSACSNTLHPELCYSAIVNVSDFSKKVTSQKDVIELSLNITVKAVRRNYYAVKELIKTRKGLTPREKVALHDCLETMDETLDELHTAVEDLELYPNKKSLKEHVEDLKTLISSAITNQETCLDGFSHDEADKKVRKVLLKGQKHVEKMCSNALAMICNMTDTDIANEMKLSAPANNRKLVEDNGEWPEWLSAGDRRLLQSSTVTPDVVVAADGSGDYKTVSEAVRKAPEKSSKRYVIRIKAGVYRENVDVPKKKTNIMFMGDGKSNTIITASRNVQDGSTTFHSATVVRVAGKVLARDITFQNTAGASKHQAVALCVGSDLSAFYRCDMLAYQDTLYVHSNRQFFVQCLVAGTVDFIFGNGAAVFQDCDIHARRPGSGQKNMVTAQGRTDPNQNTGIVIQKCRIGATSDLRPVQKSFPTYLGRPWKEYSRTVIMQSSITDVIQPAGWHEWNGNFALDTLFYGEYANTGAGAPTSGRVKWKGHKVITSSTEAQAYTPGRFIAGGSWLSSTGFPFSLGL

SEQ ID NO: 31145 - protein, 352 aa, Helianthus annuus
MADSGHSISVTFPSFHSGGKEHIIRTGCGSVSVTVCGDQEKPPLITYPDLALNHMSCFQGLFVSPESASLLLHNFCIYHINPPGHELGAASIGIDDPVPSIEDLCDQILVVLNYFRLGSVMCMGAMAGAYILTLFSIKYSERVTGLILISPICKAPSWTERFYNKLTSKTLYYYGMCDLVKELLIHRYFSKEVCGNPEIPESDMVLACRKLLDERDSVNVWRYLQAIDSRRDITEELKSLECKTIIFVGDSSPFHDEALQIAEKLGTNCSALVEVHACGSMVTQEQPHAMLIPLENFLKGFGLYRPCRYSNSPRSPLGPSSIDPELLYPEKMGLKLRPIKLRVSPQPRAHKN

SEQ ID NO: 31146 - protein, 619 aa, Candida tropicalis
MSEQNQGQPDQQHSGDHQHHHHHHHHHHHSQQPAQPIPIDPNVNPANRIGRYQIIKTLGEGSFGKVKLAQHVGTGQKVALKIINRKTLAKSDMQGRVEREISYLRLLRHPHIIKLYDVIKSKDEIIMVIEFAGKELFDYIVQRGKMPEDEARRFFQQIIAAVEYCHRHKIVHRDLKPENLLLDDQLNVKIADFGLSNIMTDGNFLKTSCGSPNYAAPEVISGKLYAGPEVDVWSSGVILYVMLCGRLPFDDEFIPALFKKISNGVYTLPNYLSPGAKHLLTRMLVVNPLNRITIHEIMEDEWFKQDMPDYLLPPDLSKIKTSKIDIDEDVISALSVTMGYDRDEIISVIEKANREAAAGGATPTNQSKSTNEVLDAYLLMKENHTLVKDLKKSKSENIESFLSLSPPPSSSFPNPGSTSSAPGVQQSLTYQTLATVPDLSTLPNSTIAILPTSLPSIHRAYMMETKVNDPQQQIPAPQPTKKLKTRWHFGIRSRSYPLDVMGEIYRALKNLGAEWAKPTEEELWTIRVRWKYDSTPQLRVWQRTNLMKMQIQLFQLEPNNYLVDFKFDGWEQTSDESKNDASLDYKQQDLDEVGSFSAYPFLHLATRLIMELAVNSQSG

SEQ ID NO: 31147 - protein, 237 aa, Listeria monocytogenes
IQPFTSFIMFVAKFVGGNYGIAIIITTLLIRALIMPLNLRTAKAQMGMQSKMAVAKPEIDEIQARLKRATSKEEQATIQKEMMAVYSKYNINPMQMGCLPLLIQMPILMAFYYAIRGSSEIASHTFLWFNLGSPDMVLAIIAGLVYLAQYFVSMIGYSPEQKKQMKIIGLMSPIMILFVSFTAPSALALYWAVGGLFLAGQTLLTKKLYMNKHPEIKVMEQEEKEFEQIVEEQKKEK

SEQ ID NO: 31148 - protein, 419 aa, Candidatus Nitrosococcus watsonii C-113
MENMKGTHITNRAKKWLAIGFTAVIASSVFYIPTVAAHGEKAQAAFLRMRTIHWYDMVWSKDTIAVNETYTISGKFRVFEDWPEAVEVPHVSFLNAGQPGPVTTRLTSYINGMFVPRSIGLELGGDYEFEMTMQGRRPGTWHVHTLLNVQGGGPLIGPGKYITITGDMADFENKVTDLTGNTVNLETMATGTVIGWHLFWYVLGIAWIVWWARRPMFLPRYMRVEAGEANDLVTAQDKKVTIGVLVGVLLIVLFGYKSAEEKFPVTIPLQAGLLGTIEPLPVDYNSMVSAKVLKANYRVPGRTITMTVELTNHTDQVLSIGEFNTGGIRFMNANVRSDDTGYPEELLAPEGLEMSQQDIAPGETVVVDISATDAAWEVQRMADVIYDPDSRFAGLIFFIDPEGNEIPIPVGGPLVPTFV

SEQ ID NO: 31149 - protein, 287 aa, Helicobacter pylori
MILISKKGVFMKTNGLFKMWGLFLVLIALVFNACSDSHKEKKDALEVIKQRGVLKVGVFSDKPPFGSVDSKGKYQGYDVIIAKRMALDLLGDENKIEFIPVEASARVEFLKANKVDIIMANFTRTKEREKVVDFAKPYMKVALGVISKDGVIKNIEELKDKELIVNKGTTADFYFTKNYPDIKLLKFEQNTETFLALLNNKATALAHDNTLLLAWAKQHPEFKLGITSLGDKDVIAPAIKKGNPKLLEWLNNEMDSLISSDFLKEAYKETLAPVYGDEIKPEEIIFE

SEQ ID NO: 31150 - protein, 438 aa, Nepenthes gracilis
MASPLYSVVLGLAIVSAIVAPTSSTSRGTLLHHGQKRPQPGLRVDLEQVDSGKNLTKYELIKRAIKRGERRMRSINAMLQSSSGIETPVYAGDGEYLMNVAIGTPDSSFSAIMDTGSDLIWTQCEPCTQCFSQPTPIFNPQDSSSFSTLPCESQYCQDLPSETCNNNECQYTYGYGDGSTTQGYMATETFTFETSSVPNIAFGCGEDNQGFGQGNGAGLIGMGWGPLSLPSQLGVGQFSYCMTSYGSSSPSTLALGSAASGVPEGSPSTTLIHSSLNPTYYYITLQGITVGGDNLGIPSSTFQLQDDGTGGMIIDSGTTLTYLPQDAYNAVAQAFTDQINLPTVDESSSGLSTCFQQPSDGSTVQVPEISMQFDGGVLNLGEQNILISPAEGVICLAMGSSSQLGISIFGNIQQQETQVLYDLQNLAVSFVPTQCGAS

SEQ ID NO: 31151 - protein, 437 aa, Nepenthes gracilis
MASSLYSFLLALSIVYIFVAPTHSTSRTALNHRHEAKVTGFQIMLEHVDSGKNLTKFQLLERAIERGSRRLQRLEAMLNGPSGVETSVYAGDGEYLMNLSIGTPAQPFSAIMDTGSDLIWTQCQPCTQCFNQSTPIFNPQGSSSFSTLPCSSQLCQALSSPTCSNNFCQYTYGYGDGSETQGSMGTETLTFGSVSIPNITFGCGENNQGFGQGNGAGLVGMGRGPLSLPSQLDVTKFSYCMTPIGSSTPSNLLLGSLANSVTAGSPNTTLIQSSQIPTFYYITLNGLSVGSTRLPIDPSAFALNSNNGTGGIIIDSGTTLTYFVNNAYQSVRQEFISQINLPVVNGSSSGFDLCFQTPSDPSNLQIPTFVMHFDGGDLELPSENYFISPSNGLICLAMGSSSQGMSIFGNIQQQNMLVVYDTGNSVVSFASAQCGAS

SEQ ID NO: 31152 - protein, 755 aa, Agrobacterium tumefaciens (strain Ach5)
MSASPLLDNQCDHLPTKMVDLTMVDKADELDRRVSDAFLEREASRGRRITQISTECSAGLACKRLADGRFPEISAGGKVAVLSAYIYIGKEILGRILESKPWARATVSGLVAIDLAPFCMDFSEAQLIQALFLLSGKRCAPIDLSHFVAISISKTAGFRTLPMPLYENGTMKCVTGFTITLEGAVPFDMVAYGRNLMLKGSAGSFPTIDLLYDYRPFFDQCSDSGRIGFFPEDVPKPKVAVIGAGISGLVVANELLHAGVDDVTIYEASDRVGGKLWSHAFRDAPSVVAEMGAMRFPPAAFCLFFFLERYGLSSMRPFPNPGTVDTYLVYQGVQYMWKAGQLPPKLFHRVYNGWRAFLKDGFYERDIVLASPVAITQALKSGDIRWAHDSWQIWLNRFGRESFSSGIERIFLGTHPPGGETWSFPHDWDLFKLMGIGSGGFGPVFESGFIEILRLVINGYEENQRMCPEGISELPRRIASEVVNGVSVSQRICHVQVRAIQKEKTKIKIRLKSGISELYDKVVVTSGLANIQLRHCLTCDTNIFQAPVNQAVDNSHMTGSSKLFLMTERKFWLDHILPSCVLMDGIAKAVYCLDYEPQDPNGKGLVLISYTWEDDSHKLLAVPDKKERLCLLRDAISRSFPAFAQHLFPACADYDQNVIQHDWLTDENAGGAFKLNRRGEDFYSEELFFQALDTANDTGVYLAGCSCSFTGGWVEGANRTPCNAVCAIIHNCGGILAKGNPLEHSWKRYNYRTRN

SEQ ID NO: 31153 - protein, 755 aa, Agrobacterium tumefaciens
MSASPLLDNQCDHLPTKMVDLTMVDKADELDRRVSDAFLEREASRGRRITQISTECSAGLACKRLADGRFPEISAGGKVAVLSAYIYIGKEILGRILESKPWARATVSGLVAIDLAPFCMDFSEAQLIQALFLLSGKRCAPIDLSHFVAISISKTAGFRTLPMPLYENGTMKCVTGFTITLEGAVPFDMVAYGRNLMLKGSAGSFPTIDLLYDYRPFFDQCSDSGRIGFFPEDVPKPKVAVIGAGISGLVVANELLHAGVDDVTIYEASDRVGGKLWSHAFRDAPSVVAEMGAMRFPPAAFCLFFFLERYGLSSMRPFPNPGTVDTYLVYQGVQYMWKAGQLPPKLFHRVYNGWRAFLKDGFYERDIVLASPVAITQALKSGDIRWAHDSWQIWLNRFGRESFSSGIERIFLGTHPPGGETWSFPHDWDLFKLMGIGSGGFGPVFESGFIEILRLVINGYEENQRMCPEGISELPRRIASEVVNGVSVSQRICHVQVRAIQKEKTKIKIRLKSGISELYDKVVVTSGLANIQLRHCLTCDTNIFQAPVNQAVDNSHMTGSSKLFLMTERKFWLDHILPSCVLMDGIAKAVYCLDYEPQDPNGKGLVLISYTWEDDSHKLLAVPDKKERLCLLRDAISRSFPAFAQHLFPACADYDQNVIQHDWLTDENAGGAFKLNRRGEDFYSEELFFQALDTANDTGVYLAGCSCSFTGGWVEGAIQTACNAVCAIIHNCGGILAKGNPLEHSWKRYNYRTRN

SEQ ID NO: 31154 - protein, 716 aa, Pisum sativum
MHQLILPFLKPWKGLVDGKTGYLYFWNPETNVTQYERPLSSAAPPKPSAVPSSSVQVQQSSQGRGRSPDFSDRYDRNGNGGSDESGSRSHQSSKGGTNSSHNNVANGTHVTGNVSSIKGLVASDTGPALTPEAYRRRHEITVTGDNVPPPVMSFASSGFPSEIHKEVQNAGFSAPTPIQAQSWPIALQSKDIVAIAKTGSGKTLGYLLPAFITSSALIITPKWGPTILVLHQQGELATQIQDEAVKFSKTSRIACTCLYGGAPKGPQLRDIDRGADIVVATPGRLNDILEMRRISLHQVSYLVLDEADRMLDMGFEPQIRKIVNGVPARRQTLMFTATWPKEVRKIAADLLVNPVQVNIGNVDELVANKSITQHIEVLAHMEKQRRLESILQSQDQGSKIIIFCSTKKMCDQLARNLTRQFGAAAIRGDKSQADRDHVLNQFRSGRTPVLVATDVAARGLDVKDIRVVVNYTFPTGVEDYLHRIGRTGRAGATGIAYTFFGDQDAKHASDLIKILEGANQKVPPELRELSSRGGGGFGRSRRYGSGGRGDSGFGAKSYDSGSGYGGRGNDSGYGGRGSDSSYGRKGGYGSSAAFGRGGGRGFDYDSQRNERDRSPDRGSSWSDRFKTRERSRSPVKAAPSQYNAPVSFHQAMMERNGGGSDRNKSFNRERSRSHSPYRHDKGKRSPSPLAVVGPTVVQVLEETVVLILTMENWRKG

SEQ ID NO: 31155 - protein, 403 aa, Cupriavidus necator [sequence omitted]

SEQ ID NO: 31156 - protein, 69 aa, Brassica rapa
SQRKRGRTPAEKETKRLKRLLRNRVSAQQARERKKAYLGELENRVKDLENRNSELEERLSTLQNENPML

SEQ ID NO: 31157 - protein, 216 aa, Pisum sativum
MVRGKTQMKRIENATSRQVTFSKRRNGLLKKAFELSVLCDAEVALIIFSPRGKLYEFSSSCMQDTIERYRRNTRSAQPLQRSDEQNMQNLKQETASLMKKIELLEASKRKLMGEGLGSCSLEELQQIEQQLEKSVSTVRAERIRFYKNQIEQLKEKEKVLLAENSRLSKQPQPQLLQLPPPPPPNDHPRENQPYAESSSPSSDVVTELFIGLHRSS

SEQ ID NO: 31158 - protein, 337 aa, Delftia tsuruhatensis
MAKRAQSLTITDVTAQGSDAILLSLRVDDEQQPKFTFQPGQYLTLAVEVQGDEHWRCYSITSEPVTGQPISVLVRRVAGGRVSNWLCDNARPGRQLQVLPPAGHFTLARPGQPLLLYAGGSGIAPVFALAREALARGAARVRLFYANRDRATAMLLAELQALQDAAAGRLEIVHWYDAEQGLPTQAVLVAQAQGLDQADAYMCGPEPFMHAVGASLQVAGFDAQRVHREDFGAAVEGASEEAAGDGPEALLTVLMKGQTHAVPVRAGELLLSAMLRAGLPAPHACRVGECASCMCRLQAGEVQRLDSSVLDEDDVAAGWLLACRTRAASPALQVRFS

SEQ ID NO: 31159 - protein, 533 aa, Mesorhizobium ciceri
MAPRVLVSDKLSPTAVQIFKDRGVEVDYLPDLGKDKDKLAEVIGQYDGLAIRSATKVTEKLINAATNLKVIGRAGIGVDNVDIPAASRKGIIVMNTPFGNSITTAEHAVAMIFALARQIPEANASTHAGKWEKNRFMGVEITGKTLGVIGCGNIGSIVATRGVGLKMHVIAFDPFLSDSRAEELGVDKVELDELFARADFITLHTPLTDKTRNIIDAAAIAKMKKGVRIINCARGGLIVEADLVAALKSGKVAGAGVDVFEVEPAENNELFGMENVVATPHLGASTTEAQENVALQVAEQMADYLIKGAVSNAINMPSITAEEAPRLKPFVKLAEVLGAFVGQVTEDPIKEVEILFDGSTATMNTRALISAALAGLIRPQVSDVNMVSAPIMVKERGIIVAEVKRDKSGVFDGYIKLTVKTEHMTRSIAGTCFSDGKPRFIQIKGINLDAEVGQHMLYTTNADAPGIIGLLGTVCGENGVNIANFQLGRNRPGGDAIALLYLDAPFPEAVLEKVKAHKSIDSAKRLQFDVNAM

SEQ ID NO: 31160 - protein, 388 aa, Mesembryanthemum crystallinum
MAEMNKQPSVIQKAAGQFHLSSGLSQITQPRLGGSQGPALHQRRFAYGNYSNAAFQYPTSSTTQDLSFVNTMASPVVAHAPAEKNFKTFAIDFMMGGVSAAVSKTAAAPIERVKLLIQNQDEMLRSGRLSEPYKGIGDCFKRTTADEGMIALWRGNTANVIRYFPTQALNFAFKDYFKRMFNFKKDESYWKWFAGNLASGGAAGASSLVFVYSLDYARTRLANDAKAAKKGGERQFNGLIDVYKKTFASDGIAGLYRGFNISCVGIIVYRGLYFGMYDSLKPVLLTGKLQDSFFASFGLGWLITNGAGLASYPIDTVRRRMMMTSGEAVKYKGSFDCFAQILKNEGAKSLFKGAGANILRAVAGAGVLAGYDKLQVILLGKKFGSGGA

SEQ ID NO: 31161 - protein, 377 aa, Rhizobium leguminosarum
MRGTRMRVGCPKEIKNHEYRVGLTPASVREYVAHGHEVWVETKAGVGIGADDAAYAAAGAKIAASAKDIFEKCDMIVKVKEPQPAEWAQLRDGQLLYTYLHLAPDPEQTKGLIASGVTAIAYETVTDERGGLPLLAPMSEVAGRLSIQAGATALQKANGGLGVLLGGVPGVLPAKVAVIGGGVVGLHAARMAAGLGADVSILDKSLPRLRQLDDIFAGRIHTRYSSIQALEEEVFSADLIIGAVLIPGAAAPKLVTREMLSGMKKGSVIVDVAIDQGGCFETSHATTHSDPTYEVDGVVHYCVANMPGAVPVTSAHALNNATLVHGLALADRGLRAIAEDRHLRNGLNVHKGRITSKPVAEALGYEAFAPESVLNVA

SEQ ID NO: 31162 - protein, 226 aa, Phanerochaete chrysosporium
MRARQYSISSSPLCDPTRASLTIRVFEAPTSPGRKDPLLGVASTYLGGLHPGDRVQLAVRPCKTAFRLPADPAVPLVLVCAGAGLAPMRGFLQERALQKEGGRDVGKSLLFFGCRHPEEDYLYRDEDLKKWVELGIVDVRVAFSRAQDQSLGCKHVQDRLWHDRTDVMDACDKGAKLYLCGSAKMAAGVKDKLVLVVQDAMQFEHAAAVEQFNTMMTGRFATDVFE

SEQ ID NO: 31163 - protein, 168 aa, Listeria monocytogenes
QQLLRNWAIVSVMNLVGAFFVAYFFGHFVGLTEGDFLPKTLATAGAKINDPFWVAFVSGIGCNWFVGIAVWLCYAAKDFAGKILGIWFPVMAFVAIGFQHVVANMFIIPAAIFAGYYSWADFIWNVIPVYLGNVVGGAVFVSLFYFLAYKKNAPKKVKEEIHQPIEEN

SEQ ID NO: 31164 - protein, 205 aa, Listeria monocytogenes
IGGILVWFGWYGFNVGSALTIDNVAMTAFVNTNTAAAAGIIGWGLVEWLTNKKPTMLGTISGAIAGLVSITPAAGFVTVPSSLIIGFFGGALCFWAVFWLKGKVKYDDALDAFGLHGIGGIWGGIATGLFATTKVNEAGADGLFYGNASLVVKQLIAIGSTVAYVAVVTALIVVIIKLFLPIRVNEEQEYKGLDLTLHGEKAYQE

SEQ ID NO: 31165 - protein, 88 aa, Listeria monocytogenes
KQLKSQKAMTNLQPKIKELQEKYSSKDNETKQKLQQETMRLYQENSVNPMMGCLPLLIQMPILLGFYQAISRTAEIKTDSFLWMQLGN

SEQ ID NO: 31166 - protein, 355 aa, Paxillus involutus
MAASTYHNDLLAPFLALPQGDKVQAEYVWIDGDSGLRSKTTTVSKKVTDIGQLRIWDFDGSSTNQAPGHDSDVYLRPAAIFKDPFRGGDNILVLAETYNSDGTPNRTNYRHHASKVMDLAKDSVPWFGLEQEYTLFDADGSPFGWPKGGFPGPQGPYYCGAGTGKVVARDLIEAHYRACLYSGINISGINAEVMPSQWEFQVGPYEGISMGDHLWMARYLLVRIAEQWGIKVSFHPKPLQGDWNGAGCHTNYSTLPMREPGGMKHIDAAIEKLAKRHNEHIAVYGEDNELRLTGRHETGHIGDFSSGVANRGASIRVPRHVAAQGYGYLEDRRPASNIDPYRVTGIIVETTLLDK

SEQ ID NO: 31167 - protein, 421 aa, Saccharomyces cerevisiae
KIKDPKILGIDPNVTQYTGYLDVEDEDKHFFFWTFESRNDPAKDPVILWLNGGPGCSSLTGLFFELGPSSIGPDLKPIGNPYSWNSNATVIFLDQPVNVGFSYSGSSGVSNTVAAGKDVYNFLELFFDQFPEYVNKGQDFHIAGESYAGHYIPVFASEILSHKDRNFNLTSVLIGNGLTDPLTQYNYYEPMACGEGGEPSVLPSEECSAMEDSLERCLGLIESCYDSQSVWSCVPATIYCNNAQLAPYQRTGRNVYDIRKDCEGGNLCYPTLQDIDDYLNQDYVKEAVGAEVDHYESCNFDINRNFLFAGDWMKPYHTAVTDLLNQDLPILVYAGDKDFICNWLGNKAWTDVLPWKYDEEFASQKVRNWTASITDEVAGEVKSYKHFTYLRVFNGGHMVPFDVPENALSMVNEWIHGGFSL

SEQ ID NO: 31168 - protein, 382 aa, Methylococcus capsulatus str. Bath
HGEKSQAAFMRMRTIHWYDLSWSKEKVKINETVEIKGKFHVFEGWPETVDEPDVAFLNVGMPGPVFIRKESYIGGQLVPRSVRLEIGKTYDFRVVLKARRPGDWHVHTMMNVQGGGPIIGPGKWITVEGSMSEFRNPVTTLTGQTVDLENYNEGNTYFWHAFWFAIGVAWIGYWSRRPIFIPRLLMVDAGRADELVSATDRKVAMGFLAATILIVVMAMSSANSKYPITIPLQAGTMRGMKPLELPAPTVSVKVEDATYRVPGRAMRMKLTITNHGNSPIRLGEFYTASVRFLDSDVYKDTTGYPEDLLAEDGLSVSDNSPLAPGETRTVDVTASDAAWEVYRLSDIIYDPDSRFAGLLFFFDATGNRQVVQIDAPLIPSFM

SEQ ID NO: 31169 - protein, 101 aa, Escherichia coli K12
MRGSHHHHGSRLQSGKMTGIVKWFNADKGFGFITPDDGSKDVFVHFSAGSSGAAVRGNPQQGDRVEGKIKSITDFGIFIGLDGGIDGLVHLSDISWAQAEA

SEQ ID NO: 31170 - protein, 271 aa, Solanum tuberosum
MSTPMMCTSLGVIRKGSWTEEEDILLRKCIDKYGEGKWHLVPTRTGLNRCRKSCRLRWLNYLRPHIKRGDFDWDEVDLILRLHKLLGNRWSLIAGRLPGRTANDVKNYWNTNLLRKLNTSTKFAPQPQEGINTSTIAPQPQEGINTSTIAPQPQEGIKCGQANAIIRPQPQKFTSSMKINVSWCNNNSIVNNEEASKDNNDMQWWANILENCNDIGEGEAERTLPSCKEINCNEIDKTPSLLHDGGNSMQQGQGDGGWDEFSLDDIWNLLN

SEQ ID NO: 31171 - protein, 256 aa, Solanum tuberosum
TPMMCTSLGVIRKGSWTEEEDILLRKCIDKYGEGKWNLVPTRAGLNRCRKSCRLRWLNYLRPHIKRGDFDWDEVDLILRLHKLLGNRWSLIAGRLPGRTANDVKNYWNTNLLRKLNTSTKFAPQPQEGINTSTIAPQPQEGIKCGKANAIIRPQPQKFRSSMKINVSWCNNNSIVNNEEASKDNNDMQWWANILENCNDIGEGEAERTLPSCKEINCNEIDKTPSLLHDGGNSTQQGQGDGGWDEFSLDDIWNLLN

SEQ ID NO: 31172 - protein, 259 aa, Solanum tuberosum
KGSWTEQEDFLLRKCIQIYGEGKWHLVPARAGLNRCRKSCRLRWLNYLRPHIKRGDFAPDEVDLILRLHKLLGNRWSLIAGRLPGRTANDVKNYWNTHFQKKLNIITPPPRPRPNPHLHIKHKSIVVTKNEIIRPQPRNFSNVKKNNSHWCNNKSMITNTLDKDDKRCKEIVVNISEKPTRENTSSIDDGVQWWTNLLENCNEIEEEVAVTNFEKTPTMLLHEEISPPLINGEGNSMQQGQSHDWDDFSTDIDLWNLLN

SEQ ID NO: 31173 - protein, 221 aa, Solanum tuberosum
EEEDILLRKCIDKYGEGKWHLVPTRTGLNRCRKSCRLRWLNYLRPHIKRGDFDWDEVDLILRLHKLLGNRWSLIAGRLPGRTANDVKNYWNTNLLRKLNTSTKFAPQPQEGINTSTIAPQPQEGIKCGKANAIIRPQPQKFRSSMKINVSWCNNNSIVNNEEASKDNNDMQWWANILENCNDIGEGEAERTLPSCKEINCNEIDKTPSLLHDGGNSMQQGQ

SEQ ID NO: 31174 - protein, 254 aa, Solanum tuberosum
LLRKCIQTYGEGKWHLVPARAGLNRCRKSCRLRWLNYLRPHIKRGDFAPDEVDLILRLHKLLGNRWSLIAGRLPGRTANDVKNYWNTHFQKKLNIIAPPPPPPPPRPRPNPHLQIKHKSIAITKNEIIRPQPRNFSNVKKNNSHWCNNKSMITNTLDKDDERCNEIVVNISEKPTRENTSSIDDGVQWWTNFLENCNEIEEEVAVTDFEKIPTMLLHEEISPPLINGEGNFMQQGQSHDWDDFSTDIDLWNLLN

SEQ ID NO: 31175 - protein, 222 aa, Eupomatia bennettii
RNGLLKKAYELSVLCDAEVALIIFSNRGKLYEFCSSSSSMFKTLERYQKCNYGAPETVVTTREIQSSHQEYLKLKARVEALQRSQRNLLGEDLGPLSGKELDTLERQLDMSLKQIRSTRTQYMLDQLTDLQRREQMLSEANKTLKRRLEEGMEANPNHAWDHNPHAMGFVRQQGPPQDDGFFHPLDCEPTLQIGLCRYQTDQMQMTTAPGPSANNYMPGWLA

SEQ ID NO: 31176 - protein, 228 aa, Magnolia grandiflora
KRRNGLLKKAYELSVLCDAEVALIIFSTRGKLYEFCSSPSMLQTLERYQKCSYSTLEVSAPTNETQSSYQEYLKLKARVEILQRTQRNLLGEDLGPLSTKELEQLENQLEMSLKQIRSTKTQFMLDQLSDLKRKEQMLVEANKALKRKLEESGRENLLQLSWDTGAQNMSSYNRQPSNYEGFFQPLDCQPTLQMGYHPVYEDQMTVATNHGQNNVHGFMPGWMTIDLT

SEQ ID NO: 31177 - protein, 206 aa, Magnolia grandiflora
KRRNGLLKKAYELSVLCDAEVALIIFSNRGKLYEFCSGSSMLKTLERYQKCNYGAPELPVSTRETQSYHQEYLKLKARVEALQRSQRNLLGEDLGPLSGKELETLERQLDISLRQIRSTRTQCMLDQLGDLQRREHMLSEANKTLRRRLEEGAQANHNQVWEPNAHAVDSYNRQQPQQQGDGFFHPLECEPTLHIGYQPDQITIAA

SEQ ID NO: 31178 - protein, 316 aa, Populus alba x Populus tremula var. glandulosa
MGSAKFFVTLCIVPLLASSFCSAQLSATFYASTCPNLQTIVRNAMTGAVNGQPRLAASILRLFFHDCFVNGCDGSILLDDTATFTGEKNANPNRNSARGFEVIDTIKTRVEAACNATVSCADILALAARDGVVLLGGPSWTVPLGRRDARTASQSAANSQIPSPASSLATLISMFSAKGLSAGDMTALSGGHTIGFARCTTFRNRIYNDTNIDASFATTRRASCPASGGDATLAPLDGTQTRFDNNYYTNLVARRGLLHSDQELFNGGSQDALVRTYSTNGATFARDFAAAMVRMGNISPLTGTNGEIRRNCRVVN

SEQ ID NO: 31179 - protein, 922 aa, Astragalus sinicus
MELQHIWMLRLVVACALFLCIFFRSTSAVEGFESIACCADSNYTDPRTTLNYTTDYIWFSDKQSCKQIPEIVLSQRSNENVRLFHINEGKRCYNLPTIEDKVYLIRGTFPFDSFDSSFYVSIGVTQLGEVRSSRLQDLEIEGVFKATKDYIDFCLVKGEVNPFISQIELRSLPEEYLHDLPASVLKLISRNNLGDKKDDIRFPVDQSDRIWKATSNLSSALPLSFNVSNVDLRGNLTPPLQVLQTALTHPERLQFIHDGLDTEDYEYSIFLYFLELNSTIIAGQRVFDIYLNNEVKKERFDVLAGGSKYSYTILNISANGSLNITLVKASQSKFGPPLNAYEILQIRPWIEETNHIDVKVIQKLRKELLQNPENKALESWTGDPCILFPWKGIKCDGSNGSSVINKLDLSSSNITGPIPSSVTEMTNLEILNLSHNSFVGHIPSFLRSSLLISVDVSYNDLTGPLPESIISLPHLKSLYFGCNHHMSEEDPAKLNSSRINTDYGKCKVKEHKHGQVFVIGAITGGSLLITLAVGILFFCRYRYKLIPWEGFGGKNYPMETNIIFSLPSKDDFFVKSVSIEAFTLEYLEVVTEKYRTLIGEGGFGSVYRGTLDDSQEVPVKVRSATSTQGTREFDNELNLLSAIQHENLVPLLGYCKEKDQQILVYPFMSNGSLLDRLYGDAAKRKILDWPTRLSIALGAARGLAYLHTFPGRSVIHRDVKSSNILLDQSMCAKVADFGFSKYAPQEGDSYVSLEVRGTAGYLDPEYYKTQQLSEKSDVFSFGVVLTGNWGVAGEPLNIKRPRTEWSLVEWAKPYIRASKVEEIVDPGIKGGYHAEAMWRVVEVALQCLEPYSTYRPCMVDIVRELEDALIIENNASEYMKSIDSLGGSNRYSIVLDKRVLPATTSTAESTITTQALSHPQPR

SEQ ID NO: 31180 - protein, 517 aa, Metarhizium anisopliae var. acridum
MTADTSVADGLAPEVHGRLLLLSNRLPITIKSSDDGSYTFSMSSGGLVTGLSGLSKTTSFQWYGWPGLEVPDNEVADMKRRLKDEYGAHPVFIDDELADRHYNGFSDSILWPLFHYHPGEITFDESAWAAYQEVNHLFAQTVIKDVQDGDLIWVHDYPLMLLPQMLREEIAKTNKKVKIGFFLHTPFPSSEVYRILPVREPLLRGLLDCDLIGFHTYDYARHFLSSCSRILGAHTTPNGVDWNGRFVTIGAFPIGIDPDKFVEGLKKPSVQERIATLNRKFEGVKLIVGVDRLDCIKGVPQKLHALEVFLTEHPEWIGKIVLVQVAVPSRQDVEEYQNLRAVVNELVGRINGKFGTIEFMPIHFLHQSASFDELTALYAVSDVCLVSSTRDGMNLVSYEYIATQQERHGVMILSEFTGAAQSLNGSLVVNPWNTEELANAIHDAVTMSPGQRAANYKKLERYVFKYTSAWWGTSFVSEMTRLDSNNAQPKTLRNVSGAVVGPGQDEDEATSPMQNNP

SEQ ID NO: 31181 - protein, 584 aa, Citrus sinensis
MTHIKEFFTKLSESSSNQNISNIPKKKKKLFLALFATLLVVAAVIGIVAGVNSRKNSGDNGNEPHHAILKSSCSSTRYPDLCFSAIAAVPEASKKVTSQKDVIEMSLNITTTAVEHNYFGIQKLLKRTNLTKREKVALHDCLETIDETLDELHKAVEDLEEYPNKKSLSQHADDLKTLMSAAMTNQGTCLDGFSHDDANKHVRDALSDGQVHVEKMCSNALAMIKNMTDTDMMIMRTSNNRKLTEETSTVDGWPAWLSPGDRRLLQSSSVTPNAVVAADGSGNFKTVAAAVAAAPQGGTKRYIIRIKAGVYRENVEVTKKHKNIMFIGDGRTRTIITGSRNVVDGSTTFKSATAAVVGEGFLARDITFQNTAGPSKHQAVALRVGADLSAFYNCDMLAYQDTLYVHSNRQFFVNCLIAGTVDFIFGNAAAVLQNCDIHARKPNSGQKNMVTAQGRTDPNQNTGIVIQKSRIGATSDLKPVQGSFPTYLGRPWKEYSRTVIMQSSITDLIHPAGWHEWDGNFALNTLFYGEHQNSGAGAGTSGRVKWKGFRVITSATEAQAFTPGSFIAGSSWLGSTGFPFSLGL

SEQ ID NO: 31182 - protein, 383 aa, Pyrus pyrifolia
MSSSNAVGATSHELLGAQAQLWNHIFQFINSMSLKCAVQLGIADVIHNHGQPISLSELIAGLNVHPSKAHFVSRLMLILVHSNFFAQHHHVHHDRADVEEEEAVVLYSLTPSSRLLLKDGPFSTTPFLLATLDPVVTTPFHLMGAWLKINGGDDPGATCTPFEMENGMPFWELGAQEPRFGNLFNEAMEADSKLIGRVVVEECGGVFEGLKSLMDVGGGSGTMAKAIANAFPNINCTVFDQPHVVAGLQGTTHNLGFMGGDMFEEIPPANAILLKWIMHDWNDEESVTILKKCREAISLSKNEGGNKKIIIIDIVVGYVDNKKKMMDKKSIETQLMFDMLMMSILPGKERSKLEWEKIFFSAGFTHYNITHTLGLRSLIEVYP

SEQ ID NO: 31183 - protein, 392 aa, Azotobacter vinelandii
MTDHHATFQSGCPGLGRGSDAPEKSSINLGFMPLTDSASLIVAATQGFAEPYGLTLNLKRQVSWSGLRDKLLSGELDAAQGLYGLIYSMQLGIGGAPATDMAVLMGLNQNGQSINLSTPLRQARVCSGETLVRHVRQSSANVTLAQTFPTGTHALWLYYWLASLGIHPLADVNTLVVPPPQMVEHLRAGRSTVSAPESPAGPRIDQGMGFTIATSQSIWPDHPEKSSAAPCFAEQYPNTARALIMAVLNEPLIDASEENKAGTAQLISANGYVAAPRQVIEPRFLGDYEDGNGMPGADSMPCAFMGDGEVNLPYLSDGLWFMTQFRRWGLLREDPDYLAIATRVQQLELYRDAAGALGMAHRHGHAHATLLDGRRWDGSDPRPMPAASTSTP

SEQ ID NO: 31184 - protein, 482 aa, Pisum sativum
MVVEKNASKNHHHQTFDVSIDQQLDSKFFDDDGRVKRTGTSWTASAHVITAVIGSGVLSLAWAIAQLGWIAGPVVMILFAWVTYYTSVLLAECYRNGDPVNGKRNYTYMEVVHSNLGGLQVQFCGFIQYLNLIGVAIGYTVASAISMMAIERSNCYHRSGGKDPCHMNSNAYMIAFGAVQIIVSQIPDFDQLWWLSIVAAVMSFTYSTIGLGLGIGKVMENKKFAGTITGVNDVTKAQKTWGSLQALGDIAFAYSFSMILIEIQDTVKAPPPSESKTMKKATLISVIVTTFFYMLCGCLGYAAFGNSSPGNLLTGFGFYNPFWLLDIANAAIVIHLIGAYQVYCQPLYAFVENYMVKRFPDNYFLNKNIKIPIPGLDMYKLNLFKLVWRTVFVILTTLVSMLLPFFNDIVGLLGALGFWPLTVYFPVEMYIIQKKIPKWSTKWTCLQLLSGACLIITIAASVGSIAGIYLDLKVFKPFKTIY

SEQ ID NO: 31185 - protein, 468 aa, Pisum sativum
GTSIEGAVASHNDSKLFDDDDRLKRTGTVWTTSSHIITAVVGSGVLSLAWAIAQLGWVIGPSVMLFFSLITWYTSSLLAECYRIGDPHSGKRNYTFMEAVHTILGGFNDTLCGIVQYSNLYGTAIGYTIAAAISMMAIKRSGCFHSSGGKDGCHISSNPYMISFGVIQIFFSQIPDFHKMWWLSIVAAIMSFTYSLIGLGLAIAKVAENGSFKGSLTGVTIGMVTEAQKVWGVFQALGNIAFAYSYSQILIEIQDTIKNPPSEVKTMKQATRISIGVTTIFYMLCGGMGYAAFGDTSPGNLLTGFGFYNPYWLIDIANAAIVIHLVGAYQVYAQPLFAFVEKIMIKRWPKINKEYIVTIPGFHPYHLNLFRLIWRTIFVITTTVISMLIPFFNDVLGLIGAVGFWPLTVYFPVEMYIKQKKIPKWNYKWICMQTLSVICFVVSVVATVGSVASIVLDLKKYKPFTTDY

SEQ ID NO: 31186 - protein, 314 aa, Solanum peruvianum
KISFNKVPLYYRNVSGGSRLVSIRAQVTTEAPAKVEKISKKQEEGVIVNKFRPKEPYVGRCLLNTKITGDDAPGETWHMVFSTEGEVPYREGQSIGVIADGVDANGKPHKLRLYSIASSALGDFGDSKTVSLCVKRLVYTNDKGEEVKGVCSNFLCDLKPGAEVKITGPVGKEMLMPKDPNATVIMLATGTGIAPFRSFLWKMFFEKHEDYKFNGTAWLFLGVPTSSSLLYKEEFEKMKEKAPENFRLDFAVSREQTNEKGEKMYIQTRMAQYAEELWTLLQKDNTFIYMCGLKGMEQGIDEIMSSLAERDGIV

SEQ ID NO: 31187 - protein, 314 aa, Solanum peruvianum
KINFNKVPLYYRNVSGGSRLVSIRAQVTTEAPAKVEKISKKQEEGVIVNKFRPKEPYVGRCLLNTKITGDDAPGETWHMVFSTEGEVPYREGQSIGVIADGVDANGKPHKLRLYSIASSALGDFGDSKTVSLCVKRLVYTNDKGEEVKGVCSNFLCDLKPGAEVKITGPVGKEMLMPKDPNATVIMLATGTGIAPFRSFLWKMFFEKHEDYKFNGTAWLFLGVPTSSSLLYKEEFEKMKEKAPENFRLDFAVSREQTNEKGEKMYIQTRMAQYAEELWTLLQKDNTFIYMCGLKGMEQGIDEIMSSLAERDGIV

SEQ ID NO: 31188 - protein, 283 aa, Physcomitrella patens
MGRGKIEIKKIENTTSRQVTFSKRRGGLLKKAHELAVLCDAEVALVIFSSTGKLFEYASSGSMRDIIERYKKSPNGAMKSGASTDFLGREVLKLQEQVERLKSSQRRMLGEDLSALKVPDLLQLEQQLDLGASRVRARKNQLILEEIEGLQKKEQELMVANEDLRKKIADAEAVARANLSEARPESPRHLARTLSRDVSASSHPAATVYPHPNLRDVQRSQTSLQLGMFSSESYPPSSSRWPSEQQFPSASEGCAGESSMKWDHPHYHIQNRLHANILPSVRI

SEQ ID NO: 31189 - protein, 717 aa, Taxus wallichiana var. chinensis
MQANSNTVEGASQGKSLLDISRLDHIFALLLNGKGGDLGAMTGSALILTENSQNLMILTTALAVLVACVFFFVWRRGGSDTQKPAVKPTPLVKEEDEEEEDDSAKKKVTIFFGTRTGTAEGFAKALAEEAKARYEKAVFKVVDLDNYAADDEQYEEKLKKEKLAFFMLATYGDGEPTDNAARFYKWFLEGKEREPWLSDLTYGVFGLGNRQYEHFNKVAKAVDEVLIEQGAKRLVPVGLGDDDQCIEDDFTAWREQVWPELDQLLRDEDDEPTSATPYTAAIPEYRVEIYDSVVSVYEETHALKQNGQAVYDIHHPCRSNVAVRRELHTPLSDRSCIHLEFDISDTGLIYETGDHVGVHTENSIETVEEAAKLLGYQLDTIFSVHGDKEDGTPLGGSSLPPPFPGPCTLRTALARYADLLNPPRKAAFLALAAHASDPAEAERLKFLSSPAGKDEYSQWVTASQRSLLEIMAEFPSAKPPLGVFFAAIAPRLQPRYYSISSSPRFAPSRIHVTCALVYGPSPTGRIHKGVCSNWMKNSLPSEETHDCSWAPVFVRQSNFKLPADSTTPIVMVGPGTGFAPFRGFLQERAKLQEAGEKLGPAVLFFGCRNRQMDYIYEDELKGYVEKGVLTDLIVAFSREGATKEYVQHKMLEKASDTWSLIAQGGYLYVCGDAKGMARDVHRTLHTIVQEQESVDSSKAEFLVKKLQMDGRYLRDIW

SEQ ID NO: 31190 - protein, 716 aa, Lactobacillus rhamnosus
MANFNDPFFNHDMDDVFNQMLQGMGKGESARYVVNGHEMTPDEFAQYRATGQLPKQGDEIPVETTGEQAVKKGGILEKLGRNLTQEAKDGLLDPVIGRDHEIQETAEILSRRTKNNPILVGDAGVGKTAVVEGLAQAIVKGNVPESIKDKQIWSIDLSNLEAGTQYRGSFEEKIQNLIKEVKAAGNVILFFDEIHQILGAGATGGEESDGKGLADIIKPALSRGEITVIGATTQDEYRNTIMKDSALARRFNDVTINEPSAADTVKILEGVKKLYEQHHHVQLPENVLKAAVDYSIQYIPQRSLPDKAIDLIDMTAAHLASKHPIVDKVELEKQIKDLNAQKDAAAKAEDFEKAANLKKEIADKQHQLEGTNNEKPVVATPNDVAAAVERLTGIPVSKLGASDIERLKGIGKRLKGKVIGQDEAVDMVARAIRRNRAGFDEGNRPIGSFLFVGPTGVGKTELAKQLALDLFGSKDAIIRLDMSEYSDRTAVSKLIGTSAGYVGYNDNKNTLTEQVRRNPYSIVLLDEIEKADPQVLTLLLQVLDDGRLTDGQGNVVDFKNTVIIATSNAGFGNEALTGEKEKDEDLMKRLAPYFRPEFLNRFNGIVEFSHLTKNDLGKIVDLMLEDVNKTLAKKGITLTVTDAAKDWLIAQGYDEAMGARPLRRVIERNIRDKVTDFYLDHLKAKKLQADLIDGAIIVSEVQPASDKPKKEASGAK

SEQ ID NO: 31191 - protein, 188 aa, Eucalyptus globulus
MAFAGTTQKCMACEKTVYLVDKLTADNRIYHKACFRCHHCKGTLKLGNYNSFEGVLYCRPHFDQLFKRTGSLEKSFEGTPKIAKPEKPVDGERPAATKASSMFGGTRDKCVGCKSTVYPTEKVTVNGTPYHKSCFKCTHGGCVISPSNYVAHEGKLYCRHHHTQLIKEKGNLSQLEGDHERETMAPES

SEQ ID NO: 31192 - protein, 218 aa, Ginkgo biloba
MVRGKTQMKRNENATSRQVTFSKRRNGLLKKAYEFSVLCDAEVGLIIFSPRGKLYEFASASMQKMLERYQKYSDDMNANKKTNEQDAQHWKEEIENMGQRIEILEATQRQMLGECLASCSMKELNHLENQVERGLNHIRARKTEILMEQIEQLKRKERFLTEENAILRQKCIQPHYADASISTTPTIGYGSIQHPEVETQLLMRPPEVQDHIQLKGSN

SEQ ID NO: 31193 - protein, 636 aa, Penicillium marneffei
MAPAIGIDLGTTYSCVGVFRDDRIEIIANDQGNRTTPSFVAFTDSERLIGDAAKNQVAMNPHNTVFDAKRLIGRKFSDPEVQADAKHFPFKIIEKATKPVIEVEFKGEVKQFTPEEISSMVLIKMRETAEAYLGGTVNNAVITVPAYFNDSQRQATKDAGLIAGLNVLRIINEPTAAAIAYGLDKKVEGERNVLIFDLGGGTFDVSLLTIEDGIFEVKATAGDTHLGGEDFDSRLVNHFASEFKRKYKKDLTTNARALRRLRTACERAKRTLSSSAQTSIEIDSLFEGIDFYTSITRARFEELCQDLFRSTMEPVERVLRDAKTDKSSVHEIVLVGGSTRIPKIQKLVTDFFNKEPNKSINPDEAVAYGAAVQAAILSGDTSSKSTNEILLLDVAPLSVGIETAGGVMTPLIKRNTTIPTKKSETFSTYSDNQPGVLIQVYEGERARTKDNNLLGKFELTGIPPAPRGVPQIEVTFDMDANGIMNVSAVEKGTGKSNKIVITNDKGRLSKEEIERMLAEAEKYKAEDEAEATRIQAKNGLESYAYSLKNTLSEGKLTIDASEKEKLEAEIEKTISWLDSNQTATKDEYEAQQKELESVANPIISAAYGGAGAAPGATGASATREADEVEERPEELD

SEQ ID NO: 31194 - protein, 256 aa, Gossypium hirsutum
MCGGAIISDFIAVKRGRKLTAEDLWSELDTFSDLLGLDYGNGKESSFTQSDNTKAGSKAKNLEKVANETTQKTSRGREKEGKTQRTRKNIYRGIRQRPWGKWAAEIRDPHKGVRVWLGTYNTAEEAARAYDEAAKRIRGEKAKLNFPQTPHLTQPPAKKRCMMAPELTPPSSETKSPPTPQLFMGFGYENGVYRPSEAMESEMELKEQISSLESFLGLEPDETTTELSGSAEPDSVDLWMLDDLVTHHQQQPQLFY

SEQ ID NO: 31195 - protein, 261 aa, Gossypium hirsutum
MCGGAIISDFVAVKHDPKLTGDDLWSEIDIFSDLLGFDNNGKSFVNHQFHNNNKKLINPKDNQLNKERSETIQKTSRVTKNVEKTQRTRKNFYRGIRQRPWGKWAAEIRDPQKGVRVWLGTHNTAEEAARAYDEAAKRIRGDKAKLNFPQTPTKNQAASPALTQLPPAKKRCIVPELTQPSFQTDSPPYPMGLGSGRSEDYKPIEVVESELELKEQIWSLESFLGLETNHETMTQLSGNGGTDSLELWTLDDLVTQYKQRR

SEQ ID NO: 31196 - protein, 249 aa, Pisum sativum
MGRGRVELKRIENKINRQVTFAKRRNGLLKKAYELSVLCDAEVALIIFSTRGKLYEFCSTSNMLKTLDRYQKCSYGAVEVSKPAKELESSYREYLKLKQRFENLQRTQRNLLGEDLGPLSSKDLEQLERQLDSSLKHVRSTKTQFMLDQLADLQNKEHMLVEANRSLSMKLDEINSRNQYRQSWEAGDQSMQYGDQQNAHSQSFFQQLDCNPTLQIGSDYRYNNVASDQIASTSQAQQQVNGFVPGWML

SEQ ID NO: 31197 - protein, 175 aa, Arabidopsis thaliana
MSLSRRDPLVVGSVVGDVLDPFTRLVSLKVTYGHREVTNGLDLRPSQVLNKPIVEIGGDDFRNFYTLVMVDPDVPSPSNRHQREYLHWLVTDIPATTGNAFGNEVVCYESPRPPSGIHRIVLVLFRQLGRQTVYAPGWRQQFNTREFAEIYNLGLPVAASYFNCQRENGCGGRRT

SEQ ID NO: 31198 - protein, 2192 aa, Phaseolus vulgaris
MSSSISFPTVRTPSARTLPCKTEKSLFNSRCPVRVTKFLGTRLRSSGKWLGSERLHVWKSEGPLRRPKLRVVVRSGMSTVPKKPLGLYDPAMDKDSCGVGFVAELSGEGNRNTVTDALEMLVRMTHRGACGCEPNTGDGAGIMVGLPHQFYKEVVDFELPPPGKYAIGMFFLPTSNSLREESKSVFQKVAESLGHSVPGWRSVPTNNSELGKSALLTEPVIEQVFLTPSTLSKVDLERQMYILRKLCMVAITSTLNLHNDGTTDFYICSLSSRTVVYKGQLTPAQLKDYYFADLGNERFTSYMALVHSRFSTNTFPSWDRAQPMRVLGHNGEINTLRGNVNWMKAREGLLKCKELGLSENELKKLLPIVDANSSDSGAFDGVLEFLIQSGKSLPEAVMMMIPEAWQNDKNMDPQRKAFYEYFSALMEPWDGPALIAFTDGHYLGATLDRNGLRPGRFYVTHSGRVVMASEVGVVDIPLEDVSRKGRLNPGMMLLVDFEKHIVVNDDALKEQYSLARPYGEWLKEQKLELKDIVDSVQQSERMPPTIAGVVPAYGDDVDMENMGIHGLLAPLKAFGYTVESLEMLLLPMAKDATEALGSMGNDTPLAVMSNREKLTFEYFKQMFAQVTNPPIDPIREKIVTSMECMVGPEGDLTEITEAQCHRLSLKGPLLSIEEMEAIKKMNHRGWQSKVIDITYSKGRGKKGLEEALDRICAEAHDAIGDGYTTLVLSDRAFSRKRVAVSSLLAVGAVHQHLVKTLERTRVALVIESAEPREVHHFSTLVGFGADAVCPYLAVEAIWRLQVDGKIPPKASGEFYSKDELIKKYFKASNYGMMKVLAKMGISTLASYKGAQIFEALGLSSEVIERCFAGTPSRVEGATFEMLARDALQLHELAFPSRVFSPGSAEAIALPNPGDYHWRKGGEIHLNDPLAISKLQEAARTNSVDAYKQYSKLIHELNKACNLRGLLKFKEAAVKVPLDEVEPASEIVKRFCTGAMSYGSISLEAHTALATAMNKMGGKSNTGEGGEQPSRMEPLSDGSMNPKRSAIKQVASGRFGVTSYYLTNADELQIKMAQGAKPGEGGELPGHKVVGDIAVTRNSTPGVGLISPPPHHDIYSIEDLAQLIHDLKNANPAARISVKLVSEAGVGVVASGVVKGHADHILISGHDGGTGASRWTGIKNAGLPWELGLAETHQTLVANDLRGRTVLQTDGQLKTGRDVAIATLLGAEEFGFSTAPLITLGCIMMRKCHKNTCPVGIATQDPVLREKFAGEPEHVINFFFMIAEEMREIMSQIGFRTVKEMVGRSDMLEVDKEVIKSNEKLENIDLSLLLRPAAELRPEAAQYCVEKQDHGLDMALDNKLIALSKAALEKGLQVYIESPILNVNRAVGTMLSHEVTKRYHLNGLPTDTIHIRFKGSAGQSFGAFLCHGITLELEGDGNDYVGKGLSGGKIVVYPSKVSTFDPKQNIVIGNVALYGATSGEAYFNGMAAERFCVRNSGVKAVVEGVGDHGCEYMTGGIVVVLGNTGRNFAAGMSGGIAYVLDIDGGFPSRCNRELVDLDKIEEEDDIATLKMLIQQHQRHTNSVLASEVLADFDSILPKFIKVFPREYKRVLASMKLKEASKDAAESASKHGEEQVEMELVEKDAFKELKELATASPNGKPNEAESFKRPSQVIDPVKHRGFVAYEREGVQYRDPNVRLNDWKEVMKETQPGPLLKTQSARCMDCGTPFCHQENSGCPLGNKIPEFNELVYQNRWREALERLLETNNFPEFTGRVCPAPCEGSCVLGIIENPVSIKSIESAIIDKAFEEGWMVPRPPVNRTGKRVAIVGSGPSGLAAADQLNKMGHTVTVYERADRVGGLMMYGVPNMKADKENIVQRRVNLMAEEGINFVVNASVGHDPLYSLDRLREENDAVVLAVGATKPRDLPAPGRELSGIHFAMEFLHANTKSLLDSNLHDGNFISAKGKKVVVIGGGDTGTDCIGTSIRHGCSSIVNLELLPEPPQTRAPGNPWPQWPRIYRVDYGHQESAAKFGKDPRSYEVLTKRFVGDENGVVKGLEIVRVRWEKDATGRFQFKEIEGSEEIIEADLILLAMGFLGPEPTIAEKLGMERDNRSNFKAEYGRFSTSVSGVFAAGDCRRGQSLVVWAISEGRQAAAQVDNYLSNEDIEHIAGNPDELIKHQQDLTKRGTVAVANTQ

SEQ ID NO: 31199 - protein, 2196 aa, Phaseolus vulgaris
MSNALSFTLPALNNPQISAFNSPNKARLHLRSRVARCPASTVEKKRLFGAQVRSSGFDRIRLLQSGRLPKWRVAVRSAFSAVPEKPLGLYDPAMDKDSCGVGFVAELSGECNRRTVTDALEMLVRMTHRGACGCEANTGDGAGILVALPHVFYQEVVDFELPPQGKYAVGMFFLPKSENRRKESKKLFSKVAESLGHTVLGWRSVPTDNTGLGKSALQTEPVIEQVFLTPSAESKVDLERQMYILRKLSMAAITSALNLQNDGITDFYICSLSSRTVVYKGQLTPAQLRDYYFADLGNERFTSYHGPDTFTVFYKYFSIAGIVLNLCVYIGHNGEINTLRGNVNWMKAREGLLKCKELGLSENKLKKLLPIVDANSSDSGAFDGVLEFLLHSGKSLPEAVMMMIPEAWQNDKNMDSQRKAFYEYFSALMEPWDGPALISFTDGHYLGATLDRNGLRPGRFYVTHSGRVIMASEVGVVDIPPEDICRKGRLNPGMMLLVDFEKHAVVNDDALKEQYSLARPYEDWLKNQKIELKDIVDSVPKSGRVPPPIAGVAPPSNDDEDMVNMGIHGLLAPLKAFGYSVESLEMLLLPMAKDGVEALGSMGNDTPLAVMSNREKLTFEYFKQMFAQVTNPPIDPIREKIVTSMQCMVGPEGDLTEITEEQCHRLSLKGPLLYTEEMEAIKKMNYRGWHSKVIDITYSKERGKGGLEEALDRICAEAHDAISEGYTTLVLSDRAFSRKRVAVSSLLAVGAVHQHLVKTLERTRVALIVESAEPREVHHFCTLVGFGADAICPYLAIETIWRLQVDGKIPPKSSGEFHSKEELVKKYFKASNYGMMKVLAKMGISTLASYKGAQIFEALGLSSKVIEKCFAGTPSRVEGATFETLARDAFQLHELAFPSRVFSPGSAEAVTLPNPGDYHWRKGGEVHLNDPLAIAKLQEAARTNSVDSYKQYAKFIHELNKACNLRGLLKFKETAVKIPIDEVEPASEIVKRFCTGAMSYGSISLEAHTALAMAMNKIGGKSNTGEGGEQSSRMEPLPNGTMNPKRSAIKQVASGRFGVSSYYLTNADELQIKMAQGAKPGEGGELPGHKVIGDIAVTRNSTAGVGLISPPPHHDIYSIEDLAQLIHDLKNANPTARISVKLVSEAGVGIIASGVVKGHADHVLISGHDGGTGASRWTGIKNAGLPWELGLAETHQTLVANDLRGRTVLQTDGQLKTGRDVAIATLLGAEEFGFSTAPLITLGCIMMRKCHKNTCPVGIATQDPVLREKFAGEPEHVINFFFMVAEEMREIMSQLGFRTVNEMVGRSDMLEVDKEVIKSNEKLENIDLSLLLRPAAELRPEAAQYCVQKQDHGLENALDNKLISLSNAALEKGLPVYIETPIYNVNRAVGTMLSHEVTKRYHLAGLPSDTIHIRFTGSAGQSFGAFLCPGITLELEGDSNDYVGKGLSGGKIVVYPPKGSNFDPKENIVIGNVALYGATQGEAYFNGMAAERFCVRNSGAKAVVEGVGDHGCEYMTGGTVVVLGETGRNFAAGMSGGIAYVLDLDGKFQSRCNLELVDLDKVEEEEDVYTLRMLIQQHQRHTNSLLAKEVLDDFENLLPKFIKVFPREYKRVLASVKSEEASKDAVVQAAKDAEDQDDEAQAVEKDAFEELKKLATVSLNEKQSQAETPKRPSQVTDAIKHRGFVAYEREGVQYRDPNVRMADWNEVMEETKPGPLLKTQSARCMDCGTPFCHQENSGCPLGNKIPEFNELVYQNRWREALERLLETNNFPEFTGRVCPAPCEGSCVLGIIENPVSIKSIECAIIDKAFEEGWMVPRPPVKRTGKRVAIVGSGPSGLAAADQLNKMGHAVTVYERADRIGGLMMYGVPNMKSDKVDVVQRRVNLMAEEGVDFVVNANVGNDPLYSLDRLREENDAIVLAVGSTKPRDLPVPGRELSGVHFAMEFLHANTKSLLDSNLEDGSYISAKGKKVVVIGGGDTGTDCIGTSIRHGCSSIVNLELLPQPPPTRAPGNPWPQWPRIFRVDYGHQEAAAKFGKDPRSYEVLTKRFLGDENGVLKGLEVIRVCWEKDETGRFQFKEIEGSEEIIEADLVLLAMGFLGPEPTIAEKLGLDRDNRSNFKADYGRFSTNVKGVFAAGDCRRGQSLVVWAISEGRQAAAQVDNYLVKDDDEHRNQDGLVKRQQGLNKKQQGSSKHTVMT

SEQ ID NO: 31200 - protein, 255 aa, Chlamydophila abortus S26/3
MLHIQNLHVCCEDVKILDYLNLHIHPGELHIIMGPNGAGKSTFAKVLSGDDSLSIISGEISLLGQDLLEKAPEERAHMGLFIGFQQPPEIPGVNNKLFLKDAYNACRRSRQEEEMAEAEFDMLLSSVSETYEFASFQHFLQRNINEGFSGGERKKNEIWQMLVLEPEMILLDEPDSGLDVDALRFICKTIEKYRELHPKSATCIVTHNPKLGSLLEPDHVHILLEGKIACSGGVSLMQELEEKSYHEVLARSSWG

SEQ ID NO: 31201 - protein, 349 aa, Chlamydophila abortus S26/3
MHLLEKFKAQRVSLLSRELISCCDPAIASSDAGHVYQLLFNTTGSNLSYKVGDSLGVFPKNPVHVVEKILECLSYSPKQLVQSRESSQISLYDFLRCHTNINKVPPKLKSFFPDLEETMTFYDAIQKYQPHIPVELFVESVLPLLPRFYSIASAPHPHENQIELLVRLVNYSGEYEQRYGVCSFFLCRELELGKSCHVFVQPTKHFTLAEHVQNQPIVMIGSGTGIAPYKAFVQQRIYNNDSGMNILFFGERFEKANFYYQDFWKKAVENELLKLFLAFSRDGDRKLYVQDLLKQHADLVLKAYQKGAYFFVCGSKVLGNEVKKTLEDILGKNKLSQLKEEHRYVADVY

SEQ ID NO: 31202 - protein, 106 aa, Chlamydophila abortus S26/3
MKSYAIIQTGSKQYQVSEGDIIDVELLDGVSEGQEIVFDQVLFTFDGSKVSLGTPTVKNAVVKGELLSRVRGEKVIAYKYKRRKNYHRKIGHRQNYLRVKISNLVM

SEQ ID NO: 31203 - protein, 335 aa, Chlamydophila abortus S26/3
MFLDQITIELRAGKGGNGVVAWRKEKYLPKGGPYGGNGGVGGSIIIESATHVYSFESYRNIRFLKAEDGRPGATNNRSGKNGKDLVLIVPEGTLLRDVETKEILYDFAKSGERLVVCRGGKGGKGNTFFKTSTNRAPTKATPGKPGEIRQVELELKLIADIGLVGFPNAGKSTLFNTLARTEVKVGAYPFTTLQPVLGLVPCQEKLYQKPWIIADIPGIIEGAHQNRGLGLDFLRHIERTRLLLFVIDICGCERSSPEEDLRILMDELVHYREDLADKNRIIALNKIDDLLPDERQERLESFQKLFPSETFVLVSGLTGEGVDLLNSLFTNKLAV

SEQ ID NO: 31204 - protein, 329 aa, Chlamydophila abortus S26/3
MRSPTTSIDLCQDIVSKQRESLERFFGAFQCEDTWVLAEKILHHQGSIFFSGVGKSGCIARKIVATLQSFGEHALFLASGDLLHGDLGVVRPGDIVCLFSKSGETRELLECIPYLKERGVFIAGITSATYSSLAVLCDHVVILPMIEELDPFNLVPTTSTTCQLLFGDLLAITLLRSRQISLADYGKNHPGGQIGLKVIGKIRDYMFLKTEVPFCSPEDTIADSLDIFSSYGCGCVCIVNEKFEILGIFTDGDLRRALARHGGDILSQRLQDVMTPNPRVISEDADVLLGLQMMETGSPVTILPVVDAKDQKYVVGLLQMHTLAKAGLI

SEQ ID NO: 31205 - protein, 659 aa, Chlamydophila abortus S26/3
MSEQKKSSKIIGIDLGTTNSCVSVMEGGQAKVIVSSEGTRTTPSIVAFKGNETLVGIPAKRQAVTNPAKTLASTKRFIGRKYSEVESEIKTVPYQVASGSNGDVVFPIDGKQFTPEEIGAQVLIKMKETAEAYLGEPVTEAVITVPAYFNDSQRASTKDAGRIAGLDVKRIIPEPTAAALAYGIDKAGDKKIAVFDLGGGTFDISILEIGDGVFEVLSTNGDTHLGGDDFDEVIIKWMIEEFQKQEGIDLSKDNMALQRLKDAAEKAKIELSGMSSTEINQPFITMDANGPKHLTLTLTRAHFEKLASNLIERTKAPCQKALADAKLAASDIDDVLLVGGMSRMPAVQEVVKSIFGKEPNKGVNPDEVVAIGAAIQGGVLGGEVKDVLLLDVIPLSLGIETLGGVMTPLVERNTTIPTQKKQIFSTAADNQPAVTIVVLQGERPMAKDNKEIGRFDLTDIPPAPRGHPQIEVTFDIDANGILHVSAKDAASGREQKIRIEASSGLKEDEIQRMINDAEKNKEEDKKRREASDVRNEADSMIFRAEKAISDYKENIPESLTKEIEERIEKVRSALKEDAPTEKIKEASDELSRHMQKIGEAMQSQSASAAANAQDGPNINTEDLKKHSFSTKPPTGNSSSSANNENIEEADVEIVDKPND

SEQ ID NO: 31206 - protein, 371 aa, Chlamydophila abortus S26/3
MIYLDNNAMASLEPGLLDFLQQLFSQGIYANPSSVHSAGKKSRKLIHDTTGLIQRVLSFPGKIIYTSSATESLNLAIASLPKGSHVITCSSEHPAIIEPLKHADLSVSYLDPEQGSCVVSPQQIEAAIRPTTSAIVLGWVNSEIGAKIHIEAIAQIANERHLQFIVDATAIIGRERVSIPQGVTMVAFSGHKFHALSGIGALLISSGVKVAPLIWGGGQQGGVRSGTENLWGIASLFYIFTMLEKQQEEIAERIAHYRNNFEKRLKEHIPEMHIHCEHQPRVNNISAIAFPPLEGEVMQIALDIEGIACGYGSACSSGATTAFKSLVAMNMEQDVATATLRFSFSHLLAQEDLDLAIEKIVKVVTRLKDAW

SEQ ID NO: 31207 - protein, 794 aa, Chlamydophila abortus S26/3
MNKRSLLFVSLVGMAFVGCQIFFGYNDFRSCKALTEKQKTISEQVLAATKSMGLGVSPWTTHPDEEVNKNHYAVCIGDRLLLLNQGNSASSVYSSGSRWDFIEETTACDNIHVALYGETGKSTVPSHTGKVFLPVTSEALPVLVVEFRNNQEPIVFLGQYKQDEGKVYNKDSQVYGTSLVFWRSGNEYLPLGIYNSKEERLESLDLPMTKAAIFSNSRETNTDTHSGQYFVLSNEYMQLVISQESGAIEGINLPFSSEDSKSIVNEIGFDRDLKSQVPSEASFPGLPSVGPNNQIVSDTIGGYYPLLRRGILSDSKKRTPASYHALNIVSGRDLVNPVTSGYRVSVFNSNVLELESYDGSIKKTYTFPEQQPYAFEVAVGLNRSSDDMWITSGVPEVEIMSNTFSPAIKYRVIKKNKGQLDKVKLPKSKDPLSLRSGVYPQWILNSNGYFGIILSPLTDIPAGYAAAYVSGNSVPTRLSSLYPKNQAYPASKYPGYETLLPLPKEEGTYRFLVYAGPLAEPTLKALDRAYTNPKGENSQYLDCITFRGLFAFITEPFAALLFIIMKFFKMITGSWGISIILLTVFLKLLLYPLNAWSIRSMRRMQKLSPYIQEIQQKYKKEPKRAQMEVMALYKTNKVNPITGCLPLLIQLPFLIAMFDLLKSSFLLRGASFIPGWIDNLTAPDVLFSWTTPVWFIGNEFHLLPILLGVVMFIQQKLSALQKKGPVTDQQRQQEAMGTMMALLFTFMFYNFPSGLNIYWFSSMLLGLIQQWVTNKILDRQHLKNEITVNKKKQR

SEQ ID NO: 31208 - protein, 864 aa, Chlamydophila abortus S26/3
MDKISDAVSEALEKAFELAKSQKNPYVSENHFLKCLLENTESLFYLIIKEIQSNPKLLISAVDKALSLEPSVVEGDAMPKPSSGLQSLLLDAKHEAKDLGDTYLSGDHVLLAFWKSNKEPFASWKNTVKISLDDLKKLIINIRRGNRMDSPSAENNLRGLEKYCKNLTLLAKEGKLDPVIGRDEEIRRTVQVLSRRTKNNPMLIGEPGVGKTAIAEGLALRIVQGDIPESLKGKHLYVLDMGALIAGAKYRGEFEERLKSVLKDVESVDGESILFIDEVHTLVGAGATDGAMDAANLLKPALARGTLHCIGATTLNEYQKYIEKDAALERRFQPIFVTEPSLEDAVFILRGLREKYEIFHGVRITEGALNAAVLLSYRYIPDRFLPDKAIDLIDEAASLIRMQIGSLPLPIDEKERELAALIVKQEAIKREKAPAYQEEAEAMQQSIDQLKEELAVLRLRWDEEKKLISGLKEKKNSLENMKFSEEEAERIADYNRVAELRYSLIPALEEEIRHDEEALNQRDHRLLQEEVDERLIAQVVANWTGIPVQKMLEGEAEKLLVLEESLEERVVGQPFAISAVSDSIRAARVGLSDPQRPLGVFLFLGPTGVGKTELAKALADLLFNKEEAMVRFDMTEYMEKHSVSKLIGSPPGYVGYEEGGSLSEALRRRPYSVVLFDEIEKADREVFNILLQIFDEGILTDSKKRKVNCKNALFIMTSNIGSQELADYCAKKGSEVSKETVLSVVSPTLRKYFSPEFINRIDDILPFIPLSTEDIVKIVGIQMRRVAQRMLERRVTLTWDDSVILYLSEQGYDSAFGARPLKRLIQQKVVTLLSKALLKGDIKADTSIELTMSKDIILFKKVSG

SEQ ID NO: 31209 - protein, 440 aa, Chlamydophila abortus S26/3
MPPVVYKFGGTSLGTAESIRKVYDIVHKDTPWFIVVSAVAGITDLLDMFCSVSSEYREHIILDIANKHNEIIHDLQLTFSIAPWMEKLQRCMHKEKISLRDRAEILAIGEDISASLFHAFCCSHDFSLEFLEARTVILTDGEYSCATPDIPRMRENWHALNFRSDVCYITQGFIGANAAGETTLLGRGGSDYSGALIAEMSHAKEVRIYTDVNGIYTMDPRIIEDAQLIPELSFEEMQNLATFGAKILYPPMLSPCVRSGIPIFVTSTFDLSKGGTWIYAMDKIMSHEPRVKALSLRQHQRLWSIDCSGSSTVGFDKILSILDTHHVLPGLITSQDSTVSFTTDDDDVSDDVIRELYDQLSSIGTVHMLYDLALITMIGSGLASTKVVTTVTEKLRHYPSPIFCCCQSCMALSLVVPENLAGNVVEQLHNDYVKQKFSVV

SEQ ID NO: 31210 - protein, 566 aa, Chlamydophila abortus S26/3
MKVALSFKHLIPKLYTCIKNGYTFNTFKKDFIAGLTVGVLAFPFAIAIAIGVGVSPIQGLLASIIGGFIASALGGSRVLISGPTSAFISILYCISAKYGVEGLFTITLMGGIFLVAFGLTGLGTFIKYMPYPVVTGLTTGLAVIIFSSQIRDFLGLQMGDTIPTDFIAKWVAYWDYLWTWDSKAFAVGLFTLLIMIYFRNYKPRYPGVMIAIIVASTLVWLLKIDIPTIGSRYGALPQSIPLPAFPHLSLTKMLQLMPDALTIAVLSGIETLLSAVVADGMTGWRHQSNCQLVAQGIANIGTSFFAGMPVTGSLSRTAASIKSGATTPIAGLIHSAFICVILLALAPLTVKIPLTCLAAVLILIAWNMSEIHHFIHLFTAPKKDVVVLLTVFILTVMTTITSAVQVGMMLAAFLFMKQMSDLSDVISTAKFFDENKQTKDNDLFSKSEVPAHTEIYEINGPFFFGIADRLKNLLNEIEKPPKIFILCMSRVPTIDASAMHALEEFFLECDRQGTLLLLAGVKKTPLSDLKRYHLDELIGVDHIFSNTKSALLFAQALINLESKSSH

SEQ ID NO: 31211 - protein, 474 aa, Chlamydophila abortus S26/3
MLRIAILGRPNVGKSSLFNRMCKRSLAIVNSQEGTTRDRLYGEIRGWGIPVQVIDTGGVDKDSEDHFQKHIYKQALAGANEADILLLVIDIRCGITELDAEIAKQLLYLKKPLILVANKADTLKDEYRVHELYKIGISEIVTVSASHDKHIDKLIHKIKTLANVPEVVEEPREEMHEEEVPGMEFPETKEFLSDDEDEDTAFSQSSVADKPLKIALIGRPNVGKSSIINALLNEERCIIDNVPGTTRDNIDILYSHNDRSYLFIDTAGLRKMKSVKNSIEWISSSRTEKAIARADICLLVIDATHHLSSYDKRILSLISKQKKPHIILVNKWDLIEGVRMEHYIRDLRATDMYIGQSKILCISAATKRNLRQIFSSIDELHTTVSSKVPTPVVNKTLALALQKHHPQVINGRRLRVYYAIHKTATPFQFLLFINAKSLLTKHYECYLKNTLKSAFNLYGVPFDLEFKEKTKRTN

SEQ ID NO: 31212 - protein, 400 aa, Leptospirillum ferrooxidans
MVFWGPENRQVVRNRIFERTGMEDRPVYLDYNATTPVDPEVVDAMMPWFRERFGNPSSGHFFGWEAQEQVEAARTEMAVLIGAKADEIVFTGSATEANNLAILGSTRAMRGEKRSLVTSVVEHPSVLQPFLRRKEEGWRLILLPVDSFGRVDLREAESIIGKDTALVSVMLANNETGTIQPVREIAGIAHSCGALFHVDAAQAIGKIPVDVEALGADLLTLAGHKFYAPKGIGVLYVREGTSLSPLMSGAGHERGLRPGTENVPYIAALGTAARLVRENLREESARIQRLRERLHGTLSAAIDGLRLNGPSNDRLPNTLNLSFPHVKGWELLAAVPGIAASTGSACHWGIHKASPVLLAMQRDETRALGAVRLSLGRFTDEAEVDFAASALISTWHRLSS

SEQ ID NO: 31213 - protein, 1166 aa, Triticum aestivum
MASGSRATPTRSPSSARPAAPHQNHTQSSGGSTSRAGGGGGGAAGSAAATESVSKAVAQYTLDAGLHAVFEQSGASGRSFDYSQSLLAPPTPSSEQQIAAYLSRIQRGGHIQPFGCTLAVADDSSFRLLAFSENAADLLDLSPHHSVPSLDSSAAPPPVSLGADARLLFSPSSGVLLERAFAAREISLLNPLWIHSRVSSKPFYAILHRIDVGVVIDLEPARTEDPALSIAGAVQSQKLAVRAISRLQALPGGDVKLLCDTVVEHVRELTGYDRVMVYKFHDDEHGEVLAESRRGDLEPYLGLHYPATDIPQASRFLFRQNRVRMIADCHAAAVRVIQDPAMPQPLCLVGSTLRSPHGCHAQYMANMGSIASLVMAVIISSGGEDEHNMTRGVIPSAMKLWGLVVCHHTSPRCIPFPLRYACEFLMQAFGLQLNMELQLAHQLSEKHMLRTQTLLCDMLLRDSPTGIVTQSPSIMDLVKCDGAALFYHGKYYPLGVTPTEAQIKDIIEWLTVCHGDSTGLSTDSLADAGYPGATALGDAVCGMAVAYITPSDYLFWFRSHTAKEIKWGGAKHHPEDKDDGQRMHPRSSFKAFLEVVKSRSLPWENAEMDAIHSLQLILRDSFRDAGEGTSNSKAIVNGQVQLGELELRGIDELSSVAREMVRLIETATVPIFAVDTYGCINGWNAKVAELTGLTVEEAMGKSLVKDLIFKESEEIVEKLLSQALKGEEGTNVEIKLKTFGSEQSKGPIFVIVNACSSRDYTKSIVGVCFVGQDITGQKVVMDKFVNIQGDYKAIVHNPNPLIPPIFASDENICCSEWNTAMEKLTGWSRGEVVGKLLVGEVFGNCCRLKGPDALTKFMIVLHNAIGGQDSEKSPFSFFDKNGKYVQALLTANTRSKMDGETIGAFCFLQIASPELQQAFEIQRQQEKKCYARMKELAYICQEIKNPLSGIRFTNSLLEMTDLKDDQRQFLETSAACEKQMSKIVKDASLQSIEDGSLVLEKGEFSLGNVMNAVVSQVMILLRERDLQLIRDIPDEIKEASAYGDQYRIQQVLSDFLLSMVRFAPTENGWVEIQVRPNVKQNSDGTETMLFLFRFACPGEGLPPDIVQDMFSNARWTTQEGIGLSVCRKILKLMGGEEQYIRESERSFFLIVLELPQPLRSESRDRS

SEQ ID NO: 31214 - protein, 285 aa, Brassica rapa subsp. chinensis
MDCSSFLDLNTNPFDHNFPAKLPKEEVKVSTSSDLERKQNASELREELNRVNSENKKLTEMLAAVWENYYALHHHLEKLQSRKSPEMDQIEQPTKRRKQDSYELLGFGNGLSGGKTENSSSNEDHHQLLSCKRPVTDSFNKANVSTVYVPSDSSDTSLTVKDGYQWRKYGQKVTRDNPSPRAYFRCSFAPSCPVKKKVQRSAEDPSILVATYEGTHNHLGPNGSEGDVTSQVGSSTVTLDLVHSGQGTMQEVLVRQMASSLTKDSKFTAALAAAISGRLMEQSRT

SEQ ID NO: 31215 - protein, 400 aa, Rhizobium leguminosarum bv. phaseoli
MAFLADALSRVKPSATIAVSQKARELKAKGRDVIGLGAGEPDFDTPDNIKKAAIDAINRGETKYTPVSGIPELRKAIAAKFKRENGLDYSWEQTIVGTGGKQILFNAFMATLNPGDEVSIPAPYWVSYPEMVALCGGTRFFVSATQEHNFKLQAADLEKAITPKTKWFIFNSPSNPTGAAYTHDELKALTDVLMKNPQVWVLTDDMYEHLTYGDFKFVTPVEVEPQLYDRTLTMNGVSKAYAMTGWRIGYAAGPIQLIKAMDMIQGQQTSGATSIAQWAAVEALNGTQDFIPENKKIFEGRRDLVVSMLNQAKGIVCPVPEGAFYVYPSCKGLIGKTAPSGKVIETDEDFVSELLESEGVAVVHGSAFGLGPNFRISYATSEEQLEEACRRIQRFCGACK

SEQ ID NO: 31216 - protein, 397 aa, Streptomyces virginiae
MSARIGAISESATLAVDAKAKALKAAGRPVIGFGAGEPDFPTPDYIVEAAVEACRNPKYHRYTPAGGLPELKAAIAAKTLRDSGYEVEASQVLVTNGGKQAIYEAFAAILDPGDEVIVPAPYWTTYPESIRLAGGVPVDVVADETTGYRVSVEQLEAARTERTKVVLFVSPSNPTGSVYSEADAKAIGEWAAEHGLWVLTDEIYEHLVYGEAKFTSLPVLVPALRDKCIIVNGVAKTYAMTGWRVGWVIAPQDVIKAATNLQSHATSNVSNVAQVAALAAVSGNLDAVAEMRKAFDRRRQTMVKMLNEIDGVFCPTPEGAFYAYPSVKELLGKEIRGKRPQSSVELAALILDEVEVAVVPGEAFGTPGYLRLSYALGDEDLVEGVSRIQKLLAEAKA

SEQ ID NO: 31217 - protein, 411 aa, Bacillus sp. MGA3
MGLIVQKFGGTSVGSVERILNVANRVIEEKKNGNDVVVVVSAMGKTTDELVDLAKQISAHPPKREMDMLLTTGEQVTISLLAMALNEKGYEAISYTGWQAGITTEPVFGNARILNIETEKIQKQLNEGKIVVVAGFQGIDEHGEITTLGRGGSDTTAVALAAALKAEKCDIYTDVTGVFTTDPRYVKSARKLASISYDEMLELANLGAGVLHPRAVEFAKNYGITLEVRSSMEREEGTIIEEEVTMEQNLVVRGVAFEDEITRVTVFGLPNSLTSLSTIFTTLAQNRINVDIIIQSATDAETTNLSFSIKSDDLEETMAVLENNKNLLNYQGIESETGLAKVSIVGSGMISNPGVAAKMFEVLALNGIQVKMVSTSEIKVSTVVEESQMIKAVEALHQAFELSGSAVKSER

SEQ ID NO: 31218 - protein, 1118 aa, Adiantum capillus-veneris
MSSTRHSYSSGGSGKSKHGRRIAQTSADAKLYAAYEESSESGSFDYSQSVSAGKEGISSQLVTAYLQRMQRGGLVQQFGCLIAVEEETFRVLAYGANAPEMLDVATQAVPTMGQYSRLCIGADVRTLLSPASASALDRVIGVVDVSMFNPITVQSRSSGKPFYAILHRNDVGLVIDLEPIRPDDASITGGALQSHKLAAKAIARLQSLPGGDIGLLCDSVVEEVHELTGFDRVMAYKFHEDEHGEVVAEIRRTDLEPYIGLHYPATDIPQAARFLFMKNRVRMICDCRLPPVKLIQDKTLSQPMSLTGSKLRAPHGCHTQYMANMNSISSLVMAVIVNDSDDDSPGHSSQGIKLWGLVVCHHTSPRYVPFPVRSACEFLMQVFSLQLNMEVGMAAQVREKHILRTQTLLCDMLLRDAPIGIVSQSPNIMDLVTCDGAALYYGKKCWLLGTTPTEAQIVDIAAWLLDCHKDSTGLSTDSLAKTGYPEASCLGDAVCGLAAAKITATDFLFWFRSHTAKEVRWGGARHDPEERDDGRRMHPRSSFKAFLEVVKQQSLPWEDVEMDAIHSLQLILRGSFQDIDDSNTKTMIHARLNDLKLQGLDELSTVASEMVRLIETATAPILAVDGQGLINGWNGKVAELTGLSFETAMGKSLAKELVHEESKTIVERVLHLALEGEEEQDIEIHLRTYDQHKQKGVVILIVNTCCSRDVSNNVVGVCFVGQDVTGQKLVLDRFIRIQGDYKAIVQSLNPLIPPIFGADEYGFCSEWNAAMEKLSNWRREEVLGKMLVGEIFGLQMVCCRLQGQDVVTKLMIVLNDAVNGQESEKFPLVFYDRNGRRVEALLIASKRTDADGRITGVFCFLHTASPELLQALIIKRAKEKVDKELSYVKEELKKPLEGLAFTRTVLEGTNLTIEQRQLIKTNAWCERQLRKILEDDLNNIEEGYMDLEMSEFFMGSVIDAVISQGMAASRGKGVQILTEIPNDVKLMCLFGDQARLQQVLADLLFCAINHATTTNEDEKDWVTIKVSRTKTRLDDGVHLMHFEFRISHSGQGISEALVEEMTNKSQKWTPEGLAISISCTLIRLMNGDVKYTTDAGNKCFLVTIQFPLAHRDDATSVR

SEQ ID NO: 31219 - protein, 383 aa, Thermus aquaticus
MRGLSQRVKSMKPSATVAVNARALELRRKGVDLVALTAGEPDFDTPEHVKEAGRRALAQGKTKYAPPAGIPELREAVAEKFRRENGLEVTPEETIVTVGGKQALFNLFQAILDPGDEVIVLAPYWVSYPEMVRFAGGVPVEVPTLPEEGFVPDPERVRRAITPRTKALVVNSPNNPTGVVYPEEVLRALAEMALQHDFYLVSDEIYEHLIYEGAHFSPGTLAPEHTITVNGAAKAFAMTGWRIGYACGPKAVIKAMADVSSQSTTSPDTIAQWATLEALTNREASMAFIAMAREAYRKRRDLLLEGLSRIGLEAVRPSGAFYVLMDTSPFAPNEVEAAERLLMAGVAVVPGTEFAAFGHVRLSYATGEENLKKALERFAQALQ

SEQ ID NO: 31220 - protein, 336 aa, Spinacia oleracea
MDQQSFPSFMASTHFDSSINRNDTRLRIFSGTANPALAQEIACYMGLQLGKIKIKRFADGEIYVQLQESVRGCDVFLVQPTCPPANENLMELLIMIDACRRASAKNITAVIPYFGYARADRKTQGRESIAAKLVANLITEAGANRVLACDLHSGQSMGYFDIPVDHVYGQPVILDYLASKTICSDDLVVVSPDVGGVARARAFAKKLSDAPLAIVDKRRHGHNVAEVMNLIGDVKGKVAVMVDDMIDTAGTISKGAALLHQEGAREVYACSTHAVFSPPAIERLSSGLFQEVIITNTIPVLEKNYFPQLTVLSVANLLGETIWRVHDDCSVSSIFQ

SEQ ID NO: 31221 - protein, 395 aa, Spinacia oleracea
MASPAPRSLSSSSSSSSSSFCPSISPPPRSPSRASLPFSVKCNTVEPLKLVNGKPSVPILDEQSLPKFLHSKRLESSVNRSNTRLKLFSGLANPALAKEVAWYMGLELGKVKIKRFADGEIYVQLEESVRGCDVFIIQPTSPPANENLMELLIMIDACRRASAKNITAVIPYFGYARADRKTQGRESIAAKLVANLITEAGANRVLACDLHSGQSMGYFDIPVDHVYCQPVILDYLASKGIASSDLVVVSPDVGGVARARAFAKKLSDAPLAIVDKRRHAHNVAEVMNLIGDVKGKVAVMLDDMIDTAGTITKGAELLHEEGAREVYACCTHAVFSPPAIERLSSGCFQEVIITNTLPVAEKNFFRQLTVLSTANLLGETIWRVHDDSSVSSIFQ

SEQ ID NO: 31222 - protein, 179 aa, Arabidopsis thaliana
MPGQWEFQVGPSVGIDAGDHVWCARYLLERITEQAGVVLTLDPKPIEGDWNGAGCHTNYSTKSMREEGGFEVIKKAILNLSLRHKEHISAYGEGNERRLTGKHETASIDQFSWGVANRGCSIRVGRDTEAKGKGYLEDRRPASNMDPYIVTSLLAETTLLWEPTLEAEALAAQKLSLNV

SEQ ID NO: 31223 - protein, 254 aa, Arabidopsis thaliana
MMWLIDELGVEGFRTEVEKRMPNGKLERGSSEDLVNKQWERRDYFGVNPQKQEGLSFVGLHVPVGRLQADDMDELARLADTYGSGELRLTVEQNIIIPNVETSKTEALLQEPFLKNRFSPEPSILMKGLVACTGSQFCGQAIIETKLRALKVTEEVERLVSVPRPIRMHWTGCPNTCGQVQVADIGFMGCLTRGEEGKPVEGADVYVGGRIGSDSHIGEIYKKGVRVTELVTLVAEILIKEFGAVPREREENED

SEQ ID NO: 31224 - protein, 154 aa, Arabidopsis thaliana
MSSLTSVELNFLVFRYLQESGFTHAAFTLGYEAGINKSNIDGNMVPPGALIKFVQKGLQYMEMEANLSNSEVDIDEDFSFFQPLDLISKDVKELQDMLREKKRKERDMEKERDRSKENDKGVEREHEGDRNRAKEKDRHEKQKEREREREKLER

SEQ ID NO: 31225 - protein, 567 aa, Zea mays
GRTGRARAAVSVPPPAGEQVPTERLEPRVEERAGGYWVLKEKYRAGLNPQEKVKLEKEPMALFMEGGIQDLARVPMEQIDAAKLTKDDVDVRLKWLGLFHRRKHQYGRFMMRLKLPNGVTTSEQTRYLASVIEAYGADGCADVTTRQNWQIRGVTLPDVPAILDGLRAVGLTSLQSGMDNVRNPVGNPLAGVDPHEIVDTRPYTNLLSSYVTNNSQGNPTITNLPRKWNVCVIGSHDLYEHPHINDLAYMPAVKDGEFGFNLLVGGFISPKRWAEALPLDAWVAGDDVVPVCKAILEAYRDLGSRGNRQKTRMMWLIDELGMEVFRSEVEKRMPNGVLERAAPEDLVDKRWERRDYLGVHPQKQEGLSYVGLHVPVGRLQAADMFELARLADEYGTGELRLTVEQNIVLPNVSNERLDALLAEPLLQEQRLSPRPSMLLRGLVACTGNQFCGQAIIETKARALQVAREVEKRVAVPRPVRMHWTGCPNSCGQVQVADIGFMGCLTKDSDGKIVEAADIFVGGRVGSDSHLADVYRKSVPCKDLVPIVADLLVERFGAVPREREEDEE

SEQ ID NO: 31226 - protein, 327 aa, Arabidopsis thaliana
MATSSSTEKLPRVLIVKRPDAMAVLGDGFVASTKFEILKAFESPLPLPEFLAYHSDSISAIIAPVAAPVTADLIRILPNLRLVVTTSAGVDHVDLVECRRRGISVANAGSSFSEDVADTAVGLLIDVFRRISAANRFVKQRFWPLKGDYPLGSKLGRKRIGIVGLGSIGSKVATRLDAFGCQISYSSRNRKPYDVPYHYYMDIEEMAANSDALIICCELNEKTLRLINKDVLSALGKRGVIVNVARGAIIDEEEMVRCLREGEIGGAGLDVFEDEPNVPKELFELDNVVFSPHSAFMTLEGLEELGKVVVGNIEAFFSNKPLLTPVL

SEQ ID NO: 31227 - protein, 212 aa, Arabidopsis thaliana
WPIGGYPGPQGPYYCGIGADKSFGRDVVDSHYKACLYAGINISGINGEVMPGQWEFQVGPAVGISAADEIWVARYILERITEIAGVVVSFDPKPIPGDWNGAGAHCNYSTKSMREEGGYEIIKKAIDKLGLRHKEHIAAYGEGNERRLTGHHETADINTFLWGVANRGASIRVGRDTEKEGKGYFEDRRPASNMDPYIVTSMIAETTILWNP

SEQ ID NO: 31228 - protein, 641 aa, Sinorhizobium meliloti
MAKVIGIDLGTTNSCVSVMDGKDAKVIENAEGARTTPSMVAFTEDGERLVGQPAKRQAVTNPENTLFAIKRLIGRTFEDPTTQKDKGMVPYKIVKADNGDAWVEAHGTSYSPSQISAMILQKMKETAESYLGEKVEKAVITVPAYFNDAQRQATKDAGKIAGLDVLRIINEPTAAALAYGLDKKEGKTIAVYDLGGGTFDISVLEIGDGVFEVKSTNGDTFLGGEDFDMRLVEYLASEFKKEQGIDLKNDKLALQRLKEAAEKAKIELSSSQQTEINLPFITADASGPKHLTMKLSRAKFESLVEDLIQKTIAPCKAALKDAGVSAAEIDEVVLVGGMTRMPKVQETVKQLFGKEPHKGVNPDEVVAMGAAIQAGVLQGDVKDVLLLDVTPLSLGIETLGGVFTVLIERNTTIPTKKSQVFSTADDNQSAVTIRVSQGEREMAADNKLLGQFDLVGIPPAPRGVPQIEVTFDIDANGIVQVSAKDKGTGKEHQIRIQASGGLSDAEIEKMVKDAEANAEADKKRREGVEAKNQAESLVHSSEKSLQEHGDKVSETDRKAIEDAIAALKSRVEVSEPDAEDIKAKTNTLMEVSMKLGQAIYEAQQTDAAHAMPPPDAKRSGDDVVDADYEEVKDEDDRKRSA

SEQ ID NO: 31229 - protein, 259 aa, Corynebacterium glutamicum ATCC 13032
MTSKPLWQGRCRMRNYPDLPHDFPGQNTELTPAKAPVWMHRLLDRIHTGRMANPLDGAETLGDTDSEKRAAVLMLFSGSETSFDLPNDASVLLTHRTPTMRSHAGQIAFPGGRIDPTDTNAVDCAFREAWEETGLDRRTATPLAQLNEVHIRATGYPVYPILGHWHTPSPVAVASPHETDEVFDAPLYDLIDPKNRLMVGWREWHGPAFRINDYIIWGFTGGLLSAILDTAGWATEWDTDRIFDLENTLSTSRNNERMR

SEQ ID NO: 31230 - protein, 595 aa, Corynebacterium glutamicum ATCC 13032
MTTSDPNPKPIVEDAQPEQITATEELAGLLENPTNLEGKLADAEEEIILEGEDTQASLNWSVIVPALVIVLATVVWGIGFKDSFTNFASSALSAVVDNLGWAFILFGTVFVFFIVVIAASKFGTIRLGRIDEAPEFRTVSWISMMFAAGMGIGLMFYGTTEPLTFYRNGVPGHDEHNVGVAMSTTMFHWTLHPWAIYAIVGLAIAYSTFRVGRKQLLSSAFVPLIGEKGAEGWLGKLIDILAIIATVFGTACSLGLGALQIGAGLSAANIIEDPSDWTIVGIVSVLTLAFIFSAISGVGKGIQYLSNANMVLAALLAIFVFVVGPTVSILNLLPGSIGNYLSNFFQMAGRTAMSADGTAGEWLGSWTIFYWAWWISWSPFVGMFLARISRGRSIREFILGVLLVPAGVSTVWFSIFGGTAIVFEQNGESIWGDGAAEEQLFGLLHALPGGQIMGIIAMILLGTFFITSADSASTVMGTMSQHGQLEANKWVTAAWGVATAAIGLTLLLSGGDNALSNLQNVTIVAATPFLFVVIGLMFALVKDLSNDVIYLEYREQQRFNARLARERRVHNEHRKRELAAKRRRERKASGAGKRR

SEQ ID NO: 31231 - protein, 565 aa, Corynebacterium glutamicum ATCC 13032
MRGYQRSWLKGDVIAGITVAAYLVPQVMAYAVIAGLPAVVGLWGVLAPMALYFFLGTSRNLSVGPESTTALMTAAGVGALVGAAGGPERYAEVAALLAIAVGIVCAVGFIGRLGFLTRLLSRPVLVGYLIGIAVLMIVSQLSKVTQVNVESGQTWQEIISFIKVAGQAHIPTVILAVVVLSLLYLANWLTPKFPSTLMVLLLSAAAVGFFHLDRFGLEVIGEVPRGLPQPSIPSIGDLEIWSLLPYAVGIAIVGFSDNVLTARAFASGKDEVIDSNQELLALGTANLANGFFQGFPVSSSGSRTVLGDTAGARTQVHSLVVVALVIMVLLFAGPVLESFPDAALGALVIYAATQLIDIAEIKRIARFRKSELVITAATAASVVASGVLAGIGVAVTLSILDLIRRITRPYADVLGYTPGMAGMHSLEDYPESTAVEGLVVFRYDSPLFFANADDFSKRAIEAVDEATQPVHWFLLNAEANTEVDLTAVDAMEALRKTLEERGIRFAMARVKQDLRRSLEPAGFIESVGEEYIFATLPTAVKGYSVEFRDRFGNYPEGVPKEILEL

SEQ ID NO: 31232 - protein, 732 aa, Corynebacterium glutamicum ATCC 13032
MSNTENVNGDVEQPNNVISSESQETPQGDSASADFALETPTNTVEDAPASEGSEEITRVADTSEDADSADADNASNVINENEDSSEGANQPSNESSSTEAKSGFDALGLPERVLDAVRKVGYETPSPIQAQTIPILMEGQDVVGLAQTGTGKTAAFALPILARIDKSVRSPQALVLAPTREQALQVADSFQSFADHVGGLNVLPIYGGQAYGIQLSGLRRGAHIVVGTPGRIIDHLEKGSLDISGLRFLVLDEADEMLNMGFQEDVERILEDTPDEKQVALFSATMPNGIRRLSKQYLNNPAEITVKSETRTNTNITQRFLNVAHRNKMDALTRILEVTEFEAMIMFVRTKHETEEVAEKLRARGFSAAAINGDIAQAQRERTVDQLKDGRLDILVATDVAARGLDVERISHVLNFDIPNDTESYVHRIGRTGRAGRTGEAILFVTPRERRMLRSIERATNAPLHEMELPTVDQVNDFRKVKFADSITKSLEDKQMDLFRTLVKEYSQANDVPLEDIAAALATQAQSGDFLLKELPPERRERNDRRRDRDFDDRGGRGRDRDRGDRGDRGSRFDRDDENLATYRLAVGKRQHIRPGAIVGALANEGGLNSKDFGRITIAADHTLVELPKDLPQSVLDNLRDTRISGQLINIERDSGGRPPRRFERDDRGGRGGFRGDRDDRGGRGRDRDDRGSRGGFRGGRDRDDRGGRGGFRGRDDRGDRGGRGGYRGGRD

SEQ ID NO: 31233 - protein, 332 aa, Corynebacterium glutamicum ATCC 13032
MLGRPRKPALFCQEVAGSIIPNFQRGFMSFTDTPDGFRSGFVSFVGRPNTGKSTLTNALVGEKIAITANQPETTRHPIRGLVHRDNAQIIVVDTPGLHRPRTLLGERLNEAVKDTYADVDLIGFTVPANEKIGPGDRWILEAVRKVSPKTPILGIITKADSVSRDLVAAQLMAVHELLGGNSEVVPVSSTSGENVETLIKVMTDLLPEGPKFYPDDHITDEDTNTRIAEAIREAALSGLKNELPHSVAVEVDEILPDPERNGVLAVHAIIYVERVGQKDIIVGHKGQRLGRIIHTSRQDIIKILGQNVFLDLRIKVLKNWQSDPKALNRLGF

SEQ ID NO: 31234 - protein, 374 aa, Ruta graveolens
MAMANGSSSSLSASWSSAELFKAQGQVWNCALNCVNSLSLKCAVELGIPDIIHSHGQPMTLSQICSALNIQPNKTQAMERVMRILVHSGFFSLSRDDDPQGYYGLTPASRLLLKDEPFGAAKFLLFMTHPHMTDSLNSLSSWFQNDVPTSFETTHGKGYWEFVAGEDKFSKIFYDCMEADSELIVSVLIKDYKEVFEGIGSLVDVGGGTGATALALAKAFPEINFTVFDQPHVVHNLQGTQNLRFQGGDMFDAIPPADAFLLKWTSHDWGDEDCVKILKKCKEAIPSKGKVIIIEIAIKENSKEEAEEEKEKDDCSSKTETETQLCFDMMCMQAYNFGKQRTVREWEKVLEGAGFSHYKITPCLGARSLIEAYP

SEQ ID NO: 31235 - protein, 60 aa, Bacillus thuringiensis serovar kurstaki
YSKRFNSEKGFGFIEVEGGEDVFVHFSAIQGEGFKTLEEGQEVTFEVEQGNRGPQAANVT

SEQ ID NO: 31236 - protein, 639 aa, Lactobacillus reuteri
MCGIVAFVDNEKPQIKDQLIQKMKDRIIHRGPDAEGQYVDDDVALGFRRLSFIDVKSGNQPIFNEDSSKAIEFNGEIYNFEELREELISKGHTFKTHADTEVILHGYEEWGKDVVNKLRGMFGFVIWDFKTKEMFGARDHFGIKPLYYAKMNGTFFVGSEIKAFLDHPNFKKELNKEALKPYMTFQYPVTQETFFKGVYRLPEGHYFTYKDGQFEMTQYWDENFEPEDETFDEAVNKIDEVVKNSVKAHTFADKGIKVGSFLSAGVDSSLVTALMRPDNTFSIGFDSTYDETKQARELAAKMGLKNTDEKLTNEEAFHAFPMIQYYLDEPDSNPSVVPLYFLNKLAKDNGYKALLSGEGADELFAGYIDYGFNTKVKFIRWVTDQLKKMPRERRYKFAKWLDGKHFHGQEHMYRNLAPARDTFIGQAYIFSPEEAADYLQPEFDCGPSIADILNPLFDKMEDKDIDEVAKKQYVDLHRFMPGDICLKADKMSMANSVEIRVPLLDKEVMKVAETTPTKYLFNYKDTKWAFRMAANRHLPEEWATRPKMGFPTPVRAWLREKKYYQEVRELFEQDFVKEFFDQEKLLKLADDNFEGKVDGRRKIWTIYTFLTWYKLYFIDNFKPDESGIDRAQKAATTEV

SEQ ID NO: 31237 - protein, 279 aa, Oryza meridionalis
QPSPPSSPMSERPPSGRSRRRAQEPGRFLGVRRRPWGRYAAEIRDPTTKERHWLGTFDTAQEAALAYDRAALSMKGAQARTNFVYTHAAYNYPPFLAPFHAPPYAAAAAAPSSVQYGGVGAAPHIGSYGHHHHHHHHHGHGAAASGASSMGECSTMPVMVPVDPHRSSMSSSLLDMDRNDHDFLFSSADDNSGYLSSVVPESCLRPRGGGAAADHQDMRRYSDADAYGMMGLREDVDDLAQMVAGFWGGGDAADQLGACGFPASGGGADMVASSQGSDS

SEQ ID NO: 31238 - protein, 279 aa, Oryza longistaminata
QPSPPSSPMSERPPSGRSRRRAQEPGRFLGVRRRPWGRYAAEIRDPTTKERHWLGTFDTAQEAALAYDRAALSMKGAQARTNFVYTHAAYNYPPFLAPFHAPPYAAAAAAPSSVQYGGGVGAAPHIGSYGHHHHHHHHHGHGAASGASSVGECSTMPVMVPVDPHRSSMSSSLLDMDRNGHDFLFSGADDNSGYLSSVVPESCLRPRGGGAAADHQDMRRYSDADAYGMMGLREDVDDLAQMVAGFWGGGDAADQLGACGFPASGGAADMVASSQGSDS

SEQ ID NO: 31239 - protein, 279 aa, Oryza glumipatula
QPSPPSSPMSERPPSGRSRRRAQEPGRFLGVRRRPWGRYAAEIRDPTTKERHWLGTFDTAQEAALAYDRAALSMKGAQARTNFVYTHAAYNYPPFLAPFHAPQYAAAAAAPSSVQYGGGVGAAPHIGSYGHHHHHHHHHGHGAASGASSVGECSTMPVMVPVDPHRSSMSSSLLDMDRNGHDFLFSGADDNSGYLSSVVPESCLRPRGGGAAADHQDMRRYSDADAYGMMGLREDVDDLAQMVAGFWGGGDAADQLGACGFPASGGAADMVASSQGSDS

SEQ ID NO: 31240 - protein, 279 aa, Oryza rufipogon
QPSPPSSPMSERPPSGRSRRRAQEPGRFLGVRRRPWGRYAAEIRDPTTKERHWLGTFDTAQEAALAYDRAALSMKGAQARTNFVYTHAAYNYPPFLAPFHAPQYAAAAAAPSSVQYGGGVGAAPHIGSYGHHHHHHHHHGHGAASGASSVGECSTMPVMVPVDPHRSSMSSSMLDMDRNGHDFLFSGADDNSGYLSSVVPESCLRPRGGGAAADHQDMRRYSDADAYGMMGLREDVDDLAQMVAGFWGGGDAADQLGACGFPASGGAADMVASSQGSDS

SEQ ID NO: 31241 - protein, 150 aa, Zea mays subsp. parviglumis
MDWDLKAAGAWDLAELEQDHAAAAPSSGGHAANAAAAGTGTDSRPPAPGAAGAPAECSVDLKLGGMGECEPGAARREREAAAGAAKRPRPAGPGGQQQQQCPSCAVDGCRADLGKCRDYHRRHKVCEAHSKTPVVVVAGREMRFCQQCSR

SEQ ID NO: 31242 - protein, 150 aa, Zea mays subsp. parviglumis
MDWDLKAAGAWDLAELEQDHAAAAPSSGGHAANAAAAGTGTESRPPAPGAAGAPAECSVDLKLGGMGECEPGAVRREREAAAGAAKRPRPAGPGGQQQQQCPSCAVDGCRADLGKCRDYHRRHKVCEAHSKTPVVVVAGREMRFCQQCSR

SEQ ID NO: 31243 - protein, 150 aa, Zea mays subsp. parviglumis
MDWDLKAAGAWDLAELEQDHAAAAPSSGGHAANAAAAGTGTESRPPAPGAAGAPAECSVDLKLGGMGECEPGAARREREAAAGAAKRPRPAGPGGQQQQQCPSCAVDGCRADLGKCRDYHRRHKVCEAHSKTPVVVVAGREMRFCQQCSR

SEQ ID NO: 31244 - protein, 150 aa, Zea mays subsp. parviglumis
MDWDLKAAGAWDLAELEQDHAAAAPSSGGHAANAAAAGTGTESRPPAPGAAGAPAECSVDLKLGGMGECEAGAARREREAAAGAAKRPRPAGPGGQQQQQCPSCAVDGCRADLGKCRDYHRRHKVCEAHSKTPVVVVAGREMRFCQQCSR

SEQ ID NO: 31245 - protein, 150 aa, Zea mays subsp. parviglumis
MDWDLKAAGAWDLAELEQDHAAAAPSSGGHAANAAAAGTGTESRPPAPGAAGAPAVCSVDLKLGGMGECEAGAARREREAAAGAAKRPRPAGPGGQQQQQCPSCAVDGCRADLGKCRDYHRRHKVCEAHSKTPVVVVAGREMRFCQQCSR

SEQ ID NO: 31246 - protein, 150 aa, Zea mays subsp. parviglumis
MDWDLKAAGAWDLAELEQDHAAAAPSSGGHASNAAAAGTGTESRPPAPGAAGAPAECSVDLKLGGMGECEPGAARREREAAAGAAKRPRPAGPGGQQQQQCPSCAVDGCRADLGKCRDYHRRHKVCEAHSKTPVVVVAGREMRFCQQCSR

SEQ ID NO: 31247 - protein, 150 aa, Zea mays subsp. parviglumis
MDWDLKAAGAWDLAELEQDHAAAAPSSGGHAANAAAAGTGTESRPPAPGAAGAPAECSVDLKLGGMGECDPGAARREREAAAGAAKRPRPAGPGGQQQQQCPSCAVDGCRADLGKCRDYHRRHKVCEAHSKTPVVVVAGREMRFCQQCSR

SEQ ID NO: 31248 - protein, 150 aa, Zea mays subsp. parviglumis
MDWDLKAAGAWDLAELEQDHAAAAPSSGGHAANAAAAGTGTESRPPAPGAAGAPAECSVDLNLGGMGECEPGAARREREAAAGAAKRPRPAGPGGQQQQQCPSCAVDGCRADLGKCRDYHRRHKVCEAHSKTPVVVVAGREMRFCQQCSR

SEQ ID NO: 31249 - protein, 150 aa, Zea mays subsp. mexicana
MDWDLKAAGAWDLAELEQDHAAAAPSSGGHAANAAAAGTGTESRPPAPGAAGAPAECSVDLKLGGMGECEPGAARRERETAAGAAKRPRPAGPGGQQQQQQCPSCAVDGCRADLGKCRDYHRRHKVCEAHSKTPVVVVAGREMRFCQQCS

SEQ ID NO: 31250 - protein, 150 aa, Zea mays subsp. mexicana
MDWDLKAAGAWDLAELEQDHAAAAPSSGGHAANAAAAGTGTESRPPAPGAAGAPAECSVDLKLGGMGECEPGAARREREAAAGAAKRPRPAGPGGQQQQQQCPSCAVDGCRADLGKCRDYHRRHKVCEAHSKTPVVVVAGREMRFCQQCS

SEQ ID NO: 31251 - protein, 150 aa, Zea diploperennis
MDWDLKAAGAWDLAELEQDHAAAAPSSGGHAANAAAAGTGTESRPPAPGAAGAPAECSVDLKLGGMGECEPGAARREREVVAGAAKRPRPAGPGGQQQQQCPSCAVDGCRADLGKCRDYHRRHKVCEAHSKTPVVVVAGREMRFCQQCSR

SEQ ID NO: 31252 - protein, 396 aa, uncultured bacterium
MELSDIVAISAVRTPMGRFGGTLKDVASYDLGAVAIRAALERAGVAGDAIDDVIFGSCRQAGNGPNPARTAAVRGGIPVTVPVQTINMACPSGMRCMTAASQAIRLGDYKIAMVGGMDSMSTIPYLLKDCRWSGFKMGDRTLLDGWADSIDPICNTGMGSTAENLVEKYKVSREEQDKFAVESHQKAAAAQSNGWFDEEIVPVEVPAKGKQPAVLFDKDETIRPDTSLEKLAKLRPAFKKDGSVTAGNACGMSDGATALVITSREHAKALGATPLFSLVAYSSVAVEPATMGEGPSVSIPLALERAGMTLDQMDLIEVNEAFAIQVLANEQVLKWDRSKLNIHGGAIALGHPTGISGARIVVTLYHALKRTGGEVGIAGICGGGGVSMALVIKRES

SEQ ID NO: 31253 - protein, 381 aa, Manihot esculenta
MCGGAIISDFIPATAAGRSSRRLTADFLWPDLKKPIGKIVGDLDDDFEADFQEFKDESDVDEEDDVLFDVKPFSFSATASPPPRNRSPSRGSTAVKSVEFNGLAEKSAKRKRKNQYRGIRQRPWGKWAAEIRDPRKGVRVWLGTFNTAEEAARAYDAEARRIRGKKAKVNFPDEAPRASPKRTMKANPQKPLPKRNATESMSYLNNPDQDYFNTLGSVDEKPLVSQFDLMDSFPANGDATVKSIPPCDNVPTFFNSDQGSNSFECSDFGWGEQASKTPEISSVLSATPEIDESLFMDDANPKKKMKSDSENAVPIEESNGKSLSEELLAFDNQMNFQMPYLEGSWEASLDGFLNGDVTQDGGNPMDLWSFDDLPNMVGGVY

SEQ ID NO: 31254 - protein, 163 aa, Gossypium hirsutum
MATYEGKVFTEEQEALVVKSWTVMKKNAAELGLKFFLKIFEIAPSAKKLFSFLRDSNVPLEQNTKLKPHAMSVFVMTCESAVQLRKAGKVTVRESNLKKLGATHFKYGVVDEHFEVTKFALLETIKEAVPDMWSDEMKNAWGEAYDRLVAAIKIEMKACSLAA

SEQ ID NO: 31255 - protein, 180 aa, Rhizobium gallicum bv. gallicum
EFDAFPALEQLPLWGFDGSSTMQAEGRSSDCVLKPVAVYPDPARTNGALVMCEVMMPDGVTPHPSNSRATILDDEDAWFGFEQEYFFYEDGRPLGFPEQGYPAPQGPYYTGVGYKNVGSVAREIVEEHLDLCLAAGINHEGINAEVAKGQWEFQIFGKGSKRAADQIWMARYLLLRLCEK

SEQ ID NO: 31256 - protein, 180 aa, Rhizobium gallicum bv. gallicum
EFDAFPALEQLPLWGFDGSSTMQAEGRSSDCVLKPVAVYPDPARTNGALVMCEVMMPDGVTPHPSNSRATILDDEDAWFGFEQEYFFYENGRPLGFPEQGYPAPQGPYYTGVGYKNVGSVAREIVEEHLDLCLAAGINHEGINAEVAKGQWEFQIFGKGSKRAADQIWMARYLLLRLCEK

SEQ ID NO: 31257 - protein, 180 aa, Rhizobium etli bv. phaseoli
EFDAFPTLEQLPLWGFDGSSTMQAEGRSSDCVLKPVAIYPDPARTNGVLVMCEVMMPDGVTPHPSNARATILDDEDAWFGFEQEYFFYQNGRPLGFPEQGYPAPQGPYYTGVGYSNVGDVAREIVEEHLDLCLAAGFNHEGINAEVAKGQWEFQIFGKGSKKAADQIWMARYLLQRLTEK

SEQ ID NO: 31258 - protein, 149 aa, Picea abies
  misc_feature (112)..(113): Xaa can be any naturally occurring amino acid
  unsure (1)..(149): unsure at all Xaa locations
MSDEDNHFESKADAGASKTFPQQAGTIRKNGYIVIKARPCKVVEVSTSKTGKHGHAKCHFVAIDIFNGKKLEDIVPSSHNCDVPHVTRTDFQLIDISEDGFVSLLADNGNTXXDLRLPSDEQLLTQIKDGFGEGKDLVVTVMSAMGEEQ

SEQ ID NO: 31259 - protein, 159 aa, Picea abies
MSDDDHQFESKGDAGASKTFPQQAGTIRKNGYIVIKARPCKVVEVSTSETGKHGHAKCHFVGIDIFSGKKLEDIVPSSHNCDVPHVTRTDYQLIDISEDGFVSLLTESGQTKDDLKLPTDDQLLAQIKAGFDEGKDLVVTVMSAMGEEQICSLKDIGPK

SEQ ID NO: 31260 - protein, 159 aa, Picea abies
MSDDDHQFESKADAGASKTFPQQAGTIRKNGYIVIKARPCKVVEVSTSKTGKHGHAKCHFVGIDIFSGKKLEDIVPSSHNCDVPHVTRTDYQLIDISEDGFVSLLTESGQTKDDLKLPTDDQLLAQIKAGFDEGKDLVVTVMSAMGEEQICSLKDIGPK

SEQ ID NO: 31261 - protein, 159 aa, Picea abies
MSDEEHHFDHKGESGASKTFPQQAGAIRKSGYIVVKGRPCKVVEVSTSKTGKHGHAKCHFVAIDIFTSKKLEDIVPSSHNCDVPEVIRTDYQLIDISEDGFVSLLTDSGDTKDDLRLPNDDQLVSQIKDGFAEGKDLIVTVMSAMGEEQISALKDIGPK

SEQ ID NO: 31262 - protein, 160 aa, Picea abies
MSDEDNHFESKADAGASKTFPQQAGTIRKNGYIVIKARPCKVVEVSTSKTGKHGHAKCHFVAIDIFNGKKLEDIVPSSHNCDVPHVTRTDFQLIDISEDGFGSLLADNGNTKDDLRPPSDEQLLTQIKDGFLEEGKDLVVTVMSAMGEEQICALKDIGPK

SEQ ID NO: 31263 - protein, 541 aa, Oryza sativa Japonica Group
MARRLRWHDLVGLGLGGMVGAGVFVTTGRATRLYAGPGVVVSYAIAGLCALLSAFCYTEFAVDMPVAGGAFSYLRVTFGELAAFLTGANLIMEYVFSNAAVARSFTAYLGTAVGVDAPSKWRIAVPGLPKGFNEVDLIAVGVILLISVCICYSTKESSVVNMVLTAVHVAFILFIIVMGFWRGDTRNLTRPVDLAHNPGGFFPHGAAGVFNGAAMVYLSYIGYDAVSTMAEEVERPSRDIPVGVSGSVVLVTLLYCLMAASMSMLLPYDAIDTEAPFSGAFKGSSGWGWVSNVIGAGASLGILTSLMVAMLGQARYLCVIGRSGVMPAWLAKVHPCTATPVNASAFLGVFTAALALFTELDVLLNLVSIGTLFVFYMVANAVVYRRYVAADDDDADHRRAWPTLVFLAAFSLVALCFTLLWQFAPAGRARTGLLAACGAAAVATVGAFRALVAEARRPELWGVPAMPWVPAASVFLNVFLLGSLDRPSYVRFGFFTAAAVLVYVLYSVHASYDAEEGGGAGAGAAALDGAKVQDEAADFKV

SEQ ID NO: 31264 - protein, 377 aa, Lactobacillus sanfranciscensis
  misc_feature (318)..(318): Xaa can be any naturally occurring amino acid
  misc_feature (321)..(321): Xaa can be any naturally occurring amino acid
  unsure (1)..(377): unsure at all Xaa locations
MVENNDINKILEEKLYCIGCGALIQDTDKDKAGYTPKSAIEKGLESGELYCQRCFRLRHYNEIQPVDVSDDEFLHLLGKIGDTDSLVVYVVDIFDVNGSIIPGIQRFVGNNPILVVGNKVDLLPSSFKESKIKDWLRQMMNKAGIKPIDIELVSAKTNRSVDDLLEVIKKYQKNRDVYVVGVTNVGKSTLINQIIHQASGQEQVITTSKFPGTTLDMIKIPLDDGHDLIDTPGVIHASQMAHYLSPKDLKYVSPQKRIKPKVYQLNDGQTLFLGAIGRFDYVKGPKTGFTVNVDNNLMIHRTKTENADEFLINMPGEXLNXPLGKENVVPLQRHEFKVEDTSDLVIEGLGWVTVPKGSIIAGWAPKGVSVLIRKAMF

SEQ ID NO: 31265 - protein, 184 aa, Oryza sativa Japonica Group
MSRDPLVVGHVVGDIVDPFVTTASLRVFYNSKEMTNGSELKPSQVLNQPRIYIEGRDMRTLYTLVMVDPDAPSPSNPTKREYLHWMVTDIPETTDARFGNEIVPYESPRPTAGIHRFVFILFRQSVRQTTYAPGWRQNFNTRDFAELYNLGSPVAALFFNCQRENGCGGRRKLELRIVPIDYMV

SEQ ID NO: 31266 - protein, 553 aa, Streptomyces aizunensis
MTSFSPAPTTMLVPDFPFSYDGWLRHPAGLGALPPERAGTPVAVVGGGMAGMTAAYELMRLGLRPVVYEAEQLGGRMRSVPFPGQPGLVAEMGAMRFPLSARSLFHYIDLLGLRTSPFPNPLAANTPSTLIDLGGERHTARSAEQLPDVYQEVASAWEKALQERAELATMRDAIQRRDVETVKQIWNRLVREFDDQSFYGFLATSSAFPSFRHREIFGQVGFGTGGWDTDFPNSLLEILRVVYTEADDNQVAIDGGSQQVPRGLWEHRPRGCAHWPAGTSLASLHGGTARPRVRAVARDGDGFLVTDADGHRERFASVVYTPHVWTLLNRVACDPALLTQPLWTAVERTHYMGASKLFVLADRPFWNDTDPRTGRPVMSMTLTDRMPRGVYLFDDGPDRPGVMCLSYTWNDDSLKMATLSADERLDVLLEKLGVIYPGVDIRSHVIGDPITITWESEPHFMGAFKSNLPGQYRYQRRLFTQFMQRGLPRAQRGFFLCGDDVSWTAGFAEGAVTTALNAVWGVLDHLGGATPPGNPGPGDLFDALAPLDLPYDS

SEQ ID NO: 31267 - protein, 329 aa, Streptomyces aizunensis
MTAHPNGVTPPLPPTETDRTLHFAGPATFGRIPRIDQVEKTDIAVVGVPFDSGVTYRPGARFGGNAIREASRTLRPYNPAQNVYPFHFSQVADAGDISANPFDLNDAVETIEAAADDLISSGARLMTLGGDHTIALPMLRAVAKKHGPLAVLHFDAHLDTWDDYFGQQYTHGMPFRRAVEEGILDTSALSHVGTRGPIYGKKDLDDDEKLGFGIVTSADVMRRGVDEVAQQLRERVGDRPLYISIDIDVLDPAHAPGTGTPEAGGLTSRELLEILRGLADCHLVSADIVEVAPAYDHADITSVAASHAAYELISIMSKQIAPVRWGATQ

SEQ ID NO: 31268 - protein, 313 aa, Solenostemon scutellarioides
MEAIGVLMMCPMSTYLEQELDKRFKLFRYWTQPAQRDFLALQAESIRAVVGNSNAGADAELIDALPKLEIVSSFSVGLDKVDLIKCEEKGVRVTNTPDVLTDDVADLAIGLILAVLRRICECDKYVRRGAWKFGDFKLTTKFSGKRVGIIGLGRIGLAVAERAEAFDCPISYFSRSKKPNTNYTYYGSVVELASNSDILVVACPLTPETTHIINREVIDALGPKGVLINIGRGPHVDEPELVSALVEGRLGGAGLDVFEREPEVPEKLFGLENVVLLPHVGSGTVETRKVMADLVVGNLEAHFSGKPLLTPVV

SEQ ID NO: 31269 - protein, 216 aa, Dendrobium thyrsiflorum
KAHEISVLCDAEVAVIVFSNKGKLYEYSTDSSMEKILERYERYSYAERALFSNEANPQADWRLEYNKLKARVESLQKSQRHLMGEQLDSLSIKELQHVEQQLESSLKHIRSRKAQLILDSISELQKKEKILLEQNKTLEKEIIAKEKAKALMQNAPWEKQNLSRYSSAPLHVISDSVPTPTSRTFQAIANEEESPQAQLRVSNTLLPPWMLGHMNG

SEQ ID NO: 31270 - protein, 441 aa, Lotus japonicus
MNQPKIKRRVGKYEVGRTIGEGTFAKVKFARNSETGEAVALKILDKEKVLKHKMAEQIKREVATMKLIKHPNVVQLYEVLGSKTKIYMVLEFVTGGELFDKIVNHGRMCEDEARRYFQQLINTVDYCHSRGVYHRDLKPENLLLDACGNLKVSDFGLSALSQQIKDDGLLHTTCGTPNYVAPEVLNDKGYDGATADLWSCGVILFVLVAGYLPFDDPNLMELYKKISAAEFTCPPWLSFSARKLITRILDPNPMTRITIAEILEDEWFKKDYKPPIFQENGETNLDDVEAVFKDSEEHHVTEKKEEQPTAMNAFELISMSKGLNLENLFDVEQGFKRETRFTSKSPANEIISKIEEAAKPLGFDVQKKNYKMRLANVKAGRKGNLNVATEVFQVAPSLHMVEVRKAKGDTLEFHKFYKKLSTCLEDVVWKTEDDMQKQEAK

SEQ ID NO: 31271 - protein, 446 aa, Lotus japonicus
MKKVRRRIGKYEVGRTIGEGTFAKVKFAKNSETGESVAIKIMDKTTILKHRMVEQIKREISIMKIVRHPNIVRLHEVLSSQTKIYIILEFVMGGELYDRIVQRGKLSEDESRRYFQQLIDAVAHCHKKGVYHRDLKPENLLLDAFGNLKVSDFGLSALTKQGVDLLHTTCGTPSYVAPEVLSNQGYDGAAADVWSCGVILYVLKAGYLPFEEADLSTLYRRTSAAEFVCPSWFSTGTTTLIHKILDPNPKTRVKIGEIRKDPWFQRNYLPLKLNEDEQVNLDDVQAVFDDIEDQYVPVQSEITEGGPLVMNAFEMITLSQGLNLSPLFDRHQDYVKRQTRFVSRKPAKVIISSIKVVAESMGLKLQSRNYKMRIEGLSANKAGQFAVVLEVYEVAPCLYMVDVRKAAGDTLDYHKFYKNLCAKLENIIWRPTETMPDSGLLRQMTL

SEQ ID NO: 31272 - protein, 431 aa, Pseudomonas putida
MGCLANARLTGREEAVMKNLKTQYLLLILGFIALPFLVEAIPMLGPTWVRILGFAMLYVLLALGLNIVIGYAGLLDMGYIGFYAIGAYLYALLASPHLQMAGLLEAVLDWPVWVIIPLAAVAAAICGVLIGAPVLKLRGDYLAIVTLGFGEIIRIFMNNLDQPVNLTNGPQGISNIAPMHVDFGAWAHAPGAGATPVLSLQQSWSLFGLPVSPVISYYLFFLFVVILCIVLSKRLEVSRIGRAWMALREDEVAAEAMGLNKRNLKLLAFAMGATFGGVSGVLFSSYQGFVSPESFTLMESIMVLAMVVLGGMGSIRGVVLGALILSVMPELFRDLVNWVQPWVMDNVTFISRDILRNVLDASTLRMLVFGLALILVMRFRPEGLWPSSRRRAELHDDDPEAEPAPAVLSTTINGPASEASFELPIKQADKA

SEQ ID NO: 31273 - protein, 364 aa, Medicago truncatula
MAFSTNGSEESELYHAQIHLYKHVYNFVSSMALKSAMELGIADAIHNHGKPMTLSELASSLKLHPSKVNILHRFLRLLTHNGFFAKTIVKGKEGDEEEEIAYSLTPPSKLLISGKPTCLSSIVKGALHPSSLDMWSSSKKWFNEDKEQTLFECATGESFWDFLNKDSESSTLSMFQDAMASDSRMFKLVLQENKRVFEGLESLVDVGGGTGGVTKLIHEIFPHLKCTVFDQPQVVGNLTGNENLNFVGGDMFKSIPSADAVLLKWVLHDWNDEQSLKILKNSKEAISHKGKDGKVIIIDISIDETSDDRGLTELQLDYDLVMLTMFLGKERTKQEWEKLIYDAGFSSYKITPISGFKSLIEVYP

SEQ ID NO: 31274 - protein, 352 aa, Medicago truncatula
MASSLNGRKPSEIFKAQALLYKHIFAFIDSMSLKWAVEMNIPNIIHNHGKPISLSNLVSILQVPSSKIGNVRRLMRYLAHNGFFEIITKEEESYALTVASELLVRGSDLCLAPMVECVLDPTLSGSYHELKKWIYEEDLTLFGVTLGSGFWDFLDKNPEYNRSFNDAMASDSKLINLALRDCDFVFDGLESIVDVGGGNGTTGKIICETFPKLKCIVFDRPQVVENLSGSNNLTYVGGDMFTSIPNADAVLLKYILHNWTDKDCTRILKKCKEAVTNDGKKGKVIIIDMVINEKKDENQVTQIKLLMDVNMACLNGKERNEEEWKKLFIEAGFQDYKISPLTGFLSLIEIYP

SEQ ID NO: 31275 - protein, 351 aa, Coptis japonica
MDTPNTFQNDDEIKAQAQVWKHMFGFAETIMLRSTVSLGIPDIIHNNGPVTLSQLVTHLPLKSTSIDRFHHFMRYLVHMQLFTISTDQITKEDKYELTPASKLLVHGHQKSLAPYVMLQTHPEEFSVWSHVINVLDGKKPYWESNDTSMYEKTEGDPEINEILNDAMTSHSTFMLPALVSGLMKENVLDGVASIVDVGGNSGVVAKGIVDAFPHVKCSVMDLNHVIERVIKNPKLDYVAGDMFTSIPNADAILLKSTLHNYEDDDCIKILNIAKEALPSTGGKVILVEIVVDTENLPLFTSARLSMGMDMMLMSGKERTKKEWEDLLRKANFTSHQVIPIMAIESIIVAYS

SEQ ID NO: 31276 - protein, 162 aa, Parasponia andersonii
MSSSEVNKVFTEEQEALVVKAWAVMKKNSAELGLQFFLKIFEIAPSAKNLFSYLKDSPVPLEQNPKLKPHATTVFVMTCESAVQLRKAGKATVKESDLKRIGAIHFKTGVVNEHFEVTRFALLETIKEAVPEMWSPEMKNAWGVAYDQLVAAIKFEMKPSST

SEQ ID NO: 31277 - protein, 318 aa, Pisum sativum
MATFIKLFVTLSIISLLACSTNAQLINNFYATTCPSLQTIVRNTMISAIKTEARIGASILRLFFHDCFVNGCDGSILLDDTATFTGEKSAGPNINSARGFEVIDTIKTNVEASCNATVSCADILALAARDGIFLLGGPTWMVPLGRRDARTASQSAANSQIPGPSSDLATLTTMFRNKGLTLNDLTVLSGAHTIGQTECQFFRNRIYNETNIDTNFATLRKSNCPSSGGDTNLAPLDSVTPTTFDNNYYNDLIANKGLLHSDQALFNGVGSQVSLVRTYSRNTVAFKRDFAAAMIKLSRISPLTGTNGEIRKNCRLVN

SEQ ID NO: 31278 - protein, 233 aa, Musa acuminata
RIENKINRQVTFSKRRNGLLKKAYELSVLCDAEVALIIFSSRGKLYEFGSVRMSKTLERYQHWCYASQDPNVVNRDNAQNWCQEMSKLKAKFESLQRSQRHLLGEDLGPLSVKELQQLERQLESALSQARQRKSQLILEQMEELRKKERHLGEINKQLRDQIEVEGATLKAFQGSWCSDAMIGSNAFAAQPSHSAGMDREPMLRIGYHQFVPADAAIPRNPIGENNFMLEWVP

SEQ ID NO: 31279 - protein, 903 aa, Solanum lycopersicum
MEVDNCWNIRLVNCVIICLVIYIQSAFAQEGFLSIQCCATANFTEPRTNLSWISDGIWFPENQSCISRPVYKSEHYERARSFSSDISHKWCYSLPTRKEHDYLVRGTFLSVKQEKTLPHSSFVVLIGVTPIATVKSSDELKVEGIFRATRSYTNFCLLKKKGNPYISKVELRPINSDYLKKEPSEILKLVHRVDAGNKAAEIRYPYDQYDRIWRPASNLESQVTQTPPSIIKHVFARKHSLLPPAFVLRTALTHPERLDFLHEDLDTGYYTYSLFLYFLEPNDSVQAGERVFYIYINNEKRLKVDILASGSRYLDVVLNFRANRSVNLTMIKASNLSQLGPICNGYEILKALPRVKETATEEVDIMANVKKELLQQNKNNEIWKSWSGDPCLPLPWPGLTCDRVNGTSVITQIDLSSGGLSGPSPPSIQKLMHLRKLNISINGSSGTNSLFTSYFTYSTRYLSSRIHISNKLSRSIKESNITTDKGMANVKQNSSSTHKLVIGAAVGTALLVILAIVISVVCLFKRRVMAGPKFLMRNYSITRNAVYSVPSMDTTMMKSISSRNFKLEYIEAITQNYKTLIGEGGFGSVYRGTLPDGVEVAVKVRSATSTQGIREFNNELNLLSAITHENLVPLIGYCCENEQQILVYPFMSNSSLQDRLYGGAAKRKILDWPARLSIALGAARGLLYLHTFSERCLIHRDVKSSNILLDQSMCAKVADFGFSKYASQEGDSGTSLEVRGTAGYLDPEYYSTQRLSAKSDVFSFGVVLLEILTGREPLNINKPRNEWSLVEWAKPLIRSSRVEEIVDPTIKGGYHGEALWRVVEVALACTETYSTYRPCMADIVRELEDALIIENNASEYLKSLDSFGGSNRFSVERSIVLPPIKSQTEPSSLLSKPAPPQPR

SEQ ID NO: 31280 - protein, 941 aa, Alnus glutinosa
MMEGSDYFILRLLEWFILCFFILVRSTCGQEGFVSLRCCSDSNFTDQITSINWTPDDSWFPNKTGCRDEPNIEAWKKHKDYGKARIFNIDSGKRCYRLTSIKEQDYLVRGTFLFGDLLRTTLDTSFDVLVGVTGISRVNSSEDSEVEGIFRATKDHIDFCLEKVQGDPYISKLELRPLKDLNYLQNFSSTTVLKSVHRIDVGNTGVDIRYPSDKSDRIWKPDTNSTARGSRLSVNVSNYSANNATPPLEVLQTALYHSERLEFQESLDKRDYEYRVFLYFFELNKTSKHGDRVFDIYINNEKVKENFEILANGYNYKEVVWDVRANGSLNLTLIKASGSLFGPICNAYEILQVREINQSYGEFDLQVQQTDEKDVEVAWRVRNELLVSNQANAVLESWSGDPCLPKPWQGLACALHNGSAIITSLNLSSMNLQGSIPHSITELANIETLNMSYNQFNGSIPEFPDSSMLKSVDISHNYLAGSLPESLISLPHLQSLYFGCNPYLDKEPQSSFNSTIHTDNGRCDSNESPRVRVSVIATVACGSFLFTVTVGVIFVCIYRKKSMPRGRFDGKGHQLTENVLIYLPSKDDISIKSITIERFTLEDIDTATENYKTLIGEGGFGSVYRGTLSDGQEVAVKVRSATSTQGTREFENELNLLSEIRHENLVPLLGHCSENDQQILVYPFMSNGSLQDRLYGEPAKRKTLDWPTRLSIALGAARGLTYLHTNAKRCIIHRDVKSSNILLDHSMCAKVADFGFSKYAPQEGDCVSLEVRGTAGYLDPEYYSTQQLSDKSDVYSFGVVLLEIVTGREPLNIHRPRNEWSLVEWAKAYIRDSQIDEMVDPSIRGGYHAEAMWRVVEVASTCIESDAASRPLMIDILRELDEALIIETNASEYMRSIDSLGTSSNRFSIVMEKRIVLPPISSSPSEPSPILPQGPSPPQPR

SEQ ID NO: 31281 - protein, 941 aa, Alnus glutinosa
MMEGSDYFILRLLEWFILCFFILVRSTCGQEGFVSLRCCSDSNFTDQITSINWTPDDSWFPNKTGCRDEPNIEAWKKHKDYGKARIFNIDSGKRCYRLTTIKEQDYLVRGTFLFGDLLRTTLDTSFDVLVGVTGISRVNSSEDSEVEGIFRATKDHIDFCLEKVQGDPYISKLELRPLKDLNYLQNFSSTTVLKSVRRIDVGNTGVDIRYPSDKSDRIWKPDTNSTARGSRLSVNVSNYSANNATPPLEVLQTALYHSERLEFQESLDKRDYEYRVFLYFFELNKTSKHGDRVFDIYINNEKVKENFEILANGYNYREVVWDVRANGSLNLTLIKASGSLFGPICNAYEILQVREINQSYGEFDLQVQQTDEKDVEVAWRVRNELLVSNQANAVLESWSGDPCLPKPWQGLACAPHNGSAIITSLNLSSTNLQGSIPHSITELANIETLNMSYNQFNGSIPEFPDSSMLKSVDISHNYLAGSLPESLISLPHLQSLYFGCNPYLDKEPQSSFNSTIHTDNGRCDSNESPRVRVSVIATVACGSFLFTVTVGVIFVCIYRKKSMPRGRFDGKGHQLTENVLIYLPSKDDISIKSITIERFTLEDIDTATENYKTLIGEGGFGSVYRGTLSDGQEVAVKVRSATSTQGTREFENELNLLSEIRHENLVPLLGHCSENDQQILVYPFMSNGSLQDRLYGEPAKRKTLDWPTRLSIALGAARGLTYLHTNANRCIIHRDVKSSNILLDHSMCAKVADFGFSKYAPQEGDCVSLEVRGTAGYLDPEYYSTQQLSDKSDVYSFGVVLLEIVTGREPLNIHRPRNEWSLVEWAKAYIRDSQIDEMVDPSIRGGYHAEAMWRVVEVASTCIESDAASRPFMIDILRELDEALIIETNASEYMRSIDSLGTSSNRFSIVMEKRIVLPPISSSPSEPSPILPQGPSPPQPR

SEQ ID NO: 31282 - protein, 945 aa, Tropaeolum majus
MMMERLDNRSSRRVECFIFCLLILPIIFHSVSAQPGFVSVACCADSGFTDNTLINWITDESWFPDKQGCRNFAPPVANYTGYKKARIFAIDSGKRCYNLPTIKDQDYLIRGSFLFGDSLSSPFGTSFNVLVGVTPIARVSTSDKLEVEGIFRANRDYIDFCLAYEKGEPYISNLELRALENSNFLKLESPVVLKLVDRVDLGGSTGEGIRFKDDKYDRIWKPDSYLNRTIITNANVSINNLNVTVPIKALQSAVTNENRLEFLKNDLDIGDYKYSVTLYFLELVENVQPGQRLFDIYINNALKWENFDISANGSDYKEVSFYATANGFLNVSLVKVPNGLGFGPICNAYEILQVRQWIQQSNLNDVNVIVNVKEELLKHNKRNVLWESWSGDPCLPYPWDGLVCYSVNGSSVITELNLSSRKLQGPIPSSIIQLTYLKDLNLSYNGFTGTIPSFTASSMLTSVDLRNNDLKGSLHESIGALQHLKTLDFGCNPQLDKELPSNFKKLGLTTDKGECGSQGPKHSTRAIIISIVTCGSVLFIGAVGIVIVFFYRRRSAQGKFKGSRHQISNNVIFSIPSTDEPFLKSISIEEFSLEYITTVTQKYKVLIGEGGFGSVYRGTLPDGQEVGVKVRSSTSTQGTREFDNELTLLSTIRHENLVPLLGYCCENGQQILVYPFMSNGSLQDRLYGEAAKRKVLDWPTRLSIALGAARGLTYLHSLAGRSLIHRDVKSSNILLDQSMTAKVADFGFSKYAPQEGDSCASLEVRGTAGYLDPEYYSTQQLSAKSDVFSFGVVLLEIISGREPLNIHRPRNEWSLVEWAKPYIRESRIDEIVDPTIKGGYHAEAMWRVVEVALACIEPFSAHRPCMADIVRELEDGLIIENNASEYMKSIDSIGGYSFGGGSNRFSIIVTDKEKKTIPPPPSPPTPNPSEPSPVNTQALTPPEPR

SEQ ID NO: 31283 - protein, 923 aa, Lupinus albus
MEHQHSWILRLVSYIICLYIFIRSASATEGFESIACCADSNYADPLTTLNYTIDHSWFSDKGSCSQISKNVTNYGSNENVRLFDIDEGKRCYNLPTTKNGVYLIRGIFPFGELSNSSFYVTIGVTQLGSVISSRLQDLGIEGVFRATKNYIDFCLVKEKVNPYISQLELRPLPEEYIHGLPTSVLKLISRNNLKGEGDDIRYPVDKSDRIWKGTSNPSYALLLSSNATNFDPKTNMTPPLQVLQTALTHPEKLEFIHNDLENEGYEYRVFLYFLELNSSLKAGQRVFDIHVNSEAKVERFDILAEGSNYRYTVLNFSATGLLNLTLVKASGSENGPLMNAYEILQVRPWIEETNQTEVEVIQKLRKELLLQNQDNKVIESWSGDPCIIFPWQGIACDNSSVITELDLSSSNLKGTIPSSVTEMINLKILNLSHSSFNGYIPSFSMSSLLISIDLSYNDLMGSLPESIPSLPHLKSLYYGCNQHMSEKVPANLNSSLIKTDCGKCQADNPKFGQIIVIDAVTCGSILITLAVGLILVCCYRLKLTPSEGFGEKNYPMATNIIFSFPASKDDFFIKPLVVTIQIFTLEYIEVVTERYKTLIGEGGFGSVYRGTLEDGQEVAVKVRSATSTQGTKGFDNELNLLSAIQHENLVPLLGYCNEKDQQILVYPFMSNGSLQDRLYGEPAKRKILDWPTRLSVSLGAARGLAYLHTFPGRSVIHRDVKSSNILLDHSMCAKVADFGFSKYAPQEGDSYVSLEVRGTAGYLDPEYYSTQQLSEKSDVYSFGVALLEIVRGREPLNIKRPRNEWSLVEWAKPYIRASKIDEIVDPGIKGGYHAEAMWRVVEVALQCIEPMSAYRPCMVDIVRELEDALIIENNASEYMKSIDSLGGSNHYSIVMEKRVLPSTSSSTAESTITTQTLSQPQPR

SEQ ID NO: 31284 - protein, 510 aa, Camellia sinensis
MALDTVFLLRELSFATLVILITHIFMRSILSKPLRMLPPGPTGLPLIGAIPHLGSMPHVALAKMAKIYGPIVYLKMGTCGMVVASTPDSARAFLKTLDLNFSNRPPNAGATHLAYGAQDMVFADYGPRWKLLRKLSNLHMLGGKALENWAQVRSSELGHMLKAMYDLSCRGEPVVVAEMLCYAMANMIGQVILSRRVFETKGSESNEFKDMVVELMTTAGYFNIGDFIPSIAWMDLQGIERGMKRLHKKFDVLITKMIEEHKASAYQRKETPDFLDVFMAQQENPGEEKLNTTNIKALLLNLFTAGTDTSSSIIEWALAEMLKDPKILNRAHDEMDRVIGRNRRLQESDLPKLPYLQAICKETFRMHPSTPLNLPRVSAQACRVNGYYIPKNTRLSVNIWAIGRDPDVWERPLEFIPDRFLSGKNAKTDPRGNDFELIPFGAGRRICAGTRMGIVLVEYILGSLVHSFDWKLADDGVELNMDESFGLALQKAVPLSAMVSPRLPPNAYAA

SEQ ID NO: 31285 - protein, 180 aa, Rhizobium etli bv. phaseoli
EFDVFPTLEQLPLWGFDGSSTMQAEGRSSDCVLKPVAIYPDPARTNGALVMCEVMMPDGVTPHPSNARATILDDEDAWFGFEQEYFFYQNGRPLGFPEQGYPAPQGPYYTGVGYSNVGDVAREIVEEHLDLCLAAGINHEGINAEVAKGQWEFQIFGKGSKKAADQIWMARYLLQRLTEK

SEQ ID NO: 31286 - protein, 180 aa, Rhizobium etli bv. phaseoli
EFDVFPTLEQLPLWGFDGSSTMQAEGRSSDCVLKPVAIYPDPARTNGALVMCEVMMPDGVTPHPSNARATILDDEDAWFGFEQEYFFYQNGRPLGFPEQGYPAPQGPYYTGVGYSNVGDVAREIVEEHLDLCLAAGINHEGINAEVAKGQWEFQIFGKGSKKAADQIWMARYLLQRLNEK

SEQ ID NO: 31287 - protein, 180 aa, Rhizobium leguminosarum bv. phaseoli
EFDEFPTLEQLPLWGFDGSSTMQAEGRSSDCVLKPVAIYPDPARTNGALVMCEVMMPDGVTPHASNARATILDDEDAWFGFEQEYFFYQNGRPLGFPEQGYPAPQGPYYTGVGYSNVGDVAREIVEEHLDLCLAAGINHEGINAEVAKGQWEFQIFGKGSKKAADQIWMARYLLQRLTEK

SEQ ID NO: 31288 - protein, 180 aa, Rhizobium leguminosarum bv. viciae
EFDVFPTLEQLPLWGFDGSSTQQAEGRSSDCVLKPVAIYPDPARTNGALVMCEVMMPDGVTPHASNARATILDDEDAWFGFEQEYFFYQNGRPLGFPEQGYPAPQGPYYTGVGYSNVGDVAREIVEEHLDLCLAAGINHEGINAEVAKGQWEFQIFGKGSKKAADQIWMARYLLQRLTEK

SEQ ID NO: 31289 - protein, 180 aa, Rhizobium sp. USDA 1920
EFDNFPTLEQLPLWGFDGSSTMQAEGRSSDCVLKPVAIYPDPARTNGVLVMCEVMMPDGVTPHASNARATILDDEDAWFGFEQEYFFYENGRPLGFPESGYPAPQGPYYTGVGYSNVGSVAREIVEEHLDLCLAAGINHEGINAEVAKGQWEFQIFGKGSKKAADQIWMARYLLQRLTEK

SEQ ID NO: 31290 - protein, 180 aa, Agrobacterium rhizogenes
EFDAFPTLEQLPLWGFDGSSTMQAEGRSSDCVLKPVAIYPDPARTNGALVMCEVMMPDGVTPHESNSRATILDDEDAWFGFEQEYFFYKDGRPLGFPESGYPAPQGPYYTGVGYKNVGDVAREIVEEHLDLCLEAGINHEGINAEVAKGQWEFQIFGKGSKKAADQIWMARYLLLRLCEK

SEQ ID NO: 31291 - protein, 902 aa, Lentinus sajor-caju
MSVDNFDFTDKARRTITAAVQLAKDYANAQVHPVHIASSLLNDSGEEEQSSGGGLGDASSRSQSLFHSAISKAGGDPAVVKRGIQRAVVRLPTQDPPPEEVYFSGPALKVLREAQSLQKTMHDSYIAQDHLLLAALKDATIQAVIKEAGLTEATLKTAIEQARGNRRIESKTAEQGFDALQKYAVDLTALAEEGKIDPVIGRDNEIRRVIRILCRRTKNNPVLIGEPGVGKTSIAEGLAQRIVKRDVPASLISRLYSLDMGALMAGAKYKGEYEERIKAVLNEVEKASEDGGPGVILFADELHLIMAGRGAEGGGMDAANLFKPLLARGKLRCIGATTLAEYRKYIETDAALERRFAQVLVNEPSVLETISILRGIREKYEVHHGVRILDGALIQAATLAHRYLTSRRLPDAAIDLVDEACASVRVNRETEPEAIDKLQRKRLELEIEIHALEREKDAASKERLQAAKKAISDVDEELQPLQAAFQAEKMRGDNSTFCGGRWTNSRRRLKRLSEDRDITTASDLKFYAVPEVQARIEQLEAKKAAEDASTGSAADVVTPEAIADIVGRWTNIPVSRLMSSEKEKLLRMERILTENVVGQPEAVKAVANAIRLSRSGLANAQRPIASFLFAGPSGTGKTLLSKTLATLLFDSPDAMIRIDGSEYSEKHSIARLIGAPPGYIGHDAGGQLTEYVRRKPYSIILIDEIEKACREFVTLFLQVLDDGRLTDGQGRVVDFRNSVIIMTSNLGAAYLNDMGDGPVRPETRTLVMGAIQGHFPPEFVNRIDEIVIFRALSQKNVLKIVDIRLKEVLERLAERKITIDIDDVAKSYLSSAGYSPAYGARPLNRAIQSELLNPLSIMILSEQVRFDGPHNRLNIIPNHEATETQGMDVDYDDDDIEIEEMD

SEQ ID NO: 31292 - protein, 441 aa, Nostoc commune
MLERMYNQGAVEGAANTELGSRIFLYEVVGLRQSEETDQTNYPIRKSGSVFIRVPYNRMNQEMRRITRLGGTIVSIQPATALQPVNGKASLGNATSEVSELATSGETANTEGNGKATPVNAHSAEEQNKDKKGNTMTQAKAKKDHGDVPVNTYRPNAPFIGKVISNEPLVKEGGIGIVQHLKFDLSGSNLKYIEGQSIGIIPPGLDKNGKPEKLRLYSIASTRHGDDVDDKTVSLCVRQLEYKHPETSETVYGVCSTHLCFLKPGEEVKITGPVGKEMLLPNDPDANVIMMATGTGIAPMRAYLWRQFKDAERAANPEYQFKGFSWLIFGVPTTPNLLYKEELEEIQQKYPDNFRLTAAISREQKNPQGGRMYIQDRVAEHADELWQLIKNEKTHTYICGLRGMEEGIDAALTAAAVKEGVTWSVYQKELKKAGRWHVETY

SEQ ID NO: 31293 - protein, 134 aa, uncultured cyanobacterium
ERVYLIRRGAVRLSRVYESGEEITVALLRENSLLGVLSLLTGQRSDRFYHAVAFTRVEMVTAPATSVRAAIEADTTVGLKLLQGLSSRILQTETMIETLTHRDMSSRLVSFLLVLCRDFGVPDGLGITIDLRLS

SEQ ID NO: 31294 - protein, 134 aa, uncultured cyanobacterium
ERVYLIRRGAVRLSRVYESGEEITVALLRENSLFGVLSLLTGHRSDRFYHAIAFTRVEMVTAPAASVRAAIEADTTVGLRLLQGLSSRILQTETMIETLTHRDMSSRLVSFLLVLCRDFGVPDELGITIDLRLS

SEQ ID NO: 31295 - protein, 134 aa, uncultured cyanobacterium
ERVYLIRRGAVRLSRVYESGEEITVALLRENSLFGVLSLLTGQRSDRFYHAVAFTRVEMVTAPATSVKAAIEADTSVGLRLLQGLSSRILQTETMIETLTHRDMSSRLVSFLLVLCRDFGVADELGITIDLRLS

SEQ ID NO: 31296 - protein, 134 aa, uncultured cyanobacterium
ERVYLIRRGAVRLSRVYESGEEITVALLRENSLFGVLSLLTGHRSDRFYHAIAFTRVEMITAPANSVLRAIEEDASVGLLLLQGLSSRILQTETMIETLTHRDMSSRLVSFLMVLCRDFGVASEKGITIDLRLS

SEQ ID NO: 31297 - protein, 134 aa, uncultured cyanobacterium
ERVYLIRRGAVRLSRVYESGEEITVALLRENSLFGVLSLLTGHRSDRFYHAIAFTRVEMITAPANSVLRAIEEDASVGLLLLQGLSSRILQTETMIETLTHRDMSSRLVSFLMVLCRDFGVAGEKGITIDLRLS

SEQ ID NO: 31298 - protein, 134 aa, uncultured cyanobacterium
ERVYLIRRGAVRLSRVYESGEEITVALLRENSLFGVLSLLTGHRSDRFYHAIAFTRVEMITAPANSVLRAIEADASVGLLLLQGLSSRILQTETMIETLTHRDMSSRLVSFLMVLCRDFGVASEKGITIDLKLS

SEQ ID NO: 31299 - protein, 134 aa, uncultured cyanobacterium
ERVYLIRRGAVRLSRVYESGEEITVALLRENSLFGVLSLLTGHRSDRFYHAIAFTRVEMITAPANSVLRAIEEDASVGLLLLQGLSSRILQTETMIETLTHRDMSSRLVSFLMVLCRDFGVASGKGITIDLRLS

SEQ ID NO: 31300 - protein, 134 aa, uncultured cyanobacterium
ERVYLIRRGAVRLSRVYESGEEITVALLRENSLFGVLSLLTGHRSDRFYHAVAFTRVEMVTAPAASVRAAIEADTGVGLRLLQGLSSRILQTETMIETLTHRDMSSRLVSFLLVLCRDFGVPDELGITIDLRLS

SEQ ID NO: 31301 - protein, 134 aa, uncultured cyanobacterium
ERVYLIRRGAVRLSRVYESGEEITVALLRENSLFGVLSLLTGHRSDRFYHAVAFTRVEMVTAPAASVRAAIEADTSVGLRLLQGLSSRILQTETMIETLTHRDMSSRLVSFLLVLCRDFGVPDELGITIDLRLS

SEQ ID NO: 31302 - protein, 134 aa, uncultured cyanobacterium
EKVYLIRRGAVRLSRVYESGEEITVALLRENSLFGVLSLLTGHRSDRFYHSIAFTRVEMLTAPATSVRQAIEDDTSVGLLLLQGLSSRILQTETMIETLTHRDMSSRLVSFLLVLCRDFGVPGQRGITIDLRLS

SEQ ID NO: 31303 - protein, 134 aa, uncultured cyanobacterium
ERVYLIRRGAVRLSRVYESGEEITVALLRENSLFGVLSLLTGHRSDRFYHAIAFTRVEMVTAPASSVRQAIEADTSVGLLLLQGLSSRILQTETMIETLTHRDMSSRLVSFLLVLCRDFGIPSTQGITIDLRLS

SEQ ID NO: 31304 - protein, 134 aa, uncultured cyanobacterium
ERVYLIRRGAVRLSRVYESGEEITVALLRENSLFGVLSLLTGQRSDRFYHAVAFTRVEMVTAPATSVRAAIEADTTVGLKLLQGLSSRILQTETMIETLTHRDMSSRLVSFLLVLCRDFGVPDELGITIDLRLS

SEQ ID NO: 31305 - protein, 134 aa, Synechococcus sp. CC9311
EKVYLIRRGAVRLSRVYESGEEITVALLRENSLFGVLSLLTGHRSDRFYHSIAFTRVEMVTAPATSVRQAIEADTSVGLLLLQGLSSRILQTETMIETLTHRDMSSRLVSFLLVLCRDFGVPGQRGITIDLRLS

SEQ ID NO: 31306 - protein, 134 aa, Prochlorococcus marinus str. MIT 9303
EKVYLIRRGAVRLSRVYESGEEITVALLRENSLFGVLSLLTGHRSDRFYHSVAFTRVEMITAPATSVRQAIENDTSVGLLLLQGLSSRILQTETMIETLTHRDMSSRLVSFLLVLCRDFGVPGEQGITIDLRLS

SEQ ID NO: 31307 - protein, 134 aa, Synechococcus sp. RS9708
EKVYLIRRGAVRLSRVYESGEEITVALLRENSLFGVLSLLTGHRSDRFYHSVAFTRVEMVTAPATSVRQAIEADTSVGLLLLQGLSSRILQTETMIETLTHRDMSSRLVSFLLVLCRDFGIPGSQGITIDLRLS

SEQ ID NO: 31308 - protein, 134 aa, Synechococcus sp. CC9305-3
  misc_feature (129)..(129): Xaa can be any naturally occurring amino acid
  unsure (1)..(134): unsure at all Xaa locations
ERVYLIRRGAVRLSRVYESGEEITVALLRENSLFGVLSLLTGHRSDRFYHSVAFTRVEMVTAPASSVRQAIEANTSVGLLLLQGLSSRILQTETMIETLTHRDMSSRLVSFLLVLCRDFGMPGPQGITXDLRLS

SEQ ID NO: 31309 - protein, 134 aa, Prochlorococcus marinus subsp. pastoris str. NATL1
ERVYLIRRGAVRLSRVYESGEEITVALLRENSLFGVLSLLTGHRSDRFYHAIAFTRVEMITAPANSVLRAIEADASVGLLLLQGLSSRILQTETMIETLTHRDMSSRLVSFLMVLCRDFGVASEKGITIDLRLS

SEQ ID NO: 31310 - protein, 134 aa, Prochlorococcus marinus str. MIT 9312
ERVYLIRRGAVRLSRVYESGEEITVALLRENSLFGVLSLLTGHRSDRFYHSIAFTRVEMITAPANSVLRAIEEDASVGLLLLQGLSSRILQTETMIETLTHRDMSSRLVSFLMVLCRDFGVASEKGITIDLRLS

SEQ ID NO: 31311 - protein, 134 aa, Prochlorococcus marinus str. NATL2A
ERVYLIRRGAVRLSRVYETGEEITVALLRENSLFGVLSLLTGHRSDRFYHAVAFTRVELVSAPATSLRNAIEQDASVGLLLLQGLSSRVLQTETMIETLTHRDMSSRLASFLLVLCRDFGVPGEKGVTIDLRLS

SEQ ID NO: 31312 - protein, 134 aa, Prochlorococcus marinus subsp. marinus str. CCMP1375
ERVYLIRRGAVRLTRVYESGEEITVALLRENSLFGVLSLLTGHRSDRFYHAVAFTRVEMSSAPAGSVRNAIEADSGVGLLLLQGLSSRILQTETMIETLTHRDMSSRLVSFLLVLCRDFGVASDKGITIDLRLS

SEQ ID NO: 31313 - protein, 134 aa, Synechococcus sp. WH 8018
ERVYLIRRGAVRLSRVYESGEEITVALLRENSLFGVLSLLTGHRSDRFYHSVAFTRVEMVTAPATSVRKAIEADTSVGLLLLQGLSSRILQTETMIETLTHRDMSSRLVSFLLVLCRDFGIPGNQGITIDLRLS

SEQ ID NO: 31314 - protein, 134 aa, uncultured cyanobacterium
ERVYLIRRGAVRLSRVYESGEEITVALLRENSLFGVLSLLTGHRSDRFYHAIAFTRVEMITAPANSVLRAIEEDASVGLLLLQGLSSRILQTETMIETLTHRDMSSRLVSFLIVLCRDFGVAGEKGITIDLRLS

SEQ ID NO: 31315 - protein, 216 aa, Illicium floridanum
KRIENTTNRQVTFCKRRNGLLKKAYELSVLCDAEVALIVFSTRGRLYEYANNSVKGTIERYKKACTDTSNSGCITEANSQYYQQESSKLREQIGILQKANRHLMGDGISSMSIKELKQLENRLEKGIGKIRTKKNELLYAEIEYMQKRETDLQKDNMYLRAKITENERAQQHMNMLPGPEYDMMPQFDSRNFLQVNLLEPSHHQYSHQEQTTLQLG

SEQ ID NO: 31316 - protein, 226 aa, Nuphar advena
MGRGKIEIKRIENTTNRQVTFCKRRSGLLKKAYELSVLCDAEVSLIIFSSRGRLYEYSNNSVKATIDRYKKACADSSNSGTVSEANAQYYQQEAYKLRQQISKIQQDNRQMLGEGINEMSVRDLKTLEGKLEKSIGKIRSKKNDLLNSEIQYMQKMGDDLQEENMYLRAKISENERAHQQQHISMMAGPSEYELLPTTFQHVNLLEPSHHHYSHQERTALQLGRDF

SEQ ID NO: 31317 - protein, 146 aa, Cucumis sativus
MKGGKSKGAPKKTDTKLKSKSAGASKKSAKAAKDPNKPKRPASAFFVFMEEFRKQYKKEHPNNKSVAAVGKAGGDKWKSMSDAEKAPYINKAEKRKTEYNKSMQAYNKRIAEGGNGAEEEESDKSKSEVNDDDEDDDESGEDEDDE

SEQ ID NO: 31318 - protein, 608 aa, Streptomyces hygroscopicus
MCGITGWVSFHQDPRTQAPVIEAMTATLAPRGPDAAGVWLGPRAAIGHRRLAVIDLAGGVQPMTDRPDAPTTVLTYSGEIYNHHELRSQLSGLGHEFRTRSDTEVVLRGYAEWGEKVADHLDGMFAFAVWDERAQRLLLVRDRLGVKPLFWAEVDGGLAFASEPKALFAHPEIRPRVDADGLREAYSLLFNTGPTVWSGVREVEPGGLLLLDRDGIRERRYWQLEADAHPDDRDATIARVHDLVSTAARAQLEADVPLCSLLSGGIDSTVLTALLADELRLREGPGARIRSYAVDYSDQAESFTGDVLRTGHDTPYATEAGAFLGTDHSTVVLDPRALLDPEHRRAVVVARDSPIGVGDMDTSLHLLFGEIRKHSTVALSGEAADEVFGGYPWFHNPKALATATFPWLLVTGDEAAMPLNPELDLRIGEFRDDTYRTALAAVPHLDGETPTEHRQREMQHLSLTRWLRQLLHRKDRLSMAQGLEVRVPYCDHRLVEYAFTTPWALKNFDGREKSLLRAAGTGLAPDSVLHRPKNHYPATHHPDYNRGLQNMARDALADDTVRSLADETRLKPCLDTPPGQLEWGHRLRLERVVDLALWLDHYQPELAL

SEQ ID NO: 31319 - protein, 791 aa, Schizosaccharomyces pombe
MKTPKFITYVTRGFKGLESKSVENNKDHIVENSSPIASKFHEFDEQKKSFEIINYAGHEKFVDDITERESSVPGNAVYDITVRDIDAIVPVTDDVDIPASTFRMWILAFGLATVIAGVDAFFLMRYPSVSIAAIVALLVAYPLGQLWYYIIPQWEIKLPRGIRVSLNPGRFNRKEHACLYIFVNICVSAKLVNTLIIEQIKFFGVNIGIGRAILFNLCSYLSSFGWSGLALPILVYPPTLIWPSVLSSCALFKIFHDNDNTKACNWTISRLRYFFIVFVASFIWYWFPDLIFPALSSLGAWISWCKPSSAVLSQIFGVKTGLGLFPLTLDWAQISSLSNPLITPWWATCCIFTSFVFWIWIVLPGLYYQNYWQVAHFPIMTNSIYTVSGKSYDAQKVVDSKWELVTQKYQEYSPVMLPIAFIINIALSLGAFSSMMISFFLRFPTDVIQPICHVFKYSDIHTKLLKKYKRVHWGFYLASIIVSLGLGFAFTEGWHDIQIRSYGFVVSMVIGAALYIPLSLIESRSSFTISMQAFFEIVAAFWFNGQPMALLYFYSFGFGTLQHAMHMTQSAKIGHYMKVPPRLVAALLFTSGIWSSLVNSAVTGWIMYHVRDVCTSNAENNMTCRSPKTQFNSHLIWGLVGNHIFSSDGRYSFVMWFFLVGAVVSVVVYLLQISFPKSSWKHVNPALLLGGAAQIPSVTGINYSTWAAVAFCFNYLIRRGYYSWWKKYNLITAAAMDCGVAIAGLFIYFCVVYTGGSSNFSWWGTTVSSAGCDKKGCAHLSVSDISKPSGW

SEQ ID NO: 31320 - protein, 221 aa, Prunus dulcis
MGRGKIEIKRIENTTNRQVTFCKRRNGLLKKAYELSILCDAEVALIVFSSRGRLYEYSNNNIRNTIEGYKKACSDSSGSTSITEINAQYYQQESAKLRQQIQMLQNSNRHLMGDALSTLSVKELKQLENRLERGINRIRSKKHEMLLAEIEYLQKKEIELENENVCLRTKISEVERLQQANMVGPELNAIQALASRNFFSQNMMEGGATYPQQDKKILHLG

SEQ ID NO: 31321 - protein, 246 aa, Prunus dulcis
MGRGRVELKRIENKINRQVTFAKRRNGLLKKAYELSILCDAEVALIIFSNRGKLYEFCSSSSSILKTLERYQKCSYGQVEVNKPAKELEQSSYREYLKLKGRFESLQRTQRNLLGEDLGPLNTKELEQLERQLESSLKQVRSTKTQYMLDQLSDLQNKEQMLIEANRDLSLKLDDISSRNQIRQSWEGGNQGGMAYGSQHAQSQGFFQPLDCNPTLQIGYSNVGSEQMSATTHAQQVNGFIPGWML

SEQ ID NO: 31322 - protein, 377 aa, Pereskia zinniiflora
TDVPAAAAGAFKSYKLAAKAISRLQSLPSRNMSLLCDVLVKEVSELTGYDRVMVYRFHEDEHGEVISEYCRPDLGPYLGLHYPATDIPQASRFLFLKNRVRMIFDCLATPVKVIQYKKLTQPLSLGGSILRAPHGCHAQYMANMGSIASLVMAVTVNEDEDEVRSDPSTGKRLWGLVVCHHTSSRFIPFPLRYACELLVQVFGIQINKEVELAAQIRESHILRIQTVLCDMLLRDSPVAIVTQSPNVMDLVKCDGAALYYKGQVWLLGTTPTEEQIKNITQWLVEYHGSTKGLSTDSLMEAGYPGASELGDAVCGMAAVRISSKDVLFWFRSHTAKEIKWGGAKHDPVDSDERRKMHPRSSFKAFLEVVKWRSQPWE

SEQ ID NO: 31323 - protein, 377 aa, Pereskia guamacho
TDVPVAAAGAFKSYKLAAKAISRLQSLPSRNMSLLCDVLVKEVSELTGYDRVMVYRFHEDEHGEVISEYRRPDLGPYLGLHYPATDIPQASRFLFLKNRVRMIYDCLAIPVKVIQYKKLTQPLSLGGSILRAPHGCHAQYMANMGSIASLVMAVTINEDEDEVKSDPSTGKRLWGLVVCHHTSSRFIPFPLRYACELLVQVFGIQINKEVELAAQIRESHILRIQTVLCDMLLRDSPVAIVTQSPNVMDLVKCDGAALYYKGQVWLLGVTPTEEQIKNITQWLLEYHGNTKGLSTDSLMEAGYPGASELGDAVCGTAAVRISSKDILFWFRSHTAKEIKWGGAKHDPVDSDDRRKMHPRSSFKAFLEVVKWRSQPWE

SEQ ID NO: 31324 - protein, 377 aa, Echinocactus platyacanthus
TDVPAAAAGAFKSYKLAAKAISRLQSLPSRNMALLCDVLVKEMSELTGYDRVMVYKFHEDEHGEVISEYRRPDMEPYLGLHYPATDIPQASRFLFLKNRVRMICDCLATPVKVIQGKKWAQPLSLGGSILRAPHGCHALYMANMGSIASLVMAVTINEDEDEVKSDPSTGKRLWGLVVCHHTSSRFIPFPLRYACELLLQVFGIQINKEVELAAQIRESHILRIQTVLCDMLLRDSPVAIVTQSPNVMDLVKCDGAALHYKGQVWLLGITPTEEQIKNITQWLLKYHGSTKGLSTDSLMEAGYPGASELGDAVCGMAAVRISSKDVLFWFRSHTAKVIKWGGAKHDPVDSDDGRKMHPRSSFKAFLEVVKWRSQPWE

SEQ ID NO: 31325 - protein, 377 aa, Pereskia stenantha
TDVPAAAAGAFKSYKLAAKAISRLQSLPSRNMSLLCDVLVKEVSELTGYDRVMVYKFHEDEHGEVISEYRRPDLEPYLGLHYPATDIPQASRFLFLKNRVRMICDRLATPVKVIQDKKLAQPLSLGGSILRAPHGCHAQYMANMGSIASLVMAVTINEDEDEVKSDPSTGKRLWGLVVCHHTSSRFIPFPLRYACELLVQVFGIQINKEVELAAQIRESHILRIQTVLCDMLLRDSPVAIVTQSPNVMDLVKCDGTALYYKGQVWLLGITPTEEQIKNITRWLLEYHGSTKGLSTDSLMEAGYPGASELGDAVCGMAAVRISSKDVLFWFRSHTAKEIKWGGAKHDPVDSDDGRKMHPRSSFKAFLEVVKWRSQPWE

SEQ ID NO: 31326 - protein, 377 aa, Blossfeldia liliputana
TDVPAAAAGAFKSYKLAAKAISRLQSLPSRNMALLCDVLVKEVSELTGYDRVMVYKFHEDEHGEVISEYLRPDMEPYLGLHYPATDIPQASRFLFLKNRVRLICDCLATPVKVIQGTKWAQPLSLGGSILRAPHGCHALYMANMGSIASLVMAVTVNDDEDEVKSDPSTGRRLWGLVVCHHTSSRFIPFPLRYACELLVQVFGIQINKEVELAAQIRESHILRIQTVLCDMLLRDSPVAIVTQSPNVMDLVKCDGAALFYEGQVWLLGITPTEEQIKNITQWLLKYHGSTKGLSTDSLMEAGYPGASELGDAVCGMAAVRISSKDVLFWFRSHTAKEIKWGGAKHDPVDGDDGRKMRPRSSFKAFLEVVKWRSQPWE

SEQ ID NO: 31327 - protein, 377 aa, Maihuenia patagonica
TDVPVVAAGAFKSYKLAAKAISRLQSLPSRNMSLLCDVLVKEVSELTGYDRVMVYKFHEDEHGEVISEYRRPDLEPYLGLHYPATDIPQASRFLFLKNRVRMICDCLATPVKVIQGKKWAQPLGLGGSILRAPHGCHALYMANMGSIASLVMAVTINEDEDEVKSDPSTGKRLWGLVVCHHTSSRFIPFPLRYACELLVQVFGIQINKEVELAAQIRESHILRIQTVLCDMLLRDSPVAIVTQSPNVMDLVKCDGAALYYKGQVWLLGITPTEEQIKNITQWLLEYHGSTKGLSTDSLMEAGYPGASELGDAVCGIAAVRISSKDVLFWFRSHTAKEIKWGGAKHDPVDGDDRRKMHPRSSFKAFLEVVKWRSQPWE

SEQ ID NO: 31328 - protein, 377 aa, Austrocylindropuntia subulata
TDVPAAAAGAFKSYKLAAKAISRLQSLPSRNMSLLCDVLVKEVSELTGYDRVMVYKFHEDEHGEVISEYRTPFLESYLGLHYPATDIPQASRFLFLKNRVRMICDCLAAPVKVIQDKKLAQPLSLGGSILRAPHGCHAQYMENMGSIASLVMAVMINEDEDEVKSDPSTGKRLWGLVVCHHTSSRFIPFPLRYACELLVQVFGIQINKEVELAAQIRESHILRIQTVLCDMLLRDSPVAIVTQSPNVMDLVKCDGVALYYKGQVWLLGITPTEEQIKNITQWLLEYHGTTKGLSTDSLMEAGYPGASELGDAVCGMAAVRISSIDVLFWFRSHSAREIKWGGAKHDPVDSDDRRKLHPRSSFKAFLEVVKWRSQPWE

SEQ ID NO: 31329 - protein, 375 aa, Pereskiopsis porteri
TDVPAAAAGAFKSYKLAAKAISRLRSLPSRNMSLLCDVLVKEVSELTGYDRVMVYKFHEDEHGEVISEYRTPDLEPYLGLHYPATDIPQASRFLFLKNRVRMICDCLAAPVKVIQDKKLAQPLSLGGSILRAPHGCHAQYMANMGTIASLVMAVTINEDEVKSDPSTGKRLWGLVVCHHTSSKFIPFPLQYACELLVQVFGIQINKEVELAAQIRESHILRIQTVLCDMLLRDSPVAIVTQSPNVMDLVKCDGAALYYKGQVWLLGITPTDEQIKNITQWLLEYHGSTKGLSTDSLMEAGYPGASELGDAVCGMAAVRISSKDVLFWFRSHSAREIKWGGAKHDPVDSDDRSKMHPRSSFKAFLEVVKWRSQPWE

SEQ ID NO: 31330 - protein, 377 aa, Grahamia bracteata
TDVPVAAAGAFKSYKLAAKAISRLQSLPSRNMLLLCDVLVKEVGELTGYDRVMVYKFHEDEHGEVISEYRRPNLEPYLGLHYPATDIPQASRFLFLKNRVRMICDCLATPVKVIQDKKLTQALSLGGSILRAPHGCHAQYMANMGSIASLVMAVTINEDEDEVKSDPSSGKRLWGLVVCHHASSRFISFPLRYACELLVQVFGIQINKEVELAAQIRESHILRIQTVLCDMLLRDSPVAIVTQSPNVMDLVKCDGAALYYKGQVWLLGSTPTQEQIKNITQWLLEYHGSTKGLSTDSLMEAGYPRASELGDPVCGMAAVRISSKDFLFWFRSHTAKEVKWGGAKHDPIDNDDERKMHPRSSFKAFLEVVKWRSQPWE

SEQ ID NO: 31331 - protein, 377 aa, Maihuenia poeppigii
TDVPVAAAGAFKSYKLAAKAISRLQSLPSRNMSLLCDVLVKEVRELTGYDRVMVYKFHEDEHGEVISEYRRPDLEPYLGLHYPATDIPQASRFLFLKNRVRMICDCLATPVKVIQGKKWAQPLSLGGSILRAPHGCHALYMANMGSIASLVMAVTINEDEDEVKSDPSTGKRLWGLVVCHHTSSRFIPFPLRYACELLVQVFGIQINKEVELAAQIRESHILRIQTVLCDMLLRDSPVAIVTQSPNVMDLVKCDGAALYYKGQVWLLGITPTEEQIKNITQWLLEYHGSTKGLSTDSLMEAGYPGASELGDAVCGIAAVRISSKDVLFWFRSHTAKEIKWAGAKHDPVDGDDRRKMHPRSSFKAFLEVVKWRSQPWE

SEQ ID NO: 31332 - protein, 377 aa, Pereskia aculeata
  misc_feature (7)..(7): Xaa can be any naturally occurring amino acid
  misc_feature (118)..(118): Xaa can be any naturally occurring amino acid
  misc_feature (120)..(124): Xaa can be any naturally occurring amino acid
  misc_feature (151)..(151): Xaa can be any naturally occurring amino acid
  misc_feature (174)..(174): Xaa can be any naturally occurring amino acid
  misc_feature (204)..(204): Xaa can be any naturally occurring amino acid
  unsure (1)..(377): unsure at all Xaa locations
TDVPAAXAGAFKSYKLAAKAISRLQSLPSHNLPLLCDVFVKEVSELTGYDRVMVYKFHEDEHGEVISEYRRPDLEPYLGLHYPATDIPQASRFLFLKNRVRMICDCSATPVEVIQDKXLXXXXXSWGSILRAPHGSHAHYMANMGSIAFSXMAVTINEDEDEVKSDPSTGKRLXGLVVCHHTSSRLIPFPLRYACELLVQVFGXQINKEVELAAQIRESHILRIQTVLCDMLLRDSPVAIVTQSPNVMDLVKCDGAALYYKGQVWLLGISPTEDQIKNITQWLLEYHGSTKGLSTDSLMEAGYPGASELGDAVCGMAAVRIRSKDVLFWFRSHTAKEIKWGGAKHDPVDNDDGRKMHPRSSFKAFLEVVKWRSQPWE

SEQ ID NO: 31333 - protein, 377 aa, Calymmanthium substerile
TDVPAAAAGAFKSYKLAAKAISRLQSLPSHNMALLCDVLVKEVSELTGYDRVMVYKFHEDEHGEVISEYRRPDMEPYLGLHYPATDIPQASRFLLLKNRVRMVCDCLATPVKVIQGKKWAQPLSLGGSILRAPHGCHALYMANMGSIASLVMAVTINEDEDEVKSDPSTGKRLWGLVVCHHTSSRFIPFPLRYACELLVQVFGIQINKEVELAAQIRESHILRIQTVLCDMLLRDSPVAIVTQSPNVMDLVKCDGAALYYKGQVWLLGITPTEEQIKNITQWLLKYHGSTKGLSTDSLMEAGYPGASELGDAVCGMAAVRISSKDVLFWFRSHTAKEMKWGGAKHDPVDSDDGRKMRPRSSFKAFLEVVKWRSQPWE

SEQ ID NO: 31334 - protein, 377 aa, Talinum paniculatum
TDVPAAAAGAFKSYKLAAKAISRLQSLPSRNMLILCDVLVKEVSELTGYDRVMVYKFHEDEHGEVISEYRKPDLEPYLGLHYPATDIPQASRFLFLKNRVRMICDCLASTVKVIQDQKLTQPLSLGGSILRAPHGCHAQYMANMGSIASLVMAVMINEDEDEVKSDPSSGKRLWGLVVCHHTGSRFIPFPLRYACELLVQVFGIQINKEVELAAQIRESHILRIQTVLCDMLMRDSPIAIVTQSPNVMDLVKCDGAALYYKGQVWLLGITPTEEQIKDITQWLLEYHGSTKGLSTDSLMEAGYPGASELGDAVCGMAAVRISSKDFLFWFRSHTAKEIKWGGAKHDPIDNDDRRKMHPRSSFKAFLEVVKWRSQPWE

SEQ ID NO: 31335 - protein, 377 aa, Portulaca oleracea
TDVPAVAAGAFKSYKLAAKAISRLQSLPSRNMSLLCDVLVKEVTELTAYDRVMVYKFHEDEHGEVISEYRKPGLDPYLGLHYPATDIPQASRFLFLKNRVRMICNCLATPVKVIQDKKLAQPLSLGGSILRVPHGCHAQYMANMGSIASLVMAVTINEDDDEVKSDPSTGKRLWGLVVCHHTSPKFISFPLRYACELLVQVFGIQINKEVELVAQIRESHILRIQTVLCDMLMRDSPVAIVTQSPNVMDLVKCDGAALYYNGQVWLLGITPTEEQIKNLTLWLLKYHGSTKGLSTDSLMEAGYPCASDLGDAVCGMAAVRISSKDFLFWFRSHTAKEVKWGGAKHDPTDNDNGRKMHPRSSFKAFLDVVKWRSQPWE

SEQ ID NO: 31336 - protein, 377 aa, Quiabentia verticillata
TDVPAAAAGAFKSYKFAAKAISGLQSLPSRNMSLLCDVLVKEVSELTGYDRVMVYKFHEDEHGEVISEYRTPDLEPYLGLHYPATDIPQASRFLFLKNRVRMICDCLAAPVKVIQDKKLAQPLSLGGSILRAPHGCHAQYMANMGTIASLVMAVTINEDEDEVKSDPSTGTRLWGLVVCHHTSSRFIPFPLRYACELLVQVFGIQINKEVELAAQIRESHILRIQTVLCDMLLRDSPVAIVTQSPNVMDLVKCDGAALYYKGQVWLLGITPTDEQIKNITQWLLEYHGSTKGLSTDSLMEAGYPGASELGDAVCGMAAVRISSKDVLFWFRSHSAREIKWGGAKHDPVDSDDRSKMHPRSSFKAFLEVVKWRSQPWE

SEQ ID NO: 31337 - protein, 61 aa, Bacillus thuringiensis serovar tolworthi
GIVKWFNSEKGFGFIEVEGGEDVFVHFSAIQGEGFKTLEEGQEVTFEVEQGNRGPPAANVT

SEQ ID NO: 31338 - protein, 193 aa, Prunus armeniaca
DPLRPLVLGGDHSISYPVVRAVSEKLGGPVDILHLDAHPDIYDAFEGNVYSHASSFARIMEGGYARRLLQVGLRSINIEGREQGKRFGVEQYEMRTFSRDRHFLENLKLGEGVKGVYISIDVDCLDPAFAPGVSHFEPGGLSFRDVLNILHNLQGDIVAADVVEFNPQRDTVDGMTAMVAAKLVRELAAKISK

SEQ ID NO: 31339 - protein, 318 aa, Saccharomyces cerevisiae
MSSNAQVKTPLPPAPAPKKESNFLIDFLMGGVSAAVAKTAASPIERVKLLIQNQDEMLKQGTLDRKYAGILDCFKRTATQEGVISFWRGNTANVIRYFPTQALNFAFKDKIKAMFGFKKEEGYAKWFAGNLASGGAAGALSLLFVYSLDYARTRLAADSKSSKKGGARQFNGLIDVYKKTLKSDGVAGLYRGFLPSVVGIVVYRGLYFGMYDSLKPLLLTGSLEGSFLASFLLGWVVTTGASTCSYPLDTVRRRMMMTSGQAVKYDGAFDCLRKIVAAEGVGSLFKGCGANILRGVAGAGVISMYDQLQMILFGKKFK

SEQ ID NO: 31340 - protein, 307 aa, Saccharomyces cerevisiae
MSSDAKQQETNFAINFLMGGVSAAIAKTAASPIERVKILIQNQDEMIKQGTLDKKYSGIVDCFKRTAKQEGLISFWRGNTANVIRYFPTQALNFAFKDKIKLMFGFKKEEGYGKWFAGNLASGGAAGALSLLFVYSLDFARTRLAADAKSSKKGGARQFNGLTDVYKKTLKSDGIAGLYRGFMPSVVGIVVYRGLYFGMFDSLKPLVLTGSLDGSFLASFLLGWVVTTGASTCSYPLDTVRRRMMMTSGQAVKYNGAIDCLKKIVASEGVGSLFKGCGANILRSVAGAGVISMYDQLQMILFGKKFK

SEQ ID NO: 31341 - protein, 99 aa, Saccharomyces cerevisiae
MAATKEAKQPKEPKKRTTRRKKDPNAPKRRLSAYMFFANENRDIVRSENPDVTFGQVGRILGERWKALTAEEKQPYESKAQADKKRYESEKELYNATRA

SEQ ID NO: 31342 - protein, 535 aa, Saccharomyces cerevisiae
MSITSEELNYLIWRYCQEMGHEVSALALQDETRVLEFDEKYKEHIPLGTLVNLVQRGILYTESELMVDSKGDISALNEHHLSEDFNLVQALQIDKEKFPEISSEGRFTLETNSESNKAGEDGASTVERETQEDDTNSIDSSDDLDGFVKILKEIVKLDNIVSSTWNPLDESILAYGEKNSVARLARIVETDQEGKKYWKLTIIAELRHPFALSASSGKTTNQVTCLAWSHDGNSIVTGVENGELRLWNKTGALLNVLNFHRAPIVSVKWNKDGTHIISMDVENVTILWNVISGTVMQHFELKETGGSSINAENHSGDGSLGVDVEWVDDDKFVIPGPKGAIFVYQITEKTPTGKLIGHHGPISVLEFNDTNKLLLSASDDGTLRIWHGGNGNSQNCFYGHSQSIVSASWVGDDKVISCSMDGSVRLWSLKQNTLLALSIVDGVPIFAGRISQDGQKYAVAFMDGQVNVYDLKKLNSKSRSLYGNRDGILNPLPIPLYASYQSSQDNDYIFDLSWNCAGNKISVAYSLQEGSVVAI

SEQ ID NO: 31343 - protein, 495 aa, Saccharomyces cerevisiae
MTTDNAKAQLTSSSGGNIIVVSNRLPVTITKNSSTGQYEYAMSSGGLVTALEGLKKTYTFKWFGWPGLEIPDDEKDQVRKDLLEKFNAVPIFLSDEIADLHYNGFSNSILWPLFHYHPGEINFDENAWLAYNEANQTFTNEIAKTMNHNDLIWVHDYHLMLVPEMLRVKIHEKQLQNVKVGWFLHTPFPSSEIYRILPVRQEILKGVLSCDLVGFHTYDYARHFLSSVQRVLNVNTLPNGVEYQGRFVNVGAFPIGIDVDKFTDGLKKESVQKRIQQLKETFKGCKIIVGVDRLDYIKGVPQKLHAMEVFLNEHPEWRGKVVLVQVAVPSRGDVEEYQYLRSVVNELVGRINGQFGTVEFVPIHFMHKSIPFEELISLYAVSDVCLVSSTRDGMNLVSYEYIACQEEKKGSLILSEFTGAAQSLNGAIIVNPWNTDDLSDAINEALTLPDVKKEVNWEKLYKYISKYTSAFWGENFVHELYSTSSSSTSSSATKN

SEQ ID NO: 31344 - protein, 508 aa, Saccharomyces cerevisiae
MKYLNLVFVLQLLISIKYASFGRAFSLFEDDTTFANLDKQLKLPQNTQQTLKLDRLNHDDPLFTTFISSVDTDYSLRLRTVDPSKLGIDTVKQWSGYMDYKDSKHFFYWFFESRNDPANDPIILWLNGGPGCSSFTGLLFELGPSSIGADMKPIHNPYSWNNNASMIFLEQPLGVGFSYGDEKVSSTKLAGKDAYIFLELFFEAFPHLRSNDFHIAGESYAGHYIPQIAHEIVVKNPERTFNLTSVMIGNGITDPLIQADYYEPMACGKGGYHPVLSSEECEKMSKAAGRCRRLNKLCYASKSSLPCIVATAYCDSALLEPYINTGLNVYDIRGPCEDNSTDGMCYTGLRYVDQYMNFPEVQETLGSDVHNYSGCDNDVFTGFLFTGDGSKPFQQYIAELLNHNIPVLIYAGDKDYICNWLGNHAWSNELEWINKRRYQRRMLRPWVSKETGEELGQVKNYGPFTFLRIYDAGHMVPYDQPEASLEMVNSWISGNRAFSDLSTLENAS

SEQ ID NO: 31345 - protein, 859 aa, Saccharomyces cerevisiae
MSRKSSTEYVHNQEDADIEVFESEYRTYRESEAAENRDGLHNGDEENWKVNSSKQKFGVTKNELSDVLYDSIPAYEESTVTLKEYYDHSIKNNLTAKSAGSYLVSLFPIIKWFPHYNFTWGYADLVAGITVGCVLVPQSMSYAQIASLSPEYGLYSSFIGAFIYSLFATSKDVCIGPVAVMSLQTAKVIAEVLKKYPEDQTEVTAPIIATTLCLLCGIVATGLGILRLGFLVELISLNAVAGFMTGSAFNIIWGQIPALMGYNSLVNTREATYKVVINTLKHLPNTKLDAVFGLIPLVILYVWKWWCGTFGITLADRYYRNQPKVANRLKSFYFYAQAMRNAVVIVVFTAISWSITRNKSSKDRPISILGTVPSGLNEVGVMKIPDGLLSNMSSEIPASIIVLVLEHIAISKSFGRINDYKVVPDQELIAIGVTNLIGTFFHSYPATGSFSRSALKAKCNVRTPFSGVFTGGCVLLALYCLTDAFFFIPKATLSAVIIHAVSDLLTSYKTTWTFWKTNPLDCISFIVTVFITVFSSIENGIYFAMCWSCAMLLLKQAFPAGKFLGRVEVAEVLNPTVQEDIDAVISSNELPNELNKQVKSTVEVLPAPEYKFSVKWVPFDHGYSRELNINTTVRPPPPGVIVYRLGDSFTYVNCSRHYDIIFDRIKEETRRGQLITLRKKSDRPWNDPGEWKMPDSLKSLFKFKRHSATTNSDLPISNGSSNGETYEKPLLKVVCLDFSQVAQVDSTAVQSLVDLRKAVNRYADRQVEFHFAGIISPWIKRSLLSVKFGTTNEEYSDDSIIAGHSSFHVAKVLKDDVDYTDEDSRISTSYSNYETLCAATGTNLPFFHIDIPDFSKWDV

SEQ ID NO: 31346 - protein, 110 aa, Saccharomyces cerevisiae
MVSQETIKHVKDLIAENEIFVASKTYCPYCHAALNTLFEKLKVPRSKVLVLQLNDMKEGADIQAALYEINGQRTVPNIYINGKHIGGNDDLQELRETGELEELLEPILAN

SEQ ID NO: 31347 - protein, 2145 aa, Saccharomyces cerevisiae
MPVLKSDNFDPLEEAYEGGTIQNYNDEHHLHKSWANVIPDKRGLYDPDYEHDACGVGFVANKHGEQSHKIVTDARYLLVNMTHRGAVSSDGNGDGAGILLGIPHEFMKREFKLDLDLDIPEMGKYAVGNVFFKKNEKNNKKNLIKCQKIFEDLAASFNLSVLGWRNVPVDSTILGDVALSREPTILQPLLVPLYDEKQPEFNETKFRTQLYLLRKEASLQIGLENWFYVCSLNNTTIVYKGQLTPAQVYNYYPDLTNAHFKSHMALVHSRFSTNTFPSWDRAQPLRWLAHNGEINTLRGNKNWMRSREGVMNSATFKDELDKLYPIIEEGGSDSAALDNVLELLTINGTLSLPEAVMMMVPEAYHKDMDSDLKAWYDWAACLMEPWDGPALLTFTDGRYCGAILDRNGLRPCRYYITSDDRVICASEVGVIPIENSLVVQKGKLKPGDLFLVDTQLGEMVDTKKLKSQISKRQDFKSWLSKVIKLDDLLSKTANLVPKEFISQDSLSLKVQSDPRLLANGYTFEQVTFLLTPMALTGKEALGSMGNDAPLACLNENPVLLYDYFRQLFAQVTNPPIDPIREANVMSLECYVGPQGNLLEMHSSQCDRLLLKSPILHWNEFQALKNIEAAYPSWSVAEIDITFDKSEGLLGYTDTIDKITKLASEAIDDGKKILIITDRKMGANRVSISSLIAISCIHHHLIRNKQRSQVALILETGEAREIHHFCVLLGYGCDGVYPYLAMETLVRMNREGLLRNVNNDNDTLEEGQILENYKHAIDAGILKVMSKMGISTLASYKGAQIFEALGLDNSIVDLCFTGTSSRIRGVTFEYLAQDAFSLHERGYPSRQTISKSVNLPESGEYHFRDGGYKHVNEPTAIASLQDTVRNKNDVSWQLYVKKEMEAIRDCTLRGLLELDFENSVSIPLEQVEPWTEIARRFASGAMSYGSISMEAHSTLAIAMNRLGAKSNCGEGGEDAERSAVQENGDTMRSAIKQVASARFGVTSYYLSDADEIQIKIAQGAKPGEGGELPAHKVSKDIAKTRHSTPNVGLISPPPHHDIYSIEDLKQLIYDLKCANPRAGISVKLVSEVGVGIVASGVAKAKADHILVSGHDGGTGAARWTSVKYAGLPWELGLAETHQTLVLNDLRRNVVVQTDGQLRTGFDIAVAVLLGAESFTLATVPLIAMGCVMLRRCHLNSCAVGIATQDPYLRSKFKGQPEHVINFFYYLIQDLRQIMAKLGFRTIDEMVGHSEKLKKRDDVNAKAINIDLSPILTPAHVIRPGVPTKFTKKQDHKLHTRLDNKLIDEAEVTLDRGLPVNIDASIINTDRALGSTLSYRVSKKFGEDGLPKDTVVVNIEGSAGQSFGAFLASGITFILNGDANDYVGKGLSGGIIVIKPPKDSKFKSDENVIVGNTCFYGATSGTAFISGSAGERFGVRNSGATIVVERIKGNNAFEYMTGGRAIVLSQMESLNAFSGATGGIAYCLTSDYDDFVGKINKDTVELESLCDPVEIAFVKNLIQEHWNYTQSDLAARILGNFNHYLKDFVKVIPTDYKKVLLKEKAEAAKAKAKATSEYLKKFRSNQEVDDEVNTLLIANQKAKEQEKKKSITISNKATLKEPKVVDLEDAVPDSKQLEKNSERIEKTRGFMIHKRRHETHRDPRTRVNDWKEFTNPITKKDAKYQTARCMDCGTPFCLSDTGCPLSNIIPKFNELLFKNQWKLALDKLLETNNFPEFTGRVCPAPCEGACTLGIIEDPVGIKSVERIIIDNAFKEGWIKPCPPSTRTGFTVGVIGSGPAGLACADMLNRAGHTVTVYERSDRCGGLLMYGIPNMKLDKAIVQRRIDLLSAEGIDFVTNTEIGKTISMDELKNKHNAVVYAIGSTIPRDLPIKGRELKNIDFAMQLLESNTKALLNKDLEIIREKIQGKKVIVVGGGDTGNDCLGTSVRHGAASVLNFELLPEPPVERAKDNPWPQWPRVMRVDYGHAEVKEHYGRDPREYCILSKEFIGNDEGEVTAIRTVRVEWKKSQSGVWQMVEIPNSEEIFEADIILLSMGFVGPELINGNDNEVKKTRRGTIATLDDSSYSIDGGKTFACGDCRRGQSLIVWAIQEGRKCAASVDKFLMDGTTYLPSNGGIVQRDYKLLKELASQV

SEQ ID NO: 31348 - protein, 609 aa, Saccharomyces cerevisiae
MNSSYTQRYALPKCIAISDYLFHRLNQLNIHTIFGLSGEFSMPLLDKLYNIPNLRWAGNSNELNAAYAADGYSRLKGLGCLITTFGVGELSAINGVAGSYAEHVGILHIVGMPPTSAQTKQLLLHHTLGNGDFTVFHRIASDVACYTTLIIDSELCADEVDKCIKKAWIEQRPVYMGMPVNQVNLPIESARLNTPLDLQLHKNDPDVEKEVISRILSFIYKSQNPAIIVDACTSRQNLIEETKELCNRLKFPVFVTPMGKGTVNETDPQFGGVFTGSISAPEVREVVDFADFIIVIGCMLSEFSTSTFHFQYKTKNCALLYSTSVKLKNATYPDLSIKLLLQKILANLDESKLSYQPSEQPSMMVPRPYPAGNVLLRQEWVWNEISHWFQPGDIIITETGASAFGVNQTRFPVNTLGISQALWGSVGYTMGACLGAEFAVQEINKDKFPATKHRVILFMGDGAFQLTVQELSTIVKWGLTPYIFVMNNQGYSVDRFLHHRSDASYYDIQPWNYLGLLRVFGCTNYETKKIITVGEFRSMISDPNFATNDKIRMIEIMLPPRDVPQALLDRWVVEKEQSKQVQEENENSSAVNTPTPEFQPLLKKNQVGY

SEQ ID NO: 31349 - protein, 764 aa, Saccharomyces cerevisiae
MSTNSFHDYVDLKSRTNTRQFSDDEEFTTPPKLSNFGSALLSHTEKTSASEILSSHNNDKIANRLEEMDRSSSRSHPPPSMGNLTSGHTSTSSHSTLFGRYLRNNHQTSMTTMNTSDIEINVGNSLDKSFERIRNLRQNMKEDITAKYAERRSKRFLISNRTTKLGPAKRAMTLTNIFDEDVPNSPNQPINARETVELPLEDSHQTNFKERRENTDYDSIDFGDLNPIQYIKKHNLPTSDLPLISQIYFDKQREENRQAALRKHSSRELLYKSRSSSSSLSSNNLLANKDNSITSNNGSQPRRKVSTGSSSSKSSIEIRRALKENIDTSNNSNFNSPIHKIYKGISRNKDSDSEKREVLRNISINANHADNLLQQENKRLKRSLDDAITNENINSKNLEVFYHRPAPKPPVTKKVEIVEPAKSASLSNNRNIITVNDSQYEKIELLGRGGSSRVYKVKGSGNRVYALKRVSFDAFDDSSIDGFKGEIELLEKLKDQKRVIQLLDYEMGDGLLYLIMECGDHDLSQILNQRSGMPLDFNFVRFYTKEMLLCIKVVHDAGIVHSDLKPANFVLVKGILKIIDFGIANAVPEHTVNIYRETQIGTPNYMAPEALVAMNYTQNSENQHEGNKWKVGRPSDMWSCGCIIYQMIYGKPPYGSFQGQNRLLAIMNPDVKIPFPEHTSNNEKIPKSAIELMKACLYRNPDKRWTVDKVLSSTFLQPFMISGSIMEDLIRNAVRYGSEKPHISQDDLNDVVDTVLRKFADYKI

SEQ ID NO: 31350 - protein, 896 aa, Saccharomyces cerevisiae
MTTTAQDNSPKKRQRIINCVTQLPYKIQLGESNDDWKISATTGNSALFSSLEYLQFDSTEYEQHVVGWTGEITRTERNLFTREAKEKPQDLDDDPLYLTKEQINGLTTTLQDHMKSDKEAKTDTTQTAPVTNNVHPVWLLRKNQSRWRNYAEKVIWPTFHYILNPSNEGEQEKNWWYDYVKFNEAYAQKIGEVYRKGDIIWIHDYYLLLLPQLLRMKFNDESIIIGYFHHAPWPSNEYFRCLPRRKQILDGLVGANRICFQNESFSRHFVSSCKRLLDATAKKSKNSSNSDQYQVSVYGGDVLVDSLPIGVNTTQILKDAFTKDIDSKVLSIKQAYQNKKIIIGRDRLDSVRGVVQKLRAFETFLAMYPEWRDQVVLIQVSSPTANRNSPQTIRLEQQVNELVNSINSEYGNLNFSPVQHYYMRIPKDVYLSLLRVADLCLITSVRDGMNTTALEYVTVKSHMSNFLCYGNPLILSEFSGSSNVLKDAIVVNPWDSVAVAKSINMALKLDKEEKSNLESKLWKEVPTIQDWTNKFLSSLKEQASSNDDMERKMTPALNRPVLLENYKQAKRRLFLFDYDGTLTPIVKDPAAAIPSARLYTILQKLCADPHNQIWIISGRDQKFLNKWLGGKLPQLGLSAEHGCFMKDVSCQDWVNLTEKVDMSWQVRVNEVMEEFTTRTPGSFIERKKVALTWHYRRTVPELGEFHAKELKEKLLSFTDDFDLEVMDGKANIEVRPRFVNKGEIVKRLVWHQHGKPQDMLKGISEKLPKDEMPDFVLCLGDDFTDEDMFRQLNTIETCWKEKYPDQKNQWGNYGFYPVTVGSASKKTVAKAHLTDPQQVLETLGLLVGDVSLFQSAGTVDLDSRGHVKNSESSLKSKLASKAYVMKRSASYTGAKV

SEQ ID NO: 31351 - protein, 285 aa, Saccharomyces cerevisiae
MCSFQVPSAFSFNYTSYCYKRHQARYYTAAKLFQEMPVIEINDQEQFTYLTTTAAGDKLIVLYFHTSWAEPCKALKQVFEAISNEPSNSNVSFLSIDADENSEISELFEISAVPYFIIIHKGTILKELSGADPKEYVSLLEDCKNSVNSGSSQTHTMENANVNEGSHNDEDDDDEEEEEETEEQINARLTKLVNAAPVMLFMKGSPSEPKCGFSRQLVGILREHQVRFGFFDILRDESVRQNLKKFSEWPTFPQLYINGEFQGGLDIIKESLEEDPDFLQHALQS

SEQ ID NO: 31352 - protein, 507 aa, Saccharomyces cerevisiae
MTMTHQQDLKGVFTAKDLDFKPAGKITKKDLNTGVTKAEYAVRGAIPTRADELKEELKKNPEVLPFDDIINANIGNPQQLDQKPLTFTRQVLAILEYPEILRVGHNELASLNLFSRDALERAERLLNDIGGSIGAYSHSQGVPGIRQTVADFITRRDGGEPATPEDIYLTTGASSAATSLLSLLCKDSQTGLLIPIPQYPLYTASASLFNAQVLPYYLDEESNWSTNSDEIEKVVQDALKKQIRPSVLIVINPGNPTGAVLSEETIARICLIAAKYGITIISDEVYQENIFNDVKFHSMKKVLRKLQHLYPGKFDNVQLASLHSISKGFMDECGQRGGYMEIIGFSQEIRDALFKLMSISICSVVTGQAVVDLMVKPPQPGDESYEQDHDERLKIFHEMRTRANLLYETFKELEGIECQKPQGAMYLFPRLVLPKKALCESERLGIEPDEFYCTSLLESTGICTVPGSGFGQRPGTYHVRTTFLAPGTKWIQDWKEFHQDFFSKYRN

SEQ ID NO: 31353 - protein, 811 aa, Saccharomyces cerevisiae
MLRQATKAPIQKYLQRTQLLRRSTPRIYTIVQCKRSICSFNARPRVANKLLSDIKTNALNEVAISTCALKSSYGLPNFKRTYVQMRMDPNQQPEKPALEQFGTNLTKLARDGKLDPVIGRDEEIARAIQILSRRTKNNPCLIGRAGVGKTALIDGLAQRIVAGEVPDSLKDKDLVALDLGSLIAGAKYRGEFEERLKKVLEEIDKANGKVIVFIDEVHMLLGLGKTDGSMDASNILKPKLARGLRCISATTLDEFKIIEKDPALSRRFQPILLNEPSVSDTISILRGLKERYEVHHGVRITDTALVSAAVLSNRYITDRFLPDKAIDLVDEACAVLRLQHESKPDEIQKLDRAIMKIQIELESLKKETDPVSVERREALEKDLEMKNDELNRLTKIWDAERAEIESIKNAKANLEQARIELEKCQREGDYTKASELRYSRIPDLEKKVALSEKSKDGDKVNLLHDSVTSDDISKVVAKMTGIPTETVMKGDKDRLLYMENSLKERVVGQDEAIAAISDAVRLQRAGLTSEKRPIASFMFLGPTGTGKTELTKALAEFLFDDESNVIRFDMSEFQEKHTVSRLIGAPPGYVLSESGGQLTEAVRRKPYAVVLFDEFEKAHPDVSKLLLQVLDEGKLTDSLGHHVDFRNTIIVMTSNIGQDILLNDTKLGDDGKIDTATKNKVIEAMKRSYPPEFINRIDDILVFNRLSKKVLRSIVDIRIAEIQDRLAEKRMKIDLTDEAKDWLTDKGYDQLYGARPLNRLIHRQILNSMATFLLKGQIRNGETVRVVVKDTKLVVLPNHEEGEVVEEEAEK

SEQ ID NO: 31354 - protein, 635 aa, Saccharomyces cerevisiae
MAPVTIEKFVNQEERHLVSNRSATIPFGEYIFKRLLSIDTKSVFGVPGDFNLSLLEYLYSPSVESAGLRWVGTCNELNAAYAADGYSRYSNKIGCLITTYGVGELSALNGIAGSFAENVKVLHIVGVAKSIDSRSSNFSDRNLHHLVPQLHDSNFKGPNHKVYHDMVKDRVACSVAYLEDIETACDQVDNVIRDIYKYSKPGYIFVPADFADMSVTCDNLVNVPRISQQDCIVYPSENQLSDIINKITSWIYSSKTPAILGDVLTDRYGVSNFLNKLICKTGIWNFSTVMGKSVIDESNPTYMGQYNGKEGLKQVYEHFELCDLVLHFGVDINEINNGHYTFTYKPNAKIIQFHPNYIRLVDTRQGNEQMFKGINFAPILKELYKRIDVSKLSLQYDSNVTQYTNETMRLEDPTNGQSSIITQVHLQKTMPKFLNPGDVVVCETGSFQFSVRDFAFPSQLKYISQGFFLSIGMALPAALGVGIAMQDHSNAHINGGNVKEDYKPRLILFEGDGAAQMTIQELSTILKCNIPLEVIIWNNNGYTIERAIMGPTRSYNDVMSWKWTKLFEAFGDFDGKYTNSTLIQCPSKLALKLEELKNSNKRSGIELLEVKLGELDFPEQLKCMVEAAALKRNKK

SEQ ID NO: 31355 - protein, 633 aa, Saccharomyces cerevisiae
MSSNNNTNTAPANANSSHHHHHHHHHHHHHGHGGSNSTLNNPKSSLADGAHIGNYQIVKTLGEGSFGKVKLAYHTTTGQKVALKIINKKVLAKSDMQGRIEREISYLRLLRHPHIIKLYDVIKSKDEIIMVIEYAGNELFDYIVQRDKMSEQEARRFFQQIISAVEYCHRHKIVHRDLKPENLLLDEHLNVKIADFGLSNIMTDGNFLKTSCGSPNYAAPEVISGKLYAGPEVDVWSCGVILYVMLCRRLPFDDESIPVLFKNISNGVYTLPKFLSPGAAGLIKRMLIVNPLNRISIHEIMQDDWFKVDLPEYLLPPDLKPHPEEENENNDSKKDGSSPDNDEIDDNLVNILSSTMGYEKDEIYESLESSEDTPAFNEIRDAYMLIKENKSLIKDMKANKSVSDELDTFLSQSPPTFQQQSKSHQKSQVDHETAKQHARRMASAITQQRTYHQSPFMDQYKEEDSTVSILPTSLPQIHRANMLAQGSPAASKISPLVTKKSKTRWHFGIRSRSYPLDVMGEIYIALKNLGAEWAKPSEEDLWTIKLRWKYDIGNKTNTNEKIPDLMKMVIQLFQIETNNYLVDFKFDGWESSYGDDTTVSNISEDEMSTFSAYPFLHLTTKLIMELAVNSQSN

SEQ ID NO: 31356 - protein, 1142 aa, Saccharomyces cerevisiae
MAINGNSIPAIKDNTIGPWKLGETLGLGSTGKVQLARNGSTGQEAAVKVISKAVFNTGNVSGTSIVGSTTPDALPYGIEREIIIMKLLNHPNVLRLYDVWETNTDLYLVLEYAEKGELFNLLVERGPLPEHEAIRFFRQIIIGVSYCHALGIVHRDLKPENLLLDHKYNIKIADFGMAALETEGKLLETSCGSPHYAAPEIVSGIPYQGFASDVWSCGVILFALLTGRLPFDEEDGNIRTLLLKVQKGEFEMPSDDEISREAQDLIRKILTVDPERRIKTRDILKHPLLQKYPSIRDSKSIRGLPREDTYLTPLSESNSSIDATILQNLVILWHGRDPEGIKEKLREPGANAEKTLYALLYRFKCDTQKELIKQQQVKKRQSISSVSVSPSKKVSTTPQRRRNRESLISVTSSRKKPISFNKFTASSASSSNLTTPGSSKRLSKNFSSKKKLSTIVNQSSPTPASRNKRASVINVEKNQKRASIFSTTKKNKRSSRSIKRMSLIPSMKRESVTTKLMSTYAKLAEDDDWEYIEKETKRTSSNFATLIDEIFEYEKYEQIRKEKEELERKVREAKAREELERRRRKQEEKERARKLLEKEDLKRKQEELKKQIEIDISDLEQELSKHKEEKLDGNIRSISAPMENEEKNINHLEVDIDNILRRRNFSLQTRPVSRLDPGIMFSSPTEEVSPVEPKRTENERLTTEKKILETIRRSKFLGSSFNIDKELKLSKMEYPSIIAPQRLSEERVVSDSNDGYESLILPKDGNGVSQLKDSTATTAPVSDGRLRKISEIRVPQFTRKSRHFSESNKRLSVLSMYSTKESFTNLVDILKNGNLDVNNQQSQRIPTPRSADDSEFLFETVNEEAEYTGNSSNDERLYDVGDSTIKDKSALKLNFADRFNGSNEAKQTDNLHLPILPPLNGDNELRKQNSQEGDQAHPKIKSMIPESGSSSHTEKEEENEEKEEKKPEQHKQEEDQEKREKVVDDMEPPLNKSVQKIREKNAGSQAKDHSKDHLKEHKQDKNTAIGNGSFFRKFSKSSDKTMELYAKISAKQLFNGLEKLLRGWTQYGLKNIKSHPNNLTLTGKLSSDNIFSLRSTLFEVNIYPRGKMSVVQFKKVSGSFKAVKKLVNEVENVLNKEGVLQK

SEQ ID NO: 31357 - protein, 101 aa, Saccharomyces cerevisiae
MSDSEVNQEAKPEVKPEVKPETHINLKVSDGSSEIFFKIKKTTPLRRLMEAFAKRQGKEMDSLRFLYDGIRIQADQTPEDLDMEDNDIIEAHREQIGGATY

SEQ ID NO: 31358 - protein, 143 aa, Saccharomyces cerevisiae
METNFSFDSNLIVIIIITLFATRIIAKRFLSTPKMVSQETVAHVKDLIGQKEVFVAAKTYCPYCKATLSTLFQELNVPKSKALVLELDEMSNGSEIQDALEEISGQKTVPNVYINGKHIGGNSDLETLKKNGKLAEILKPVFQ

SEQ ID NO: 31359 - protein, 157 aa, Saccharomyces cerevisiae
MSDEEHTFETADAGSSATYPMQCSALRKNGFVVIKSRPCKIVDMSTSKTGKHGHAKVHLVAIDIFTGKKLEDLSPSTHNMEVPVVKRNEYQLLDIDDGFLSLMNMDGDTKDDVKAPEGELGDSLQTAFDEGKDLMVTIISAMGEEAAISFKEAARTD

SEQ ID NO: 31360 - protein, 527 aa, Saccharomyces cerevisiae
MPMDFQPTSSHSNWVVQKFGGTSVGKFPVQIVDDIVKHYSKPDGPNNNVAVVCSARSSYTKAEGTTSRLLKCCDLASQESEFQDIIEVIRQDHIDNADRFILNPALQAKLVDDTNKELELVKKYLNASKVLGEVSSRTVDLVMSCGEKLSCLFMTALCNDRGCKAKYVDLSHIVPSDFSASALDNSFYTFLVQALKEKLAPFVSAKERIVPVFTGFFGLVPTGLLNGVGRGYTDLCAALIAVAVNADELQVWKEVDGIFTADPRKVPEARLLDSVTPEEASELTYYGSEVIHPFTMEQVIRAKIPIRIKNVQNPLGNGTIIYPDNVAKKGESTPPHPPENLSSSFYEKRKRGATAITTKNDIFVINIHSNKKTLSHGFLAQIFTILDKYKLVVDLISTSEVHVSMALPIPDADSLKSLRQAEEKLRILGSVDITKKLSIVSLVGKHMKQYIGIAGTMFTTLAEEGINIEMISQGANEINISCVINESDSIKALQCIHAKLLSERTNTSNQFEHAIDERLEQLKRLGI

SEQ ID NO: 31361 - protein, 318 aa, Saccharomyces cerevisiae
MSTNSIKLLAGNSHPGLAELISQRLGVPLSKVGVYQYSNKETSVTIGESIRDEDVYIIQTGYGEHEINDFLMELLILIHACKTASVRRITAVIPNFPYARQDKKDKSRAPITAKLIANLLETAGCDHVITMDLHASQIQGFFHIPVDNLYGEPSVLNYIRTKTDFNNAILVSPDAGGAKRVASLADKLDMNFALIHKERQKANEVSRMLLVGDVAGKSCLLIDDMADTCGTLVKACDTLMDHGAKEVIAIVTHGIFSGSAREKLINSRLSRIVCTNTVPVDLDLDIVDQVDISPTIAEAIRRLHNGESVSYLFTHAPV

SEQ ID NO: 31362 - protein, 778 aa, Saccharomyces cerevisiae
MKFYIDDLPVLFPYPKIYPEQYNYMCDIKKTLDVGGNSILEMPSGTGKTVSLLSLTIAYQMHYPEHRKIIYCSRTMSEIEKALVELENLMDYRTKELGYQEDFRGLGLTSRKNLCLHPEVSKERKGTVVDEKCRRMTNGQAKRKLEEDPEANVELCEYHENLYNIEVEDYLPKGVFSFEKLLKYCEEKTLCPYFIVRRMISLCNIIIYSYHYLLDPKIAERVSNEVSKDSIVIFDEAHNIDNVCIESLSLDLTTDALRRATRGANALDERISEVRKVDSQKLQDEYEKLVQGLHSADILTDQEEPFVETPVLPQDLLTEAIPGNIRRAEHFVSFLKRLIEYLKTRMKVLHVISETPKSFLQHLKQLTFIERKPLRFCSERLSLLVRTLEVTEVEDFTALKDIATFATLISTYEEGFLLIIEPYEIENAAVPNPIMRFTCLDASIAIKPVFERFSSVIITSGTISPLDMYPRMLNFKTVLQKSYAMTLAKKSFLPMIITKGSDQVAISSRFEIRNDPSIVRNYGSMLVEFAKITPDGMVVFFPSYLYMESIVSMWQTMGILDEVWKHKLILVETPDAQETSLALETYRKACSNGRGAILLSVARGKVSEGIDFDHQYGRTVLMIGIPFQYTESRILKARLEFMRENYRIRENDFLSFDAMRHAAQCLGRVLRGKDDYGVMVLADRRFSRKRSQLPKWIAQGLSDADLNLSTDMAISNTKQFLRTMAQPTDPKDQEGVSVWSYEDLIKHQNSRKDQGGFIENENKEGEQDEDEDEDIEMQ

SEQ ID NO: 31363 - protein, 244 aa, Saccharomyces cerevisiae
MTVVEIKSQDQFTQLTTTNAANKLIVLYFKAQWADPCKTMSQVLEAVSEKVRQEDVRFLSIDADEHPEISDLFEIAAVPYFVFIQNGTIVKEISAADPKEFVKSLEILSNASASLANNAKGPKSTSDEESSGSSDDEEDETEEEINARLVKLVQAAPVMLFMKGSPSEPKCGFSRQLVGILREHQIRFGFFDILRDENVRQSLKKFSDWPTFPQLYINGEFQGGLDIIKESIEEDPEYFQHALQ

SEQ ID NO: 31364 - protein, 265 aa, Saccharomyces cerevisiae
MSADETDAKFHPLETDLQSDTAAATSTAAASRSPSLQEKPIEMPLDMGKAPSPRGEDQRVTNEEDLFLFNRLRASQNRVMDSLEPQQQSQYTSSSVSTMEPSADFTSFSAVTTLPPPPHQQQQQQQQQQQQQQLVVQAQYTQNQPNLQSDVLGTAIAEQPFYVNAKQYYRILKRRYARAKLEEKLRISRERKPYLHESRHKHAMRRPRGEGGRFLTAAEIKAMKSKKSGASDDPDDSHEDKKITTKIIQEQPHATSTAAAADKKT

SEQ ID NO: 31365 - protein, 237 aa, Saccharomyces cerevisiae [sequence omitted]

SEQ ID NO: 31366 - protein, 574 aa, Saccharomyces cerevisiae
MSEGRTFLSQLNVFNKENYQFSSSTTKKEVSNSTVDADNGASDFEAGQQFATELDQGEKQLGILSCIGLICNRMLGTGVFAVSSTIYTLCGSVGLALIMWAVGAIIAISGLYVYMEFGTAIPKNGGEKNYLEAIFRKPKFFITCMYAAYIFFLGWAAGNSINTAIMFLTAADTEVTKWNQRGIGVAVVFFAFLINSLNVKIGLYLQNILGIFKIGIVLFISITGWVALGGGLKDGYQSHNFRNAFEGTETATAYGIVNALYSVIWSFVGYSNVNYALGEVKNPVRTLKIAGPTSMVFLAIIYIFVNIAYFAVVPKDKLISSKLILAADFFDIVFGGQAKRAAAALVGLSALGNVLSVIFSQGRIIQQLGREGVLPFSNFFASSKPFNSPMVGLFQHFIVCTVTILAPPPGDAYLLVQNLISYPMNIINFAISAGLLWIYWQRRQGKIEWNPPIKAGVFVTGFFTLSNLYLIIAPYVPPSNGESVYSSMPYWIHCVIAWGIFFFGGVYYVVWAQLLPRWGHYKLVSKDVLGEDGFWRVKIAKVYDDTIGDVDTQEDGVIETNIIEHYKSEQEKSL

SEQ ID NO: 31367 - protein, 563 aa, Saccharomyces cerevisiae
MSEITLGKYLFERLKQVNVNTIFGLPGDFNLSLLDKIYEVDGLRWAGNANELNAAYAADGYARIKGLSVLVTTFGVGELSALNGIAGSYAEHVGVLHVVGVPSISAQAKQLLLHHTLGNGDFTVFHRMSANISETTSMITDIATAPSEIDRLIRTTFITQRPSYLGLPANLVDLKVPGSLLEKPIDLSLKPNDPEAEKEVIDTVLELIQNSKNPVILSDACASRHNVKKETQKLIDLTQFPAFVTPLGKGSIDEQHPRYGGVYVGTLSKQDVKQAVESADLILSVGALLSDFNTGSFSYSYKTKNVVEFHSDYVKVKNATFLGVQMKFALQNLLKVIPDVVKGYKSVPVPTKTPANKGVPASTPLKQEWLWNELSKFLQEGDVIISETGTSAFGINQTIFPKDAYGISQVLWGSIGFTTGATLGAAFAAEEIDPNKRVILFIGDGSLQLTVQEISTMIRWGLKPYLFVLNNDGYTIEKLIHGPHAEYNEIQTWDHLALLPAFGAKKYENHKIATTGEWDALTTDSEFQKNSVIRLIELKLPVFDAPESLIKQAQLTAATNAKQ

SEQ ID NO: 31368 - protein, 492 aa, Saccharomyces cerevisiae
MESRTTGPLTTETYDGPTVAFMILGAALVFFMVPGLGFLYSGLARRKSALALIWVVLMATLVGILQWYFWGYSLAFSKSAPNNKFIGNLDSFGFRNVYGKKFDEDAYPELAYATFQMMFSCVNLSIIAGATAERGRLLPHMVFLFILATIGYCPVTYWIWSPGGWAYQWGVLDWAGGGNIEILSAVSGFVYSWFLGKRNEKLLINFRPHNVSLVTLGTSILWFGWLLFNSASSLSPNLRSVYAFMNTCLSAITGGMTWCLLDYRSEKKWSTVGLCSGIISGLVAATPSSGCITLYGSLIQGIVAGVVCNFATKLKYYAKVDDAMDILAEHGVAGVIGLIFNALFGADWVIGMDGTTEHEGGWVTHNYKQMYKQIAYIAASIGYTAAVTAIICFVLGYIPGMRLRISEEAEEAGMDEDQIGEFAYDYVEVRRDYYLWGVDEDSQRSDVNHRVNNAHLAAERSSSGTNSSSDGNGEMIQSEKILPIHQEDPANR

SEQ ID NO: 31369 - protein, 572 aa, Saccharomyces cerevisiae
MCGIFAAFKHEDIHNFKPKALQLSKKIRHRGPDWSGNAVMNSTIFVHERLAIVGLDSGAQPITSADGEYMLGVNGEIYNHIQLREMCSDYKFQTFSDCEPIIPLYLEHDIDAPKYLDGMFAFCLYDSKKDRIVAARDPIGVVTLYMGRSSQSPETVYFASELKCLTDVCDSIISFPPGHVYDSETDKITRYFTPDWLDEKRIPSTPVDYHAIRHSLEKAVRKRLMAEVPYGVLLSGGLDSSLIAAIAARETEKANADANEDNNVDEKQLAGIDDQGHLHTSGWSRLHSFAIGLPNAPDLQAARKVAKFIGSIHHEHTFTLQEGLDALDDVIYHLETYDVTTIRASTPMFLLSRKIKAQGVKMVLSGEGSDEIFGGYLYFAQAPSAAEFHTESVQRVKNLHLADCLRANKSTMAWGLEARVPFLDKDFLQLCMNIDPNEKMIKPKEGRIEKYILRKAFDTTDEPDVKPYLPEEILWRQKEQFSDGVGYSWIDGLRDTAERAISDAMFANPKADWGDDIPTTKEAYWYRLKFDAWFPQKTAADTVMRWIPKADWGCAEDPSGRYAKIHEKHVSA

SEQ ID NO: 31370 - protein, 399 aa, Saccharomyces cerevisiae [sequence omitted]

SEQ ID NO: 31371 - protein, 320 aa, Saccharomyces cerevisiae
MPTNSIKLLAPDVHRGLAELVAKRLGLQLTSSKLKRDPTGEVSFSIGESVRDQDIFIITQIGSGVVNDRVLELLIMINASKTASARRITAIIPNFPYARQDRKDKSRAPITAKLMADMLTTAGCDHVITMDLHASQIQGFFDVPVDNLYAEPSVVRYIKENVNYMDSIIISPDAGGAKRAATLADRLDLNFALIHKERARANEVSRMVLVGDVTDKICIIVDDMADTCGTLAKAAEILLENRAKSVIAIVTHGVLSGRAIENINNSKLDRVVCTNTVPFEEKIKKCPKLAVIDISSVLAESIRRLHNGESISYLFKNYPL

SEQ ID NO: 31372 - protein, 627 aa, Saccharomyces cerevisiae
MVDDSNYLTPHETALAVVATAMKKARLQLDTLLINSILGGVLFSSGSFLLVAVYSEDPDIVARNPGIVNLITGVNFAMGLFYVVMMGADLFNSNILFFSVGVLRKAVTIYDLMISWVVSWLGNIAGSLFVSYLFGHLSGISSQKLWIIGSRQIIEQKVSYSFVQTFLKGIACNFFVCLAIYLQLMAKPIHVKFILMSFPIIDFIGIGFTHVVGDMSASFIAMLNGANVSVGKYIWKLLIPASLGNIVGGLFFSAVVPFYLHLVVVERDRKRLSLPEYEARDEQPELNMDSRVVRIQKNECDDDATETGEDLENLTEKGFASIYNTNHDNSSYFTGRSLNSLRSIPSSVITSDNVTMESDLGEPVQFIPKSNSTTRSPHLGLPHNLPHNHSIKSINRHRINKRHSLRSPPGVFPVRGMGEPLEREKTIEDATYDPKENELFLRRAETHNSAYVKNKKKEDDNLLRLVKTEEDREQKEYEKNGGYNILENKPGTRLEKIITHLAENVSSREVTPPILPRTTQDTFPHNAPASSPAYTDDAHSLRKANSTTLGGLFRAVSKEFHSSKDAESPDDLLKKMAAVGINRNARITANNVAGIVNLNKEDLDSTTRRQKITEPKNFYNRHTSPQL

SEQ ID NO: 31373 - protein, 499 aa, Saccharomyces cerevisiae
MSIAWSSVFKRELRLERFLPRVYSTKVPDNAPRAADNEQWLETLRPITHPEQKKSDHDVSYTRHINVPLGEVTSVNYLQRYNKHKHSQGNFVDVRIVKCKSGAGGSGAVSFFRDAGRSIGPPDGGDGGAGGSVYIQAVAGLGSLAKMKTTYTAEDGEAGAARQLDGMRGRDVLIQVPVGTVVKWCLPPQKVRELVEREMRKDNNATLRSILGSTAVNLSVSSGSHRKKIQLYRHEMAESWLFKDKAKEYHENKDWFKDLHKKMEAYDHSLEQSELFNDQFPLAGLDLNQPMTKPVCLLKGGQGGLGNMHFLTNLIRNPRFSKPGRNGLEQHFLFELKSIADLGLIGLPNAGKSTILNKISNAKPKIGHWQFTTLSPTIGTVSLGFGQDVFTVADIPGIIQGASLDKGMGLEFLRHIERSNGWVFVLDLSNKNPLNDLQLLIEEVGTLEKVKTKNILIVCNKVDIDAEKSESFAKYLQVEKFSKSQEWDCVPISALREKT

SEQ ID NO: 31374 - protein, 799 aa, Saccharomyces cerevisiae
MSTIYRESDSLESEPSPTPTTIPIQINMEEEKKDAFVKNIDEDVNNLTATTDEEDRDPESQKFDRHSIQEEGLVWKGDPTYLPNSPYPEVRSAVSIEDDPTIRLNHWRTWFLTTVFVVVFAGVNQFFSLRYPSLEINFLVAQVVCYPIGRILALLPDWKCSKVPFFDLNPGPFTKKEHAVVTIAVALTSSTAYAMYILNAQGSFYNMKLNVGYQFLLVWTSQMIGYGAAGLTRRWVVNPASSIWPQTLISVSLFDSLHSRKVEKTVANGWTMPRYRFFLIVLIGSFIWYWVPGFLFTGLSYFNVILWGSKTRHNFIANTIFGTQSGLGALPITFDYTQVSQAMSGSVFATPFYVSANTYASVLIFFVIVLPCLYFTNTWYAKYMPVISGSTYDNTQNKYNVTKILNEDYSINLEKYKEYSPVFVPFSYLLSYALNFAAVIAVFVHCILYHGKDIVAKFKDRKNGGTDIHMRIYSKNYKDCPDWWYLLLQIVMIGLGFVAVCCFDTKFPAWAFVIAILISLVNFIPQGILEAMTNQHVGLNIITELICGYMLPLRPMANLLFKLYGFIVMRQGLNLSRDLKLAMYMKVSPRLIFAVQIYATIISGMVNVGVQEWMMHNIDGLCTTDQPNGFTCANGRTVFNASIIWSLPKYLFSSGRIYNPLMWFFLIGLLFPLAVYAVQWKFPKFKFAKHIHTPVFFTGPGNIPPSTPYNYSLFFAMSFCLNLIRKRWRAWFNKYNFVMGAGVEAGVAISVVIIFLCVQYPGGKLSWWGNNVWKRTYDNDYKKFYTLKKGETFGYDKWW

SEQ ID NO: 31375 - protein, 444 aa, Saccharomyces cerevisiae
MKQRFIRQFTNLMSTSRPKVVANKYFTSNTAKDVWSLTNEAAAKAANNSKNQGRELINLGQGFFSYSPPQFAIKEAQKALDIPMVNQYSPTRGRPSLINSLIKLYSPIYNTELKAENVTVTTGANEGILSCLMGLLNAGDEVIVFEPFFDQYIPNIELCGGKVVYVPINPPKELDQRNTRGEEWTIDFEQFEKAITSKTKAVIINTPHNPIGKVFTREELTTLGNICVKHNVVIISDEVYEHLYFTDSFTRIATLSPEIGQLTLTVGSAGKSFAATGWRIGWVLSLNAELLSYAAKAHTRICFASPSPLQEACANSINDALKIGYFEKMRQEYINKFKIFTSIFDELGLPYTAPEGTYFVLVDFSKVKIPEDYPYPEEILNKGKDFRISHWLINELGVVAIPPTEFYIKEHEKAAENLLRFAVCKDDAYLENAVERLKLLKDYL

SEQ ID NO: 31376 - protein, 682 aa, Saccharomyces cerevisiae
MFFNRLSAGKLLVPLSVVLYALFVVILPLQNSFHSSNVLVRGADDVENYGTVIGIDLGTTYSCVAVMKNGKTEILANEQGNRITPSYVAFTDDERLIGDAAKNQVAANPQNTIFDIKRLIGLKYNDRSVQKDIKHLPFNVVNKDGKPAVEVSVKGEKKVFTPEEISGMILGKMKQIAEDYLGTKVTHAVVTVPAYFNDAQRQATKDAGTIAGLNVLRIVNEPTAAAIAYGLDKSDKEHQIIVYDLGGGTFDVSLLSIENGVFEVQATSGDTHLGGEDFDYKIVRQLIKAFKKKHGIDVSDNNKALAKLKREAEKAKRALSSQMSTRIEIDSFVDGIDLSETLTRAKFEELNLDLFKKTLKPVEKVLQDSGLEKKDVDDIVLVGGSTRIPKVQQLLESYFDGKKASKGINPDEAVAYGAAVQAGVLSGEEGVEDIVLLDVNALTLGIETTGGVMTPLIKRNTAIPTKKSQIFSTAVDNQPTVMIKVYEGERAMSKDNNLLGKFELTGIPPAPRGVPQIEVTFALDANGILKVSATDKGTGKSESITITNDKGRLTQEEIDRMVEEAEKFASEDASIKAKVESRNKLENYAHSLKNQVNGDLGEKLEEEDKETLLDAANDVLEWLDDNFETAIAEDFDEKFESLSKVAYPITSKLYGGADGSGAADYDDEDEDDDGDYFEHDEL

SEQ ID NO: 31377 - protein, 157 aa, Saccharomyces cerevisiae
MSDEEHTFENADAGASATYPMQCSALRKNGFVVIKGRPCKIVDMSTSKTGKHGHAKVHLVTLDIFTGKKLEDLSPSTHNLEVPFVKRSEYQLLDIDDGYLSLMTMDGETKDDVKAPEGELGDSMQAAFDEGKDLMVTIISAMGEEAAISFKEAPRSD

SEQ ID NO: 31378 - protein, 359 aa, Saccharomyces cerevisiae
MSTKVVNVAVIGAGVVGSAFLDQLLAMKSTITYNLVLLAEAERSLISKDFSPLNVGSDWKAALAASTTKTLPLDDLIAHLKTSPKPVILVDNTSSAYIAGFYTKFVENGISIATPNKKAFSSDLATWKALFSNKPTNGFVYHEATVGAGLPIISFLREIIQTGDEVEKIEGIFSGTLSYIFNEFSTSQANDVKFSDVVKVAKKLGYTEPDPRDDLNGLDVARKVTIVGRISGVEVESPTSFPVQSLIPKPLESVKSADEFLEKLSDYDKDLTQLKKEAATENKVLRFIGKVDVATKSVSVGIEKYDYSHPFASLKGSDNVISIKTKRYTNPVVIQGAGAGAAVTAAGVLGDVIKIAQRL

SEQ ID NO: 31379 - protein, 427 aa, Saccharomyces cerevisiae
MRKCKIFVGNSHPELGNMVCQRLGIEPAPCTLKKFANGETSVQIGVSVRDEDVYVIQSGSPSINDDIMELLILVSACRGGSARKITAVIPQFPYSKQCKMKRHRGAITARMLANLLVMAGADHVVSMDLHASQMQGFFTKPVDNLYGGPSLAKWIRENVEDYEDAVVVSKNPGGTKRVTALADSLKINFAMIHTDRRRSKDLYSQNKDLQQLKLRKQSMLRKNRPIIRQGDHPNEEENIILSNGIQTARIRNGHVIGDDEADDDEDAILESDSELHSIDGLDSHGLGGTYDAVDSEDEEEIPVLYREQLITLVGNVRGRSAIILDDMIDRPGSFISAAEHLVQNCGAKKVYVVATHGIFTGDCLEELEKSDAIDTIVVTNTYPISGERIAGSKKLVTIDVSPIFAECIRRDHYGESISVLFDSLAAL

SEQ ID NO: 31380 - protein, 692 aa, Saccharomyces cerevisiae
MNGKEVSSGSGRTQSNNNKKNNNGGSTGISHASGSPLTDGNGGNSNGNSRSRSRSRKSSGTTGGLLKKPPLLVNNEAVHASVPDASHTSCNNGTLEVSINNPEPHVVDAVARHLIRNPSNSLQLQGGDITRDLYKWTNDHPSSPSQYQYPSQPALSTSIPSQAPSFSNRKRSMSFSAASIASSSHLNNNSEANGNPLAAIGLAPAPMTHEEIRAPGGFRRSFIIQKRRKHNVDAPIPNFFTRNFIEFLTLYGHFAGEDLSEEEEEEEETEEEPEEEALETESTQLVSREHGRHPHKSSTVKAVLLLLKSFVGTGVLFLPKAFHNGGWGFSALCLLSCALISYGCFVSLITTKDKVGVDGYGDMGRILYGPKMKFAILSSIALSQIGFSAAYTVFTATNLQVFSENFFHLKPGSISLATYIFAQVLIFVPLSLTRNIAKLSGTALIADLFILLGLVYVYVYSIYYIAVNGVASDTMLMFNKADWSLFIGTAIFTFEGIGLLIPIQESMKHPKHFRPSLSAVMCIVAVIFISCGLLCYAAFGSDVKTVVLLNFPQDTSYTLTVQLLYALAILLSTPLQLFPAIRILENWTFPSNASGKYNPKVKWLKNYFRCAIVVLTSILAWVGANDLDKFVSLVGSFACIPLIYIYPPLLHYKASILSGTSRARLLLDLIVIVFGVAVMAYTSWQTIKMWSQ

SEQ ID NO: 31381 - protein, 1518 aa, Saccharomyces cerevisiae
MTGHVSKTSHVPKGRPSSLAKKAAKRAMAKVNSNPKRASGHLERVVQSVNDATKRLSQPDSTVSVATKSSKRKSRDTVGPWKLGKTLGKGSSGRVRLAKNMETGQLAAIKIVPKKKAFVHCSNNGTVPNSYSSSMVTSNVSSPSIASREHSNHSQTNPYGIEREIVIMKLISHTNVMALFEVWENKSELYLVLEYVDGGELFDYLVSKGKLPEREAIHYFKQIVEGVSYCHSFNICHRDLKPENLLLDKKNRRIKIADFGMAALELPNKLLKTSCGSPHYASPEIVMGRPYHGGPSDVWSCGIVLFALLTGHLPFNDDNIKKLLLKVQSGKYQMPSNLSSEARDLISKILVIDPEKRITTQEILKHPLIKKYDDLPVNKVLRKMRKDNMARGKSNSDLHLLNNVSPSIVTLHSKGEIDESILRSLQILWHGVSRELITAKLLQKPMSEEKLFYSLLLQYKQRHSISLSSSSENKKSATESSVNEPRIEYASKTANNTGLRSENNDVKTLHSLEIHSEDTSTVNQNNAITGVNTEINAPVLAQKSQFSINTLSQPESDKAEAEAVTLPPAIPIFNASSSRIFRNSYTSISSRSRRSLRLSNSRLSLSASTSRETVHDNEMPLPQLPKSPSRYSLSRRAIHASPSTKSIHKSLSRKNIAATVAARRTLQNSASKRSLYSLQSISKRSLNLNDLLVFDDPLPSKKPASENVNKSEPHSLESDSDFEILCDQILFGNALDRILEEEEDNEKERDTQRQRQNDTKSSADTFTISGVSTNKENEGPEYPTKIEKNQFNMSYKPSENMSGLSSFPIFEKENTLSSSYLEEQKPKRAALSDITNSFNKMNKQEGMRIEKKIQREQLQKKNDRPSPLKPIQHQELRVNSLPNDQGKPSLSLDPRRNISQPVNSKVESLLQGLKFKKEPASHWTHERGSLFMSEHVEDEKPVKASDVSIESSYVPLTTVATSSRDPSVLAESSTIQKPMLSLPSSFLNTSMTFKNLSQILADDGDDKHLSVPQNQSRSVAMSHPLRKQSAKISLTPRSNLNANLSVKRNQGSPGSYLSNDLDGISDMTFAMEIPTNTFTAQAIQLMNNDTDNNKINTSPKASSFTKEKVIKSAAYISKEKEPDNSDTNYIPDYTIPNTYDEKAINIFEDAPSDEGSLNTSSSESDSRASVHRKAVSIDTMATTNVLTPATNVRVSLYWNNNSSGIPRETTEEILSKLRLSPENPSNTHMQKRFSSTRGSRDSNALGISQSLQSMFKDLEEDQDGHTSQADILESSMSYSKRRPSEESVNPKQRVTMLFDEEEEESKKVGGGKIKEEHTKLDNKISEESSQLVLPVVEKKENANNTENNYSKIPKPSTIKVTKDTAMESNTQTHTKKPILKSVQNVEVEEAPSSDKKNWFVKLFQNFSSHNNATKASKNHVTNISFDDAHMLTLNEFNKNSIDYQLKNLDHKFGRKVVEYDCKFVKGNFKFKIKITSTPNASSVITVKKRSKHSNTSSNKAFEKFNDDVERVIRNAGRS

SEQ ID NO: 31382 - protein, 908 aa, Saccharomyces cerevisiae
MNDQTQFTERALTILTLAQKLASDHQHPQLQPIHILAAFIETPEDGSVPYLQNLIEKGRYDYDLFKKVVNRNLVRIPQQQPAPAEITPSYALGKVLQDAAKIQKQQKDSFIAQDHILFALFNDSSIQQIFKEAQVDIEAIKQQALELRGNTRIDSRGADTNTPLEYLSKYAIDMTEQARQGKLDPVIGREEEIRSTIRVLARRIKSNPCLIGEPGIGKTAIIEGVAQRIIDDDVPTILQGAKLFSLDLAALTAGAKYKGDFEERFKGVLKEIEESKTLIVLFIDEIHMLMGNGKDDAANILKPALSRGQLKVIGATTNNEYRSIVEKDGAFERRFQKIEVAEPSVRQTVAILRGLQPKYEIHHGVRILDSALVTAAQLAKRYLPYRRLPDSALDLVDISCAGVAVARDSKPEELDSKERQLQLIQVEIKALERDEDADSTTKDRLKLARQKEASLQEELEPLRQRYNEEKHGHEELTQAKKKLDELENKALDAERRYDTATAADLRYFAIPDIKKQIEKLEDQVAEEERRAGANSMIQNVVDSDTISETAARLTGIPVKKLSESENEKLIHMERDLSSEVVGQMDAIKAVSNAVRLSRSGLANPRQPASFLFLGLSGSGKTELAKKVAGFLFNDEDMMIRVDCSELSEKYAVSKLLGTTAGYVGYDEGGFLTNQLQYKPYSVLLFDEVEKAHPDVLTVMLQMLDDGRITSGQGKTIDCSNCIVIMTSNLGAEFINSQQGSKIQESTKNLVMGAVRQHFRPEFLNRISSIVIFNKLSRKAIHKIVDIRLKEIEERFEQNDKHYKLNLTQEAKDFLAKYGYSDDMGARPLNRLIQNEILNKLALRILKNEIKDKETVNVVLKKGKSRDENVPEEAEECLEVLPNHEATIGADTLGDDDNEDSMEIDDDLD

SEQ ID NO: 31383 - protein, 461 aa, Saccharomyces cerevisiae [sequence omitted]

SEQ ID NO: 31384 - protein, 563 aa, Saccharomyces cerevisiae
MSEITLGKYLFERLKQVNVNTVFGLPGDFNLSLLDKIYEVEGMRWAGNANELNAAYAADGYARIKGMSCIITTFGVGELSALNGIAGSYAEHVGVLHVVGVPSISAQAKQLLLHHTLGNGDFTVFHRMSANISETTAMITDIATAPAEIDRCIRTTYVTQRPVYLGLPANLVDLNVPAKLLQTPIDMSLKPNDAESEKEVIDTILALVKDAKNPVILADACCSRHDVKAETKKLIDLTQFPAFVTPMGKGSIDEQHPRYGGVYVGTLSKPEVKEAVESADLILSVGALLSDFNTGSFSYSYKTKNIVEFHSDHMKIRNATFPGVQMKFVLQKLLTTIADAAKGYKPVAVPARTPANAAVPASTPLKQEWMWNQLGNFLQEGDVVIAETGTSAFGINQTTFPNNTYGISQVLWGSIGFTTGATLGAAFAAEEIDPKKRVILFIGDGSLQLTVQEISTMIRWGLKPYLFVLNNDGYTIEKLIHGPKAQYNEIQGWDHLSLLPTFGAKDYETHRVATTGEWDKLTQDKSFNDNSKIRMIEIMLPVFDAPQNLVEQAKLTAATNAKQ

SEQ ID NO: 31385 - protein, 592 aa, Saccharomyces cerevisiae
MLSLSAKNHFTVSNSITHVIKSYHIRTLTSSAEKMPHITTPFSTSASSTKLKAFRKVRPVLQRHSSSWIVAQNHRRSLSGQSSLNDLRHLNRFPHHTLKTSNNEFYPAEQLTLEDVNENVLKAKYAVRGAIPMRAEELKAQLEKDPQSLPFDRIINANIGNPQQLQQKPLTYYRQVLSLLQYPELLNQNEQQLVDSKLFKLDAIKRAKSLMEDIGGSVGAYSSSQGVEGIRKSVAEFITKRDEGEISYPEDIFLTAGASAAVNYLLSIFCRGPETGVLIPIPQYPLYTATLALNNSQALPYYLDENSGWSTNPEEIETVVKEAIQNEIKPTVLVVINPGNPTGAVLSPESIAQIFEVAAKYGTVVIADEVYQENIFPGTKFHSMKKILRHLQREHPGKFDNVQLASLHSTSKGVSGECGQRGGYMELTGFSHEMRQVILKLASISLCPVVTGQALVDLMVRPPVEGEESFESDQAERNSIHEKLITRAMTLYETFNSLEGIECQKPQGAMYLFPKIDLPFKAVQEARHLELTPDEFYCKKLLESTGICTVPGSGFGQEPGTYHLRTTFLAPGLEWIKKWESFHKEFFDQYRD

SEQ ID NO: 31386 - protein, 893 aa, Saccharomyces cerevisiae
MSREGYPNFEEVEIPDFQETNNTVPDLDDLELEYDQYKNNENNDTFNDKDLESNSVAKHNAVNSSKGVKGSKIDYFNPSDVSLYDNSVSQFEETTVSLKEYYDHSIRSHLTVKGACSYLKSVFPIINWLPHYNFSWFTADLIAGITIGCVLVPQSMSYAQVATLPAQYGLYSSFIGAYSYSFFATSKDVCIGPVAVMSLQTAKVIADVTAKYPDGDSAITGPVIATTLALLCGIISAAVGFLRLGFLVELISLNAVAGFMTGSAFNILWGQVPALMGYNSLVNTRAATYKVVIETLKHLPDTKLDAVFGLIPLFLLYVWKWWCGTYGPRLNDRYNSKNPRLHKIIKWTYFYAQASRNGIIIIVFTCIGWAITRGKSKSERPISILGSVPSGLKEVGVFHVPPGLMSKLGPNLPASIIVLLLEHIAISKSFGRINDYKVVPDQELIAIGVSNLLGTFFNAYPATGSFSRSALKAKCNVRTPLSGLFSGSCVLLALYCLTGAFFYIPKATLSAVIIHAVSDLLASYQTTWNFWKMNPLDFICFIVTVLITVFASIEDGIYFAMCWSCAMLILKVAFPAGKFLGRVEVAEVTDAYVRPDSDVVSYVSENNNGISTLEDGGEDDKESSTKYVTNSSKKIETNVQTKGFDSPSSSISQPRIKYHTKWIPFDHKYTRELNPDVQILPPPDGVLVYRLSESYTYLNCSRHYNIITEEVKKVTRRGQLIRHRKKSDRPWNDPGPWEAPAFLKNLKFWKKRENDPESMENAPSTSVDVERDDRPLLKILCLDFSQVAQTDATALQSLVDLRKAINQYADRQVEFHFVGIISPWVKRGLISRGFGTLNEEYSDESIVAGHTSYHVARVPQGEENPEKYSVYTASGTNLPFFHIDIPDFAKWDI

SEQ ID NO: 31387 - protein, 563 aa, Saccharomyces cerevisiae
MSEITLGKYLFERLSQVNCNTVFGLPGDFNLSLLDKLYEVKGMRWAGNANELNAAYAADGYARIKGMSCIITTFGVGELSALNGIAGSYAEHVGVLHVVGVPSISSQAKQLLLHHTLGNGDFTVFHRMSANISETTAMITDIANAPAEIDRCIRTTYTTQRPVYLGLPANLVDLNVPAKLLETPIDLSLKPNDAEAEAEVVRTVVELIKDAKNPVILADACASRHDVKAETKKLMDLTQFPVYVTPMGKGAIDEQHPRYGGVYVGTLSRPEVKKAVESADLILSIGALLSDFNTGSFSYSYKTKNIVEFHSDHIKIRNATFPGVQMKFALQKLLDAIPEVVKDYKPVAVPARVPITKSTPANTPMKQEWMWNHLGNFLREGDIVIAETGTSAFGINQTTFPTDVYAIVQVLWGSIGFTVGALLGATMAAEELDPKKRVILFIGDGSLQLTVQEISTMIRWGLKPYIFVLNNNGYTIEKLIHGPHAEYNEIQGWDHLALLPTFGARNYETHRVATTGEWEKLTQDKDFQDNSKIRMIEVMLPVFDAPQNLVKQAQLTAATNAKQ

SEQ ID NO: 31388 - protein, 340 aa, Saccharomyces cerevisiae
MILSQRRMLSSKQLIENLIRYKFHKTPYTRSSIWPFKRNSAVIILLFIGMKGELRVLLTKRSRTLRSFSGDVSFPGGKADYFQETFESVARREAEEEIGLPHDPEVLHKEFGMKLDNLVMDMPCYLSRTFLSVKPMVCFLYKDKLEKHEDKYKVPLDIRKFFGKLNPGETSSLFSVPLNDLVIHLLPEADEDVKSYQAEYFERKEYKLNWGGIKWLIMHYHFHVANNNEMPWLQTIEDLSSSDEDGVDGGIFRFRDLWGLTCKILFDVSCIANGLMDEKLKGELGHEDLIVGLHDYGNQMQPNGRSEWEIGMINGDRNLKYSDVIPEYYMKHLLECRSLW

SEQ ID NO: 31389 - protein, 695 aa, Saccharomyces cerevisiae
MIVRMIRLCKGPKLLRSQFASASALYSTKSLFKPPMYQKAEINLIIPHRKHFLLRSIRLQSDIAQGKKSTKPTLKLSNANSKSSGFKDIKRLFVLSKPESKYIGLALLLILISSSVSMAVPSVIGKLLDLASESDGEDEEGSKSNKLYGFTKKQFFTALGAVFIIGAVANASRIIILKVTGERLVARLRTRTMKAALDQDATFLDTNRVGDLISRLSSDASIVAKSVTQNVSDGTRAIIQGFVGFGMMSFLSWKLTCVMMILAPPLGAMALIYGRKIRNLSRQLQTSVGGLTKVAEEQLNATRTIQAYGGEKNEVRRYAKEVRNVFHIGLKEAVTSGLFFGSTGLVGNTAMLSLLLVGTSMIQSGSMTVGELSSFMMYAVYTGSSLFGLSSFYSELMKGAGAAARVFELNDRKPLIRPTIGKDPVSLAQKPIVFKNVSFTYPTRPKHQIFKDLNITIKPGEHVCAVGPSGSGKSTIASLLLRYYDVNSGSIEFGDEDIRNFNLRKYRRLIGYVQQEPLLFNGTILDNILYCIPPEIAEQDDRIRRAIGKANCTKFLANFPDGLQTMVGARGAQLSGGQKQRIALARAFLLDPAVLILDEATSALDSQSEEIVAKNLQRRVERGFTTISIAHRLSTIKHSTRVIVLGKHGSVVETGSFRDLIAIPNSELNALLAEQQDEEGKGGVIDLDNSVAREV

SEQ ID NO: 31390 - protein, 1098 aa, Saccharomyces cerevisiae
MALIVASLFLPYQPQFELDTSLPENSQVDSSLVNIQAMANDQQQQRALSNNISQESLVAPAPEQGVPPAISRSATRSPSAFNRASSTTNTATLDDLVSSDIFMENLTANATTSHTPTSKTMLKPRKNGSVERFFSPSSNIPTDRIASPIQHEHDSGSRIASPIQQQQQDPTTNLLKNVNKSLLVHSLLNNTSQTSLEGPNNHIVTPKSRAGNRPTSAATSLVNRTKQGSASSGSSGSSAPPSIKRITPHLTASAAKQRPLLAKQPSNLKYSELADISSSETSSQHNESDPDDLTTAPDEEYVSDLEMDDAKQDYKVPKFGGYSNKSKLKKYALLRSSQELFSRLPWSIVPSIKGNGAMKNAINTAVLENIIPHRHVKWVGTVGIPTDEIPENILANISDSLKDKYDSYPVLTDDDTFKAAYKNYCKQILWPTLHYQIPDNPNSKAFEDHSWKFYRNLNQRFADAIVKIYKKGDTIWIHDYHLMLVPQMVRDVLPFAKIGFTLHVSFPSSEVFRCLAQREKILEGLTGADFVGFQTREYARHFLQTSNRLLMADVVHDEELKYNGRVVSVRFTPVGIDAFDLQSQLKDGSVMQWRQLIRERWQGKKLIVCRDQFDRIRGIHKKLLAYEKFLVENPEYVEKSTLIQICIGSSKDVELERQIMIVVDRINSLSTNISISQPVVFLHQDLDFSQYLALSSEADLFVVSSLREGMNLTCHEFIVCSEDKNAPLLLSEFTGSASLLNDGAIIINPWDTKNFSQAILKGLEMPFDKRRPQWKKLMKDIINNDSTNWIKTSLQDIHISWQFNQEGSKIFKLNTKTLMEDYQSSKKRMFVFNIAEPPSSRMISILNDMTSKGNIVYIMNSFPKPILENLYSRVQNIGLIAENGAYVSLNGVWYNIVDQVDWRNDVAKILEDKVERLPGSYYKINESMIKFHTENAEDQDRVASVIGDAITHINTVFDHRGIHAYVYKNVVSVQQVGLSLSAAQFLFRFYNSASDPLDTSSGQITNIQTPSQQNPSDQEQQPPASPTVSMNHIDFACVSGSSSPVLEPLFKLVNDEASEGQVKAGHAIVYGDATSTYAKEHVNGLNELFTIISRIIED

SEQ ID NO: 31391 - protein, 526 aa, Saccharomyces cerevisiae
MSTIPFRKNYVFKNWAGIYSAKPERYFQPSSIDEVVELVKSARLAEKSLVTVGSGHSPSNMCVTDEWLVNLDRLDKVQKFVEYPELHYADVTVDAGMRLYQLNEFLGAKGYSIQNLGSISEQSVAGIISTGSHGSSPYHGLISSQYVNLTIVNGKGELKFLDAENDPEVFKAALLSVGKIGIIVSATIRVVPGFNIKSTQEVITFENLLKQWDTLWTSSEFIRVWWYPYTRKCVLWRGNKTTDAQNGPAKSWWGTKLGRFFYETLLWISTKIYAPLTPFVEKFVFNRQYGKLEKSSTGDVNVTDSISGFNMDCLFSQFVDEWGCPMDNGLEVLRSLDHSIAQAAINKEFYVHVPMEVRCSNTTLPSEPLDTSKRTNTSPGPVYGNVCRPFLDNTPSHCRFAPLENVTNSQLTLYINATIYRPFGCNTPIHKWFTLFENTMMVAGGKPHWAKNFLGSTTLAAGPVKKDTDYDDFEMRGMALKVEEWYGEDLKKFRKIRKEQDPDNVFLANKQWAIINGIIDPSELSD

SEQ ID NO: 31392 - protein, 309 aa, Saccharomyces cerevisiae
MSHTETQTQQSHFGVDFLMGGVSAAIAKTGAAPIERVKLLMQNQEEMLKQGSLDTRYKGILDCFKRTATHEGIVSFWRGNTANVLRYFPTQALNFAFKDKIKSLLSYDRERDGYAKWFAGNLFSGGAAGGLSLLFVYSLDYARTRLAADARGSKSTSQRQFNGLLDVYKKTLKTDGLLGLYRGFVPSVLGIIVYRGLYFGLYDSFKPVLLTGALEGSFVASFLLGWVITMGASTASYPLDTVRRRMMMTSGQTIKYDGALDCLRKIVQKEGAYSLFKGCGANIFRGVAAAGVISLYDQLQLIMFGKKFK

SEQ ID NO: 31393 - protein, 1054 aa, Saccharomyces cerevisiae
MTIIVASLFLPYTPQFEADVTNSDTAKLVESSMIKVDCNNQELSNNKQERSSSVTSASSHYIGLPQEAQINGEPLQRANVGSPATGVNYHNEMEMLSSEQFLEELTANATHAANSGIPPANNPVSSGSTAQRPSVEEFFSAPSARVCSPSQEASASSISASRSSAHHNDLSSSLMKNPNLSFDSHPPRVRSSSKSAVITPVSKSVPDVDPAVVDVAKVREEFQQQASLPSMKRVSGSTAGDSSIASSSSNLRYSQQFQDNFIEDTDSEDDIDSDLETDATKKYNVPKFGGYSNNAKLRASLMRNSYELFKHLPWTIVDSDKGNGSLKNAVNIAVAEKTVKEPVSWVGTMGIPTDELPHEVCHKISKKLEQDFSSFPVVTDDITFKGAYKNYAKQILWPTLHYQIPDNPNSKAFEDHSWDYYQKVNQKFSDRIVSVYKPGDTIWIHDYHLMLVPQMVREKLPKAKIGFFLHVSFPSSEVFRCLANRERILEGIIGANFVGFQTKEYKRHFLQTCNRLLAADVSNDEVKYHCNIVSVMYAPIGIDYYHLTSQLRNGSVLEWRQLIKERWRNKKLIVCRDQFDRIRGLQKKMLAYERFLIENPEYIEKVVLIQICIGKSSDPEYERQIMVVVDRINSLSSNISISQPVVFLHQDLDFAQYLALNCEADVFLVDALREGMNLTCHEFIVSSFEKNAPLLLSEFTGSSSVLKEGAILINPWDINHVAQSIKRSLEMSPEEKRRRWKKLFKSVIEHDSDNWITKCFEYINNAWESNQETSTVFNLAPEKFCADYKASKKHLFIFKISEPPTSRMLSLLSELSSNNIVYVLSSFTKNTFESLYNGVLNIGLIAENGAYVRVNGSWYNIVEELDWMKEVAKIFDEKVERLPGSYYKIADSMIRFHTENADDQDRVPTVIGEAITHINTLFDDRDIHAYVHKDIVFVQQTGLALAAAEFLMKFYNSGVSPTDNSRISLSRTSSSMSVGNNKKHFQNQVDFVCVSGSTSPIIEPLFKLVKQEVEKNNLKFGYTILYGSSRSTYAKEHINGVNELFTILHDLTAA

SEQ ID NO: 31394 - protein, 532 aa, Saccharomyces cerevisiae
MKAFTSLLCGLGLSTTLAKAISLQRPLGLDKDVLLQAAEKFGLDLDLDHLLKELDSNVLDAWAQIEHLYPNQVMSLETSTKPKFPEAIKTKKDWDFVVKNDAIENYQLRVNKIKDPKILGIDPNVTQYTGYLDVEDEDKHFFFWTFESRNDPAKDPVILWLNGGPGCSSLTGLFFELGPSSIGPDLKPIGNPYSWNSNATVIFLDQPVNVGFSYSGSSGVSNTVAAGKDVYNFLELFFDQFPEYVNKGQDFHIAGESYAGHYIPVFASEILSHKDRNFNLTSVLIGNGLTDPLTQYNYYEPMACGEGGEPSVLPSEECSAMEDSLERCLGLIESCYDSQSVWSCVPATIYCNNAQLAPYQRTGRNVYDIRKDCEGGNLCYPTLQDIDDYLNQDYVKEAVGAEVDHYESCNFDINRNFLFAGDWMKPYHTAVTDLLNQDLPILVYAGDKDFICNWLGNKAWTDVLPWKYDEEFASQKVRNWTASITDEVAGEVKSYKHFTYLRVFNGGHMVPFDVPENALSMVNEWIHGGFSL

SEQ ID NO: 31395 - protein, 350 aa, Saccharomyces cerevisiae
MSKKPIVLKLGKDAFGDQAWGELEKIADVITIPESTTREQFLREVKDPQNKLSQVQVITRTARSVKNTGRFDEELALALPSSVVAVCHTGAGYDQIDVEPFKKRHIQVANVPDLVSNATADTHVFLLLGALRNFGIGNRRLIEGNWPEAGPACGSPFGYDPEGKTVGILGLGRIGRCILERLKPFGFENFIYHNRHQLPSEEEHGCEYVGFEEFLKRSDIVSVNVPLNHNTHHLINAETIEKMKDGVVIVNTARGAVIDEQAMTDALRSGKIRSAGLDVFEYEPKISKELLSMSQVLGLPHMGTHSVETRKKMEELVVENAKNVILTGKVLTIVPELQNEDWPNESKPLV

SEQ ID NO: 31396 - protein, 499 aa, Saccharomyces cerevisiae
MSYNFTGTPTGEGTGGNSLTTDLNTQFDLANMGWIGVASAGVWIMVPGIGLLYSGLSRKKHALSLLWASMMASAVCIFQWFFWGYSLAFSHNTRGNGFIGTLEFFGFRNVLGAPSSVSSLPDILFAVYQGMFAAVTGALMLGGACERARLFPMMVFLFLWMTIVYCPIACWVWNAEGWLVKLGSLDYAGGLCVHLTSGHGGLVYALILGKRNDPVTRKGMPKYKPHSVTSVVLGTVFLWFGWMFFNGGSAGNATIRAWYSIMSTNLAAACGGLTWMVIDYFRCGRKWTTVGLCSGIIAGLVGITPAAGFVPIWSAVVIGVVTGAGCNLAVDLKSLLRIDDGLDCYSIHGVGGCIGSVLTGIFAADYVNATAGSYISPIDGGWINHHYKQVGYQLAGICAALAWTVTVTSILLLTMNAIPFLKLRLSADEEELGTDAAQIGEFTYEESTAYIPEPIRSKTSAQMPPPHENIDDKIVGNTDAEKNSTPSDASSTKNTDHIV

SEQ ID NO: 31397 - protein, 713 aa, Saccharomyces cerevisiae
MVTNNGDGEHLGIRRNGNLRHPSNNMKIPRRAQSTVLNSNPFYSRKYSMSTLTPRDICRSVDSRVFVDMSSPNFQTLEDPHRDEIINSVRLNYLNSSKRSSVSHGNEAIPRVNPTKNSSASTIAAANVDSDDDETNLSSAGGDITHDIYKLVKAEDPKRLRRPRSMENVTPKIEHHTKLSSASGLNVPGGFRREFIVNKKRQEHQLNDSASSDFTSHESDSINQSSPSSNQDIDKVPFLTRNFLEFLYVFGHFAGESFEDDFIPDSSNMMIRGEDERSALLSRPDHMKVLPSAKGTTSTKKVFLILLKSFIGTGVLFLPNAFHNGGLFFSVSMLAFFGIYSYWCYYILVQAKSSCGVSSFGDIGLKLYGPWMRIIILFSLVITQVGFSGAYMIFTAKNLQAFLDNVFHVGVLPLSYLMVFQTIIFIPLSFIRNISKLSLPSLLANFFIMAGLVIVIIFTAKRLFFDLMGTPAMGVVYGLNADRWTLFIGTAIFAFEGIGLIIPVQDSMRNPEKFPLVLALVILTATILFISIATLGYLAYGSNVQTVILLNLPQSNIFVNLIQLFYSIAIMLSTPLQLFPAIKIIENKFFPKFTKIYVKHDDLTTRVELRPNSGKLNWKIKWLKNFIRSIIVIIVVSIAYFGSDNLDKFVSVIGSLACIPLVYIYPSMLHLRGNSLPETKGEFWRFKPMLDTILIFFGIASMLYTSYQSIFGV

SEQ ID NO: 31398 - protein, 386 aa, Saccharomyces cerevisiae
MKVISLKKDSFNKGGAVITLLPEDKEDLFTVYQIVDKDDELIFKKKFTSKLDEAGKKKSTDLVKLKIKVISEDFDMKDEYLKYKGVTVTDESGASNVDIPVGKYLSFTLDYVYPFTIIKQNFNKFMQKLLNEACNIEYKSDTAAVVLQEGIAHVCLVTSSSTILKQKIEYSMPKKKRTTDVLKFDEKTEKFYKAIYSAMKKDLNFDKLKTIILCSPGFYAKILMDKIFQYAEEEHNKKILDNKGMFFIAHCSTGYLQGINEVLKNPLYASKLQDTKYSKEIMVMDEFLLHLNKDDDKAWYGEKEVVKAAEYGAISYLLLTDKVLHSDNIAQREEYLKLMDSVESNGGKALVLSTLHSLGEELDQLTGIACILKYPLPDLDEDDGEE

SEQ ID NO: 31399 - protein, 496 aa, Saccharomyces cerevisiae
MSMSNIVVFGGDSHPELVTKICENLDIHPSKVELGKFSNGETNIALRESVREKDVYIIQSGCGQVNDTFMQLLILISACKSASASRVTAVMPYLCYSRQPDIPYTAKGAPIISKPKENYTFESHPGTPVSSSLMTQRPGAESSLKSLDSAIRSTINLENPQPIRTPNSSATANNNFDIKKTLSFSRIPMIPGGKLQNTSNSTDAGELFNAQNAGYKLWVVQAGTLIAHLLSAAGADHVITMDLHDPQFPGFFDIPVDNLYCKPIAQNYIQHRIPDYQDAVIVSPDAGGAKRATAIADALELSFALIHKERRSQLLKGPPDATLTSGGSLPVSPRPLVTTLVSSQNTTSSGATGVAALEMKKTTSTSSTSSQSSNSSKFVQTTMLVGDVRNKVCIIVDDLVDTSYTITRAAKLLKDQGSTKVYALITHGVFSGDALERIGQSSIDKLIISNTVPQDRTLQYLGKDRVDVIDVSCIIGEAIRRIHNGESISMLFEHGW

SEQ ID NO: 31400 - protein, 447 aa, Saccharomyces cerevisiae
MPKESEVINSEFHVDVQDPERLNGHPVAKFINKLSGQPESYVNRTNYIFGRTLGAGSFGVVRQARKLSTNEDVAIKILLKKALQGNNVQLQMLYEELSILQKLSHPNIVSFKDWFESKDKFYIVTQLATGGELFDRILSRGKFTEVDAVEIIVQILGAVEYMHSKNVVHRDLKPENVLYVDKSENSPLVIADFGIAKQLKGEEDLIYKAAGSLGYVAPEVLTQDGHGKPCDIWSIGVITYTLLCGYSPFIAESVEGFMEECTASRYPVTFHMPYWDNISIDVKRFILKALRLNPADRPTATELLDDPWITSKRVETSNILPDVKKGFSLRKKLRDAIEIVKLNNRIKRLRNMYSLGDDGDNDIEENSLNESLLDGVTHSLDDLRLQSQKKGGELTEEQMKLKSALTKDAFVQIVKAATKNKHKVLAGEEEDDSKKTLHDDRESKSED

SEQ ID NO: 31401 - protein, 572 aa, Saccharomyces cerevisiae
MSPLTRTVAIKKTVKVLSKCQSGREYTQKFLQRAYSTSHANSTYYSRTKLFISSHSKALNIALLSGSLLLTYSYYSPKKILSLDTINGIKDYSTNTSGNINMPSPNPKGTETQKSQRSQNDQSVLILNDSKIEAKLHDREESHFVNRGTGIFRYDVAQLPSNHPIEDDHVEQIITIPIESEDGKSIEKDLYFFGIFDGHGGPFTSEKLSKDLVRYVAYQLGQVYDQNKTVFHSDPNQLIDSAISKGFLKLDNDLVIESFRKLFQDPNNTNIANTLPAISGSCALLSLYNSTNSILKVAVTGDSRALICGLDNEGNWTVKSLSTDQTGDNLDEVRRIRKEHPGEPNVIRNGRILGSLQPSRAFGDYRYKIKEVDGKPLSDLPEVAKLYFRREPRDFKTPPYVTAEPVITSAKIGENTKFMVMGSDGLFELLTNEEIASLVIRWMDKNMNLAPVKAEPGKLPKVIDVSEDKEAQRPAFRYKDNNSSSPSGSNPEYLIEDKNVATHLIRNALSAGGRKEYVSALVSIPSPMSRRYRDDLTVTVAFFGDSGTPSIVSNATSIVMNPEATTKPKPRL

SEQ ID NO: 31402 - protein, 809 aa, Saccharomyces cerevisiae
MSSVEELTQLFSQVGFEDKKVKEIVKNKKVSDSLYKLIKETPSDYQWNKSTRALVHNLASFVKGTDLPKSELIVNGIINGDLKTSLQVDAAFKYVKANGEASTKMGMNENSGVGIEITEDQVRNYVMQYIQENKERILTERYKLVPGIFADVKNLKELKWADPRSFKPIIDQEVLKLLGPKDERDLIKKKTKNNEKKKTNSAKKSSDNSASSGPKRTMFNEGFLGDLHKVGENPQAYPELMKEHLEVTGGKVRTRFPPEPNGYLHIGHSKAIMVNFGYAKYHNGTCYLRFDDTNPEKEAPEYFESIKRMVSWLGFKPWKITYSSDYFDELYRLAEVLIKNGKAYVCHCTAEEIKRGRGIKEDGTPGGERYACKHRDQSIEQNLQEFRDMRDGKYKPGEAILRMKQDLNSPSPQMWDLIAYRVLNAPHPRTGTKWRIYPTYDFTHCLVDSMENITHSLCTTEFYLSRESYEWLCDQVHVFRPAQREYGRLNITGTVLSKRKIAQLVDEKFVRGWDDPRLFTLEAIRRRGVPPGAILSFINTLGVTTSTTNIQVVRFESAVRKYLEDTTPRLMFVLDPVEVVVDNLSDDYEELATIPYRPGTPEFGERTVPFTNKFYIERSDFSENVDDKEFFRLTPNQPVGLIKVSHTVSFKSLEKDEAGKIIRIHVNYDNKVEEGSKPKKPKTYIQWVPISSKYNSPLRVTETRVYNQLFKSENPSSHPEGFLKDINPESEVVYKESVMEHNFGDVVKNSPWVVDSVKNSEFYVEEDKDSKEVCRFQAMRVGYFTLDKESTTSKVILNRIVSLKDATSK

SEQ ID NO: 31403 - protein, 800 aa, Saccharomyces cerevisiae
MASVPKRHTYGGNVVTDRDRHSLQRNNEILHPIHKNQRKHATFGPYIIGSTLGEGEFGKVKLGWTKASSSNEVPKQVAIKLIRRDTIKKDADKEIKIYREINALKHLTHPNIIYLEEVLQNSKYIGIVLEFVSGGEFYKYIQRKRRLKESSACRLFAQLISGVNYMHYKGLVHRDLKLENLLLDKHENLVITDFGFVNEFFEDNELMKTSCGSPCYAAPELVVSTKAYEARKADVWSCGVILYAMLAGYLPWDDDHENPTGDDIARLYKYITQTPLKFPEYITPIPRDLLRRILVPNPRRRINLQTIKRHVWLKPHEAFLSIQPNYWDEHLQKERPKPPNKGDVGRHSTYSSSASSYSKSRDRNSLIIESTLEQHRMSPQLATSRPASPTFSTGSKVVLNDTKNDMKESNINGERTSASCRYTRDSKGNGQTQIEQVSARHSSRGNKHTSVAGLVTIPGSPTTARTRNAPSSKLTEHVKDSSQTSFTQEEFHRIGNYHVPRSRPRPTSYYPGLSRNTADNSLADIPVNKLGSNGRLTDAKDPVPLNAIHDTNKATISNNSIMLLSEGPAAKTSPVDYHYAIGDLNHGDKPITEVIDKINKDLTHKAAENGFPRESIDPESTSTILVTKEPTNSTDEDHVESQLENVGHSSNKSDASSDKDSKKIYEKKRFSFMSLYSSLNGSRSTVESRTSKGNAPPVSSRNPSGQSNRSNIKITQQQPRNLSDRVPNPDKKINDNRIRDNAPSYAESENPGRSVRASVMVSTLREENRSELSNEGNNVEAQTSTARKVLNFFKRRSMRV

SEQ ID NO: 31404 - protein, 367 aa, Saccharomyces cerevisiae
MQRNSLVNIKLNANSPSKKTTTRPNTSRINKPWRISHSPQQRNPNSKIPSPVREKLNRLPVNNKKFLDMESSKIPSPIRKATSSKMIHENKKLPKFKSLSLDDFELGKKLGKGKFGKVYCVRHRSTGYICALKVMEKEEIIKYNLQKQFRREVEIQTSLNHPNLTKSYGYFHDEKRVYLLMEYLVNGEMYKLLRLHGPFNDILASDYIYQIANALDYMHKKNIIHRDIKPENILIGFNNVIKLTDFGWSIINPPENRRKTVCGTIDYLSPEMVESREYDHTIDAWALGVLAFELLTGAPPFEEEMKDTTYKRIAALDIKMPSNISQDAQDLILKLLKYDPKDRMRLGDVKMHPWILRNKPFWENKRL

SEQ ID NO: 31405 - protein, 865 aa, Saccharomyces cerevisiae
MSYTNKRHTYYGGFTNDLSDTFQYPQRTDEQRRKHVTFGPYILGSTLGEGEFGKVKLGWPKNFSNSSNSTFDFPKQVAIKLIKRDSISNDYRKEVKIYREINALKHLSHPNIVKLEEVLQNSRYIGIVLEYACGGEFYKYIQKKRRLKEMNACRLFSQLISGVHYIHSKGLVHRDLKLENLLLDKNENLVITDFGFVNEFCSRNELMKTSCGSPCYAAPELVISAEPYEARKADIWSCGVILYAILAGYLPWDDDPNNPEGSDIGRLYNYINSTPLKFPDYILPIPRDLLRRMLVSDPKKRINLKQIKKHEWLKPHSSFLSITPDEWDKLNNTQSVFRLAKPRRRYGSRPQSSCSTSSLGSRSDKRDSLVIDSTLITFPAPPQESQNHIITRPASIASDQRLSPIRRSNRHNRSNSAASVALQAVVNADREYVLSHEQSLSPVQNIRQTTGNMTASLSPPPAISPGDIIIETTPIKRNTISGSSIVPSLEEESSTTMQTSKIQPNNMASSQNHQYNKNKTQNSLQSAKNFYRTSSSSHTKPRPTSYHPGSYTTPPYNSNTLSIYEINEKAKSSASSQTLNQRDTSPFDSTPYLALDTCITSSSSIESSPKLITHGQFSVAKPSVDLQSVSGDLIKYKRDADVVTRIYDEKYKQKRKSLRYSGIFSDISCDTVTEESDELRPPESPLQQHEGQESIDKAKTEDTSEKGSKSSNIAKATAQKHVNNHLERSLNEAESTKKRFSFLSLYSYDTSKSSLYSSMDSKRKPSPPSQRRPKKDDSYQTNSKNHYITASNMQTSHQVSKDLPAPTMVQNKCTLETKKAVRSNRSSIMVSEVNKASVDNKAAQSPEHSTAKRVLGFFKRRSMKI

SEQ ID NO: 31406 - protein, 150 aa, Saccharomyces cerevisiae
MFLPKFNPIRSFSPILRAKTLLRYQNRMYLSTEIRKAIEDAIESAPVVLFMKGTPEFPKCGFSRATIGLLGNQGVDPAKFAAYNVLEDPELREGIKEFSEWPTIPQLYVNKEFIGGCDVITSMARSGELADLLEEAQALVPEEEEETKDR

SEQ ID NO: 31407 - protein, 398 aa, Saccharomyces cerevisiae
MSQNVYIVSTARTPIGSFQGSLSSKTAVELGAVALKGALAKVPELDASKDFDEIIFGNVLSANLGQAPARQVALAAGLSNHIVASTVNKVCASAMKAIILGAQSIKCGNADVVVAGGCESMTNAPYYMPAARAGAKFGQTVLVDGVERDGLNDAYDGLAMGVHAEKCARDWDITREQQDNFAIESYQKSQKSQKEGKFDNEIVPVTIKGFRGKPDTQVTKDEEPARLHVEKLRSARTVFQKENGTVTAANASPINDGAAAVILVSEKVLKEKNLKPLAIIKGWGEAAHQPADFTWAPSLAVPKALKHAGIEDINSVDYFEFNEAFSVVGLVNTKILKLDPSKVNVYGGAVALGHPLGCSGARVVVTLLSILQQEGGKIGVAAICNGGGGASSIVIEKI

SEQ ID NO: 31408 - protein, 754 aa, Saccharomyces cerevisiae
MTSNNSLLGRGRMSYSSTAPPRFKRSVDQRDTFSDNFDYDKDSSNRGRTYIAASNSTTGVPPPNNSRSGCTNNTNNTNNTSNTSNTNNNDSVDENTVFETLPYYLPCFSWLPEYTFNKLWGDVIAGISVASFQIPLALSYTTSIAHVPPLCGLYSLAISPFVYGILGSVPQMIVGPESAISLVVGQAVESITLHKENVSLIDISTVITFVSGTILLFSGISRFGFLGNVLSKALLRGFISSVGLVMIINSLISELKLDKFLVSLPQHYHTPFEKILFLIDYAPAQYHIPTAIFSGCCLIVLFLTRLLKRKLMKYHKSAIFFPDILLVVIVTILISMKFNLKHRYGISIIGDFSMDNFDELKNPLTRPRRKLIPDLFSASLIVAMLGFFESTTASKSLGTTYNLTVSSNRELVALGFMNIVISLFGALPAFGGYGRSKINALSGAQSVMSGVFMGVITLITMNLLLQFVHYIPNCVLSVITTIIGISLLEEVPGDIKFHLRCGGFSELFVFAVTFCTTIFYSIEAGICIGCVYSIINIIKHSAKSRIQILARVAGTSNFTNLDDYMMNMKRNSLDVEGTEEIEGCMIVRIPEPLTFTNSEDLKQRLDRIERYGSSKIHPGRKSLRSKDSIKYVIFDLGGMTSIDSSAAQVLEEIITSYKRRNVFIYLVNVSINDKVRRRLFKAGVAASVERAQANNNENNTSNTFSDAGETYSPYFDSIDAALYEIEKMKIKGNNVPNNDSESFMSNTLFNSSLV

SEQ ID NO: 31409 - protein, 370 aa, Saccharomyces cerevisiae
MAEASIEKTQILQKYLELDQRGRIIAEYVWIDGTGNLRSKGRTLKKRITSIDQLPEWNFDGSSTNQAPGHDSDIYLKPVAYYPDPFRRGDNIVVLAACYNNDGTPNKFNHRHEAAKLFAAHKDEEIWFGLEQEYTLFDMYDDVYGWPKGGYPAPQGPYYCGVGAGKVYARDMIEAHYRACLYAGLEISGINAEVMPSQWEFQVGPCTGIDMGDQLWMARYFLHRVAEEFGIKISFHPKPLKGDWNGAGCHANVSTKEMRQPGGTKYIEQAIEKLSKRHAEHIKLYGSDNDMRLTGRHETASMTAFSSGVANRGSSIRIPRSVAKEGYGYFEDRRPASNIDPYLVTGIMCETVCGAIDNADMTKEFERESS

SEQ ID NO: 31410 - protein, 363 aa, Prunus persica
MESTDSSTASQQQQQQQPQPPPQPNLPPGFRFHPTDEELVVHYLKKKVTSAPLPVAIIAEIELYKFDPWELPAKATFGEQEWYFFSPRDRKYPNGARPNRAATSGYWKATGTDKPVLTSGGTQKVGVKKALVFYGGKPPKGIKTNWIMHEYRLADSKTSNKPPGCDLGNKKNSLRLDDWVLCRIYKKNNSHRPMDLEREDSMEDMMGPLMPPSISHVGHHQNMNLHLPKSNTNYGPPFIENDQIIFDGIMSSTDGSASLSNGTSQLPLKRSIVPSLYRNDQEDDQTAGASSSKRVVQLHQLDSGTNNSVAANNNSTSIANLLSQLPQTPPLHQHAMLGSLGDGLFRTPYQLPGMNWFSESNLG

SEQ ID NO: 31411 - protein, 360 aa, Nicotiana tabacum
MAFRLSHLSLALSLLALALAGVAIYRNTYEAMSKGFQTLSPELDLLESAASILTLDNNNAEQNSDSKLTQPLSPSACIFTAVRGVVNSAIDRERRMGASLIRLHFHDCFVDGCDGGVLLDDIPGSFQGEKTSPPNNNSARGFEVIEQAKQRVKDTCPNTPVSCADILAIAARDSVVKLGGQGYNVALGRRDARAANFTGALTQLPAPFDNLTVQIRKFNDKNFNAREMVALAGAHTVGFTRCATACNSNNVNPAARLQCNCSVTQNDTNLQQLDTTPAVFDRVYFQDLSRNQGILFSDQVLTGNTTTAAIVTTYSNNGAVFLGDFAAAMIKMGNLPPSPGVQLEIRDVCSRVNPSSVASM

SEQ ID NO: 31412 - protein, 93 aa, Saccharomyces cerevisiae
MVTPREPKKRTTRKKKDPNAPKRALSAYMFFANENRDIVRSENPDITFGQVGKKLGEKWKALTPEEKQPYEAKAQADKKRYESEKELYNATLA

SEQ ID NO: 31413 - protein, 489 aa, Saccharomyces cerevisiae
MARGDGHLWTETYDSSTVAFMILGAALVFFMVPGLGFLYSGLARRKSALALIWVVIMATLVGILQWYFWGYSLAFSKTATNNKFIGNLDSFGFRNVYGKISDDSTYPELIYAIFQMMFMCVALSIIAGATAERGKLFPHMVFLFVFATLVYCPITYWIWAPGGWAYQWGVLDWAGGGNIEILSAVAGFVYSYFLGRRKENLLINFRPHNVSMVTLGTSILWFGWLLFNAASSLSPNMRSVYAFMNTCLSATTGGMTWCLLDYRSEKKWSTVGLCSGIICGLVAATPSSGCITLYGSLIQGIIAGVVCNFATKIKYYLKVDDSLDLLAEHGIAGVVGLIFNALFAADWVIGMDGTTKHKGGWLTHNWKQMYIQIAYIGASAGYCAVVTAIICFVLGKIPGVHLRVTEEAEALGLDEDQIGEFAYDYVEVRRDYYQWGVDTDALHTTCNGANSASETNPTEDSQNSSLSSATVSGQNEKSNNPKLHHAKEA

SEQ ID NO: 31414 - protein, 572 aa, Saccharomyces cerevisiae
MCGIFAAFRHEDVHRYKPKALQLSKRIRHRGPDWSGNAIKNSTIFVHERLAIVGVESGAQPITSSDGEYMLCVNGEIYNHIQLREECADYEFGTLSDCEPIIPMYLKHDIDAPKYLDGMFAWTLYDAKQDRIVAARDPIGITTLYMGRSSASPKTVYFASELKCLTDDCDTITAFPPGHVYDSKTDKITRYFTPDWLDEKRIPSTPIDYMAIRHSLEKAVRKRLMAEVPYGVLLSGGLDSSLIASIAARETAKATNDVEPSTYDSKARHLAGIDDDGKLHTAGWTSLHSFAIGLPNAPDLQAARKVAKFIGSIHHEHTFTLQEGLDALDDVIYHLETYDVTTIRASTPMFLLSRKIKAQGVKMVLSGEGSDEIFGGYLYFAQAPSAAEFHTESVQRVKNLHLADCLRANKSTMAWGLEARVPFLDREFLQLCMNIDPNEKMIKPKEGRIEKYILRKAFDTTGEPDAKPYLPEEILWRQKEQFSDGVGYSWIDGLKDTAEAVISDEMFASPKAEWGSDIPTTKEAFWYRLKFDALFPQKTVADTVMRWIPKADWGCAEDPSGRYAQIHEKHIE

SEQ ID NO: 31415 - protein, 437 aa, Saccharomyces cerevisiae
MSTGDFLTKGIELVQKAIDLDTATQYEEAYTAYYNGLDYLMLALKYEKNPKSKDLIRAKFTEYLNRAEQLKKHLESEEANAAKKSPSAGSGSNGGNKKISQEEGEDNGGEDNKKLRGALSSAILSEKPNVKWEDVAGLEGAKEALKEAVILPVKFPHLFKGNRKPTSGILLYGPPGTGKSYLAKAVATEANSTFFSVSSSDLVSKWMGESEKLVKQLFAMARENKPSIIFIDEVDALTGTRGEGESEASRRIKTELLVQMNGVGNDSQGVLVLGATNIPWQLDSAIRRRFERRIYIPLPDLAARTTMFEINVGDTPCVLTKEDYRTLGAMTEGYSGSDIAVVVKDALMQPIRKIQSATHFKDVSTEDDETRKLTPCSPGDDGAIEMSWTDIEADELKEPDLTIKDFLKAIKSTRPTVNEDDLLKQEQFTRDFGQEGN

SEQ ID NO: 31416 - protein, 877 aa, Saccharomyces cerevisiae
MSETVKDKVIIDEKVSTKGTVDYAEGAEYSERLSNHSSDFSQWYTDEQILHFMKKLGYENRTLYDIPEDVAYILKKMPELTLEDSFKILKDSIIYFKDDENIPHDQYEEWKRLVDLEDLDSKEGIDEYDSFDIRAFASAIKFHSPYQEVRAVVDPEDDPTIPVETFRAYFLAIIWSVIGSGFNEFFSHRVVSISLNTPIIQMFLYICGKAWAKTIPCWTITIRGRKYGINIDKPWTQKEQMFSTLLYAICQGAFYTHYNILTQKLFYHSAFSFGYQFLLSLSVQFIGFGFAGILRKFVVYPARALWPTVMPTIAINKALLGKEKHESGMSRYKFFFLTFFIMFIYNWFPTYIINILNTFNWMTWIKPSNINLANITGGVTGLGINPISSFDWNVISFNSPLVYPFWSYLTQYLGCILAALIVIAVYYSNYMSCQYLPIFTNSLYTNTGHSFKVTEVLDSDNKLDVKKYQSYSPPYYSAGNLVSYGAFICAYPLMITWSFIVHSKLLFNAFKDWALNLWAMRKLKSWVTMFKSDYRALDDYDDPHSNAMKNYKEVPDWWYFAILIGSLVVGIAVVEHYPTNTPVWGLFVCLGFNFVFLIPTTILQATTGYSFGLNLLIEMVMGYALPGNPIAIMILKAFGYNIDGQADNYVSNLKIAHYCKIPPMALFRGQCVIVFIQIFVNLGVLNWQISNIKDFCTPHQNAKFTCPDAVTYYNASVVWGAIGPKRIFNYIYPIFKWCWLIGACIGIFFGVWKRWGKFYPRYFDPMLFVGGMLNMSPPYNLMYYTSGMIVSYISQYYMKRHHLNLWEKYNYVLSAGFSTGLVLSAIIIFFAVQYKDTAFNWWGNTVPYAGADGVGYPLKNITDTANGYFGYAPGHYP

SEQ ID NO: 31417 - protein, 665 aa, Colletotrichum trifolii
MDNNNNRLYLNIGNNNDRLGPGSDRQYPTTPSTFPQPVFPHQGQQQQQQQQQQLHHQQQPGMQHPQQYQAQQQQQQQQQQQQQQPYQTGYAPSGYFNPNQQAAQYPPQGHGDYNAAYQPRSNTPGTNDPNVGLAHQFSHQNLGGAARASPYGSRGPSPGQRPRTAGASGQPPSGYGHYATPPLPNQQPASVDPFAPAPERNYEKYGPNANGNQKKCTQLASDFFKDSVKRARERNQRQSEMEAKLSEPNQSQSRREQIWSTAGRKEGQYLRFLRTKDKPENYNTVKIIGKGAFGEVKLVQKKGDGKVYAMKSLIKTEMFKKDQLAHVRSERDILAESDSPWVVKLYTTFQDSYFLYMLMEFLPGGDLMTMLIKYEIFSEDITRFYIAEIVLAIEAVHKLGFIHRDIKPDNILLDRGGHVKLTDFGLSTGFNRLHDNNYYQQLLQGRSNKPRDRNSVAIDQINLTVSNRSQINDWRRSRRLMAYSTVGTPDYIAPEIFTGHGYTFDCDWWSLGTIMFECLVGWPPFCAEDSHDTYRKIVNWRQTLYFPDDIQLGVEAENLIRSLICNTENRLGRSGAHEIKAHSFFRGVEFDSLRRIRAPFEPRLTSAIDTTYFPTDEIDQTDNATVLKAQAIQQARSGIPQVEESPEMSLPFIGYTFKRFDNNFR

SEQ ID NO: 31418 - protein, 251 aa, Brassica oleracea
MGRGRVEMKRIENKINRQVTFSKRRAGLLKKAHEISILCDAEVSLIVFSHKGKLFEYSSESCMEKVLEHYERYSYAEKQLKVPDSHVNAQTNWSVEYSRLKAKIELLERNQRHYLGEDLESISIKELQNLEQQLDTSLKHIRSRKNQLMHESLNHLQRKEKEILEENSMLAKQIRERESILRTHQNQSEQQNRSHHVAPQPQPQLNPYMASSPFLNMGGMYQGEYPTAVRRNRLDLTLEPIYNCNLGYFAA

SEQ ID NO: 31419 - protein, 617 aa, Streptomyces avermitilis
MTEQATGAHHPQPRPRSGGQQSAPEHVTGRAQSLIRSLEEVGAETVFGIPGGAILPAYDPLMDSKRVRHVLVRHEQGAGHAATGYAQATGKVGVCMATSGPGATNLVTPIADAHMDSVPLVAITGQVASKAIGTDAFQEADIVGITMPITKHNFLVTKAEDIPRTIAEAFHIASTGRPGPVLVDIAKDALQARPPSSGPPTPDLPGYRPVTKPHAKQIREAAKLITQAKRPVPYVGGGVLKAKATAELKVLAELTGAPVTTTLMALGAFPDSHKLHVGMPGMHGAVTAVTALQKADLIVALGARFDDRVTGKLDTFAPYAKIVHADIDPAEIGKNRAADVPIVGDAREVIADLVQAVQKEHSEGHAGDYTAWWKDLKPWRDTYPLGYEQPDNGSVSPQQVIERIGQLAPEGTIFAAGVGQHQMWAAHYVKYEQPATWLNSGGARTMGYAVPAAMGAKAGQPDRTVWAIDGDGCFQMTNQELTTCALNNIPIKVAIINNGALGMVRQWQTLFYNQRYSNTVLHSGPGRGRKAAERRHPRPRLREAVGGHGLLRDPCESPDDLDKVIAEANSVNDRPVVIDFIVHEDAMVWPMVAAGTSNDEVMFARDVRPDFGDNEDD

SEQ ID NO: 31420 - protein, 105 aa, Solanum lycopersicum
MSASGGTGDEDKKPNDQMVHINLKVKGQDGNEVFFRIKRSTQMRKLMNAYCDRQSVDMNSIAFLFDGRRLRAEQTPDELEMEEGDEIDAMLHQTGGSCCTCFSNF

SEQ ID NO: 31421 - protein, 93 aa, Saccharomyces cerevisiae
  misc_feature (1)..(1): Xaa can be any naturally occurring amino acid
  unsure (1)..(93): unsure at all Xaa locations
XVTPREPKKRTTRKKKDPNAPKRALSAYMFFANENRDIVRSENPDITFGQVGKKLGEKWKALTPEEKQPYEAKAQADKKRYESEKELYNATLA

SEQ ID NO: 31422 - protein, 878 aa, Lotus japonicus
MEYGSLLVQQQQQQDCNSAYGSLSNLSSDCGSVTTAEADHHIIEELLVQGCWVEVSGVGVREGELQLQQDESSFVVGKRWWIGPAAAVAGSCNSSVKERLVIAVGYLKDYTRNSNVLIQIWVPLRRGILHDHDYHTNYLLSNNPPPQPEAAADHESVSLGFPMPAAPNSNLYSNVHVRFFRSHEYPRVQAQQYGSLALPVFERGTGTCLGVLEIVITNQTTINYNVSNALDQAVDFRSSQSFIPPAIKVYDELYQAAVNEIIEVMTSVCKTHNLPLALTWAPCIQQGKCGCGVSSENYMWCVSTVDSACFVGDLDILGFQEACSEYHLFRGQGIVGTAFTTSKPCFAIDITAFSKAEYPLAHHANMFGLHAAVAIPLRSVYTGSAADFVLEFFLPKDCHDSEEQKQLLNSLSMVVQQACRSLHVVLVEDEYTLPMPSHTSKEELEEEEITITNNHEQKLFVSPSSHESECSKESSWIAHMMEAQQKGKGVSVSLEYLEEPKEEFKVTTNWDSSTDHDQQAQVFSSDFGQMSSGFKASTVEGGDQESSYTFGSRRSSSGGRKSGEKRRTKAEKTISLQVLRQYFAGSLKDAAKSIGVCPTTLKRICRQHGITRWPSRKIKKVGHSLKKLQLVIDSVQGAEGAIQIGSFYASFPELSSSDFSASCRSDSSKKMHNYPDQNNTLYGHGDHGGVVTSLKSPPSACSQTFAGNQPCTIINNGDVLMTESPPVPEALLSRRDHCEEAELLNNASIQEDTKRFSRPKSQTLPPLSDSSGWNSLETGAFRVKATFADEKIRFSLQPIWGFSDLQLEIARRFNLNDVTNILLKYLDDDGEWVVLACDGDLEECKDIHRSSQSRTIRLSLFQASPLNLANTFRNSSPS

SEQ ID NO: 31423 - protein, 145 aa, Streptococcus pyogenes
WRITVRDAETGKVITDLVEHGQEVVIAKGGRGGRGNIRFATPRNPAPEIAENGEPGEERQLELELKILADVGLVGFPSVGKSTLLSVVSSAKPKIGAYHFTTIVPNLGMVRTKSGDSFAMADLPGLIEGASQGVGLGTQFLRHPA

SEQ ID NO: 31424 - protein, 472 aa, Blumeria graminis f. sp. hordei
MPTFGFLKKRKKVSLGHRDLDSPASTLSQPASPITPSTSRGLGEPIDTTSSKITSPGQKLGSNITKDHRGTRTTVEDLPSMTDVSHLQQAYRNLSQGSTASKSNLLTIHNLINPPQHDGAGQSKVMPEKHMNNKTERPVQGKAAVAQVRQTKGKYSLSDFEILRTLGTGSFGRVHLVQSKHNQRFYAVKVLKKQQVVKMKQVEHTNDERSMLQEVKHPFLITLWGTFQDSKNLYMVMDFVEGGELFSLLRKSQRFPNPVAKFYAAEVTLALEYLHKKDIIYRDLKPENLLLDRHGHLKITDFGFAKKVTDITWTLCGTPDYLAPEVVSSKGYNKSVDWRWSLGILIFEMLCGYTPFWDNGSPMKIYENILKGRVKYPPYIHPDAQDLIQRLITADLTKRLGNLHGGAEGIKSHQWFAEVTWERLAKKDIDAPYVPPVKAGSGDASQFDKYPEETERYGQTGPDEHGSLFENF

SEQ ID NO: 31425 - protein, 286 aa, Deinococcus radiodurans R1
MGWPEGRAPVAPEQGAPGPFFSDRGGVCWRHPAQVRQGKSGAGPAVPLRRTHMEFFIDTAIVDEIREINAWGVLSGVTTNPSLIVASGRDFKEVIGEIAELVPGGAISAEVTALDAEGMIKEGKDVAAWHKQVVVKLPLTPAGLQACKALTSEGIKTNVTLCFSVPQALLAARAGATYVSPFVGRVDDTGWDGSELIRQIKEAFVLGDIQTKVLAASIRHPQHVVQAALAGADVATIPYKVFTQMVKHPLTQAGLDSFMADWAKRQGASPETPPSEAGTNPVKKEG

SEQ ID NO: 31426 - protein, 370 aa, Zymomonas mobilis subsp. mobilis ZM4
MIYLDYQATTPMAPEAKAAMLPWLDGGANPHSPHRIGRKAAAAVAIAKDQIAALIPEREAGNLVFTSGATEALNMAIKGLWFSGKNTRRKIVTLATEHAATLDSLGYLARLGAEIVLLPVHSDGLVDLEKAAAAIDDKTALVTAMFVNNEIGVIQPIAELAKLACQVGAYFLLDAVQGYGRFALPEGCDMIALSGHKIHAPIGSGALWFKKDITLTPLLHGGHQQEGFRSGTLSPLCLRLWCCRRFGAEQQAKDQSHVAALFALAKAEMPDWIINGSEDQRWLGNFNIHQEGIDSSRLISDARQVAFSAGSACSSGNGRPSHVLKALGLSQKAVRGSIRIGFGRYTTEEELLSGLGYIREAAEKQRRFLS

SEQ ID NO: 31427 - protein, 483 aa, Brassica oleracea var. botrytis
MSLLIRSSYVSQFHTRNSKPSSFSDQTPSKSPFFSSFNHNPLINLVYKRNPRMQSLSFPSSMTVKSSLIDPDGGELMELVVPDSEIELKKKEAESMPKVKLTKIDLEWVHVISEGWASPLKGFMREDEYLQSLHFNSLRLKDGSLVNMSLPIVLAIDDQTKEQIGVSKNVALVSPQGDIVGSLRSVEIYKHNKEERIARTWGTTSPGLPYVEEHITPSGNWLIGGDLEVFKPVKYNDGLDHYRLSPKQLRKEFDNRKADAVFAFQLRNPVHNGHALLMNDTRKRLLEMGYKNPVLLLHPLGGFTKADDVPLYVRMEQHSKVLEDGVLDPETTIVSIFPSPMHYAGPTEVQWHAKARINAGANFYIVGRDPAGMGHPTEKRDLYDPDHGKKVLSMAPGLEKLNILPFRVAAYDTVEKKMAFFDPTRAKEFLFISGTKMRTYARTGESPPDGFMCPSGWNVLVKYYESLQESDDSSKQQQTVVSA

SEQ ID NO: 31428 - protein, 181 aa, Nicotiana tabacum
MTFAGTTQKCSACEKTVYLVDRLAADNRIYHKACFRCYHCKSTLKLSNFNSFEGVIYCRPHFDQLFKRTGSLDKSFDGTPKVTKPEKSVENENGSGSKVSSLFAGTREKCVGCTKTVYPIEKVSVNGTAYHKGCFKCSHGGCTISPSNYIAHEGRLYCKHHHIQLFKEKGNYSQLESDHET

SEQ ID NO: 31429 - protein, 174 aa, Dendrobium grex Madame Thong-In
MGRGRVEMKRIENKINRQVTFAKRRTGLLKKAYELSVLCDVEVALIIFSNRGKLYEFCSSRSMLKTLEKYQKCSDGAPEMTMTSRETQSSQVEYLKLKSQVEALQRSQRNLLGEDLNPLGGKDLDQLERQLEASLKQIISTRMQYMLDQLGDLQQRELLLFETNKSLGTRVSAL

SEQ ID NO: 31430 - protein, 247 aa, Dendrobium grex Madame Thong-In
MGRGRVQLKRIENKINRQVTFSKRRSGLLKKAHEISVLCDAEVALIVFSNKGKLYEYSTDSSMEKILERYERYSYAERALFSNEANPQADWRLEYNKLKARVESLQKSQRHLMGEQLDSLSIKELQRLEQQLESSLKFIRSRKTQLILHSISELQKMEKILLEQNKTLEKEIIAKEKAKALVQHAPWEKQNQSQYSSALPPVISDSVPTPTSRTFQARANEEESPQPQLRVSNTLLPPWMLSHMNGQ

SEQ ID NO: 31431 - protein, 220 aa, Dendrobium grex Madame Thong-In
MGRGRVELKRIENKINRQVTFAKRRNGLLKKAYELSVLCDAEVALIVFSNRGRLFEFCSSTSMTKTLERYQKCSYNASESAVPSKDAQNSYHEYLTLKAKVEYLQRSQGNLLGEDLIELSSKELDQLELQLEMSLKQIRSTKTQLMLDQLCDIKRKEQMLHEANRALSMKLKEDGPEIPLELSWPGGETNGSSERQQPQSDKFFQPLPCSNPSLQIGYSP

SEQ ID NO: 31432 - protein, 244 aa, Gnetum gnemon
  misc_feature (195)..(195): Xaa can be any naturally occurring amino acid
  unsure (1)..(244): unsure at all Xaa locations
MVRGKTQMKRIENATSRQVTFSKRRNGLLKKAYELSILCDAEVGLIIFSPRGKLYEFANPSMQKMLDRYQKCCQESTANTSKNLVEDTQHLKREVAIMEEKIKMLEYAQKKLLGENLESLSMKELTQLENQAERGLVNIRARKTEILMDQINQLKRKSQLLGEENAVLRKKCNGPYMGGGLLSILHAGASGAGPXNNNNNNGGSGVTHHDDNNNNNRSNNVNVEDVETQLNIGPPDVHCSINQC

SEQ ID NO: 31433 - protein, 271 aa, Sporobolus stapfianus
NEVEEEGEEFAAYCRRGKGRRRVEMEDRHVAKVALGGDPKAALFGVFDGHGGKNAAEFAAENMPKFVAEEMTKADGGESEIEGAVKRGYLKTDEEFLRRGESGGACCVTAVLQKGGLVVSNVGDCRAVLSRSGKAEALTSDHRASREDEKERIENLGGFVVNYRGTWRVQGSLAVSRGIGDAHLKQWIVADPDTRTLLVDQHCEFLILASDGLWDKIDNQEAVDLARPLCTSNDKASRMAACRMLVETSISRGSTDDISVVIIQLQNFSSS

SEQ ID NO: 31434 - protein, 571 aa, Buchnera aphidicola
MEILSGAEMVVRSLINQGIQHIFGYPGGAVLDIYDALKTIGGIEHILVRHEQAATHMADGYARSTGKTGVVLVTSGPGATNAITGIATAYMDSIPMVVISGQVASLLIGYDAFQECDMIGVSRPIVKHSFLVKKTEDIPITFKKAFWLAESGRPGPIVIDLPKDILKKKSKYFFKWPDSVNIRSYNPTTKGHKKQIQKALYRLLKAKQPVIYAGGGVISSKCHKELLEFAEKTNCPVTTSLMGLGVFPGNHPQSIAMLGMHGTYEANMAMHHADVIFAIGVRFDDRTTNNLKKYCPNAIVVHIDIDPTSISKTVSAHIPIVGDAKYVLQQMLKILKSEQHIFCLKNWWNCIEKWKKVNSLKYYENNKKIKPQKVIETLFQLTKGDAYITSDVGQHQMFTALYYPFNKPRRWINSGGLGTMGFGFPAALGVKLGFPKDTVICITGDGSIQMNIQELSTARQYNLAILIINLNNASLGMVKQWQDMIYCGRHSHSYMDSLPNFIQLVESYGHIGIQISQPLELKEKLILALQKLSTGNLVFVDIKIDSSEHVYPMQIQGGGMNDMWLRKKEEF

SEQ ID NO: 31435 - protein, 573 aa, Buchnera aphidicola
MEMLSGSEMGIQSLIDQGIKYIFGYPGGAVLDIYDSLKSTNKIKHILVRHEQGATHMADGYARATGKVGVVLVTSGPGATNAITGIATAYMDSIPIVVISGQVASYLIGYDAFQECDMIGISRPIVKHSFLVKKTEDIPITFKKAFWLASSGRPGPIVIDLPKDILNSCKKKPYVWPTKINIRSYNPIIKGHFGQIKKAIDALKLAKQPIIYVGGGVISSNSYNELKEFAERLNIPVTTSLMALGAFPGNHPQNLNMLGMHGTYEANMAMHNSDLILAIGVRFDDRTTNNVDKYCPNATIIHIDIDPTSISKTITAHIPIIGNAKNILQQMLQLINDSMFVKELYCLKKWWIKINHWKSMNSLHINIDNVKIKPQSVIKTIWKLTKGEAYIASDVGQHQMFAALYYSFQKPRRWINSGGLGTMGFGLPAALGAKLALPKKTIICITGDGSIQMNIQELSTAMQYELPILILNLNNRSLGMVRQWQDIIYSGRHSHSYMKSLPNFVQLAESYGHIGIYIEHPKDLEKKLRIALEQLKKGHLVLVDVIIDASEHVYPMQIRGGGMNSMILRKNGK

SEQ ID NO: 31436 - protein, 360 aa, Nicotiana tabacum
MAFRLSHLSLALSLLALALAGVAIYRNTYEAMSKGFQTLSPELDLLESAASILTLNNNNAEQNSDSKLTQPLSPSACIFSAVRRVVNRAIDRERRMGASLIRLHFHDCFVDGCDGGVLLDDIPGSFQGEKTSPPNNNSARGFEVIEQAKQRVKDTCPNTPVSCADILAIAARDSVVKLGGQGYNVALGRRDARAANFTGALTQLPAPFDNLTVQIRKFNDKNFNAREMVALAGAHTVGFTRCATACNSNNVNPAARLQCNCSVTQNDTNLQQLDRTPAVFDRVYFQDLNRNQGILFSDQVLTGNTTTAAIVTTYSNNGAVFLGDFAAAMIKMGNLPPSPGVQLEIRDVCSRVNPSSVASM

SEQ ID NO: 31437 - protein, 1121 aa, Pisum sativum
  misc_feature (28)..(28): Xaa can be any naturally occurring amino acid
  unsure (1)..(1121): unsure at all Xaa locations
SNNNNNRNIKRESLSMRKAIAQYTEDAXLHAVFEKSGDSFDYAQSIRVTAATESVPEQQITAYLAKIQRGGFIQPFGSMIAVDETSFRVLAYSENARDMLGIAPQSVPSMEDDSSSSSFFSLGVDVRSLFSASSSVLLEKAFSAREISLMNPIWIHSRSTGKPFYGILHRIDIGVVIDLEPARSEDPALSIAGAVQSQKLAVRAISQLQALPGGDVKLLCDAVVESVRELTGYDRVMVYKFHEDEHGEVVAESKRVDLEPYIGLHYPATDIPQASRFLFKQNRVRMIVDCNASPVRVFQDEALVQPVCLVGSTLRAPHGCHAQYMANMGSIASLAMAVIINGNDEDGGGIGGAARGSMRLWGLVVCHHTSARCIPFPLRYACEFLMQAFGLQLNMELQLAVQSLEKRVLKTQTLLCDMLLRDSHTGIVTQSPSIMDLVKCDGAALYYQGNYHPLGVTPTESQIRDIIDWLLAFHSDSTGLSTDSLADAGYPGAASLGDAVCGMAVAYITEKDFLFWFRSHTAKEIKWGGAKHHPEDKDDGQKMHPRSSFKAFLEVVKIRSMQWDNAEMDAIHSLQLILRDSFKEAENNDSKAVVHTHMAELELQGVDELSSVAREMVRLIETATAPIFAVDVDGRINGWNAKVSELTGLLVEEAMGKSLVHDLVYKESRETVDKLLSHALKGEEDKNVEIKMKTFGPGNQNKAVFIVVNACSSKDYTNNIVGVCFVGQDITGQKVVMDKFINIQGDYKAIVHSPNPLIPPIFASDDNTCCLEWNNAMEKLSGWSRADVIGKLLVGEVFGSFCQLKGSDAMTKFMIVLHNALGGHDTDKFPLSFLDRHGKYVHTFLTANKRVNMDGQIIGAFCFLQIVNPELQQALTVQRQQDSSSLARMKELAYICQEVKNPLSGIRFTNSLLESTCLTDEQKQLLETSVACEKQMLKIVRDIALESIEDGSLELEKQEFLLENVINAVVSQVMLLLRDRKLQLIRDIPEEIKALAVYGDQLRIQQVLADFLMNVVRYAPSPDGWVEIHVFPRIKQISEGLTLLHAEFRMVCPGEGLPPELIQDMFHNSRWVTQEGLGLSMSRKIIKLMNGEVQYVREAERCYFLVLLELPVTRRSSKAIN

SEQ ID NO: 31438 - protein, 758 aa, Arabidopsis thaliana
MIFKIEDVTVYFPYDNIYPEQYEYMVELKRALDAKGHCLLEMPTGTGKTIALLSLITSYRLSRPDSPIKLVYCTRTVHEMEKTLGELKLLHDYQVRHLGTQAKILALGLSSRKNLCVNTKVLAAENRDSVDAACRKRTASWVRALSTENPNVELCDFFENYEKAAENALLPPGVYTLEDLRAFGKNRGWCPYFLARHMIQFANVIVYSYQYLLDPKVAGFISKELQKESVVVFDEAHNIDNVCIEALSVSVRRVTLEGANRNLNKIRQEIDRFKATDAGRLRAEYNRLVEGLALRGDLSGGDQWLANPALPHDILKEAVPGNIRRAEHFVHVLRRLLQYLGVRLDTENVEKESPVSFVSSLNSQAGIEQKTLKFCYDRLQSLMLTLEITDTDEFLPIQTVCDFATLVGTYARGFSIIIEPYDERMPHIPDPILQLSCHDASLAIKPVFDRFQSVVITSGTLSPIDLYPRLLNFTPVVSRSFKMSMTRDCICPMVLTRGSDQLPVSTKFDMRSDPGVVRNYGKLLVEMVSIVPDGVVCFFVSYSYMDGIIATWNETGILEEIMQQKLVFIETQDVVETTLALDNYRRACDCGRGAVFFSVARGKVAEGIDFDRHYGRLVVMYGVPFQYTLSKILRARLEYLHDTFQIKEGDFLTFDALRQAAQCVGRVIRSKADYGMMIFADKRYSRHDKRSKLPGWILSHLRDAHLNLSTDMAIHIAREFLRKMAQPYDKAGTMGRKTLLTQEDLEKMAETGVQDMAY

SEQ ID NO: 31439 - protein, 357 aa, Comamonas testosteroni
MSYQLTLEPLGASIEVEEGQTLLDAALRQGIYIPHACGHGLCGTCKVQVCDGEVDHGAANPFALMDMEREDGMTLACCATLQSDATIEADFEDEPDAQIIPVRDFAATVVRIVDLTPTIKALHLRLDQSMRYQAGQYVQLRIPGLSEEQGGSRAFSIANAPGADGCAQEIELNVRLVPGGAGTGWLHEHLSEGDSLQLAGPYGRFFVRHSACQPMVFMAGGSGLSSPRAMILELLANGCEQPITLVYGQRSREELYYDDEFRALAAQHPHFTYIPAISGEDCGDWQGARGFVHEAAQAHFQGGFAGCKAYLCGPPPMVEACISTLMQGRLFERDIYTEKFLSAADAQGARSPLFKRV

SEQ ID NO: 31440 - protein, 587 aa, Nicotiana tabacum
MLRSLTSKRSLQSLLHYHHHPLLRPNPHPTPFNPRPFSSTPGPTTSESELRKYIGYTLLLLGCGAATYYSFPFPENAKHKKAQLFRYAPLPDDLHTVSNWSGTHEVQTRTFLQPEAIEELEGIVKTANEKKQRIRPVGSGLSPNGIGLTRAGMVNLALMDMVLYVDEEKKTVTVQAGIRVQQLVDAIKEYGITLQNFASIREQQIGGIVQVGAHGTGAKLPPIDEQVISMKLVTPAKGTIEISKEKDPELFYLARCGLGGLGVVAEVTLQCVERQELVEHTFLSNMKDIKKNHKKFLSDNKHVKYLHIPYTDAVVVVTCNPISKSRGPPKHKPKYTTEEALQHVRVLYRESLKKYRGQVADSGSPEPEIDELSFTELRDKLLALDPLNKVHVIEINKAEVEFWRKSEGYRVGWSDEILGFDCGGHQWVSETCFPAGTLSKPSMKDLEYIEELMQLIEKESVPAPAPIEQRWTACSKSRMSPAYSSADDDIFSWVGIIMYLPTMDARQRRQITEEFFHYRHMTQAQLWDHYSAFEHWAKIEVPKDKEELAALQERLKKKFPVDAYNQARKELDPNRILSNNMLEKLFI

SEQ ID NO: 31441 - protein, 240 aa, Arabidopsis thaliana
MESINTLKGYDKVSDQENQIHHHHHSPLPKPSSFSRKTLIATGSVVSLLLILSVVALTAGAFTHSPPHHPPISSASLKSLCSVTRYPETCFNSLSSSLNESDSKLNPESILELSLRVAAKEISNLSISFRSINDMPEDAAVGDCVKLYTDALSQLNDSITEIERKKKKGGNNWLTEEVVGDVKTWISAAMTDGETCSDGIEEMGTIVGNEIKKKMEMANQMMSISLAIVSQMKKLLLIFH

SEQ ID NO: 31442 - protein, 520 aa, Bacillus anthracis str. A2012
MKSRKTDWPVFLISGGSLLLFVIAVFLNKSYVEGVINSSFAASIKYFGAFWQILLIGTFVVAMCMAFSKYGRVKLGGLEKPEISTTKWLAIIMSTLLAGGGVFWAAAEPMYHLMTVPPIHEGITAGTKEAVMPALAQSYMHWGFLAWTILGTISAVVMMYGHYHKGMPLKPRTLLYPIFGEKLRKSWLGTLIDAFAIIAVAAGTIGPIGFLGLQASYGLQALFNIPDVFTTQLAIIVCVVAVSTISAVTGIDKGIQIISNLNVRLAILLMVFVLLFGPGGFIIDSFVSSFGFYINEFIPMSTYRGDTTWLGSWTIFFWGWFIGYGPMMAILVSRISRGRTIREIIVAIGIIAPIITTFWFTILGGSGVFYELMKPGSISSALSESGMPAAMIAITEQLPLSHIIGPAFLLLTILFVVTTGDSMAYSISMAVTGDGDPRISLRVFWSLIMGTVAAILLYMGEGSINALQSFIVVTAVPVSILLFPMLWLAPKVAGELALKQGIVKEEEKTSFLFQKASKSK

SEQ ID NO: 31443 - protein, 421 aa, Bacillus anthracis str. A2012
MSGLDDLHSPFECIDEAQQLLADVYGVNKSYFLINGSTVGNLAMILSCCGEHDIVLVQRNCHKSIINGLKLAGANPIFLDPWIDEAYNVPVGIHDEIIKEAIEKYPNAKALILTHPNYYGMGMDLEASIAYAHTHKIPVLVDEAHGAHFCLGGAFPQSALAYGADMVVHSAHKTLPAMTMGSYLHINSRLVKEEKVSTYLSMLQSSSPSYPIMASLDIARFTIARIKEKGHDEIVEFLQEFKEELSTIPQIAILQYPLQDGLKITVQTRCRLSGYELQSVFEKVGIYTEMADPYNVLFILPLQVNKKYMKAIEMIRVALQYYEVKDKTESIRYTYKGEISPLPYTYKQLEEYETKVVPIEEAVGMVAAEMVIPYPPGIPLIMYGERITSGHKEQIMYLEKAGARFQGSRKYMKVYDIESRF

SEQ ID NO: 31444 - protein, 272 aa, Bacillus anthracis str. A2012
MSTQYLNSNLKVFSLNSNKELAEQIAKHIGVGLGKCSVDRFSDGEVQINIEESIRGCDVFIIQSTSFPVNEHIMELLIMIDALKRASAKTINIVIPYYGYARQDRKARSREPITSKLVANLLETAGATRVITLDLHAPQIQGFFDIPIDHLMGVPILSDYFETKGLKDIVIVSPDHGGVTRARKMADRLKAPIAIIDKRRPRPNVSEVMNIIGNIEGKTAILIDDIIDTAGTITLAANALVENGASEVYACCTHPVLSGPAIERIQSQILKS

SEQ ID NO: 31445 - protein, 455 aa, Bacillus anthracis str. A2012
MIALGGVIGTGLFLGSGYTIHEAGPGGAIVAYLVGGFVMYLTMLCLGELAVAMPDAGSYQTYATKHISPAAGYVVGWMSWLNWSATIGIELIAVSILMKRWFPDVPSWIWCVVFAVLLFAINALSSRSFAEVEFWFASIKVITIIAFIILGGAAMFGFLDMKGNEPAPMFSSFTDYGGLFPNGLSAILITMIAVNFSFQGTELVGIAAGESENPEKTIPKAINNTVWRILVFFVLSIFILAGLFPWQQAGVIESPFVVVFDKIGIPYAADIINFVIITAVLSVANSGLYATSRMLWSMSNQGMISPIFGKLSKNGVPIYALIVSTIVGCLSLLSGIYAEDTVYLWLLSIAGFGAILVWASIALSNLLARRSYIKQGGDVKDLKFKTPLYPFVPLLALVLNVTVIVGMAFIPEQRMALYCGIPFMIVCLLFYRATRNKAHKVEHIEKTDTTEVDSL

SEQ ID NO: 31446 - protein, 579 aa, Bacillus anthracis str. A2012
  misc_feature (449)..(449): Xaa can be any naturally occurring amino acid
  unsure (1)..(579): unsure at all Xaa locations
MQFVKPYRWLIAITIMIGLVKFGIPLIMPWLLKYIIDDVIQGAGSLQDKTSQLVTAIGIAFFIFAVLRPPIEYYRQYFAQRIANTILYDLRKHIFGHLQKLSLRYYSNTKTGEIISRVIHDVEQTKDFVITGLMNVWLDTATIAIAIIVMFSMNIKLTFVALLILPIYVVAVKYFFGRLRKLTKERSQALATMQGYLHERIQGMQVTRSFALEEYEGKQFEKRNNEFLTKALTHTSWTARTFSAVNTLTDLGPLLVIGFAAYEVIQGQLTLGTMVAFVGYMDSLYSPLRRLVNSSTTLTQSFASMDRVFELLDEKYDIVNVPSAVQTKKLNGEVIFDNVSFRYNADEKEILHNLSLTMLPGEKVALVGASGGGKSSLASLIPRFYDVSSGAVYVDGIDVRKYDMRNLRSHIGIVLQDNLLFSDTIGANILYGNPKATEEEVIAAAKAAXIHDFIIELPDGYDTVVGERGVKLSGGQRQRVAIARVFLKNPSLLILDEATPALDLENERYIQEALQTLAADRTTIIIAHRLATITHVDTIIYIEDGEIKETGSHEELMKKRGYYYNLYQLQHITETAPLA

SEQ ID NO: 31447 - protein, 1428 aa, Bacillus anthracis str. A2012
MNHRAGFINGEGDGIGIHIDVPKALWNEKLKSSGYNPTIVDHPHFIVGHFFLNKNENIVDLKNHIRTQLNNENFAILFESDNVINSDALGPLGKQEEPLFWQVALIAENEVVNIEQTLFSVTIKIEENEAIHVASLSRDHVVYKVLGAGDTLVAYYNDLQHPLIASTMTLGHNRYSTNTLSNFFRVQPFSILGHNGEINTIAKLRDQAEMIHVPLTAGGSDSQDLNRTLETLLVQYGYSLFEAMDILFPPIINEIKLYETHLQDLYTYIREAWGHFAQGPAGIISRYKDEAVFSVDSLGLRPVWKVEIESSYIFSSEPGVVSPTEYVAEPKPLAPGEKVGLKWNEQDELVLYEHDDYQTQVYNRFKKKVDVTNYHLHLSIPKTKEIPDACDSMQVETKQYVAFGWDREHIQLLEQMATKGVEPIRSLGHDSPLAALDTDRRNIADFIKESVAVVTNPAIDRDREVEHFSTRTILGERPSLLSDAKKPFVVEMLSPIILEGSVAQSIAQELHTITYEQLIELFNTHSSIATISATFSQAETLQCALSRISSEAITAVNDGASLLLIDDADAHLNERLWIDPHLVTAKVHQVLSENKLRRNCSLVIRSGALRSLHDIVTLHGLGADSINPYLLFATVNDGTKTPITNLYNALNKGLEKVISTIGIHELRGYGRLYSSIGLHEEIANILQITNFLGSNDLAFSLESLAEDAQMRADDYNDPKVRIRKSFHIFPRIWKAIGDVAKGNSYDDYRDKLSELEENNPIAIRHLIQTKETKHVIPTEEVSISIQNHDLPFIISSMSFGSQNEIAFRAYAEAADQLNMISLNGEGGEIKDMIGKYPHTRGQQVASGRFGVNAELLNSSNLIEIKIGQGAKPGEGGHLPGSKVTAKIAEARNATIGSDLISPSNNHDIYSIEDLAQMITEIKTANQLAKVAVKVPVVPNIGTIAVGIAKAGADFINISGFDGGTGAARIHALQHVGLPVEIGVKAAHNALLEANMRHNVEIWADGGIRSVNDALKIMLLGANRIGFGTLSMIAIGCTTCRGCHLDTCHVGIATQIESEAQAKEHGLRRFVPRELESAVAGLLHLFTTFGEELKRLTGNLGYTNLQEIVGRSDLLEQVRGKNLLNLCNLLQTIEHPSVIKTEHVLEKQFEPIHSPHSKELVGVGVEQRVMGGLESCYRVRSKLYEDTKLEPLTLKYTNGSIPGNGLGAYNSENLFIHVNGGAQDGIGKTSFGGGIYITKAKGKDGLYYNGSVGKGFGYGAQKGALYVQGNADARAGIRLSGADMIIGGRMTKPLREKEQGNIGAYSNIKGFAFEYMTNGRALVLGDPGPWICAGMTGGVVYLRHDSSLGLTEQALKRRIAKGANVTLQPISKNGVRDVNELLLDYIRVLNEHEQYEEVALLTPLLDDMQQQFFEIIPKKEQADPSISTE

SEQ ID NO: 31448 - protein, 531 aa, Bacillus anthracis str. A2012
MINIIVNFIKQGWDSMIKKENSVFYISILLTTLFIIWGITPASWIQGYDLQSVTSSLNSFILNKFGWFYSLLMTAMIILATYLAFSKYGSIRLGKDGEKPKYSYPSWLSMLFGAGMGIGLLFYGIAEPISHFTDPLTGKAGTEESAKLAMQYSFFHWGLFPWALYAMVALTIAYFTFRKQKGSTIGATVTPLFNRSKNSPIGKTVDILAVLATVFGIVPSVGIGAQQIAGGLSYLFPSIHNTLLTQLVLIAIFAVLYLTSAQTGLDRGIKYLSNLNFSLTGILLVSFLLLGPTVFIMKYFTSTLGSYIGALPSMGLNLGAFNEKSSSWIENWTIFYWGWWISWSPFVGTFIARISKGRTIKEFIFGVVLVPTLICTFWFAVFGGTAIHMEMFQSLGVADEIAKNGTEIGLFAVISHLPFSTFLTIIGLILVATFFVTSADSATFVVSMQTSNGSLSPKNSLKLIWGLTIAIIAAILLQAGGLNALQIAAIIAALPFSIVVVLMVTSLFKELRKEDINSQTKEVPKKIKKVM

SEQ ID NO: 31449 - protein, 304 aa, Bacillus anthracis str. A2012
MMFKLMFAILTPALISGAFAERMRFSAFLIFILLWTTIVYNPVAHWVWGVGGWLRELGALDFAGGNVVHITSGVAGLVLAIFLGKRKNINGTSPHHLPFTMLGAGLLWFGWFGFNVGSALSLNDVALTAFINTNIAAAASALTWMLSEWFFQSKPTAMGAACGAVSGLVAITPACGFVTPFSALLIGAIGGVLCFGAVFFLKTKFGYDDTLDAFGCHGIGGTWGGIATGLFATTTVNGDGANGLFYGNAALLFKQFVAIGATYAFTIIMTYAIIKAINFFLPVRVDEHEEHMGLDISMHGRESL

SEQ ID NO: 31450 - protein, 721 aa, Bacillus anthracis str. A2012
  misc_feature (659)..(659): Xaa can be any naturally occurring amino acid
  unsure (1)..(721): unsure at all Xaa locations
MDLNQMTTKTQEAIMSAQSLAVSHHHQEVDTVHLLFTLLEEQDGLAVRIFQKMNVDIEALKQGVENLIKKKPSVTGSGAEAGKLYITGALQQLLVRAGKEAEKLQDDYISVEHVLLAFTEEKGDISQLFTRFHITKDNLLQSLMTVRGNQRVTSQNPEATYEALEKYGRDLVAEVKAGKIDPVIGRDSEIRRVIRILSRKTKNNPVLIGEPGVGKTAIVEGLAQRIVKKDVPEGLKDRTIFALDMSALVAGAKFRGEFEERLQAVLNEIKKSEGRILLFIDELHTIVGAGKTEGAMDAGNMLKPMLARGELHCIGATTLDEYRKYIEKDPALERRFQQVLAEEPTVEDTISILRGLKERFEIYHGVNIHDRAIVAASVLSDRYISDRFLPDKAIDLVDEACATIRTEIDSMPTELDEVTRRIMQLEIEEAALGKEKDFGSQERLKTLQRELSDLKEVASSMRAKWEKEKEDIHKVRDLREHLERLRRELEEAEGNYDLNRAAELRHGKIPAIEKELKEAEEMGANNKQENRLLREEVSEEEIADIVSRWTGIPVAKLVEGEREKLLRLEQILSERVIGQEEAVSLVSDAVLRARAGIKDPNRPIGSFIFLGPTGVGKTELAKTLAQSLFDSEEQMIRIDMSEYMEKHAVSRLIGAPPGXVGYEEGGQLTEAVRRKPYSVILLDEIEKAHPEVFNILLQMLDDGRITDSQGRTVDFKIQLLL

SEQ ID NO: 31451 - protein, 322 aa, Bacillus anthracis str. A2012
MTVRETQIAIKEVKTFFEDQLAKRLELFRVSAPLFVTKKSGLNDHLNGVERPIEFDMLHSGEELEIVHSLAKWKRFALHEYGYEAGEGLYTNMNAIRRDEELDATHSIYVDQWDWEKIVQKEWRTVDYLQKTVLTIYGIFKDLEDHLFEKYPFLGKYLPEEIVFVTSQELEDKYPELTPKDREHAIAKEHGAVFIIGIGDALRSGEKHDGRAADYDDWKLNGDILFWHPVLQSSFELSSMGIRVDSKSLDEQLTKTGEDFKREYDFHKGILEDVLPLTIGGGIGQSRMCMYFLRKAHIGEVQSSVWPDDLREACKKENIHLF

SEQ ID NO: 31452 - protein, 482 aa, Bacillus anthracis str. A2012
  misc_feature (407)..(407): Xaa can be any naturally occurring amino acid
  misc_feature (421)..(421): Xaa can be any naturally occurring amino acid
  misc_feature (430)..(430): Xaa can be any naturally occurring amino acid
  unsure (1)..(482): unsure at all Xaa locations
MYNTEMDETLKIINKGLKKTTSPKQIIVVGAGMAGLVSASLLKAAGHEVKIFEANNRVGGRIETVRMEDTGLYLDVGAMRIPYSHTLTMAYIRKFGLQVSPFINRNETDIIYVNGRKTTLKQYEKDPSILKYPVEMNEVGKTSEELLLLAVQPIINFIKKNPEKNWDVVVKDFGRYSTGQFLKYHPYQYNTYFSPVTIEMIGVLLDLEGFLERSFVETLRFLYIMQEESGFCEIVGGNDRLPKSFLPQLEENIIYNQKLMKLHQRDNGVTAFYRNEETFEYSSITGDLVIVTIPFSTMRFVEVEPFDSISHEKWKAIRELHYMPATKIGIQFKSRFWEEQGQLGGRIITDLPIRYAYYPSYGIGEKGPAMMLGSYTWSYDALLWDGLSKGDRIYYTLQNLATILGGXVYDEFLSGISKSWXLDPYALGGXALFQAGQESELQPAIVKPEGRIFFAGDHTTLYHGWIQGAIESGVRVAEEVNE

SEQ ID NO: 31453 - protein, 233 aa, Bacillus anthracis str. A2012
MIAVANSMTLSQDLKELLASVEYKMQIKKGNFIFQEGMEATELYIIHSGKVQISKLSADGQELTLRICSAYDIIGELTLFTDNAKYLLNSKCLEDVEVGVIKREALEKELLQKPALVFEFMKWISEHLRRMQTKFRDLVLHGKKGALYSTLIRMTNSYGVLKENGILIDLPLTNQELANFCATSRESVNRMLNELKKQGTISIHKGKITIHDLQFLKCEIACEDCSASVCSID

SEQ ID NO: 31454 - protein, 598 aa, Bacillus anthracis str. A2012
  misc_feature (183)..(183): Xaa can be any naturally occurring amino acid
  misc_feature (425)..(425): Xaa can be any naturally occurring amino acid
  unsure (1)..(598): unsure at all Xaa locations
MRNFQGQFANKGGRNAPKIDKAKNTKGTVMRVWNYMGYQKAALTFVIFLVLVTTLLGLLGPYLMGVIIDQYIVPKDVSGTARMCLLLIAIYGVTVLLTWLQTFVMVNVALKTIQKIRQDIFKKIQTLSLRFFDVRSQGDLMSRVTNDIDNLNQALTQSVVQIISSALTFIGVTIAMFALDWIXAIVTLITVPIMFFVTKKLVAYSGKNFAKRQKDLGELNGFIEEAITGADVTTLYGKEKETVQKFNKINEQLRVSATKADTFSAFIFPSMNFINNLGMGLVIGTGSVMVLNGMTTVGVIAAFINYSRQFSRPLSQFATLMNTIQAAVAGGERVFEIMDEVPEIKNKKDAFVIQNLHGHVALENVSFGYEENKTILKEVSLKARPGETIALVGPTGSGKTTIINLLTRFYDVQQGQIYIDEKNIXEYDLNSLRSKIGVVLQDTYLFAGSIMDNIRYGRLDASDEEVINAAKAASAHSFIKHLPNQYETKIATEGSNLSQGQKQLLAIARAILADTDILILDEATSNIDTRTELQIQEGLNNLMRGRTSFVIAHRLKTIEKADQILVIKDGSILEKGNHESLMEDRGFYFDLYTSQFKI

SEQ ID NO: 31455 - protein, 264 aa, Bacillus anthracis str. A2012
MEELVMSFHKPEQIAELVIEAGVQKVSQTLPAMLILGFLGGAFISLGFLLNIRVLGNLPERWGSLVNVLGGAVFPVGLMLVVLAGGELITGNMMSMSMALYAKKITFVSVLNNWIWITFMNFVGAIFVAYCFGHLGGLTEGDYLNKTVAIAEGKLHESFGRTLILAIGCNWLVCLALWLAYGTSDFVGKIIGIWIPIMAFVVIGFQQVVANMFVISAVIFAGHLTWMDLARNFVPVFIGNVIGGAGFVGFAYYACYQKQHSNMK

SEQ ID NO: 31456 - protein, 410 aa, Bacillus anthracis str. A2012
MQNMKIIVQKFGGTSVRDENGRKHALHHIKKSLDAGYKVVTVVSAMGRKGEPYATDTLLSLVNQEESHISNREQDLLLSCGELISAIVFSNMLNENGIKAAALNGAQAGFVTNDDFTNAKIIEMNCDRIHEELENVDVIVVTGFQGQTKKGDTTTLGRGGSDTSASALGVALHAEYIDIFTDVEGVMTADPRIVKDARHLQTVTYNEICNMAYQGAKVVHPRAVEIAMHAKVPLRVRSTYSDSEGTLIAAYDGATKGQDVEERPVTGIAHVSNVTQIKVLAKETAYDIQQHVFKEMANEGISVDLINISPTGVAYTVNDNVSARAVEVLKQLGYEPIVTEHCAKVSIVGAGMAGIPGVTAKIVTALAEKGIQILQSADSHTTIWVLVKETDLVEAVNALHRAFELSKEKQ

SEQ ID NO: 31457 - protein, 490 aa, Bacillus anthracis str. A2012
  misc_feature (36)..(36): Xaa can be any naturally occurring amino acid
  unsure (1)..(490): unsure at all Xaa locations
MSQYETPLFTALVEHSKRNPIQFHIPGHKKGQGMDXEFREFIGHNALAIDLINIAPLDDLHHPKGMIKEAQDLAAAAFGADHTFFSIQGTSGAIMTMVMSVCGPGDKILVPRNVHKSVMSAIIFSGAKPIFMHPEIDPKLGISHGITIQSVKKALEEHSDAKGLLVINPTYFGFAADLEQIVQLAHSYDIPVLVDEAHGVHIHFHDELPMSAMQAGADMAATSVHKLGGSLTQSSILNVKEGLVNVKHVQSIISMLTTTSTSYILLASLDVARKRLATEGKALIEQTIQLAEQVRNAINDIEHLYCPGKEMLGTDATFNYDPTKIIVSVKDLGITGHQAEVWLREQYNIEVELSDLYNILCLVTFGDTESETNTLIAALQDLSAIFKNKADKGVRIQVEIPEIPVLALSPRDAFYSETEVIPFENAAGRIIADFVMVYPPGIPIFTPGEIITQDNLEYIRKNLEAGLPVQGPEDMTLQTLRVIKEYKPIS

SEQ ID NO: 31458 - protein, 120 aa, Bacillus anthracis str. A2012
MEHKTLSIGFIGIGVMGKSMVHHLMQEGHKVYVYNRTKAKTDSLVQDGANWCDTPKDLVKQVDVVMTMVGYPHDVEEVYFGIDGILENANEGTITIDFTTSTPTLAKRINEAGKSKNIYR

SEQ ID NO: 31459 - protein, 372 aa, Bacillus anthracis str. A2012
MEVATVSVNRILVINPGSTSTKIGVFDNERPVLEETIRHDEEQIGKYKRIIDQYEFRKETILEVLHSHGINISKLNAVCGRGGLLRPIEGGTYTVNDAMLEDLKNGFSGHHASNLGGILAYEIASGLNIPAFIVDPVVVDEMEPIARISGIAGMERKSIFHALNQKAVARKVAEELNHKYEDLNLLVTHMGGGITVGAHKKGKVIDVNNGLNGEGPFSPERAGTVPVGQLVEMCFSGEYYRDEMVKKLVGQGGLVSLIGTNDAIKVEQMVEKGDPEATLIYKAMAYQVAKEIGGASAVLHGKIDAIVLTGGLAYSKILVDEIKERVDWIADVIVHPGEDELQALAEGALRVLREEEAPKEYIVREKETVARG

SEQ ID NO: 31460 - protein, 381 aa, Bacillus anthracis str. A2012
  misc_feature (273)..(273): Xaa can be any naturally occurring amino acid
  unsure (1)..(381): unsure at all Xaa locations
MERIYLDHAATSPTHLEVVEKMIPYMTETFGNPSSIHFYGRQTRHAVDEARRACARSIHANPNEIIFTSGGTEADNLALIGVARANRHKGNHIITTQIEHHAILHTCELLEREGFEVTYLPVDETGRVQVSDIQKALTEETILVSVMFGNNEVGTMQPIAEIGKLLKEHQAYFHTDAVQAYGLVEINVKEFGIDLLSISAHKINGPKGVGFLYAGTNVKFEPLLIGGEQERKRRAGTENVPSIVGLQHAILLAEKTREQKNAQYEEFKDIMVXVFQNEDITFEVNGNLEYRLPHVLNISFTGMNIEPFLVNLDLAGIAVSSGSACTAGSIDPSHVLVAMFGKDSDQIRSSVRFSFGLGNTKEQIEKAAYETVKIVKRLTQN

SEQ ID NO: 31461 - protein, 368 aa, Bacillus anthracis str. A2012
MFRLGEGKDLAFVKEKALSVGAIKSYMIDVQEEFANEYALMAMQAHTLYEGKYPLVSALSRPLIAKKLVEIAEQEGATAVAHGCTGKGNDQVRFEVSIQALNPYLEVIAPVREWKWSREEEIAYAKENNVPIPINLDSPFSIDQNLWGRSNECGILEDPWAAPPEDAYEMTLALEDTPNKPEFVEIGFEAGVPTTLNGTAYPLSELIKTLNALAGKHGVGRIDHVENRLVGIKSREVYECPAAMTLITAHKELEDLTLVKEVAHFKPMIEQKITELIYNGLWFSPLKQALHAFLQETQKNVTGTVRVKLFKGHAIVEGRKSEYSLYDEKLATYTAQDEFNHDAAVGFISLFGLPTKVYSQVNQKKVEA

SEQ ID NO: 31462 - protein, 493 aa, Prochlorococcus marinus subsp. pastoris str. PCC 9511
MQTNFLFMTTALQTPQRRSRSKLQDASLVNGPMLLLRSIRGFSSNRSMLWLATVPLALFGLGIFNLSAHAADLPELNAAFLANNLWLLIATILVIFMNAGFAMVEAGMCRSKNAVNILAKNLFVFALAVTSYWFIGYSLMYGGSVADGWLYFGGLFFDPTVTADMVTDAGLVPTVDFLFQSAFAGTAATIVSGLVAERVKFGEFVVFAIVLTAFIYPIAGSWKWNGGWLDSLGFVDFAGSSIVHSVGAWAGLVGAMLLGPRIGKYSDGKPQAMPGHNMAIATLGALILWIGWYGFNPGSQLAMDQWVPYVAVTTTLAAAAGAIGATIVSTLTSGKPDLTMIINGILAGLVSITAGCGDMTLAGAWFAGLVGGIIVVFSVAALDAAEIDDPVGAFSVHGVCGVWGTLVIGLWGTAVQGDGAGMGLFNGGGINLLLVQALGAAAYAIWTLVTCWIAWSIIGGLFGGIRVSEEEETQGLDISEHGMESYPDFASAK

SEQ ID NO: 31463 - protein, 204 aa, Arabidopsis thaliana
MMSSQTSSHNKLIKLPQRFFFLHKQFFLHKQILLFVVVMAPTVKTAAVKTNEGNGVRYRGVRKRPWGRYAAEIRDPFKKSRVWLGTFDTPEEAARAYDKRAIEFRGAKAKTNFPCYNINAHCLSLTQSLSQSSTVESSFPNLNLGSDSVSSRFPFPKIQVKAGMMVFDERSESDSSSVVMDVVRYEGRRVVLDLDLNFPPPPEN

SEQ ID NO: 31464 - protein, 711 aa, Arabidopsis thaliana
MQLSSLSHTSITHKDKKKKMGIELQNHQSHHEEASPAEEPMSRWLINTPEPPSMWQELIGYIRTNVLAKKKHKRNKTKNSSSNLVYSCLKSAFPILSWGRQYKLNLFKKDLMAGLTLASLCIPQVTLSTNFIKKRKKTLLTNCNRYIFNFMLQSIGYANLAGLDPEYGLYTSVVPPLIYSTMGTSRELAIGPVAVVSLLLSSMVRDLQDPVTDPIAYRKIVFTVTLGFLVDFLSHAALVGFMAGAAIVIGLQQLKGLFGLTHFTNKTDVVSVLSSVFHSLHHPVRTVFSYFFLSSSFQWQPLNFVIGSSFLIFILLARFIVTMAPLISVVLATLIVYLSNAESRGVKIVKHIKPGFNQLSVNQLQFKSPHLGQIAKIGLISAIIALTEAIAVGRSFATIKGYRLDGNKEMMAMGFMNIAGSLSSCYVATGSFSRTAVNFSAGCETVVSNIVMAITVMISLEVLTRFLYFTPTAILASIILSALPGLIDVSGALHIWKLDKLDFLVLIAAFFGVLFASVEIGLLLAVGISFARIMLSSIRPSIEALGRLSKTDIFGDINQYPMANKTAGLLTLRISSPLLCFANANFIRDRSLINIYLLLFFFFLILNSVQEIEGEENEQEVLKENGLQVVILDMSCVMGVDTSGVFALEELHQELASNDIRLVIASPRWRVLHKLKRAKLDEKIKTENIYMTVGEAVDIYVRARSTSHELC

SEQ ID NO: 31465 - protein, 430 aa, Canavalia lineata
MAQILAPSTQWQMRITKTSPNASPVTSNMWSSLLMKQNKKATSSAKFRVLAIKSENGTINRLENLLDLDITPYTDKIIAEYIWVGGTGIDVRSKSRTIARPVEHPSELPKWNYDGSSTGQAPGDDSEVILYPQAIFKDPFRGGNNILVICDAYTPAGEPIPTNKRHRAAEIFSNPKVQAEVPWYGIEQEYTLLQTNVNWPLGWPVGGYPGPQGPYYCSAGADKSFGRDISDAHYKACLYAGINISGTNGEVMPGQWEFQVGPSVGIEAGDHIWAARYILERITEQAGVVLSLDPKPIQGDWNGAGCHTNYSTKSMREEGGFEVIKKAILNLSLRHSDHIRAYGEGNERRLTGKHETADINTFSWGVANRGCSIRVGRDTEKNGKGYLEDRRPASNMDPYVVTSLLAETTLLWEPTLEAEALAAQKIALKV

SEQ ID NO: 31466 - protein, 161 aa, Trema virgata
MSSSEVDKVFTEEQEALVVKSWAVMKKNSAELGLKFFLKIFEIAPSAKNLFSYLKDSPIPLEQNPKLKPHAMTVFVMTCESAVQLRKAGKVTVRESNLKRLGAIHFKNGVVNEHFETRFALLETIKEAVPEMWSAEMKNAWGEAYDQLVAAIKFEVKPSST

SEQ ID NO: 31467 - protein, 161 aa, Trema virgata
MSSSEVDKVFTEELEALVVKSWAVMKKNSAELGLKFFLKIFEIAPSAKNLFSYLKDSPIPLEQNPKLKPHAMTVFVMTCESAVQLRKAGKVTVRESNLKRLGAIHFKNGVVNEHFETRFALLETIKEAVPEMWSAEMKNAWGEAYDQLVAAIKFEVKPSST

SEQ ID NO: 31468 - protein, 161 aa, Trema virgata
MSSSEVDKVFTEEQEALVVKSWAVMKKNSAELGLKFFLKIFEIAPSAKNLFSYLKDSPIPLEQNPKLKPHAMTVFVMTCESAVQLRKAGKVTVRESNLKRLGAIHFKNGVVNEHFETRFALLETIKEAVPEMWSAEMKNAWGEAYDLLVAAIKFEVKPSST

SEQ ID NO: 31469 - protein, 461 aa, Allium cepa
MSTLSNSFLAPNTPSKLTQKFQNRLILKYPKCPTHHRISCSLIEPDGGSLKNLVVPAGPARDTRVKEAATAGQALRRVRLKRVDLEWVHVLSEGWASPLGGFMRESEFLQTLHFNSIRLDDGSFVNMSVPIVLAIDDEKKNEIGERKRVLLVDQNDKAVAFLNDIEIYKHNKEERIARTWGTTARGLPYVEEAIINAGNWLVGGDLEVIEPIKYNDGLDQYRLSPSQLRDEFSRRNADAVFAFQLRNPVHNGHALLMTDTRRRLLEMGYKNPILLLHPLGGYTKADDVPLSWRMKQHEKVLEEGVLNPETTVVAIFPSPMHYAGPTEVQWHAKARINAGANFYIVGRDPAGMGHPIEKRDLYDADHGKKVLSMAPGLEKLNILPFRVAAYDKTQGKMDFFDQSRPEDFVFISGTKMRSLAKNKENPPDGFMCPGGWKVLVEYYEGIAAVQSKKKIGVPASV

SEQ ID NO: 31470 - protein, 180 aa, Pseudomonas syringae pv. syringae B728a
MKLLILDRDGVINHDSDTYIKSVAEWLPIPGSIEAIAALSKAGWTVAVATNQSGIARGYYDLATLDAMHVRLRKLVAEQGGELGLIVYCPHGPDDGCTCRKPKPGMLRAIARHYAADLKGLWFVGDSKGDLQAALAVDSQPVLVMTGKGRKTMEGGVPAGTLIFDDLAAVAAELIHNSTH

SEQ ID NO: 31471 - protein, 522 aa, Pseudomonas syringae pv. syringae B728a
MRWLNRHKFLPFLAWLPQQNRASVGRDALVGLSGAILALPQSIAYALIAGLPPEYGLYAAIVPVLVACLWGSSWHLICGPTAAISIVLYASVSPLAVPASQDYIMLILLLTFIAGVFQLLLGMMRFGALVNFVSHSVVLGFTLGAAVVIALGQMPNLLGIDLPSQTTALKSLSAVLEHWREVDLSSLMLGLLTLALGIGLKLLVPRWPTLLIALVSSSLLVWLWPAMFGHVRVVSAFVGHLPPFSPLPLDLELILKLLPTAVAVGMLGLVNSLSIARSLSARSQQMLNANQEVRAQGLSNMVGSLFSGYLSAGSFTRAALSYEAGARSPLAGVFSALWVALFAVAGASLISHIPIPAMAASILLICWGLVDRRGIRALFRVSRAEFFVMALTCLATLLLELQTAIYAGVLASLFFYLKRTSQPRVQQWREGDEEVLRVGGSIFFGASHYLQTRLQRTEGVRVVIDAQQINFIDYSGVEMLHQEARRLGRQGRVLVLRNARPQVIEELHKLEGAEKCPILFED

SEQ ID NO: 31472 - protein, 395 aa, Pseudomonas syringae pv. syringae B728a
MILTRLQSELPMTTSALYLDYAATTPVDGQVIEAMVACMGREGHFGNPASSGHGYGQVARQAVEQARAQVADAVGAPVDTIVWTSGATESNNLAIKGIAHDASAPRRHIITSVLEHKAVLDTVSTLERQGFPVTWLKPDAQGLIQPHAVQAALREDTLLVSLMLVNNELGTLTDIASIGALVREHGALFHVDAAQGVGKVKVDLASLAVDLMSFSAHKAYGPKGIGALYVGPRAHSLLKAQIHGGGHEGGFRSGTLATHQIVGMGTAFALAISQAETENRRIEELSRHLREGLLSLPDVQLNGCPQQRIPHTLNLCITRSGFTSSQLSHSLALSSTSACNSASNAPSHVLLALGMDSAKALASVRVSLGRYTTQADVERAIEVFSKALSAPAAFW

SEQ ID NO: 31473 - protein, 261 aa, Pseudomonas syringae pv. syringae B728a
MTKRYSALLTALFASLMLSQTPAHANGLDDVVARGTLKVAVPQDFPPFGSVGPDMKPRGLDIDTAQLLADKLKVKLELTPVNSTNRIPFLTTGKVDLVISSLGKNPDREKVIDFSRAYAPFYLAVFGPPDSPVKDIADLKGKTISVTRGAIEDIELSNVAPEGATIKRFEDNNSTIAAYLAGQTDLIASGNVVMVAISERNPKRIPAMKVKLKDSPVYVGVNKGQPELLGKVNEILNAAKADGTLEKASQKWLKDPLPADL

SEQ ID NO: 31474 - protein, 1481 aa, Pseudomonas syringae pv. syringae B728a
MKAGLYQPDEFKDNCGFGLIAHMQGEPSHHLLQTAVQALTCMTHRGGINADGKTGDGCGLLIQKPDGFLRAIAKQHFDVDLPRQYAVGMVFLNQDDAKADAARENMNREILAEGLDLVGWRQVPIDTSVLGRLALERLPKIEQVFIGGEGLSDQEFAIKLFSARRRSSVSNAADTDHYICSFSHKTIIYKGLMMPADLTAFFPDLSDERLQTAICVFHQRFSTNTLPKWPLAQPFRFLAHNGEINTITGNRNWAQARRTKFTNDLMDLDELGPLVNRVGSDSSSMDNMLELMVTGGIDLFRGVRMIIPPAWQNVETMDPDLRAFYEYNSMHMEPWDGPAGVVMTEGRHAVCLLDRNGLRPARWVTTRNGYITLASEIGVWDYKPEDVIAKGRVGPGQIFAVDTETGQILDTDAIDNRLKSRHPYKQWLRKNALRIQATMEDNDHGSAFYDSEQLKQYMKMYQVTFEERDQVLRPLGEQGQEAVGSMGDDTPMAVLSRRVRSPYDYFRQQFAQVTNPPIDPLREAIVMSLEICLGAERNIFQESPEHASRVILSSPVISPAKWRSLMNLERPGFERHIIDLNYDESLGLEAAVRNVADQAEEAVRSGHTLIVLSDRHIAPGKLPVHASLAVGAVHHRLTEQGLRCDSNILVETATARDPHHFAVLIGFGASAVYPFLAYEVLGDLIRTGEVLGDLYEVFKNYRKGITKGLLKILSKMGISTVASYRGAQLFEAIGLSEEVCDMSFRGVPSRLKGARFVDIEAEQKALAAEAWSPRKPIQQGGLLKFVFGGEYHAYNPDVVSTLQAAVQQGDYSKFKEYTSLVDQRPVSMIRDLLQVRTIDQPLNIDEIEPLSEILKRFDSAGISLGALSPEAHEALAEAMNRLGARSNSGEGGEDPARYGTVRSSKIKQIATGRFGVTPEYLVNADVLQIKVAQGAKPGEGGQLPGGKVNGLIAKLRYAVPGVTLISPPPHHDIYSIEDLSQLIFDLKQVNPAALVSVKLVAEAGVGTIAAGVAKAYADLITISGYDGGTGASPLTSIKYAGAPWELGLAETHQTLRGNDLRGKVRVQTDGGLKTGLDVIKAAILGAESFGFGTAPMIALGCKYLRICHLNNCATGVATQNEKLRKDHYIGTVDMVINFFTYVAEETREWLARLGVRSLEELIGRTDLLDILPGETEKQQHLDLTPLLGSDHIPADKPQFSQVDRNPPFDKGLLAEKMVEMAKPAIESLSGGDYELDICNCDRSIGARISGEIARLHGNQGMNKAPVTFRFKGTAGQSFGVWNAGGLNMYLEGDANDYVGKGMTAGKLVIVPPKGSPFKTNESAIIGNTCLYGATGGKLFAAGTAGERFAVRNSGAHTVVEGTGDHCCEYMTGGFVCVLGKTGYNFGSGMTGGFAYVLDLDNTFVDLVNHELVEIQRISGESMEAYRTHLQSVLNEYVAETDSEWGRNIAENLDDYLRRFWLVKPKAANLKSLLSSTRANPQ

SEQ ID NO: 31475 - protein, 600 aa, Pseudomonas syringae pv. syringae B728a
MTTSESSATSSVKIYFRLLSYVRPYVGIFLLSIIGFVIFASTQPMLAGILKYFVDGLTNPEAVLFPNVPYLRELQLLQAVPLLIVLIAAWQGLGSFLGNYFLAKVSLGLVHDLRVELFNKLLVLPNRYFDTTNSGHLISRITFNVTMVTGAATDAIKVVIREGLTVVFLFIYLLMMNWKLTLVMLAILPLIAVMVGTASKKFRKQSKKIQVAMGDVTHVASETIQGYRVVRSFGGEAYEQARFAQASNSNTQKQLRMTKTGAIYTPMLQLVIYSAMAVLMFLVLFLRGEATAGDLVAYITAAGLLPKPIRQLSEVSSTIQKGVAGAESIFEQLDVEEEVDTGTIERERVTGHLEVKNLSFFYPQTARQVLNDISFSAAPGQMIALVGRSGSGKSTLANLIPRFYGHDIGNILLDGVEINDYRLRNLRRHIAQVNQNVTLFNDTIANNIAYGDLAGAPRADIEAAAADAYAREFIDQLPQGFDTQVGENGVLLSGGQRQRLAIARALLKNAPLLILDEATSALDTESERHIQAALDHVMKGRTTLVIAHRLSTIEKADLILVMDAGQIVERGTHTELLAQNGYYARLHAMGLDEPAPVGAV

SEQ ID NO: 31476 - protein, 437 aa, Pseudomonas syringae pv. syringae B728a
MSAPVAVPVSKPVEIKKSLIDAVVAGLLALIVFGPIVGIVLDGYSFNLQPTRVAWLVGVVMIGRFLISLFLQTPRGLRVSQSFESSDSGVHVLKPDHRSSLYWIIPLLIVIAIVFPIFANKYILTVVILGLIYVLLGLGLNIVVGLAGLLDLGYVAFYAIGAYGLALGYQYLGLGFWSALPLAAIAAALAGCILGFPVLRMHGDYLAIVTLGFGEIIRLVLNNWLSFTGGPNGVPVPAPTFLGLEFGRRAKDGGVPIHEYFGFDYNPDLKFIFIYTVLFLVVLAVLFIKHRLTRMPIGRAWEALREDEIACRSMGLNHVLVKLSAFTIGASTAGLAGVFFASYQGFVNPTSFTFFESALILAIVVLGGMGSTVGVVIAAFVLTVAPELLRSFSEYRVLLFGILMVLMMIWRPRGLIRISRTGVKPRKGALVTERAAR

SEQ ID NO: 31477 - protein, 295 aa, Pseudomonas syringae pv. syringae B728a
MNIAFIGLGNMGAPMARNLIRAGHALQVFDLNKSVLAEFAELGAQVSDSPAQAAQGTELVITMLPAAAHVRSVYLNDDGVLKGISPGVPAVDCSTIDPQTIRDIAAVAAQQGVVLGDAPVSGGTGGAQAGTLTFMVGGSAGHFAVLKPVLEQMGRNIVHCGDVGTGQIAKICNNMLLAISMIGVAESMALGNALGIDTEVLAGIINTSTGRCWSSEAYNPWPGIVESAPSSRGYSGGFGAELMLKDLGLATEAARSAHQPVILGAVAQQLYQAMSLRGDGGKDFSAIIEGYRPKA

SEQ ID NO: 31478 - protein, 103 aa, Pseudomonas syringae pv. syringae B728a
MYAVIVTGGKQYKVAPGEYLKIEKLEIATGESVTFDRVLLVGNGDDVNIGAPVVAGATVVAEVVSQGRHDKVRIIKFRRRKHHMKRMGHRQWYTEIKITGIQA

SEQ ID NO: 31479 - protein, 407 aa, Pseudomonas syringae pv. syringae B728a
MKFVDEVSIRVKAGDGGNGCMSFRREKFIENGGPNGGDGGDGGSIFMVADVNLNTLVDYRYTRHFDAERGSNGGSADCTGRKGEELVLRVPVGTTIIDATTQEIIGDLTKDGQRLMVAQGGWHGLGNTRFKSSTNRAPRQTTPGKPGDQRDLKLELKVLADVGLLGLPNAGKSTFIRSVSAAKPKVADYPFTTLVPNLGVVSVDRWKSFVVADIPGLIEGASDGAGLGIRFLKHLARTRLLLHLVDMAPLDESSAPDAAEVIVNELEKFSPSLAERDRWLVLNKCDQILEEEQEARKQEIVDRLEWTGPVYVISAIAKEGTEQLTRDIMRYLEERSQRIAEEPGYAEELAELDQRIEDEARAQLQALDDQRALRRSGVKSVHDIGDDDWDEEDVDDEDGPEIIYVRD

SEQ ID NO: 31480 - protein, 854 aa, Pseudomonas syringae pv. syringae B728a
MRIDRLTSKLQLALSDSQSLAVGLDHPAIEPAHLMQALLEQQGGSIKPLLLQVGFDINSLRKELSAELDRLPKIQNPTGDVNMSQDLARLLNQADRLAQQKGDQFISSELVLLAAMDENSKLGKLLLGQGVSKKALENAINNLRGEGAVNDPNVEESRQALDKYTVDLTKRAEEGKLDPVIGRDDEIRRTIQVLQRRTKNNPVLIGEPGVGKTAIAEGLAQRIINGEVPDGLRGKRLLSLDMGALIAGAKYRGEFEERLKSLLNELSKQEGQIILFIDELHTMVGAGKGEGSMDAGNMLKPALARGELHCVGATTLNEYRQYIEKDAALERRFQKVLVDEPSEEDTIAILRGLKERYEVHHKVAITDGAIIAAAKLSHRYITDRQLPDKAIDLIDEAASRIRMEIDSKPEVLDRLERRLIQLKVEAQALKKEKDEAAIKRLEKLQGEIERLELEYADLEEIWTSEKAEVTGSAQIQQKIEQSRQELEAARRRGDLNRMAELQYGIIPDLERSLQMVDQHGKPENQLLRSKVTEEEIAEVVSKWTGIPVSKMLEGERDKLLRMETLLHNRVIGQEEAVVAVSNAVRRSRAGLSDPNRPSGSFMFLGPTGVGKTELCKALAEFLFDTEEAMVRIDMSEFMEKHSVARLIGAPPGYVGYEEGGYLTEAVRRKPYSLILLDEVEKAHSDVFNILLQVLEDGRLTDSHGRTVDFRNTVIVMTSNLGSAQIQELVGDREAQRAAVMDAVGTHFRPEFVNRIDEVVIFEPLARDQIAGITDIQLGRLRKRLAERELSMTLSPEALDKLIAVGYDPVYGARPLKRAIQRWIENPLAQMILSGSFMPGTTITGKVVDDEITFV

SEQ ID NO: 31481 - protein, 392 aa, Pseudomonas syringae pv. syringae B728a
MHDVVIVAATRTAVGSFQGSLASVAAVDLGAAVIRQLLARTGVDGAQVDEVIMGQVLTAGAGQNPARQAAIKAGLPFSVPAMTLNKVCGSGLKALHLATQAIRCGDAEIIIAGGQENMSLSNYVLPGARTGLRMGHASMVDTMITDGLWDAFNDYHMGITAENLAQQYDISREAQDEFAALSQQKAMAAIEAGRFVDEITPILIPQRKGDPLSFATDEQPRAGTTAETLAKLKPAFKKDGTVTAGNASSLNDGAAAVMLMSTAKAEQLGLPVLARIAGYANAGVDPAIMGIGPVSATRRCLDKAGWSLAELDLIEANEAFAAQSLSVGKALGLDPQKLNVNGGAIALGHPIGASGCRVLVTLLHEMIRRDVKKGLATLCIGGGQGVALALER

SEQ ID NO: 31482 - protein, 390 aa, Pseudomonas syringae pv. syringae B728a
MSQPYSARSRAIEPFHVMALLARANELQAAGHDVIHLEIGEPDFTTAEPIIKAGQAALADGKTRYTAARGLPQLREAISGFYAQRYGVDIDPQRILVTPGGSGALLLTSSLLVDPGRHWLLADPGYPCNRHFLRLIEGEAQLVPVGPQQRYQLTPELVATHWNHNSVGALVASPANPTGTLLSRDELAALSQALKVRNGHLVVDEIYHGLTYGVDASSVLEVDNDAFVLNSFSKYFGMTGWRLGWLVAPQDAVADLEKLAQNLYISAPSMAQHAALACFEPQTLAILEQRRAEFGRRRDFLLPALRELGFGIAVEPEGAFYLYADISAFGGDAFAFCRHFLETEHVAFTPGLDFGRFQAGHHVRFAYTQSLPRLEQAVERIARGLRSWGV

SEQ ID NO: 31483 - protein, 574 aa, Pseudomonas syringae pv. syringae B728a
MELLSGAEMVVRFLRDEGVEHIYGYPGGALLHVYDALFKEPAVSHILVRHEQAATHMADGYARATGKAGVVLVTSGPGATNAITGIATAYMDSIPMVVLSGQVASTLVGTDAFQETDMIGISRPIVKHSFMIKHPSEIPDVLKKAFYLAQSGRPGPVVVDIPKDMTNPAEKFEYVFPKKAKLRSYSPAVRGHSGQIRKAVEMLLAAKRPIVYAGGGVIMGNASAQLTELAQLLDAPVTNTLMGLGCYPGTDRQFVGMLGMHGSYTANLAMHHTDVILAVGARFDDRVINGASKFCPNAKIIHIDIDPASISKTIKADVPIVGPVESVLTEMVATLKEIGETPDKASVAAWWKQIDEWRGTGDLFPYNRGDGTVIKPQAVIETLCEVTKGDAYVTSDVGQHQMFAAQYYRFNKPNRWINSGGLGTMGFGFPAAMGVKLSFPDEHVACVTGEGSIQMNIQELSTCLQYGLPVKIILLNNGVLGMVRQWQDMSYGARHSHSYMESLPDFVKLVEAYGHVGMRITDLKDLKPKMEEAFAMTDRLVFMDIQVDVTEHVYPMQIKDGSMRDMWLSKTERT

SEQ ID NO: 31484 - protein, 313 aa, Pseudomonas syringae pv. syringae B728a
MSKMMVFTGNANPDLARRVVRQLHIPLGDVSVGKFSDGEISTEINENVRGKDVFIIQPTCAPTNDNLMELVVMADAFRRSSASRITAVIPYFGYARQDRRPRSARVAISAKVVADMLTVVGIDRVLTVDLHADQIQGFFDIPVDNIYGSPVLVDDIEDQRFENLMIVSPDIGGVVRARAVAKSLGVDLGIIDKRREKANHSEVMHIIGDVEGRTCILVDDMVDTAGTLCHAAKALKEHGAAKVFAYCTHPVLSGRAIENIENSVLDELVVTNTIPLSAAAQACGRIRQLDIAPVVAEAVRRISNEESISAMFR

SEQ ID NO: 31485 - protein, 696 aa, Pseudomonas syringae pv. syringae B728a
MQTFFIAPTDFGVGLTSISLGLVRTLERAGLKVGFFKPIAQPHPGDLGPERSTELMARTHGLKPPKPLGLAHVERMLGDGQLDELLEEIINLYQQAAVGKDVLVVEGMVPTRSASYAARVNLHLAKSLDAEVILVSAPENEVLADLSGRVELQAQLFGGPKDPKVLGVILNKVRTEESMEVFASRLKEHSPLLRSGDFRLLGCIPYRAELNAPRTRDVAELLGAQVLNAGDYDQRRMTRIIICARTVLNTVPLLKPGVLVVTPGDRDDIILAVSLAAINGVPLAGLLLTSDTVPDPRIMELCRGALQAGLPVLSVSSGSYDTANRLNQLNKEIPIDDRERAENITDFVASHLDANWLHQRCGTPRELRLSPAVFRYQLIQRAQAANKRIVLPEGNEPLTIQAAAICQARGIARCVLLARPEEVHAVAQAHGIELPQGLEILDPDLIRERYVAPMVELRKSKSLNAPMAEQQLEDPVVIGTVMLALDEVDGLVSGVIHSTANTIRPALQLIKTAPGCTLVSSVFFMLFPEQVLMYGDCIMNPHPSASELSEIALQSADSATAFGISPRVAMISYSSGNSASGEEVEKVREATQLARETRRDLLIDGPLQYDAAANEQVARQLAPDSAVAGRANVFVFPDLNTGNTTYKAVQRSADCVSLGPMLQGLRKPVNDLPRGAQVDDIVYTIALTAIQADTLS

SEQ ID NO: 31486 - protein, 324 aa, Pseudomonas syringae pv. syringae B728a
MKKTVLAFSRVSPEMAERLAQDFNVIVPNPKQGDINAQFAEALPESHGLIGAGRKLGREQLQSATKLEVVSSISVGYDNYDVDYLSERGILLTNTPDVLTESTADLGFSLIMSSARRVAELDAYTKAGQWTRSIEPPHFGTDVHGKTLGIVGMGNIGAAIARRGRLGFNMPILYAGNSRKTQLEQELGAQFRSLDQLLAEADFVCLVVPLSEKTKHLIGRRELSLMKPGAILVNIARGPIVDEPALIEALQNGTIRGAGLDVYEKEPLSESPLFQLKNAVTLPHVGSATTETRQAMADRAYGNLRSALLGERPQDLVNPQVWKG

SEQ ID NO: 31487 - protein, 342 aa, Pseudomonas syringae pv. syringae B728a
MKMLKSTLAVVTALAAFGVIGAANAGTTLDAIKKKGFIQCGVSDGLPGFSVPDSTGKITGIDADVCRAVAAAVFGDATKVKFSQLNAKERFTALQSGEIDILSRNTTWTSSRDAGMGLVFTGVTYYDGIGFLVNNKLGVKSAKELDGATICIQAGTTTELNVSDYFRSNGLKYTPITFDTSDESAKSLEGGRCDVLTSDQSQLYAQRSKLAKPDDYIVLPEVISKEPLGPVVRKGDEEWFSIVRWTLFAMLNAEEAKITSKNVEAEAKSTKNPDVARMLGADGTYGKDLKLEKDWVVQIVKQVGNYGEVFERNLGEGTPLKIKRGQNALWNAGGIQYAPPIR

SEQ ID NO: 31488 - protein, 70 aa, Pseudomonas syringae pv. syringae B728a
MAERQSGTVKWFNDEKGFGFITPESGPDLFVHFRAIQGNGFKSLKEGQKVTFVAVQGQKGMQADEVQAEG

SEQ ID NO: 31489 - protein, 404 aa, Pseudomonas syringae pv. syringae B728a
MKLPIYLDYSATTPVDPRVAQKMIDCLTVEGNFGNPASRSHVFGWKAEEAVENARRQVADLVNADPREIVWTSGATESNNLAIKGVAHFYASKGKHLITSKVEHKAVLDTTRQLEREGFEVTYIEPGEDGLITPAMIEAALRDDTILVSIMHVNNEIGTINDIAAIGELTRSRGVLFHVDGAQSTGKVEIDLASLKVDLMSFSAHKTYGPKGIGALYVSRKPRVRLEATMHGGGHERGMRSGTLATHQIVGMGEAFRIAKEEMAAENVRIKALSDRFFKQVENLEELYVNGSLTARVPHNLNLSFNYVEGESLIMALKDLAVSSGSACTSASLEPSYVLRALGRNDELAHSSIRFTFGRFSTEEEIDYAAQKVCEAVTRLRTLSPLWDMFKDGVDISKIEWAAH

SEQ ID NO: 31490 - protein, 382 aa, Pseudomonas syringae pv. syringae B728a
MIDSKLPNVGTTIFTVMSQLAAETGAINLSQGFPDFDGPQALRDAVCRHVTQGHNQYSPMTGLPALRQQVAAKIARSYGRTVNPDSEITITPGATQAIFCAIHSVIRAGDEVIIFDPCYDSYEPAVELAGGRCVHVQLGLDDFSIDWQKLSDALSPRTRMIVINSPHNPSGALISRAELDRLAALIADRDIYLLSDEVYEHLVFDGARHVSVLDHEALYQRAFVVSSFGKTYHVTGWKTGYVVAPPALSAELRKVHQYVSFCGVTPLQYALADFMAEHPEHVDELPGFYQAKRDFFCGHLAESRFSFRPVGGTYFQLVDYSQIRPDLNDVDMALWMTREHGVASIPISVFYQSPPAGQRLIRLCFAKQEETLRQAAEKLCAI

SEQ ID NO: 31491 - protein, 198 aa, Pseudomonas syringae pv. syringae B728a
MLDELLRRVVRHTPETLDSDRQFPEAAVLVPITRSEQPELILTLRASGLSTHGGEVAFPGGRRDPGDPDLIFTALREAEEEIGLPPGLVEVIGPLSPLISKHGIKVTPYVGVIPDFVEYQPNDAEIAAVFSVPLEFFRQDTREHTHRIDYEGRSWYVPSYRYGEYKIWGLTAIMIVELVNVLYDTRISLHHPPERSTI

SEQ ID NO: 31492 - protein, 557 aa, Pseudomonas syringae pv. syringae B728a
MDDHFNSPSIDILYDYGPFLKKCEMTGGIGSYSSGTPTPRVAIVGAGISGLVAATELLRAGVKDVVLYESRDRIGGRVWSQVFDQTRPRYIAEMGAMRFPPSATGLFHYLKKFGISTSTTFPDPGVVDTELHYRGKRYYWPAGKKPPALFRRVYEGWQSLLRDGYLLEGGSLVAPLDIASMLKSGCLEEAAIAWQGWLNVFRDCSFYNAIVCIFTGPHPPGGDQWARPEDFELFGSLGIGSGGFLPVFQAGFTEILRMVINGYQSDQRLIPDGISSLATRLADQAFDGKTLRERICFSRVGRISRDSEKIIIQTTAGEQGLFDRVIVTSSNRAMQMIHCLTDSERFLSRDVARAVRETHLTGSSKLFILTRTKFWIKNKLPTTIQSDGLVRGVYCLDYQPDEPDGHGVVLLSYTWEDDAQKMLAMSDKKTRCQVLVNDLAAMHPTFASYLLPVEGDYERYVLHHDWLTDPHSAGAFKLNYPGEDVYSHRLFFQPMTANSPDKDTGLYLAGCSCSFAGGWIEGAVQTALNSACAVLRSTGGQVSEGNPLDCINASYRY

SEQ ID NO: 31493 - protein, 564 aa, Pseudomonas syringae pv. syringae B728a
MSKPTPEPAAHSKAGPAVPTNFLRPIVQADLDSGKHSKIVTRFPPEPNGYLHIGHAKSICVNFGLAQEFGGDTHLRFDDTNPAKEDQEYIDAIMSDVKWLGFEWAGEVRYASQYFDQLHDWAVELIKAGKAYVDDLTPEQAREYRGTLTEPGKNSPFRERSVEENLDLFARMKAGEFEDGARVLRAKIDMASPNMNLRDPIIYRIRHAHHHQTGDKWCIYPIYDFTHGQSDALEGITHSICTLEFESHRPLYDWFLDNLPVPCKPRQYEFSRLNLNYTITSKRKLKQLVDEKHVNGWDDPRMSTLSGFRRRGYTPKSIRNFCEMIGTNRSDGVVDFGMLEFSIRDDLDHSAPRAMCVLRPLKVVITNYPEGQVEKLELPRHPKEDLGMRELPFSRELYIDRDDYMEEPPKGYKRLEPNGEVRLRGSYVIRADEAIKDADGNIVELRCSYDPETLGKNPEGRKVKGVVHWVPAAESVECEVRLYDRLFRSPNPEKAEEGASFLDNINPDSLQVLTGCRAEPSLAQAQPEDRFQFEREGYFCADIKDSRPGRPVFNRTVTLRDSWT

SEQ ID NO: 31494 - protein, 589 aa, Pseudomonas syringae pv. syringae B728a
MISRITRRHRQALRLAASFIAPYRWQALGALLALVITAGITLSIGQGIKLMVDQGFMTRSPQLLERSIGFFMLLTVGLAVGTFARFYLVSWIGERVVADLRKKVFDHLIELHPGFYENNRSSEIQSRLTADTTLLQSVIGSSLSMFLRNALMVIGGIVLLFITNPKLTSIVVVALPLIIAPILMFGRRVRNLSRESQDRVANVGSYVAEALGQIKTVQAYNHQQQDKQRFSHTVEQAFETARKRILQRSWLITLVIVLVLGAVAVMLWVGGMDVISGRISSGELAAFVFYALMVGMAFGTLSEVIGDLQRAAGAAERIGELLQARSEISVPTTDLQSLPPRISGRLALENVTFAYPSRPERNALDNLTLSIEPGETLALVGPSGAGKSTILDLLLRFYDPIQGRILIEGVPIAQLDHHDLRRCFALVSQSPALFFGTVEDNIRYGNATASLEQVQAAARIAHAHEFILDMADGYRTHLGEGGVGLSGGQRQRLAIARALLVDAPILLLDEATSALDAQSEHLIQQALPSLMQGRTTLVIAHRLATVQNADRIAVMDQGRLVAVGTHQQLIASNPLYARLAALQFNAGVE

SEQ ID NO: 31495 - protein, 454 aa, Pseudomonas syringae pv. syringae B728a
MSTQLKPTLGTIHLWGIAVGLVISGEYFGWSYGWGVAGTLGFLVTALMVATMYTCFIFSFTELTTAIPHAGGPFAYSRRAFGEKGGLIAGMATLIEFVFAPPAIAMAIGAYLNVQYPGLDPKHAAVGAYIVFMALNIVGVKLAATFELVVCILAVAELLVFMGVVAPAFSFSNFALNGWAGSQTFGPEAIAGMFAAIPFAIWFFLAIEGAAMAAEEAKDPKRTIPKAYISGILTLVILAIGVMLFAGGVGDWRTLANINDPLPQAMKAVVGDSSGWLHMLVWIGLFGLVASFHGIIMGYSRQFFALARAGYLPASLARLSRFQTPHRAIIAGGLIGIAAIYSDGLINLSGMTLTAAMITMAVFGAIVMYIMSMLSLFKLRKTEPGLERTFRAPGYPVVPGIALALAVVCLVAMAWFNALIGLIFLGLMAVGFIYFSLTAKLRADAPTDAMLTGE

SEQ ID NO: 31496 - protein, 403 aa, Pseudomonas syringae pv. syringae B728a
MNERTGNALDWVAGSDAPEMNSLDVGFMALTDCAPLVVAATQGFAQPYGLSLNLERQTSWAGLRDRLVSGRLQAAHSLYGLIYAVELGISGGPATDMAILMGLNQNGQCINLSRELQQAGVITPEALDKHAHQSGSKLTFAQTFPTGNHAMWLYYWLASQGIHPLDDVTSVVVPPTQMAQHLQAGRIDGFCVGEPWGASAVQQQLGFTMATSQSIWPDHPGKVLGCTREFVEQNPNTARALIMAVLEASRFIEENDHNRRSTAQLLSGADYLDTSVDCIEPRLLGQYSDGLGNHWQDPHAVSFHTQGQVNYPWLSDGMWFMTQFRRWGLLREDPDYLAVASRVQQLDLYRQAASALGIDVPAATLRSSQLIDGRVWDGSDPAGYARSFKLHSLADDVPAMASR

SEQ ID NO: 31497 - protein, 70 aa, Pseudomonas syringae pv. syringae B728a
MSNRQTGTVKWFNDEKGFGFITPQGGGDDLFVHFKAIQSDGFKSLKEGQTVTFVAAKGQKGMQAEEVQVA

SEQ ID NO: 31498 - protein, 446 aa, Pseudomonas syringae pv. syringae B728a
MSDPISHKPAPVLRESATFDRLTIQEIQRAAETGIYDIRGGGTKRKLPHFDDLLLLGASVSRYPLEGYREKCGTDVVLGNRFAKKPLYLKIPVTIAGMSFGALSANAKEALGRGATIAGTSTTTGDGGMTPEERGQSQHLVYQYLPSRYGMNPDDLRKADAIEIVLGQGAKPGGGGMLLGMKVTERVAGMRTLPVGVDQRSACRHPDWTGPDDLAIKIAEIREITDWEKPIYVKIGASRPYYDVKLAVKAGADVIVLDGMQGGTAATQEVFIEHVGIPILPAIPQAVQALQEMGMHRKVQLIVSGGIRNGADVAKAMALGADAVAIGTAALIALGDNHPRLDEELRKIGSAAGYYDDWQNGRDPAGITTQDPELSKRLDPVEGGRRLANYLRVLVLEAQTMARACGKSHLHNLDPEDLVALTVESAAMARVPLAGTSWIPGSGSGY

SEQ ID NO: 31499 - protein, 437 aa, Pseudomonas syringae pv. syringae B728a
MATAETSSLRRAITAPMLTLFILGDVLGAGVYALAGTIAGRVGGAIWAPLLIALCFALLTAASYAELVTKYPRAGGAAVYAEKAFGKPLLSFLVGFSMVAAGVTSAAGLAVAFAGDYFQALLDWPAQWVCVAFLVTVGLLNARGIKESLSANLVMTVIELSGLLMVIAAAIWFVSQGQGVPQRVFELDSASPATAILGASLLAFYSFVGFETSANLAEEIKDVRKVYPRALFGALLAAGAVYILVGMGAAMVLPVEQLKDSQAPLMDVVSASGLGIPAPWFAVIALIAVANGALLTMIMASRLTFGMAREGLLPAVMGSVLPKRRTPGLAILATTLVAIALSFTSTLTILAETVVLLLLFVFLSVNIAVLVLKRDKVEAGHFQVHWVIPLLGILSCLLLLTQQGPETWLRAGIMLAVGAALYGLTRLGSSALASHPR

SEQ ID NO: 31500 - protein, 552 aa, Pseudomonas syringae pv. syringae B728a
MYVYDDYDQKIIEDRVKQFRDQTRRYLVGELSEEEFRPLRLQNGLYVQRFAPMLRVAVPYGQLTSRQARMMAKIARDYDKGYAHISTRQNVQFNWPALEDVPDILAELATVQMHAIQTSGNCLRNVTTDQFAGVAADELVDPRPWCEIVRQWTTFHPEFAYLPRKFKIAINGSTSDRAAIEVHDIGLEPLRNEAGELGFRVLVGGGLGRTPVVGAFINEFLPWQDLLSYLDAILRVYNRYGRRDNKYKARIKILVKALTPEVFAAKVEAEMAHLRGGQTTLTEAEVQRVSRHFVDPQYKVLSDQHAELAALDAQHPGFARWRQRNVLAHKKPGYIAVTLSLKPTGVAPGDVTDKQLDAIADLADRYSFGQLRTSHEQNIILADVEQRELFTLWNELRDNGFATPNIGLLTDIICCPGGDFCSLANAKSIPIAESIQRRFDDLDYLFDIGELDLNISGCMNACGHHHVGHIGVLGVDKKGEEFYQVSLGGSASRDASLGKILGPSFAQEAMPDVIEKLIDVYVEKRTEDERFIDTYQRIGIDPFKERVYAANH

SEQ ID NO: 31501 - protein, 283 aa, Pseudomonas syringae pv. syringae B728a
MHRGPSFVKACAFVLSASFMLANTVQAAEGSKLDAVLKRGNLVVGTGSTNAPWHFQGADGKLQGFDIDIGRIIAKGLFNDPSKVEFVVQSSDARIPNLLTDKVDISCQFITVTASRAQQVAFTLPYYREGVALLLPANSKYKEIDDLKAAGDDVTVAVLQNVYAEELVHQALPKAKVDQYDSVDLMYQAINSGRADTAATDQSSVKYLMVQNPGRYRSPAFAWSPQTYACAVKRGDQDWLNFVNTALHEAMTGVEFPAYAASFKQWFGVDLPVPAIGFPMEYK

SEQ ID NO: 31502 - protein, 316 aa, Pseudomonas syringae pv. syringae B728a
MIDVTVLSRNDEALDICSFELVRADGALLPPFSAGAHIDVHLPDGLIRQYSLCNAPSERHRYLIGVLNDPASRGGSRSLHQQIQPGAQLRISEPRNLFPLAENSRRTLLFAGGIGITPILCMAEQLALEAADFELHYCVRSAERGAFIERLKHSAFAERITLHFDEQPDTALEAGKVLANPQPDTHLYVCGPGGFMQYILDSARAAGWSEDTLHREYFSAEPVDTSNDGSFSIEIASTGQVIAIPANKTVAQVLESHGIDIPLSCEQGVCGTCLTRVLKGIPDHRDLFLTEDEQALNDQFTPCCSRSKTPVLVLDI

SEQ ID NO: 31503 - protein, 290 aa, Pseudomonas syringae pv. syringae B728a
MSFKTALVLSLIAFTLLAGCDKPAEQKPVAKAAPSPSSSYLETIKARDKLIVGVFSDKPPFGFVNEQGQYVGFDTDLGKRFAKDLLGDEKKVEFVVVEPASRIPFLQSDKVDLILANMTVTPERREAVDFTHPNLRVAVQALVPQASPVKTLDDLASKTTIVTTGTTADIWLTKNHPDWKVLKFEKNSESLQALANGRGDAYAQDNLVLFSWAKKNPGYRVLEQKLGDEAPIAPAVKKGNIELRDWVNTELARLGEEKYLLKLYDQYVRPELAEGTDPNAVIVEGGSWKP

SEQ ID NO: 31504 - protein, 214 aa, Pseudomonas syringae pv. syringae B728a
MFPPYGTESTMSIIADLIKSRISANNYDTERKLSDQAITDLIDLATHAPSAFNLQNWRFVAIRSEEAKARLLPLAYGQKKVVDSAVTFIVCGTLNPHQTIATSLKPSMDAGVIDKAIYDMWVGAVQGMYAENPQLQRDEAIRSGSLAAMTLMLAAKGQGLDSTPMIGFDPAAVAEAFNLSATEIPVMLVTVGYPGESNWPQKPRKAVREVLEFI

SEQ ID NO: 31505 - protein, 402 aa, Pseudomonas syringae pv. syringae B728a
MSIERTPPHQDPVVIVSAVRTPMGGFQGDLQSLSATALGSIAIRAAVERAGIEPADVEHVLFGCVLPAGLGQAPARQAALGAGLSHATLCSTVNKMCGSGMQSAIMAHDLLLADSTAVAVAGGMESMSNAPYLLDRARSGYRMGHGKVLDHMFLDGLEDAYEPGRLMGTFAEDCAGLNGFTREAQDAFALASLARAQKAIAEGHFDAEIVPVQVTVGKESRQITHDEQPPKARPDKIPTLKPAFREGGTVTAANSSSISDGAAALLLMRQSEAQRRGLRPLAVFHAHAAFADEPGLFPTAPIGAIQRLLGKTGWSLDDVDLFEINEAFAVVPLVAMRELGIPHDKVNVNGGACALGHPIGASGARIIVTLLAALRHRQLKRGLAAICIGGGEATAIAIEFLN

SEQ ID NO: 31506 - protein, 396 aa, Pseudomonas syringae pv. syringae B728a
MNEPVLYFDYAATTPVDERVISVMVDCLGASGNFGNPASSSHSFGQKARLAVELAREQVAHLVGAQASQIIWTSGATESSNLALKGVAQERAKRQAAAGGRPGHIITSLIEHKATLDTARQLEEQGVDVTWLAPDSEGLISADAVSAALRDDTFLVSLMLVNNELGTVNDIAEIGRRVRGHGALLHVDAAQGAGKLPIDLSQLAVDLMSLSAHKIYGPKGIGALYVGPRAQQRVLAQIHGGGHECGLRSGTLATHQIAGMGAAFALAAEVLEEEAVEIQRLSDLLCDRLAEIPGVCINGSPTQRIAHTLSFTFTHNDLDVAALGESLAFSSTSACNSAKNLPSHVLLALGLSPQAASQTIRLSLGRFTREQDIARAADLIRASLIEPAFWAVAQAR

SEQ ID NO: 31507 - protein, 310 aa, Pseudomonas syringae pv. syringae B728a
MTTVLVLVENLDTYLPILESSGFQLIRAPTAELRAAAIATHGQSISAVVTRGPLGFFAEEMDALPQLRIICVSGAGYEKVDLPAAQARGIVVTNGAGVNAATVADHTLALLLSLVRDIPQADASVRRSEWRKVVRPSLAGKRLGIVGLGAVGLAIARRAAAFDIVIGYHNRKPRSDCDYTWHATAQALAAASDFLVIATPGGSGTQHLIDARVLEALGPDGFLVNIARASVVDTQALVSALQNEQIAGAALDVFDDEPTVPDVLKTLGNVVLTPHVAGLSPEASRDSVQRVNDNLLAFFAGQPVLTPVTE

SEQ ID NO: 31508 - protein, 391 aa, Pseudomonas syringae pv. syringae B728a
MSLNPRDVVIVDFGRTPMGRSKGGMHRNTRAEDMSAHLISKLLERNNKVDPAEVEDVIWGCVNQTLEQGWNIARMASLLTQIPHTSAAQTVSRLCGSSMSALHTAAQAIMTNNGDVFIIGGVEHMGHVSMMHGVDPNPHMSLHAAKASGMMGLTAEMLGKMHGITREQQDAFGLRSHQLAHKATLEGKFKDEIIPMQGYDENGFLKVFDYDETIRPDTTLESLAALKPAFNPKGGTVTAGTSSQITDGASCMIVMSAQRAQDLGIQPMAVIRSMAVAGVDPAIMGYGPVPATQKALKRAGLSIADIDFFELNEAFAAQALPVLKDLKVLDKMNEKVNLHGGAIALGHPFGCSGARISGTLLNVMKQNGGTFGVSTMCIGLGQGIATVFERV

SEQ ID NO: 31509 - protein, 471 aa, Pseudomonas syringae pv. syringae B728a
MPINVLLVEDDRSLREALGETLELAGYDYKAVGSAEEALVAAEATPFSLVISDVNMPGMDGHQLLSLLRSRHPQLPVLLMTAHGAVERAVDAMRQGAADYLVKPFEPKALIALVARHALGRLEPAERDGPIAVEPASIQLLNLASRVAKSDSTVLISGESGTGKEVLARFIHQNSPRADKPFIAINCAAIPDNMLEATLFGHEKGSFTGAIAAQAGKFEQADGGTILLDEISEMPLGLQAKLLRVLQEREVERVGARKPIVLDIRVVATTNRDLAGEVAAGRFREDLFYRLSVFPLAWQALRQRTADILPLAERLLAKHVNKMKHAPVRLSAEAQQCLVSYPWPGNVRELDNAVQRALILQQGGVIQAQDFCLSGPVTSLPVAASVEAAVAVTGTTVAENAGAGVSPESVGALGDDLRRHEFQMIIDTLRSERGRRKEAAERLGISPRTLRYKLAQMRDAGMDVEAYLFAT

SEQ ID NO: 31510 - protein, 410 aa, Pseudomonas syringae pv. syringae B728a
MALIVQKFGGTSVGSVERIEQVADKVKKFREAGDDLVVVLSAMSGETNRLIELARQISDQPVPRELDVIVSTGEQVTIALLAMALMKRGVPAVSYTGNQVRILTDSAHNKARILQIDDQKIRSDLKAGRVVVVAGFQGVDEHGNITTLGRGGSDTTGVALAAALKADECQIYTDVDGVYTTDPRVVSQAQRLDKITFEEMLEMASLGSKVLQIRAVEFAGKYNVPLRVLHSFKEGPGTLITIDEEESMEQPIISGIAFNRDEAKLTIRGVPDTPGVAFKILGPISAANIEVDMIVQNVSHDNTTDFTFTIHRNDYQAALQVLEATAREISAREVSGDTKIAKVSIVGVGMRSHAGVASRMFEALAKESINIQMISTSEIKVSVVIEEKYLELAVRALHTAFELDAPRQGE

SEQ ID NO: 31511 - protein, 469 aa, Pseudomonas syringae pv. syringae B728a
MSETTSPSGELKRGLKNRHIQLIALGGAIGTGLFLGSAGVLKSAGPSMILGYAICGFIAFMIMRQLGEMIVEEPVAGSFSHFAHNYWGGFAGFLSGWNCWLLYILVGMSELTAVGKYIHYWLPDIPGWVSAAAFFVLINAINLTNVKVFGETEFWFAIIKVVAIIGMIALGSYMLVSGSGGPQASVSNLWEHGGFFPNGVSGLVMALAIIMFSFGGLEMLGFTAAEAEQPKTVIPKAINQVIYRILIFYIGALVVLLSLTPWDSLLASLNASGDSYSGSPFVQVFSMLGSDTAAHILNFVVLTAALSVYNSGTYCNSRMLVGMAEQGDAPRALAQVDKRGVPVKAIFASAAVTLVAVLLNYFVPQQALELLMSLVVATLVINWAMISYSHLKFRQHMNRTAQVPLFKALWYPYGNYVCLAFVVFILGIMLMIPGIQISVYAIPVWLAVMWVCYRAKNRRSVVVPAESGK

SEQ ID NO: 31512 - protein, 403 aa, Pseudomonas syringae pv. syringae B728a
MQFNKSNKLANVCYDIRGPVLKHAKRLEEEGHRILKLNIGNPAPFGFEAPDEILQDVIRNLPTAQGYSDSKGLFSARKAVMQYYQQKQVEGVGIEDIYLGNGVSELIVMSMQALLNNGDEVLVPAPDYPLWTAAVALSGGSPVHYLCDEQANWWPDLEDIKAKITPNTKAMVIINPNNPTGAVYSREVLLGMLELARQHNLVVFSDEIYDKILYDDAVHICTASLAPDLLCLTFNGLSKSYRVAGFRSGWIAISGPKHNAQSYIEGIDILANMRLCANVPSQHAIQTALGGYQSINDLILPPGRLLEQRNRTWELLNDIPGVSCVKPMGALYAFPRIDPKVCPILNDEKFVLDLLLSEKLLVVQGTAFNWPYPDHFRVVTLPRVDELEQAIGRIGNFLKGYRQ

SEQ ID NO: 31513 - protein, 557 aa, Pseudomonas syringae pv. syringae B728a
MTQEIGGFAALELHPNIVAAVVATGYEEPSAIQQQSIPIILAGHDMIGQAQTGTGKTAAFALPILHRIDPSKREPQALILAPTRELALQVATAFETYAKQMPGVTVVAVYGGAPMGPQLKAIRNGAQIVVATPGRLCDHLRRDEKVLATVNHLVLDEADEMLKLGFMDDLEVIFKAMPETRQTVLFSATLPQSIRAIAERHLRDPKHVKIQTKTQTVTAIEQAHLLVHADQKTSAVLSLLEVEDFDALIMFVRTKQATLDLASALEAKGYKAAALNGDIAQNQRERVIESLKDGRLDIVVATDVAARGLDVPRITHVFNVDMPYDPESYVHRIGRTGRAGREGRALLLVTPRERRMLQVIERVTGQKVAEVRLPDAQAVLDARIKKLTNSLSPLVADAESTHGDLLDRLTADIGCSPRALAAALLRKATNGQALTLAAIERERPLVPNNAPRGDRPERSSDRGDRPERERRAPVPLAEGRARCRTALGARDGIAAKNLLGAILNEGGLAREAIGRIQVRDSFSLVELPEDGLERLLTKLKDTRVAGKQLKLRRYRED

SEQ ID NO: 31514 - protein, 590 aa, Pseudomonas syringae pv. syringae B728a
MCGLAGELRFDHQPADLAAVERITHELAPRGPDAWGFHSQGPVALGHRRLKIMDLSDGSAQPMIDSNLGLSLAFNGAIYNFPELRAELESLGYQFHSGGDTEVLLKGYHAWGADMLPKLNGMFAFAIWERDSKQLFIARDRLGVKPLYLSKTDKRLRFASSLPALLKGGDISGMLDPVALNHYLNFHAVVPAPRTLLAGVEKLPPASWMRIDASGKVEQKVWWTLPYGPHEDEKNLTLEDWRDRVLDSTREAVAIRQRAAVDVGVLLSGGVDSSMLVGLLREVGVEDLSTFSIGFQDAGGERGDEFQYSDLIAKHYGTRHHQLRIQEREIIEQLPAAFRAMSEPMVSHDCIAFYLLSREVSKHCKVVQSGQGADELFAGYHWYPQVDGASDPVAAYRDAFVDRSYAEYAETVQPKWRTANDAAGDFVRDHFAQPGASAAVDKALRLDSTVMLVDDPVKRVDNMTMAWGLEARTPFLDYRLVELSARIPGKFKLPDGGKQVLKEAARMVIPSEVIDRKKGYFPVPGLKHLQGDTLNWVRELLTDSSQDRGLFNPAMVDKLLTNPEGQLTPLRGSKLWQLAALNLWLSEQGL

SEQ ID NO: 31515 - protein, 405 aa, Pseudomonas syringae pv. syringae B728a
MADVNKVVLAYSGGLDTSVILKWLQDTYNCEVVTFTADLGQGEEVEPARAKAQAMGVKEIYIDDLREEFVRDFVFPMFRANTVYEGEYLLGTSIARPLIAKRLIEIANETGADAISHGATGKGNDQVRFELGAYALKPGVKVIAPWREWDLLSREKLMDYAEKHNIPIERHGKKKSPYSMDANLLHISYEGGVLEDTWTEHEEDMWRWTKSPEDAPNVATYLELTYRNGDIVALDGVEMTPATVLATLNRIGGENGIGRLDIVENRYVGMKSRGCYETPGGTIMLRAHRAIESITLDREVAHLKDELMAKYASLIYTGYWWSPERLMLQQMIDASQVHVNGVVRLKLYKGNVIVTGRKSDDSLFDANIATFEDDAGAYDQADAAGFIKLNALRMRIAANKGRKLF

SEQ ID NO: 31516 - protein, 108 aa, Pseudomonas syringae pv. syringae B728a
MDIIETIKEQIANNTILLYMKGAPNAPQCGFSAKASQALMACGEKFAYVDILQNPEIRANLPKYANWPTFPQLWVAGELVGGSDIITEMMDDGSLQTLVKEASAAKAE

SEQ ID NO: 31517 - protein, 300 aa, Pseudomonas syringae pv. syringae B728a
MNDTTATRCGYVAIVGRPNVGKSTLLNHILGQKLAITSRKPQTTRHNMLGIKTEGAVQAIYVDTPGMHKNGEKALNRYMNKTASAALKDVDVVIFVVDRTRWTDEDQMVLERVQYVQGPVILAINKTDRIEDKSDLMPHLEWLQGQLPNASIVPISAQHGHNLEALESLIASHLPENDHFFPEDQITDRSSRFLAAELVREKIMRQLGAELPYQITVEIEEFKQQGRTLHIHALILVERDGQKKIIIGDKGDRIKRIGSDARRDMELLFDSKVMLNLWVKVKGGWSDDERALRSLGYGDL

SEQ ID NO: 31518 - protein, 444 aa, Pseudomonas syringae pv. syringae B728a
MLNSVIVVDDEAPIRQAVEQWLTLSGFEVQVFARAEECLAHLPEHFPGVVLTDVRMPGMSGLELLTRLQGADRDLPVILLTGHGDVPMAVEAMREGAYDFLEKPFSPETLISNLRRALEKRQLVLENRRLHEQADARTRLDATLLGVSPGMQTLRRQVLELAQLPVNVIIRGETGSGKELVARCLHDFGPRAARPFVALNCAAIPEHLFEAELFGHESGAFTGAQGKRIGRLEYADGGTVFLDEIESMPMAQQVKLLRVLQDKRLERLGSNQSIDVDLRIIAATKPDLLEEARAGRFREDLAYRLNVAELRLPPLRERLEDIAQLFSHFARAAAERVGREAPALDAARLSLLLGHDWPGNVRELANAAERQALGLEQALPQPDTQWQGHSLAARQEAFEAQCLRASLARHKGDIKAVLNELQLPRRTLNEKMQRHALVRETFLE

SEQ ID NO: 31519 - protein, 399 aa, Pseudomonas syringae pv. syringae B728a
MREVFICDAIRTPIGRFGGGLSSVRADDLAAVPIKALMERNPSVNWEEIDEVFFGCANQAGEDNRNVARMAALLAGLPQSVPGVTLNRLCASGMDAIGTAFRAIASGEIELAIAGGVESMSRAPFVMGKADAAFSRNMKLEDTTIGWRFINPAMKAQYGVDSMPETGDNVATDFRISRADQDAFALRSQQRTAVAQAAGFFEEEIVPVRVAHKKGETLVDKDEHPRGDTSLETLSKLKPVNGPDRTVTAGNASGVNDGAAALILASAEAVKKHGLTPRARVLGMASAAVAPRVMGIGPVPAVRKLVERLGLAVTDFDVIELNEAFASQGLAVLRELGLADDAPQVNPNGGAIALGHPLGMSGARLVLTALHHLEKTGGRRGLATMCVGVGQGLALAIER

SEQ ID NO: 31520 - protein, 324 aa, Pseudomonas syringae pv. syringae B728a
MNQSSDLIQSAQRTIRLEIEAMQGLLERLDGDFVRACEMILASKGRVVVVGMGKSGHIGNKIAATLASTGTTSFFVHPAEASHGDMGMITRDDIILALSNSGSTNEIVTLLPLIKRLGIKMISLTGDPESILAKAADINLNAHVVHEACPLNLAPTSSTTAALVMGDALAVALLDARGFTAEDFAFSHPGGALGRRLLLKVENVMHSGESLPSVQRGTLLRDALLEMTRKGLGMTAIVEADGTLAGIFTDGDLRRTLDRPVDIRQTIIDEVMTLHGKTAHAEMLAAEALKIMEDNKISALVVVDQNDRPVGAFNLQDLLRAGVM

SEQ ID NO: 31521 - protein, 638 aa, Pseudomonas syringae pv. syringae B728a
MGRIIGIDLGTTNSCVSILENGNVKVIENAEGTRTTPSIIAYANDGEILVGQSAKRQAVTNPHNTLYAVKRLIGRKFEEDVVQKDIQMVPYKIVKADNGDAWVEVNGQKMAPPQISAEILKKMKKTAEDYLGEAVTEAVITVPAYFNDSQRQATKDAGRIAGLDVKRIINEPTAAALAYGMDKAKGDHTVIVYDLGGGTFDVSVIEIAEVDGEHQFEVLATNGDTFLGGEDFDIRLIDYFVDEFKKESGMNLKGDPLAMQRLKEAAEKAKIELSSSTQTEVNLPYITADATGPKHLVVKISRSKLESLVEDLVQRTIAPCEMALKDAGIDRSKINDVILVGGQTRMPLVQKLVTEFFGKEARKDVNPDEAVAMGAAIQGAVLAGDVKDVLLLDVSPLTLGIETMGGVMTALIEKNTTIPTKKSQVFSTADDNQNAVTIHVLQGERKQAAQNKSLGKFDLAEIPPAPRGVPQIEVTFDIDANGILHVGAKDKATGKQQSIVIKANSGLSEEEIQQMVRDAEVNSEEDRKFEELASARNQGDALVHSTRKMIADAGDKVTAEEKTAVEAALVALEAAIKGDDKAAIEAKVEELSKVSAPIAQKMYAEQAENPDAAAKPAEETAKADDVVDAEFEEVKDHK

SEQ ID NO: 31522 - protein, 658 aa, Pseudomonas syringae pv. syringae B728a
MCGITGFFGVKNKNLDETTVIKNMLSMIEHRGPDQAGYYVNNSMGLGTMRLSIIDLAAGIQPLSDGTGQYWISYNGELYNYIELRRRLQVLGHHFSTESDTEVVLRSWMEWGDEALEKFNGAFAFAIYDTVKDEVFIARDRFGKRPLFYTQTDGGYLFASEMKCFFGFPGFEFKFDEMSLSSILAHWTPLPSQTPFQGIRQLPPGSIMTLRGAQCEIRPYYALDFRAVDFDGTENEAKEEIRNTLEQAVKLRLRSDVPMGLYLSGGVDSSVLTSIAARIIKQKPLRTFSVEFEDKNLDESSDQQLVSALFSTKHERLIINHKDIVDNFSATVFHAEMPLFRTAPVPMYMLSKHVRSTGIKAILSGEGADEVFLGYNIFKETLLRSQWDTTDHDEKKRLLAKLYPYMKSFSEDNDSNLMGFYNAYAKEKIPGLFSHEIRFQNGRFASRLLKTKNDPFAGIQAWVAKDPVYSALSPTQKAQWLEFNTLLSGYLLSSQGERMGLAHGIENRCPFLDINVQKLASSINLRFDDGFTEKYMLRMAYDGILPGRIIHKAKTPYRAPDSGPFVEHALDYLNHLCESNALDAIELINPVFAKALIKKVVERTLAGGEDITVRDNQAFVYLMSLIELDKWFVKRQGAAYINPCRVDKLLVQAVDARH

SEQ ID NO: 31523 - protein, 447 aa, Pseudomonas syringae pv. syringae B728a
MNEQQSARTSSATLRPSACPGLLRIVPALDGGICRIKLAGGVISSAQAMAVAEAARTYAQGVIEATNRANLQIRGIGADHDGLIGALMAAGLGPANPASDDVRNLMLSPTAGLDPQMLFDARPLAAQILDALEHHPRFHELSPKFALSLDAGEALVMLEHPHDVWLSALKRDDEVLLAFGLAGCPAHDRPLAAVPLAEGKMLVVALLELFLDLARPEHTRMRHLLTEVSTADLLRELSTRSACTVRTDKAITDWQRPAIQGTRHIGVYPQAQPNQVAVGAAVPLGRLDAAMLCSVAQLAADQGDGTLRLTPWQSLLLPNVPVERAAAVLDELQASGFAGSAEQPLAQMLACTGSAGCAKGLADTKADALQLAAALDTGQAIHLSGCTRSCAAAHVAPVTLLAVAPGRYDLYFRDAAHAGFGVLRARNLTIEAVGAQLNAGSRSNMHD

SEQ ID NO: 31524 - protein, 271 aa, Pseudomonas syringae pv. syringae B728a
MSLNTPQQIAEIAVESGVKKAHLGLSSLMILGFLAGAFIALGFLLDIHVSTMIPHEWASLGNLLGAVVFPVGLILVVLAGGELLTGNMMSLPMALFAGRIGLGQLVRNWVLVTLANLIGALFVAYCFGHVVGLTEGAFMAKTVAIANAKVGASFEQAFISGIGCNWLVCLAVWLSYASKDVIGKVVGMWFPVMAFVAIGFQHIVANMFVIPAAIFAGALSWAQFGDNFVPVFLGNAVGGAVFVGLAYHLAFSNKATQPAELSRTSGAQTPE

SEQ ID NO: 31525 - protein, 559 aa, Pseudomonas syringae pv. syringae B728a
MKNNRHPANGKKPITMFGPDFPFAFDDWIEHPKGLGSIPVENHGAEVAIIGAGIAGLVAAYELMKMGLKPVVYEASKMGGRLRSQEFEGAKGIVAELGGMRFPVSSTAFFHYVDKLGLESRPFPNPLTAASGSTVIDLEGTTYYAQMLSDLPALFQEVADAWADALESGSQFGDIQQAIRDRDVPRLKELWNKLVPLWDDRTFYDFVATSKAFAKLSFFHREVFGQVGFGTGGWDSDFPNSMLEIFRVVMTNCDEHQHLIVGGVQQVPVGLWSHVPEHCAHWPKGTSLSSLHRGAPRPGVKRIARAEDGSFAVTDNWGDTRQYAAVLTTCQSWLLTTQIECEESLFSQKMWMALDRTRYMQSSKTFVMVDRPFWKDKDPETGRDLMSMTLTDRLTRGTYLFDNGDDKPGVICLSYSWMSDALKMLPQPIEKRVKLALDALKKIYPKVDIAARIIGDPITVSWEADPHFLGAFKGALPGHYRYNQRMYAHFMQQDMPSEQRGMFIAGDDVSWTPAWVEGAVQTSLNAVWGIMNHFGGKTHAENPGPGDVFHEIGPIALGD

SEQ ID NO: 31526 - protein, 366 aa, Pseudomonas syringae pv. syringae B728a
MSQSFLSPVTTQTWANGRHLVRVVKVIQETWDVRTFCFMADQPIMFFFKPGQFVTLELEIDGLPIMRSYTISSSPSVPYSFSITVKRVPGGRVSNYLHDTLIEGQELAVHGPVGLFNAIDFPNPKILYLSGGVGITPVMSMARWFYDTNANVDMVFVHSARSPKDIIYHRELEHMASRIDNFNLHLVCEKHGLGEPWAGYRGYLNQKMLELMAPDFMEREVFCCGPTPYMTAVKRLLQENGFNMAQYHEESFGATPPEARADAVEQAEIAADAPDVDIADLHQVEFTDTGKSIRVGPGETVHAAAAKLGLMIPKACGMGICGTCKVMKLSGEVEMEHNGGITDEDVAEGYILSCCSVPKGDVRIEY

SEQ ID NO: 31527 - protein, 664 aa, Pseudomonas syringae pv. syringae B728a
MSSASSSSSGMVRMNAPVFYFAASFILIFGIVVIAFPQASGEWLLAAQNWAANTVGWYYMMVMTLYLVFVVVTALSGFGKIKLGADHDEPEFSYLSWAGMLFAAGISITLFFFCVSEPLTHLLQPPQGEGGTAEAARQGMQLLFLHWGLHGWGVFAFVGMALAYFAYRHNLPLALRSALYPLIGKRINGPIGYAVDGFGIIATIFGLGADMGFGVLHLNSGLDYLFGVAHTHWIQVGLITLMMGAAILVAIAGVDKGVRVMSDINMLLACALLLFVLFAGPTQHLLNTLVQNIGDYLGALPSKSFDVYAYNEPSDWLGGWTVFYWAWWIAWAPFVGLFIARISRGRTIREFVFGVLLIPLGFTLAWMSIFGNSAIDQVLNHGMTALGQSAIDDPSMTLYLLLETYPWSKTVIAVTVFISFVFFVTSADSGTVVLSTLSAKGGNPDEDGPKWLRVFWGVATALITSGLLFSGSIDALKSAVVLTSLPFSLILLLMMWGLHKAFVMESQRKIAQLYSLAPVSGSRRGGWRQRLSQAVHYPSRDEVYRFLDQTVRPAIEEVTAVFVEKGLNVVNVPDPSNDSVTLEIGHGEERPFIYQVQMKGFFTPSFARGGMGSKQLNNRRYYRAEVHLSEGSQDYDLVGYTKEQVINDVLDQYERHMQFLHLVR

SEQ ID NO: 31528 - protein, 458 aa, Pseudomonas syringae pv. syringae B728a
MTSQDGLKRGLSARHIRFMALGSAIGTGLFYGSASAIQQAGPAVLLAYLIGGAAVYMVMRALGEMAVHDPVSGSFSHYATRYMGPLAGFVLGWTYAFEMIIVCLADVTAFGIYMGFWFPEVPRWIWVLGIVFLIGALNLCNVKVFGETEFWLSILKVSAIVAMIVAGFGIMIFGIGSSASGSEIGISNLWAHGGFMPNGVTGLIASFAVVMFAFGGIEIIGITAGEAKDPRRSLPQAINAVPLRILLFYVLTLFVLMCIYPWPQIGTQGSPFVQIFDNLGIASAATILNIVVISAAVSAINSDIFGAGRMMYGLAREGQAPASFARVSRHGVPWMTVLVMGIALLGGVLLNYLIPKDVFLLIASLATFATVWVWLMILLTQVSMRRSMSREEAAQLKFAVPFWPYGPAAAIAFMLFIFGVLGYFPDNRAALIVGAIWIVLLLIAYAVWVKPKALNTTH

SEQ ID NO: 31529 - protein, 867 aa, Pseudomonas syringae pv. syringae B728a
MNLKSLFAKLNETSRTATESAAALCLSENHYDVEVEHLLLQLLDNNDNDLPVILRHYDVVPDRLQAQLVTALGTFKKGNTRTPALSPHITRMIEQAWVLASIEFGQSQIRTGHLVQALLDDDALRRVVIGSAPELEKINADDLRLNMSALVEGSPETKLSKPLANADASTGATTKGNGKTPALDQYTVNLTQSARDGRIDPVLGREFEVRQMVDILTRRRQNNPILTGEAGVGKTAVVEGLALRIVQGDVPSVLKGVAIHTLDLGLLQAGAGVKGEFENRLKSVIEETKRSLHPIILFIDEAHTLIGSGGQAGQNDAANLLKPALARGELRTIAATTWAEYKKYFEKDAALARRFQVVKVEEPDEDKAIHMLRGLLAKMQEHHKVTVMDEALVQAVRLSNRYITGRQLPDKAVSVLDTACARVALGQSAQPGALEDCKRHIDNLNAEITVLEQETAKGSDHARRLTALHEELQAEQETRESLEQQWKRELELVEKLGALSVPQSGEPDAGQIAAVRAELASVQGEQPLVHALVDGGTIGEVISGWTGIPLGKMLRDEIDTVQSLPALLGERVLGQDHALEEIGKRIKISRARMEDPNKPIGVFLLLGPSGVGKTETALALADTLYGGERNVITINMSEYQEAHTVSSLKGSPPGYVGYGEGGVLTEAVRRKPYSVVLLDEVEKAHPDVLELFFQVFDKGVLDDGEGREINFRNTVIILTSNTGTDRIMQWCLNTEQKPTPDDIVEGLRDELNQVFKPAFLGRLTIVPYYPVQDAILERIVGLKLERIRKRFERNHQAVLRYDEALIKAIASRCTEVDSGARNIDNILSKTLMPELAQRVLERMAQDKPIQSLTIDLGSDGDFAYTLT

SEQ ID NO: 31530 - protein, 373 aa, Pseudomonas syringae pv. syringae B728a
MHIGVPLETQAGETRVSATPETIKKLISQGHRVTVQSGAGIHASVPDSAYEAAGAVIGDSNETYAAELILKVVAPDDEALSLIKSGSVVVGMLNPFNDELIGKMAARGITAFALEAAPRTSRAQSLDVLSSQANIAGYKAVLLAAHHYPRFMPMLMTAAGTVKAARVLILGAGVAGLQAIATAKRLGAVVEASDVRPAVKEQIESLGAKFIDVPYETDEERECAEGVGGYARPMPASWMQRQAAAVHERAKLSDIVITTALIPGRKAPVLLGAETVAQMKPGSVVIDLAAAQGGNCPLTVADQVVVEHGVTIVGHTNLPALVAADASALYARNLLDFMKLLFDKDGTFSINLEDDIVAACLMCRDGQVVRKNG

SEQ ID NO: 31531 - protein, 563 aa, Pseudomonas syringae pv. syringae B728a
MDIKRTILIVALAIVTYVGVLKWNQDYGQAAMPTQNVAASTTAPGIPDTAAGTNGSASADVPSANATANTAAAPLETPAVASKDLIHVKTDVLDLAIDPVGGDVVQLRLPLYPRRQDRPDVPFQLFDNGGERTFLAQSGLTGTNGPDARAAGRPVYTSTQKTYQLADGQDTMVVDLKFSENGVNYIKRFTFKRGLYDLVMTYVVDNQSAQPWSGNLFAQLKRDASSDPSSTTATGTATYLGAALWTAAEPYKKVSMKDIDKGQVKETVQGGWVAWLQHYFVTAWIPDHNATNAVQTRKDSQGNYIIGFTSPTLSVAPGAQGETSATLYAGPKSQAVLKELSPGLELTVDYGFLWFIAQPIFWLLQHIHAILGNWGWSIIVLTMLIKGLFFPLSAASYKSMARMRAVAPKLALLKEQHGDDRQKMSQAMMELYKKEKINPLGGCLPILVQMPVFLSLYWVLLESVEMRQAPWILWITDLSIKDPFFILPIIMGATMFIQQRLNPTPPDPMQAKVMKMMPIIFTFFFLWFPAGLVLYWVVNNTLSIAQQAYITRKIEAATKKAAV

SEQ ID NO: 31532 - protein, 586 aa, Capsicum annuum
MLRSFISKRSLQSFLRYHHHHHHRAHRRPFSTTPGPPTADAELRKYIGYTLLLVASGAATYYSFPFPENARDKKAQLFRYAPLPDDLHTVTNWSGTHEVRTRTFLQPESIEQLEGIVKEGHERKHKIRPVGSGLSPNGIGLTRAGMVNLALMDKVLSVDKEKKRVTVQAGIRVQQLVDEIKEYGITLQNFASIREQQIGGIVQVGAHGTGARLPPIDEQVISMKLVTPAKGTIEISKEKDPELFYLARCGLGGLGVVAEVTLQCVERQELVEHTFLSNMKDIKKNHKKFLSENKHVKYLHIPYTDAVVVVTCNPVSKLRGPPKHKPIYTTEEALQHVRDLYQESLKKYRSQVAASGSPDEPEVDELSFTELRDKLLVMDPLNKEHVIKVNKAEAEYWRKSEGYRVGWSDEILGFDCGGHQWVSETCFPAGTLSKPSMKDLEYIEELMQLIEKESVPAPAPIEQRWTACSKSQMSPAYSSADDDIFSWVGIIMYLPTMDARQRKQITEEFFHYRHMTQAQLWDRYSAFEHWAKIEVPKDKEELAALQARLKKKFPVDAYNQARNELDPNHILSNNMLEKLFPSSEAQ

SEQ ID NO: 31533 - protein, 214 aa, Elaeis guineensis
MVRGKTEMKLIENATSRQVTFSKRRNGLLKKAFELSVLCDAEVAVIVFSPRGKLYEFSSTSMEKTIDRYRRHAKSGINNNEVTQQWKFEAASMSRKIESLEVSKRKLLGENLESCSAEELHEIEGKIEQSLCHVRGKKNQLLEEQIATLKEQEQTLMEENALLREKCKLQSQLRPAAAPEETVPCSQDGENMEVETELYIGWPGRGRTNCRSQG

SEQ ID NO: 31534 - protein, 559 aa, Prunus dulcis
  misc_feature (46)..(46): Xaa can be any naturally occurring amino acid
  unsure (1)..(559): unsure at all Xaa locations
MGSLEEERSLLEDGLIQDETNGLYTGDGSVDITGKPVLKQSTGNWXACPFILGTECCERLAFYGISTNLVTYLTHKLHEGNVSAARNVTTWSGTCYLTPLIGAVLADAYWGRYWTIAIFSTIYFIGMCTLTISASVPALKPPQCVDSVCPSASPAQYGVFFFGLYLIALRTGGIKPCVSSFGADQFDDTDSRERVKKGSFFNWFYFSINIGALVSSTLIVWVQDNAGWGLGFGIPALFMGIAIVSFFSGTPLYRFQKPGGSPLTRMCQVLVASFRKWNLDVPRDSSLLYETQDKGSAIKGSRKLEHSDELNCLDKAAVISETETKTGDFSNPWRICTVTQVEELKILIRMFPIWATGIVFSAVYAQMATMFVEQGMMMDTSVGSFTIPPASLSSFDVISVIFWVPIYDRFIVPIARKFTGKERGFSELQRMGIGLFLSVLCMSAAAVVEMKRLQLATELGLVDKEVAVPLSIFWQIPQYFLLGAAEIFTFIGQLEFFYDQSSDAMRSLCSALSASDDFIGKLSELFDSDIVTYFTTQGGKAGWIPDNLNDGHLDYFSGS

SEQ ID NO: 31535 - protein, 276 aa, Mesorhizobium mediterraneum
WGFDGSSTMQAEGHSSDCVLKPVAIYPDPARTNGVLVMCEVMMPDGVTPHASNKRATILDDEGAWFGFEQEYFFYKDGRPLGFPESGYPAPQGPYYAGVGYSNVGSVARQIVEEHLDLCLAAGINHEGINAEVAKGQWEFQIFGKGSKKAADQMWMARYLMQRLTEKYGIDIEYHCKPLGDTDWNGSGMHANFSTAHMREVGGKAYFEALMAAFDKNLMDHIAVYGPDNDKRLTGKHETAPWNRFSYGIADRGASIRVPHSFINNGYKGYLEDRRP

SEQ ID NO: 31536 - protein, 276 aa, Mesorhizobium tianshanense
WGFDGSSTMQAEGHSSDCVLKPVAVYPDPARTNGVLVMCEVMMPDGVTPHASNKRATILDDEGAWFGFEQEYFFYKDGRPLGFPESGYPAPQGLYYTGVGYSNVGSVARQIVEEHLDQCLAAGINHEGINAEVAKGQWEFQIFGKGSKKAADQMWMARYLMQRLTEKYGIDIEYHCKPLGDTDWNGSGMHANFSTAYMREVGGKDYFEALMAAFDKNLMDHIAVYGPDNDKRLTGKHETAPWNRFSYGIADRGASIRVPHSFINNGYKGYLEDRRP

SEQ ID NO: 31537 - protein, 276 aa, Mesorhizobium ciceri
WGFDGSSTQQAEGHSSDCVLKPVAVYPDPARTNGVLVMCEVMMPDGVTPHASNKRATILDDEGAWFGFEQEYFFYKDGRPLGFPESGYPAPQGPYYTGVGYSNVGSVARQIVEEHLDLCLAAGINHEGINAEVAKGQWEFQIFGKGSKKAADQMWMARYLLQRLTEKYGIDIEYHCKPLGDTDWNGSGMHANFSTAYMREVGGKAYFEALMAAFDKNLMDHIAVYGPDNDKRLTGKHETAPWNRFSYGIADRGASIRVPHSFIKSDYKGYLENRRP

SEQ ID NO: 31538 - protein, 276 aa, Mesorhizobium loti
WGFDGSSTMQAEGHSSDCVLKPVAVYPDPTRTNGVLVMCEVMMPDGVTPHASNKRATILDDEGAWFGFEQEYFFYKDGRPLGFPESGYPAPQGPYYTGVGYKNVGDVARQIVEDHLDLCLAAGINHEGINAEVAKGQWEFQIFGKGSKKAADQMWIARYLLLRLTEKYRIDIEFHCKPLGDTDWNGSGMHANFSTAYMREVGGKAYFESLMAQFDKNLMDHIAVYGPDNDKRLTGKHETAPWNKFSYGIADRGASIRVPHSFVQNDYKGYGEDRRP

SEQ ID NO: 31539 - protein, 276 aa, Bradyrhizobium japonicum
WGFDGSSTQQAEGHSSDCVLKPVAVFPDAARTNGVLVMCEVMMPDGKTPHASNKRATILDDAGAWFGFEQEYFFYKDGRPLGFPSSGYPAPQGPYYTGVGFSNVGDVARKIVEEHLDLCLAAGINHEGINAEVAKGQWEFQIFGKGSKKAADEMWMARYLMLRLTEKYGIDIEFHCKPLGDTDWNGSGMHANFSTEYMRTVGGKEYFEALMAAFDKNLMDHIAVYGPDNDKRLTGKHETAPWNKFSYGVADRGASIRVPHSFVNNGYKGYLEDRRP

SEQ ID NO: 31540 - protein, 276 aa, Rhizobium tropici
WGFDGSSTMQAEGRSSDCVLKPVAIYPDPARTNGALVMCEVMMPDGVTPHPSNSRATILDDEDAWFGFEQEYFFYQDGRPLGFPESGYPAPQGPYYTGVGYKNVGDVAREIVEEHLDLCLEAGINHEGINAEVAKGQWEFQIFGKGSKKAADQIWMARYLLLRLCEKYGIDIEFHCKPLGDTDWNGSGMHCNFSTKFMREVGGKAYFEALMAQFDKNLEAHISVYGPDNHLRLTGKHETAPWNKFSYGVADRGASIRVPHSFIKNDYRGYLEDRRP

SEQ ID NO: 31541 - protein, 276 aa, Rhizobium tropici
WGFDGSSTMQAEGRSSDCVLKPVAIYPDPARTNGALVMCEVMMPDGVTPHESNSRATILDDEDAWFGFEQEYFFYQDGRPLGFPESGYPAPQGPYYTGVGYKNVGDVAREIVEEHLDLCLEAGINHEGINAEVAKGQWEFQIFGKGSKKAADQIWMARYLLLRLCEKYGIDIEFHCKPLGDTDWNGSGMHCNFSTKFMREVGGKAYFEALMAQFDKNLDAHIAVYGPDNHLRLTGKHETAPWNKFSYGVADRGASIRVPHSFIKNDYKGYLEDRRP

SEQ ID NO: 31542 - protein, 276 aa, Rhizobium etli
WGFDGSSTMQAEGRSSDCVLKPVAIYPDPARTNGVLVMCEVMMPDGVTPHPSNARATILDDEDAWFGFEQEYFFYQNGRPLGFPEQGYPAPQGPYYTGVGYSNVGDVAREIVEEHLDLCLAAGINHEGINAEVAKGQWEFQIFGKGSKKAADQIWMARYLLQRLTEKYGIDIEYHCKPLGDTDWNGSGMHCNFSTKYMREVGGKAYFEALMAQFEKNLMDHINVYGPDNDKRLTGKHETAPWNKFSYGVADRGASIRVPHSFVKNDYKGYLEDRRP

SEQ ID NO: 31543 - protein, 276 aa, Rhizobium leguminosarum bv. viciae
WGFDGSSTQQAEGRSSDCVLKPVAIYPDPARTNGALVMCEVMMPDGVTPHASNARATILDDEDAWFGFEQEYFFYQNGRPLGFPEQGYPAPQGPYYTGVGYSNVGDVAREIVEEHLDLCLAAGINHEGINAEVAKGQWEFQIFGKGSKKAADQIWMARYLLQRLTEKYGIDIEYHCKPLGDTDWNGSGMHCNFSTKYMREIGGKAYFEALMAQFEKNLMDHINVYGPDNDKRLTGKHETAPWNKFSYGVADRGASIRVPHSFVKNDYKGYLEDRRP

SEQ ID NO: 31544 - protein, 276 aa, Rhizobium galegae
WGFDGSSTMQAEGRSSDCVLKPVALYPDPARTNGALVMCEVMMPDGVTPHATNARATILDDEDAWFGFEQEYFFYQNGRPLGFPEQGYPAPQGPYYTGVGYSNVGDVAREIVEEHLDLCLEAGINHEGINAEVAKGQWEFQVFGKGSKKAADQIWMARYLLQRLTEKYGIDIEYHCKPLGDTDWNGSGMHCNFSTKYMREVGGKDYFEALMAAFDKNLMDHIAVYGPDNDKRLTGKHETAPWNKFSYGVADRGASIRVPHSFVKNDYKGYLEDRRP

SEQ ID NO: 31545 - protein, 276 aa, Mesorhizobium huakuii
WGFDGSSTMQAEGRSSDCVLKPVALYPDPARTNGILVMCEVMMPDGVTPHESNSRATILDDEDAWFGFEQEYFFYKDGRPLGFPESGYPAPQGPYYTGVGYKNVGDVARKIVEEHLDQCLAAGINHEGINAEVAKGQWEFQIFGKGSKKAADQIWMARYLLLRLTETYGIDIEFHCKPLGDTDWNGSGMHCNFSTKFMREVGGKAYFEALMAQFDKNLMDHIAVYGPDNDKRLTGKHETAPWNKFSYGVADRGASIRVPHSFVKNDYKGYLEDRRP

SEQ ID NO: 31546 - protein, 276 aa, Sinorhizobium saheli
WGFDGSSTNQAEGRSSDCVLKPVAVYPDPVRTNGVLVMCEVMMPDGKTPHPSNSRATILDDEGAWFGFEQEYFFYKDGRPLGFPEQGYPAPQGPYYTGVGYKNVGNIARQIVEEHLDICLAAGINHEGINAEVAKGQWEFQVFGKGSKKAADEVWMARYLLQRLTEKYGIDIEWHCKPLGDTDWNGSGMHCNFSTAYMREVGGKDYFEALMAAFDKNLHEHIAVYGPDNHLRLTGKHETAPWNKFSYGVADRGASIRVPHSFVNNGYRGYLEDRRP

SEQ ID NO: 31547 - protein, 276 aa, Sinorhizobium terangae
WGFDGSSTMQAEGRSSDCVLKPVAVYPDPVRTNGVLVMCEVMMPDGKTPHPSNSRATILDDEGAWFGFEQEYFFYKNGRPLGFPEQGYPAPQGPYYTGVGYKNVGDIARQIVEDHLDICLAAGINHEGINAEVAKGQWEFQIFGKGSKKAADEVWLARYLLQRLTEKYGIDIEWHCKPLGDTDWNGSGMHCNFSTAYMREVGGKEYFEALMAAFEKNLHEHIAVYGPDNHMRLTGKHETAPWNKFSYGVADRGASIRVPHSFVNNGYRGYLEDRRP

SEQ ID NO: 31548 - protein, 276 aa, Sinorhizobium fredii
WGFDGSSTNQAEGRSSDCVLKPVAVYPDPVRTNGVLVMCEVMMPDGKTPHPSNSRATILDDEGAWFGFEQEYFFYKNGRPLGFPEQGYPAPQGPYYTGVGYSNVGDVARKIVEEHLDICLAAGINHEGINAEVAKGQWEFQVFGKGSKKAADEVWMARYLLQRLTEKYGIDVEYHCKPLGDTDWNGSGMHCNFSTAYMREVGGKDYFEALMAAFDKNLQEHIDVYGPDNHLRLTGKHETAPWNKFSYGVADRGASIRVPHSFVNNGYKGYLEDRRP

SEQ ID NO: 31549 - protein, 276 aa, Sinorhizobium medicae
WGFDGSSTLQAEGRSSDCVLKPVAVYPDPVRTNGALVMCEVMMPDGKTPHASNTRATVLDDEGAWFGFEQEYFFYKNGRPLGFPEQGYPAPQGPYYTGVGYKNVGDVARQIVEEHLDICLAAGINHEGINAEVAKGQWEFQIFGKGSKKAADEVWLARYLLLRLTEKYGIDVEFHCKPLGDTDWNGSGMHANFSTAYLREVGGQDYFEALMAAFEKNLHDHINVYGPDNHLRLTGKHETAPWDKFSYGVADRGASIRVPHSFINNGYQGYLEDRRP

SEQ ID NO: 31550 - protein, 276 aa, Sinorhizobium meliloti
WGFDGSSTQQAEGRSSDCVLKPVAVYPDPVRTNGALVMCEVMMPDGKTPHPSNTRATVLDDESAWFGFEQEYFFYKNGRPLGFPEQGYPAPQGPYYTGVGYKNVGDIARQIVEEHLDICLAAGINHEGINAEVAKGQWEFQVFGKGSKKAADEVWLARYLLLRLTEKYGIDVEFHCKPLGDTDWNGSGMHANFSTAYLREVGGKDYFEALMAAFEKNLHDHINVYGPDNHLRLTGKHETAPWDKFSYGVADRGASIRVPHSFVNNGYRGYLEDRRP

SEQ ID NO: 31551 - protein, 394 aa, Staphylococcus aureus
MQEAYIVAYGRSAAAKAKQGALFHERPDDVAAKVLQGVLKRIDGKFNKNMIEDVIVGTAFPEGLQGQNIARTIALRTGLSDTVPGQTVNRYCSSGLQTIAIAANQIMAGQGDILVAGGVELMSAVPMGGNEPTNNPTLQYVDIGASYPMGLTAENVASQFDVSREDQDAYAVRSHQRAYDAQRDGRFKDEIIPIQVNSVEYTNTGPKVHTNIFDQDEFIRPDTTMEALAKLRTVFKADGTVTAGTSAPLSDGAGFVVLMSGDKVKELGVTPIARFVGYKAVGVDPKIMGIGPAYAIPEVLSLSNLSVEDIDLIELNEAFASQTIASIKEVGLDISRTNVNGGAIALGHPLGATGAMLTARLLNEMGRRPDSRYGMVTMCIGVGMGAAAIFEYVR

SEQ ID NO: 31552 - protein, 394 aa, Staphylococcus aureus
MQEAYIVAYGRSAAAKAKQGALFHERPDDVAAKVLQGVLKRIDGKFNKNMIEDVIVGTAFPEGLQGQNIARTIALRTGLSDTVPGQTVNRYCSSGLQTIAIAANQIMAGQGDILVAGGVELMSAVPMGGNEPTNNPTLQYDDIGASYPMGLTAENVASQFDVSREDQDAYAVRSHQRAYDAQRDGRFKDEIIPIQVNSVEYTNAGPKVHTNIFDQDEFIRPDTTMEALAKLRTVFKADGTVTAGTSAPLSDGAGFVVLMSGDKVKELDVTPIARFVGYKAVGVDPKIMGIGPAYAIPEVLSLSNLSVEDIDLIELNEAFASQTIASIKEVGLDISRTNVNGGAIALGHPLGATGAMLTARLLNEMGRRPDSRYGMVTMCIGVGMGAAAIFEYVR

SEQ ID NO: 31553 - protein, 394 aa, Staphylococcus aureus
MQEAYIVAYGRSAAAKAKQGALFHERPDDVAAKVLQGVLKRIDGKFNKNMIEDVIVGTAFPEGLQGQNIARTIALRTGLSDTVPGQTVNRYCSSGLQTIAIAANQIMAGQGDILVAGGVELMIAVPMGGNEPTNNPTLQYDDIGASYPMGLTAENVASQFDVSREDQDAYAVRSHQRAYDAQRDGRFKDEIIPIQVNSVEYTNAGPKVHTNIFDQDEFIRPDTTMEALAKLRTVFKADGTVTAGTSAPLSDGAGFVVLMSGDKVKELGVTPIARFVGYKAVGVDPKIMGIGPAYAIPEVLSLSNLSVEDIDLIELNEAFASQTIASIKEVGLDISRTNVNGGAIALGHPLGATGAMLTARLLNEMGRRPDSRYGMVTMCIGVGMGAAAIFEYVR

SEQ ID NO: 31554 - protein, 394 aa, Staphylococcus aureus
MQEAYIVAYGRSAAAKAKQGALFHERPDDVAAKVLQGVLKRIDGKFNKNMIEDVIVGTAFPEGLQGQNIARTIALRTGLSDTVPGQTVNRYCSSGLQTIAIAANQIMAGQGDILVAGGVELMSAVPMGGNEPTNNPTLQYDDIGASYPMGLTAENVASQFDVSREDQDAYAVRSHQRAYDAQRDGRFKDEIIPIQVNSVEYTNTGPKVHTNIFDQDEFIRPDTTMEVLAKLRTVFKADGTVTAGTSAPLSDGAGFVVLMSGDKVKELGVTPIARFVGYKAVGVDPKIMGIGPAYAIPEVLSLSNLSVEDIDLIELNEAFASQTIASIKEVGLDISRTNVNGGAIALGHPLGATGAMLTARLLNEMGRRPDSRYGMVTMCIGVGMGAAAIFEYVR

SEQ ID NO: 31555 - protein, 576 aa, Sinapis arvensis
YAPDEPRKGADILVEALERQGVETVFAYPGGASMEIHQALTRSSTIRNVLPRHEQGGIFAAEGYARSSGKPGICIATSGPGATNLVSGLADAMLDSVPLVAITGQVSRRMIGTDAFQETPIVEVTRSITKHNYLVMDVDDIPRIVQEAFFLATSGRPGPVLVDVPKDIQQQLAIPNWDQPMRLPGYMSRLPQPPEVSQLSQIVRLISESKRPVLYVGGGSLNSSDELGRFVELTGIPVASTLMGLGSYPCNDELSLQMLGMHGTVYANYAVEHSDLLLAFGVRFDDRVTGKLEAFASRAKIVHIDIDSAEIGKNKTPHVSVCGDVKLALQGMNKVLENRAEELKLDFGVWRSELSEQKQKFPLSFKTFGEAIPPQYAIQVLDELTHGKAIISTGVGQHQMWAAQFYKYRKPRQWLSSSGLGAMGFGLPAAIGASVANPDAIVVDIDGDGSFIMNVQELATIRVENLPVKILLLNNQHLGMVMQWEDRFYKANRAHTYLGDPAKENEIFPNMLQFAGACGIPAARVTKKEELRDAIQTMLDTPGPYLLDVICPHQEHVLPMIPSGGTFKDVITEGDG

SEQ ID NO: 31556 - protein, 573 aa, Sinapis arvensis
EPRKGADILVEALERQGVETVFAYPGGASMEIHQALTRSSTIRNVLPRHEQGGIFAAEGYARSSGKPGICIATSGPGATNLVSGLADAMLDSVPLVAITGQVSRRMIGTDAFQETPIVEVTRSITKHNYLVMDVDDIPRIVQEAFFLATSGRPGPVLVDVPKDIQQQLAIPNWDQPMRLPGYMSRLPQPPEVSQLSQIVRLISESKRPVLYVGGGSLNSSDELGRFVELTGIPVASTLMGLGSYPCNDELSLQMLGMHGTVYANYAVEHSDLLLAFGVRFDDRVTGKLEAFASRAKIVHIDIDSAEIGKNKTPHVSVCGDVKLALQGMNKVLENRAEELKLDFGVWRSELSEQKQKFPLSFKTFGEAIPPQYAIQVLDELTHGKAIISTGVGQHQMWAAQFYKYRKPRQWLSSSGLGAMGFGLPAAIGASVANPDAIVVDIDGDGSFIMNVQELATIRVENLPVKILLLNNQHLGMVMQWEDRFYKANRAHTYLGDPAKENEIFPNMLQFAGACGIPAARVTKKEELRDAIQTMLDTPGPYLLDVICPHQEHVLPMIPSGGTFKDVITEGDGR

SEQ ID NO: 31557 - protein, 595 aa, Dunaliella tertiolecta
MASVDCTLVSARGIKDVEIVGKQSPYAVLTVGPKTFKSGTANGGGSDPVWNQTFSFTNVTPDSSVKLEIFNSNVVLRDVAIGGCKAPMDKALSAGKDELTLPIITKKGKPHGEVKLILTLKPDATKQMVTSHKTRKAAGAWILPTYGNTDCWKDYEPGTLLGKGTFGTTYLATEKKTGQKCAVKVISKRKLTTPDEVDDVKKEVQIMHHLAGHPNVVGLKGVYEDKSNVCLAMEVATGGELFDSIVKRGHYSERDAAELIRTIVSVVAHCHNMGVIHRDLKPENFLLSDKSPRAQLKATDFGLSSFFQEGQVFTDIVGSAYYVAPEVLRRSYGKEADIWSCGIILYILLCGFPPFHGDSEKKIFEAIISKSVDFNTQPWPRISAPAKDCVKRMLQRDPKKRATANEIMQHDWMRENGVASDEPLEMEVVSRIKNFSGMNKLKKEALKVIAVNLPIDEISGMREMFMDIDKDKSGNITIDEFAAALHKKGQIVTEKEIEKIMKEADVDGDGTIDYEEFLAATINLGKLQREENLKTAFEHFDLDGNGEISHNELVQCLSKLGINDAHVKDIIKEVDADGNGQIDYNEFCIMMRNLD

SEQ ID NO: 31558 - protein, 1548 aa, Nostoc sp. PCC 7120
MNDNSTHQNQQITANNNSGDTYQGQRWLVEERDACGVGFIAHRQNLGSHELWLKLCALTCLEHRGGCSADQDSGDGAGILTAIPWELLQQDYPQGQIDFLSSKNIAVGMIFLPQDGEVARKAKAIFEQIATEENLTVLGWRVVPVQPDLFGDTGKENQPRIEQVILSADNSGDALERQLFIARKRLIQSGKKVSLEFYICSLSSRTIVYKAMVRSAVLGAFYLDLQNPAYKSAFAVYHRRFSTNTMPKWPLAQPMRLLGHNGEINTLLGNINWMMAREANLRSSHFFWGDRFDELKPSVLMGNSDSATLDNVLELLVHSGRSPLEALMIMVPEAYQNQPSLRNYPEIIDFYEYYSGLQEAWDGPALLVFGDGKTVGATLDRNGLRPARYLITKDDYIVVASEAGVVDFPEADIIEKGRLGPGQMIAVDLVNHEVLKNWEIKQRIAKQQPYGEWLKKYRPTLKSFTIQVNGKHVTTAKIDKETLLRNGLAFGYTTEDVEMVIQPMAATGSEPTFCMGDDIPLAVLTDKPHLLYDYFKQRFAQVTNPAIDPLREKLVMSLKVELGERGNLLEPKPEYVRRLKLESPVLLESELAAIKLSGFATAELSTLFAIASGPDGLKAAVLALQQQAAESVRAGAKILILNDRAGEGISTEYSYIPPLLAVGAVHHYLIREGLRTKTSLIVNTAQCWSTHHFACLIGYGAGAVCPYLALETVRNWWSDPATQQFMERGKITSLSLEQAIANYRKAVESGLLKILSKMGISLLSSYQAAQIFEAIGIGGDLLALGFQGTASRIGGLSVSELAQEVLSIHSKAFPELATHKLENLGFVNYRPTGEYHMNNPKLAKALHEAVDGKKYDHYEVYKQYLQDRPITALRDLLDFHSDRTPISLEEVESVSDIVKRFCTGGMSLGALSREAHETLAIAMNRTGIGGKSNSGEGGRKTQIRFKVLGRIGHSPTLPHLRGLRNGDTASSAIKQVASARFGVTPEYLMSADQIEIKMAQGAKPGEGGQLPGPKVSQYIAMLRRSKPGVTLISPPPHHDIYSIEDLAQLIYDLHQINPKAQVSVKLVAEIGIGTIAAGVAKANADIIQISGHDGGTGASPLSSIKHAGSPWELGLSEVHRVLMENSLRRSLVLRVDGGLKSGWDVLIGALMGAEEFGFGSIAMIAEGCIMARICHTNNCPVGVASQKEELRKRFTGIPEHVVNFFYFVAEEVRHLLAKLGYRSLSEIIGRADILTTRKDVQLSQTQAINLNCILQLPDTKENRCWLVHEQVHSNGPVVDDQLLADPDIQAAIRNQSAVTKTLPIVNTDRTLGARLAGAIASQYGDSGFEGQINLNFTGSVGQSFGAFNLPGIILHLKGEANDYVGKGMHGGEIIIKPPTEATYDPAQNVIVGNTCLYGATGGVLFANGLGGERFAVRNSKGVAVIEGTNDHCCEYMTGGTIVVLGKVGRNVAAGMTGGLAYFLDEDGLFPELVNREIVKIQRVLTTAGEKPLQDLIQAHAERTGSPKAQMILDNWQEFLPKFWQLVPPSEAESQEANPDVVVEKIILS

SEQ ID NO: 31559 - protein, 429 aa, Methylobacillus flagellatus
MQEISKSSKLSNVCYDIRGPVLDRARQMEEDGHRIIKLNIGNPAPFGFAAPEEILQDVIRNMDSASGYTDSKGLFAARKAIMHYTQQKNIQGVTIDDIIIGNGVSELIVMAMQALLNNGDQVLVPMPDYPLWTAAVNLAGGTARHYVCDEQTGWLPDLRDIENKITANTRGIVIINPNNPTGALYPRETLEGIIEIARHHGLVIFADEIYDKVLFDGNTHTSIASLADDVLFVTFNGLSKNYRTCGYRAGWLVISGEKRHAGDYIEGLNMLASMRLSRQCARAVGDPDRAGRYQSIDDLVAPTGRLCKQRDLAYKMLTDIPGVSCVKPKAGLYLFPRLDPKIYPIQDDQQFILDLLLEEKVLLVQGTGFNWRAPDHFRVVFLPNVDDLTEAFTRIARFLENYRKQHSTITIVEAKPRKRAQTTSQSASA

SEQ ID NO: 31560 - protein, 148 aa, Vicia faba
MEFTLRQEALVNSSWEAFNQNLPLFSVLFYTFILEKAPIAKNMFSVLKDANEIPLANPSINAHTEMVFEMVRDAAAQLQTTGQVVLGDTTLGVVHTQKRVDGLHFMVVKEALLKTIKEAVGDKWSEELSNAWEIAYDGLAVAIMKEMS

SEQ ID NO: 31561 - protein, 245 aa, Capsicum annuum
MGRGRVELKRIENKINRQVTFAKRRNGLLKKAYELSVLCDAEVALIIFSNRGKLYEFCSTSSMVKTIEKYQRCSYATLEANQSATDTQNNYHEYLRLKARVELLQRSQRNFLGEDLGTLSTKDLEQLENQLESSLKQIRSRKTQFMLDQLADLQQREQMLAESNRLLRRKLEESTAGFPVRLSWEDGADQAMHQHNRLPHTEGFLQPLGLHSSPPHFGYNPVNTDEVNAAATAHNMNGFIHGWML

SEQ ID NO: 31562 - protein, 309 aa, Bradyrhizobium japonicum
MTVEASGEAPAATRCGFVALIGAPNVGKSTLVNALVGAKVTIVSRKVQTTRALIRGIVIENNAQIILVDTPGIFSPKRRLDRAMVSTAWSGAHDADLVCVLLDAKTGIDEEAEAILAKAASVNHDKILVINKVDLVQREKLLALAQAANERMPFAKTFMIAAISGDGVDDLRSTLAEMVPPGPFLYPEDQMSDAPMRHLAAEITREKIYRKLHQELPYQSTVETARKWEARKAKSVRIEQTIFVERESQRKIVLGKGGATIKSIGADSRKEISEILGVPVHLFLFVKVRENWGDDPDRYREMGLEFPKE

SEQ ID NO: 31563 - protein, 1249 aa, Gossypium hirsutum
MTPSAGSFSGDRDDDGDATKKKKKQRKVPLLKLFSFADFYDHVLMGLGSLGACVHGASVPVFFIFFGKLINIIGMAYLFPKEASHKVAKYSLDFVYLSVAILFSSWIEVACWMHTGERQAAKMRMAYLKSMLNQDISLFDTEASTGEVISAITSDIIVVQDALSEKVGNFMHYISRFIAGFSIGFARVWQISLVTLSIVPLIALAGGIYAYVATGLIARVRNSYVKAGEIAEEVIGNVRTVQAFAGEERAVKSYKDALMNTYTYGKKAGLTKGLGLGSLHCVLFVSWALLVWFTSIVVHKNIANGGDSFTTMLNVVISGLSLGQAAPDISAFIRARAAAYPIFEMIERNTVSKTSSKTGRKLSKVEGNIELKNVSFSYPSRPDVVIFDRFCLNIPTGKIVALVGGSGSGKSTVISLIERFYEPLAGEILLDGNNIKGLDLKWLRQQIGLVNQEPALFATTIRENILYGKDDATVDEITRAAKLSEAIAFINNLPDRFETQVGERGIQLSGGQKQRIAISRAIVKNPPILLLDEATSALDAESEKSVQEALDRVMVGRTTVVVAHRLSTIRNADVIAVVQNGKIVETGTHDELISNPNSTYSSLVQHQETSPLQRYPSQGPTLSRPLSVSYSRELSRTRTSFGASFRSERDSVSRAGADGIDAGKQPYVSPGRLYSMIGPDWYYGFFGTVTALIAGAQMPLFALGVSQALVAYYMDWETTCHEVKKIAILFCCASVITVIVHAIEHLCFGIMGERLTLRVREGMFSAILKNEIGWFDDLNNASSMLASRLETDATFLRGVVVDRTSILIQNVGLVIAAFIIAFILNWRITLIILATFPLIISGHISEKLFMQGYGGNLSKAYLKANMIAGEAVSNMRTVAAFCAEEKILDLYARELIEPSERSFKRGQIAGIFYGISQFFIFSSYGLALWYGSVLMGKELASFKSVMKSFMVLIVTALAMGETLALVPDLLKGNQMVASVFEIMDRKTQVVGDAGEELTNVEGTIELKGVHFSYPSRPDVVIFKDFDLKVRSGKSMALVGQSGSGKSSVLALILRFYDPTSGKVMIDGRDVKKLKLKSLRKHIGLVQQEPALFATSIYENILYGKEGASESEVVEAAKLANAHSFISSLPEGYSTKVGERGVQLSGGQKQRVAIARAVLKNPEILLLDEATSALDVESERVVQQALDRLMRNRTTVMVAHRLSTIKNADRISVIQGGRIIEQGTHSSLIENRNGPYFKLINLQQQQQMEQ

SEQ ID NO: 31564 - protein, 1118 aa, Solanum lycopersicum
MSSSSTTNKTNCSRGSSARSRRSARVIAQTPVDAKLHVEFEESEQQFDYSSSVNLSNSTSNVPSSTVSDYLQKMQRGSLIQPFGCMIAIDAQNFAVIAYSENAPEMLDLTPHAVPSIEQQEALTFGTDVRKLFRSSGASALEKAVSFGELSLLNPILVHCKNSGKPFYAILHRIEVGLVIDLEPVDPHEVPVTTAGAIKSYKLAAKAIRKLQSLPSGDISLLCDVLVREVSHLTGYDRVMVYKFHEDEHGEVVAECRTPELEPYLGLHYPATDIPQASRFLFMKNKVRMICDCLAPPIRVIQDPRLAQSLSLGGSTLRAPHGCHAQYMTNMGTVASMAMSVMINEQDDELDSDQQVGRKLWGLVVCHHTCPRFLSFPLRYASEFLLQVFSVQVNKEVEMAAQLKEKQILQIQTVLCDMLLRDAPMGIVTQSPNVMDLVKCDGAALYYRNKLWLHGVTPAESQIRDIAEWLNESHGDSTGLNTDSLMEAGFPGASVLGDAVCGMAAVKITSKDFLFWFRSHTAKEIKWGGAKHLPGDKDDGRKMHPRSSFKAFLEVVKRRSLPWEDVEMDAIHSLQLILRGSLQDEAADCSKMIVNVPAVDTIIDRVDTLHINDMVRLVETASMPVLAVDTSGRINGWNSKVSELTGLPVENVIGVPLVDLVIGGTTNTIKRVLSLALQGKEEKNVEIKLRTLGPQEKVGSISIVVNACCSRDFKQNIVGVCFTGKDVTGLKLIKDKYSRVQGDYVGIIHSPSPLIPPIFVMDEQGRCVEWNDAMHKLTGSKREEVIDQMLLGEVFTVNSFGCRVKDQDTLTQLTILLNRVIAGGEGEKLFFGLFNKQDKYIEALISANKKVDDDGRVTGVLCFLHVPSPELQYAMHVQKLSEQAAKNSLKKLAYVRLELKNPLNGINCIQNLLKSSDLSKDQRQLLKTSTMCQKQLAKIIDDTDIESIEECYTEMNSCEFNLGEVVTVVINQVMILSQERKVQVTWDSPVEVSQLYLIGDNLRLQQVLSDFLTTAILFTPFEDSSVHFRVIPRKERIGTKMYIMHLEFRITHPSPGIPDDLIQHMFHYSRSISREGFGLYISQKLVKIMDGTVQYLREADRSSFIILVEFPLMEKKNN

SEQ ID NO: 31565 - protein, 235 aa, Musa acuminata
MGRGKIEIKRIENTTNRQVTFCKRRNGLLKKAYELSVLCDAEVALIVFSSRGRLYEYANNNIKSTIERYKKACADSSSSDAIVDVNSQHYYQQESAKLRHQIQVLQNANRHLMGDALSSLNVKELKQLENRLERSITRIRSKKHELLFAEIEYMQKREVELQSDNMYPRAKIAENERVQQLSIVEAGAEYDAIPGAFDSRNYYHANILEAAAHYSHHQDQTALQLGYETKADSAA

SEQ ID NO: 31566 - protein, 272 aa, Ipomoea purpurea
MVNSSARWSPRVRKGAWSEEEDDLLRKCIQKFGEGKWHLVPFRAGLNRCRKSCRLRWLNYLHPDIKRGHFSLEEADLILRLHKLLGNRWSLIAGRIPGRTANDVKNYWHSHLKKKVVSMHMASSNSSRQDNNWDDEKGKAPQIKENILFRPRPRRFFRTSLSSPALSTLTGKAKAVVYDAPPPPPPPPHQLQPQPEATSPAADLLMVFNVQQNSNSIETNLPAQTTAPSSHDGVKWWEDLLYDDSHQGLIDWTTDDDFPIDVTLLKLLDTTI

SEQ ID NO: 31567 - protein, 446 aa, Solanum lycopersicum
MKKVKRKLGKYEVGRTIGEGTFAKVKFARNTETGENVAIKVLAKSTILKHRMVEQIKREISIMKIVRHPCIVRLHEVLASQTKIYIVQEFVTGGELFDKIVHLGRLSEDEARRYFQELIDAIAHCHSKGVYHRDLKPENLLLDFQGNLKISDFGLSALPQQGVELLYTTCGTPNYVAPEVLGNRGYDGAAADVWSCGIILYVLMAGYLPFDETDLPTLYTKIKAAEFSCPFWFSPGATSLIQKIIDPNPQTRIKIDGIKRDPWFRKNYRAVKAKADEVVNLDDIHAVFDDIEDAFVSEKSEDSESGPLVMNAFEMITLSQGLNLSALFDRRQDYVKRQTRFISRQPAKVVIETIEAAAESLGLKVHTRDYKTRIEGVTANRAGQFAVVLEVFQVAPSLFMVDVRKAAGDTLEYHKFYKTFCTKIDDVIWKPKEGMSNAVLLRTRTR

SEQ ID NO: 31568 - protein, 659 aa, Xanthomonas campestris pv. campestris str. 8004
MNVSEPQLAPVRTLRPVFVLAATVVCTFALLVALFPLDAGRILLDAQTWASRNVGWYYLLAMTLYLVFVLGVALSSYGNIKLGADHDEPEFSYLSWAGMLFAAGISITLFFFCVSEPLTHYLQPPQGGTGNGEASARLAMQLLFLHWGLHGWGVFALAAMALAYFAFRHNLPLALRSALYPLIGKRINGPIGYTVDALGIVATVFGLGADMGFGVLHLNAGLATLFNVPHTHWVQVALIVAMMGAAILVAVSGVEKGVRWMSDINMLLAIALLLFMLFAGPTQYLLNALMQNLGDYLGSVVGKSFDVYAYGGRPDWLGNWTVFYWAWWIGWAPFVGLFIARISRGRTIREFVLGVLLIPLGFTLAWLSIFGNSALDQLLHHGQAAWAQQAIDAPQTVLYSLLQDYPWSRVVITITVAISFVFFVTSADSGTVVLSTLSSHGGEPHDDGPRWLRVFWGVLTAVVTAGLLLAGSMDALKSAVVLASLPFSAVLLLMAWGLSRALSEESQRKRAQLYNPSPLIGQSRDHRGWRQRLGQAMHFAARDEVYRFMHEQVRPAIEAVAAQLQDEGWQVSSRLDDADMEISVDHGEQQGFRYQVVMRGYLTPSFAAQRLRNQRYYRAEVYLFEGSQDYDLVGYSREQIINDIIDQYERHLQFLHLTR

SEQ ID NO: 31569 - protein, 459 aa, Xanthomonas campestris pv. campestris str. 8004
MTDTPGRSDAATLERFGYAQELKRQLSLKDLLIYGLVFMVPTAPFSIFGGVFDISAGMVPLTYLVGFVAMLFTALSYQQMSQAFPVAGSVYAYVGRGLSGGMGFLAGWAILLDYLLVPTLLYVVGANAMHNVLPQVPQPAWIAFFVVLNTVVNLRGIETTARANRFFLYAQLIVLALFVVLATLAIQRGVNGAQWTLRPFYNPQAFSPQLIFSALSVAVVSFLGFDAISTLSEETRGGNRVVGRATLLALVLVAGLFVLQTWLAALLQPHLQRYPSAQASNDAFFEIGRLIAGPWMQIVIALTVAISAAIANSLVAQAATSRLLFAMARDRQLPAFLRYIHPRTGVPQRAILLVAALSMVLGEVFVGQIALLSSLCNVGALTAFVLLHVAVLWHFRAHGRKVLHGVVPVIGIVILAYVLINADLHAQLGGSAWMVVGLAVLAFLKFSGRSTEFRATDAL

SEQ ID NO: 31570 - protein, 454 aa, Xanthomonas campestris pv. campestris str. 8004
MCDMSNEQLKPTLGTWQLWGIAVGLVISGEYFGWSYGWGTAGTLGFLVTTVLVAVMYTCFIFSFTELTTAIPNAGGPFAYSLRAFGTYGGMLAGLATLIEFVFAPPAIAMAIGAYLNVQFPTLDPRVAAIGAYVIFMSLNIVGVAIAATFELIVTLLAVIELLVFMGVVAPGFSVARFAANGWAGSNQFGPAAISGIFAAIPFAIWFFLAIEGAAMAAEEAKDPKRTIPRAYIAGILTLVVLALGVMVFAGGVGDWRQLSNINDPLPQAMKAVVGNSSTWLHMLVWIGLFGLVASFHGIILGYSRQFFALARAGFLPHGLAKLSRFRTPHRAILAGGVIGIAAICSDSVVKIQGMSLTAAMITMSVFGAIVMYVMSMLSLFKLRRTEPTLERSFRAPGYPVVPAIALLLALVCLVAMVWFNPLVALVFVGLLLFGAVCCLLSLRGRPNAGGIAG

SEQ ID NO: 31571 - protein, 413 aa, Xanthomonas campestris pv. campestris str. 8004
MSPKKTSFPKQDIRVLLLEGISPTAVDVFRAAGYSQIELHAKSLPEDELKARIAEAHIVGIRSRTHLSADVLAHAKRLIAVGCFCIGTNQVDLEAAELAGIPVFNAPYSNTRSVAELVIAEAILLLRGIPQKNAQCHRGGWSKSAAGSHETRGKVLGIVGYGHIGTQVGVLAESLGMQVIFHDIETKLSLGNARAAIDLDDLLARSDVVTLHVPETPSTKDMIGAAEIARMKPGAHLINASRGTVIDIDALDAALTSGQIGGAAVDVFPIEPKGNGDAFESPLIAHDNVILTPHVGGSTLEAQDNIGIEVAAKLVRYSDNGSTLSAVNFPEVTLPEHPDSLRLLHIHRNVPGVLSQINELFSRHNLNIDGQFLRTDPKVGYVVIDVSASEELAGVLKDELGQITGTLRTRVLY

SEQ ID NO: 31572 - protein, 319 aa, Xanthomonas campestris pv. campestris str. 8004
MQDQRNLLVFSGNANKPLAQSICKELGVRMGKALVTRFSDGEVQVEIEESVRRQEVFVIQPTCAPSAENLMELLVLIDALKRASAASVTAVIPYFGYSRQDRRMRSSRVPITAKVAAKMICAMEADRVLTVDLHADQIQGFFDVPVDNVYASPLLLADIWRAYGTDNLIVVSPDVGGVVRARAVAKRLDDADLAIIDKRRPRANVATVMNIIGDVQGKTCVLVDDLVDTAGTLCAAAAALKQRGALKVVAYITHPVLSGPAVDNINNSQLDELVVTDTIPLSAAARTCPKIRQLSVAELLAETIRRIAFGESVSSLYVD

SEQ ID NO: 31573 - protein, 573 aa, Xanthomonas campestris pv. campestris str. 8004
MNQTRVFLIFAWLMVAALLWMEWGKDKAPANAPTPIASQAVPAARDPDAAAPAANVPSAQAIPQAGSPAAVPATSTTTATPATTGAAPAITLTSDVLRLKLDGRSVLDAELLQFPQTKDGTEPVKLLTEDAAHPYNATSGWASERSPVPGVGGFRAEQPGTTFELAKGQNTLVVPFVWNGPNGVSIRRIFTLQRGSYAISIKDEVINKSDAAWNGYVFRKLSRVPTILSRGMTNPDSFSFNGATWYSPQEGYERRAFKDYMDDGGLNRQITGGWVALLQHHFFTAWIPQKDQASLYVLAQDGPRDVAELRGPAFTVAPGQSASTEARLWVGPKLVSLLAKEDVKGLDRVVDYSRFSIMAIIGQGLFWVLSHLHSFLHNWGWAIIGLVVLLRLALYPLSAAQYKSGAKMRRFQPRLAQLKERYGDDRQKYQQATMELFKKEKINPMGGCLPLLIQMPIFFALYWVLVESVELRQAPWLGWIQDLTARDPYFILPVLNIAIMWATQKLTPTPGMDPMQAKMMQFMPLVFGVMMAFMPAGLVLYWVVNGGLGLLIQWWMIRQHGEKPSKIIQANAK

SEQ ID NO: 31574 - protein, 663 aa, Gentiana lutea
MASASVFYNSLNPSTSLVSRFHVPPLISKLELYQLFHQQKQSFGNKKGRNFNKITKAKAATTELVSPGAEISDNSKPTQKKMRILVAGGGIGGLVFALAAKKKGFEVLVFEKDLSAIRGEGQYRGPIQIQSNALAALEAIDMDVAEKIMGAGCITGDRINGLVDGISGNWYIKFDTFTPAAERGLPVTRVVSRMTLQQILASAVGEDIIKNESNVVDFKDDGHKVTVTLENGQHYEGDLLVGADGIWSKVRANMFGHSEATYSDYTCYTGIADFVPADIELVGYRVFLGHKQYFVSSDVGKGKMQWYAFHKEPPGGADSPNGKKERLLKLFDGWCDNVIDLLLATDEDAIIRRDIYDRSPTFSWGKGRTTLLGDSVHAMQPNLGQGGCMAIEDGYQLAQELEKGWNQSEKSGDPIDIGSCLRSYERSRILRVSIIHGLARMAAIMATTYKPYLGVGLGPLSFLTKLRIPHPGRVGGRVFIDIGMPLMLSWVLGGNGSKLEGRPLQCRLSDKANDQLQTWFVDDDSMERALNAEWFLFPIGPLTTSSQTIFLNRDEKNPCTIGSESMLDAVISSSQVSKQHARIEYKDGAFFVVDLQSEYGTYITDNEGRRYRVTPNSPTRFHPSDIIEFGSDKKATFRVKVMKNTPKIAEKTSKGSEEALQAA

SEQ ID NO: 31575 - protein, 662 aa, Gentiana lutea
MASASVFYNSLNPSTSLVSRFHVPPLISKLELYQLFHQQKHSFGNTKGRNFNKITKAKAATTELVSPGAEISDKSKPTQKKLRILVAGGGIGGLVFALAAKKKGFEVLVFEKDLSAIRGEGQYRGPIQIQSNALAALEAIDMDVAEKIMAAGCITGDRINGLVDGISGNWYIKFDTFTPAAERGLPVTRVVSRMTLQQILASAVGEDIIKNESNVVDFKDDGQKVTVTLENGQHYEGDLLVGADGIWSKVRTNLFGHSEATYSDYTCYTGIADFVPADIELVGYRVFLGHKQYFVSSDVGKGKMQWYAFHKEPPGGADSPNGKKERLLKLFDGWCDNVIDLLLATDEDAIIRRDIYDRSPTFSWGKGLTTLLGDSVHAMQPNLGQGGCMAIEDGYQLAQELKKGWEHSEKSGNPIDIGSCLRSYERSRILRVSIIHGLARMAAIMQQLYKPYLGVGLGPLSFLTKFRIPHPGRVGGRVFIDIGMPLMLSWVLGGNGSKLEGRPLQCRLSDKANDQLQTWFVDDDSMERALKAEWFLFPIGPLTTSSHTIFLNRDEKNPCTIGSESMLDVVISSAQVSKQHAQIEYKDGAFFVVDLQSEHGTYITDNEGRRYRVTPNSPTRLHPSDIIEFGSDKKAAFRVKVMKNPPKIAENTSKGNEAFQAA

SEQ ID NO: 31576 - protein, 246 aa, Cucumis sativus
MGRGRVELKRIENKINRQVTFAKRRNGLLKKAYELSVLCDAEVALIIFSNRGKLYEFCSTSNMLKTLERYQKCSYGAVEVTKPAKELESSYREYLKLKSRFESLQRTQRNLLGEDLGPLNSKELEQLERQLVSSLKQVRSTKTQYMLDQLSDLQNKEQMLIETNRALQIKLEEISSRNNIRLTWDGGDQSMSYGPQNAQTQGFFQPLECNPTLQIGYTSAVSDQITSTTTPTHAQQVNGFLPGWML

SEQ ID NO: 31577 - protein, 393 aa, Burkholderia sp. DSMZ 9242
MTDVVIVSAARTAVGKFGGALAKIAAPELGATVIRAVLERGGVKPEQISEVILGQVLAAGSGQNPARQSLIKAGLPSAVPGMTINKVCGSGLKAVMLAANAIIAGDADIVIAGGQENMSAAPHVLPGSRDGFRMGDAKLVDTMIVDGLWDVYNQYHMGITAENVAKEYGITREEQDAFAALSQNKAEAAQKAGRFDDEIVPVAIPQRKGEPLQFATDEFVRHGVTAESLAGLKPAFAKDGTVTAANASGINDGAAAVLVMSAKKADALGLKPLARIKAYANAGVDPSVMGMCPVPASRRCLVRAVWTPGDLDLMEINEAFAAQALAVHKQMGWDTSKVNVNGGAIAIGHPIGASGCRILVTLLHEMVKRDAKAGLASLCIGGGMGVALALERP

SEQ ID NO: 31578 - protein, 317 aa, Picea abies
MKTLACIVLCVLCISSINNAAHGQLTSTFYNKLCPTALSIVKAAVNKAVNNEKRMGASLLRLHFHDCFVNGCDGSILLDDNSTFTGEKTALPNANSVRGFDVIDTIKTQVEAACSGVVSCADILAIVARDSVVQLGGPTWTVLLGRRDSTTASLSAANNNIPSPASNLSALISSFTAHGLSTKDLVALSGGHTIGQARCTTFRARIYNESNIDTSFATSVKSSCPSAGGDNTLSPLDLATPTTFDNKYYTDLGNRKGLLHSDQQLFSGGSTNSQVTTYSANQNTFFTDFAAAMVKMGNISPLTGTSGQIRKNCRKAN

SEQ ID NO: 31579 - protein, 320 aa, Picea abies
MMMRTLVCIGVMAVLLCSININAVNGQLSSTFYAKSCPRVQSIVKTVVKQAVAKEKRMGASLVRLHFHDCFVNGCDGSILLDDNATFTGEKTAGPNANSARGFDVIDTIKTQVEAACSGVVSCADILTIAARDSIVELQGPTWTVMLGRRDSPTASLSAANNNIPSPASSLSTLITSFQNHGLSTKDLVALSGAHTIGQSRCAFFRTRIYNESNINAAFATSVKPNCPSAGGDNTLSPLDVVTPTTFDNKYYSNLKVQKGLLHSDQQLFNGGSTDSQVTTYSTNQNSFFTDFAAAMVKMGNISPLTGTSGQIRKNCRKAN

SEQ ID NO: 31580 - protein, 320 aa, Picea abies
MMMRNLLCIGIMAVFVCSININAVSGQLSSTFYDKSCPRAQSIVKRVVKQALAKEKRMGASLVRLHFHDCFVSGCDGSILLDDNATFTGEKTAGPNANSARGFDVIDTIKTQVEAACSGVVSCADILTIAARDSVVELQGPTWTVMLGRRDSTTASLSAANNNIPSPASSLSALISSFKGHGLSTKDLVALSGAHTIGQSRCAFFRTRIYNESNINAAFATSVKANCPSAGGDNTLSPLDVVTPIKFNNKYYGNLKIQKGLLHSDQQLFNGGSTDSQVTAYSTNQNSFFTDFAAAMVKMSNISPLTGTSGQIRKNCRKAN

SEQ ID NO: 31581 - protein, 320 aa, Picea abies
MMMRTLLCIGVMAVFVCSININAVSGQLSSTFYDKSCPRAQSIVKRVVKQAVAKEKRMGASLVRLHFHDCFVNGCDGSILLDDNATFTGEKTAGPNANSARGFDVIDTIKTQVEAACSGVVSCADILTIAARDSVVELQGPTWTVMLGRRDSTTASLSDANNNIPSPASSLSALISSFKGHGLSTKDLVALSGAHTIGQSRCAFFRTRIYNESNINAAFATSVKANCPSAGGDNTLSPLDVVTSIKFDNKYYGNLKIQKGLLHSDQQLFNGGPTDSQVTAYSTNQNSFFTDFAAAMVKMSNISPLTGTSGQIRKNCRKAN

SEQ ID NO: 31582 - protein, 393 aa, Sinorhizobium meliloti
MDALLVVNAGSSSLKFQVFGIVGMDLTRQIRGKVDGIGTRPRLQATAADGTQLIDQTYDAKAVRDLPAAITEARRWLLTLEGFELQAVGHRVVHGGPDYTRPVLIDATVLDHLAGYQDLAPLHQPNNLAPIRLAMEINPDVPQVACFDTAFHRGHAKHTDCYALPRSFYDEGVRRYGFHGLSYEYIAERLREVASRAAKGRVVVAHLGSGASMCGLRDGRSIESTMLHRPSTGCRWDTPGQLDPGVVLYLILQKGMKAQAVSDLLYHDAGLKGLSGLSNDMRDLLASDDPHAALSVAHFVYRCVLNGGMLAAALGGIDAFVFTAGVGENSPPIRARIVEGLAWLGAELDPAANEAGAALISTATSRVAVHVLPTDEELMIARHTLALISAPNA

SEQ ID NO: 31583 - protein, 332 aa, Clostridium thermocellum ATCC 27405
MSFLEQIIERAKSDVKTIVLPESTDLRVIKAASMIMKKGIAKVVLIGNEKEIKSLAGDIDLEGVMIEDSLNSEKLEDYANTLYELRKSKGMTIEAARETIKDPLYYGVMMVKKGEADGMVAGAVNSTANTLRPALQILKTAPGTKLVSSFFVMVVPNCEYGHNGTFVYADCGLVENPDADQLSEIAISASKSFEMLVGAKPQVAMLSYSSYGSAKSELTEKVIKATQLAKEKAPHLAIDGELQVDAAIVPEVAKSKAKGSSVAGKANVLIFPDLDAGNIAYKLTQRLAKAEAYGPITQGLARPVNDLSRGCSAEDIVGVAAITAVQAQYVKA

SEQ ID NO: 31584 - protein, 329 aa, Corynebacterium glutamicum
MSAELFENWLLKRARAEHSHIVLPEGDDDRILMAAHQLLDQDICDITILGDPVKIKERATELGLHLNTAYLVNPLTDPRLEEFAEQFAELRKSKSVTIDEAREIMKDISYFGTMMVHNGDADGMVSGAANTTAHTIKPSFQIIKTVPEASVVSSIFLMVLRGRLWAFGDCAVNPNPTAEQLGEIAVVSAKTAAQFGIDPRVAILSYSTGNSGGGSDVDRAIDALAEARRLNPELCVDGPLQFDAAVDPGVARKKMPDSDVAGQANVFIFPDLEAGNIGYKTAQRTGHALAVGPILQGLNKPVNDLSRGATVPDIVNTVAITAIQAGGRS

SEQ ID NO: 31585 - protein, 328 aa, Thermoanaerobacterium thermosaccharolyticum
MSIIQSIIEKAKSNKKKIVLPEGAEPRTLKAADIVLKEGIADLVLLGNADEIRNAAEGLDISKAEIIDPLKSEKFDKYATDFYELRKNKGLTLEKAKETIKDNIYFGCMMVKRRLCSGLVSGAIDATADLLRPAFQNVKTAPGAKIVSSFFIMEVPNCEFGENGVFLFADCAVNPSPNAEELASIAVQSANTAKTLLGMEPRVAMLSFSTKGSASHELVDKVRTATEIAKNLIPDVAIDGELQLDADVVKEVAELKAPGSPVAGRANVLIFPDLQAGNIGYKLVQRLAKANAIGPITQGMGAPVNDLSRGCSYKDIVDVIATTAVQAQ

SEQ ID NO: 31586 - protein, 316 aa, Sinorhizobium meliloti
  misc_feature (3)..(3): Xaa can be any naturally occurring amino acid
  unsure (1)..(316): unsure at all Xaa locations
MRXRWPAQPSKYDRLIAAARAEAPAVTIVAHPCDETSLGGAIEAAEMGLITPILVAPEAKIRNVAAEHRLDLGRREIVDVPHSHAAAAKAVALIREGRGELLMKGSLHTDELMHEVAASATGLRTQRRISHVFVMDVPGHTDTLFITDAAINIFPDLEAKRDIVQNAIDLWVAIGLGEPRVAILSAVETVTAKIPSTIEAAALCKMAERGQITGGVLEGPLAFDNAIDQEAARIKGINSPVAGHAQILVVPDLEAGNMLAKNLTFLTHADAAGLVLGARVPIVLTSRADSVRTRLASCAVAALYAARRRAAQVAAV

SEQ ID NO: 31587 - protein, 358 aa, Medicago sativa subsp. x varia
MENGKVHVVKPQSEARLAILELAHIMSVPTSLVAVLKMKVPEAIWQGGKNTPLSASQILSIVRPNGGGDAENLQRILRLLTTYAIFAEDLSSNGKRKYSLTDIGKALVPDDDGLSYATYVLQHYQDQYLRAWPLVGDAVEDASVEPFEKLHGEGAYAYCMKRPDEMSLFYASMSGLSMPHMNEMLEKYDGFKGVETLVDVGGNSGVILNMIMNKYPNILKGINFDLPDMISSAPQLPGITHVGGDALESVPAGDAIFTKWTMLTWTDEECKKVLQNCYKALPVNGKLIVCEPVSPELTDESQRTRALLSGDIFIMTMYRTKGKHRTEEQFKQLGISTGFLRFRAFHIDPYFPVLEFQK

SEQ ID NO: 31588 - protein, 563 aa, Zygosaccharomyces bisporus
  misc_feature (225)..(225): Xaa can be any naturally occurring amino acid
  unsure (1)..(563): unsure at all Xaa locations
MSEITLGRYLFERLRQVDTNTIFGVPGDFNLSLLDKIYEVQGLRWAGNANELNAAYAADGYARVKGMAALVTTFGVGELSALNGIAGSYAEHVGVLHIEGVPSISSQAKQLLLHHTLGNGDFTVFHRMSANISETTAWLTDITTAPAEIDRCIRVTYLTQRPVYLGLPANLTDQKVPASLLNTPIDLSLKENDPEAEAEVVETVLELIKEAKNPIILADACCSRXDVKAETKKLIDITQFPSFVTPMGKGSIDEQNPRFGGVYVGTLSSPAVKKAVESADLVLSVGALLSDFNTGSFSYSYKTKNVVEFHSDHIKIRNATFPGVQMKFVLEDLLKKVPAAVKGYNPGPVPPAPSPNAEVAASTPLKQEWLWRQVGKFLQEGDIVITETGTSAFGINQSHFPNRTYGISQVLWGSIGYTTGSTLGAAFAAEEIDPKKRVVLFIGDGSLQLTVQEISTMVRWGLKPYLFVLNNDGYTIERLIHGEKAQYNDIQPWKNLELLHAFGATDYETHRVATVGDWDKLTTDSKFNENSRIRMIEVMLETMDAPSSLVAQAQLTAAINAKQ

SEQ ID NO: 31589 - protein, 576 aa, Solanum tuberosum
MLDSGKQIDFSKRKKKIYLAIVASVLLVAAVIGVVAGVKSRSNNSDDDADIMAISSSAHAIVKSACSNTLHPELCYSAIVNVTDFSKKVTSQKDVIELSLNITVKAVRRNYYAVKELIKTRKGLTPREKVALHDCLETMDETLDELHTAVADLELYPNKKSLKEHAEDLKTLISSAITNQETCLDGFSHDEADKKVRKVLLKGQKHVEKMCSNALAMICNMTNTDIANEMKLSGSRKLVEDNGEWPEWLSAGDRRLLQSSTVTPDVVVAADGSGDYKTVSEAVAKAPEKSSKRYVIRIKAGVYRENVDVPKKKTNIMFMGDGRSNTIITASRNVQDGSTTFHSATVAAVGEKFLARDITFQNTAGASKHQAVALRVGSDLSAFYKCDILAYQDTLYVHSNRQFFVQCLVAGTVDFIFGNGAAVLQDCDIHARRPGSGQKNMVTAQGRTDPNQNTGIVIQKCRIGATSDLRPVQKSFPTYLGRPWKEYSRTVIMQSSITDVIQPAGWHEWNGNFALNTLFYGEYANTGAGAATSGRVKWKGHKVITSSTEAQAYTPGSFIAGGSWLSSTGFPFSLGL

SEQ ID NO: 31590 - protein, 365 aa, Oryza sativa
MCGGAIIHHLKGHPEGSRRATEGLLWPEKKKPRWGGGGRRHFGGFVEEDDEDFEADFEEFEVDSGDSDLELGEEDDDDVVEIKPAAFKRALSRDNLSTITTAGFDGPAAKSAQRKRKNQFRGIRHRPWGKWAAEIRDPRKGVRVWLGTFNSAEEAARAYDAEARTIRGKKPKVNFPEAPTTAQKRRAGSTTAKAPKSSVEQKPTVKPAFNNCANAMAFVYPSANFTSNKPFVQPDNMPFVPAMNSAAPIEDPIINSEQGSNSFGCSDFGWENDTKTPDITSIAPISTIAEVDESAFIKSSTNPMVPPVMENSGVDLPDLEPNMRFLLDDGGGDSIDSLFNLDGSQDVVSNMDLWSFDDMPVSDFY

SEQ ID NO: 31591 - protein, 352 aa, Clostridium beijerinckii
MIAPSKYIQGNGELKNIAEYVSVLGEKALCLISESGLKRVKDTIDKSFETKNIGVKYDLFNGECSITEVNRIIKICDENQLTVLIGIGGGKIIDTIKAVGYYANLPVVIVPTIAATDAPCSALSVLYTDDGVFDKYLFLKQNPNIVLVDTGIIAKAPVRLLVSGMGDALATYFEARACEKSNAGTCSIFGTTTITAQALARLCYDTLITEGYKAKLAVEEGVCTKSVEKIVEANTLLSGLGFESGGIAARHAIHNGLTVLPACHHMYHGEKVAFGTLAQLVLENAPMDEIEEVLDFSTRVGLPVTLKQLGINEIKPEEIIEVAKAATSKEDTAHNMPFEVTPEDVCDCYFNS

SEQ ID NO: 31592 - protein, 555 aa, Moritella marina
MCSIFGILDIKSDIKPLREQALELSKLLRHRGPDWSGIYTSDNAILVHERLAIVDVNNGAQPLYNEEKTHVLAVNGEIYNHKDLKKTLNVDFEFQTESDCEVILALYKEKGTQFLDDLNGIFAFALYDETEDAYLIGRDHIGIIPLYTGYDEHGNFYVASEMKALVPICTQIEEFPAGHYLWSKDGVVTPYYQRDWKDFDNVAQNGGDKSVVKQGLEDAVKRQLMCDVPYGVLLSGGLDSSVISAITQQYAKRRIEDGGKTEAWWPQLHSFSVGLNGSPDLAAAQKVADHLGTIHHSIEFTVQEGIDALRDVIYHIETYDVTTIRASTPMYLMARKIKAMGIKMVLSGEGADELFGGYLYFHKAPNAKEFHEETVRKVNKLHMFDCLRANKSMAAWGIEARVPFLDKEFVDASMRLNPELKMITGDRIEKNIIREAFEDLLPEEIVWRQKEQFSDGVGYSWIDQLKVHVEEAVTDQMLASAAFKFPINTPDTKEGYYYRAIFEDHFPGDSAAKCVPFGKSVACSTVEALAWDESFQNNADPSGRAAGVHNEAYED

SEQ ID NO: 31593 - protein, 804 aa, Hyaloperonospora parasitica
MSDKKDDFKAGIMDRKRSPNRLVVDEALNDDNSVVALSMAKMEELQLFRGDTVLLKGKKGHETVCVVLQDETVDDHNVRMNKVVRKNLRVRLGDVVGLHTCGDVPYGKRIHVLPIDDTIEGVTGNLFDVYLKPYFVEAYRPVKKGDLFLVRQAMHPVEFKVVETEPGPYCIVAPDTIIHCEGEPVRREDEEKMDEVGYDDIGGCRRQMAQIREMIELPLRHPQLFKTLGVKPPRGVLLYGPPGSGKTLIARAVANETGAFFFLINGPEIMSKMAGESESNLRKAFEEAEKNAPAIIFIDEIDSIAPKREKTNGEVERRIVSQLLTLMDGLKQRASVVVIGATNRPNSMDPALRRFGRFDREIDIGVPDENGRLEIFRIHTRNMKLDDDVDPELIARDTQGFVGADMAALCTEAALQCIREKMDVIDIEDETIDAEILDAMSVTQAHFKYALGVSNPSSLRETTVEVPTVTWRDIGGLEGVKRELLELVQYPVEHPEKFEKYGLSPSKGVLFYGPPGCGKTLLAKAVANECQANFISIKGPELLTMWFGESEANVREVFDKARGAAPCVLFFDELDSIAQQRGSSSGDAGGAGDRVMNQLLTEMDGMGAKKNVFIIGATNRPDIIDPALMRPGRLDQLIFIPMPDFDSRLSILRSVLRKSPVSKDVDLNFLAQQTDKFSGADLTEICQRAAKLAIRESIARDMERDRLRAEAGDEMEDIEDDDPVPEITPRHFEEAVRNARRSVSDRDLAQYSTFAQTLQQARSHVTAGGTSLANFSFPGRNVSANTGGGAAVAADEEDEEDLYS

SEQ ID NO: 31594 - protein, 596 aa, Rhizopus stolonifer
AKKQSIPMGKVLNQMRSEWHLLAIGVCGAAIAGAVFPCFALIFARVIALLISPDMSPPGPMSGTNLYSFLFVVIGICAFIGFSSQVISFEVAGERYTKRLRSDIFRAFMRQEIGFFDHDDNSLGALTSRLAIDSKNVNELVTKTWGDITQIIVTAITGLSIAFSQTWALTLVILCMTPFIAFATGYESKIHRGFEDKTKKANEQSGEVAGEAIKEIRTVTALNKQNFFETKYHRATDHPHKLAQRKAYMSSIGYALQQGITLYTNAVAFYAGIRFMANGMIDFQQMFTCMMAIMLTAQGVGRASVFTSTLSKAKYSAIAAFDILEREPEIDPDLEGIEPAHSQINGDIAFENITFRYPARPDTSIFNGEFNLHGKSGQTIALVGPSGCGKSTTIGMLQRWYDPISGTVRLDDNNVKNYSLNNLRSHMALVGQEPILFDMTIGENISFGVDESIQVTQEQIEDACRASNIHKFIVGLPQGYDTRVGDKGSQLSGGQKQRIAIARALIRKPRVLLLDEATSALDSESEKLVQAAIDNILEEGGRTTITIAHRLSTIQNADLICVVKNGRVIEQGTHWELLKLSGVYSDLVYQQSLNAH

SEQ ID NO: 31595 - protein, 1313 aa, Rhizopus stolonifer
MKRDHSTSRSSVTAQSDSGDTQLNTTENHDEKILLQQEIAAAERSDVKSEETDKKKKKEKQLSVPIYKIFRFATKLELLMICIAAIFSAGIGAMQPISIIIFGQFMTTISTAMASGDYQALVDATHPLVLIFVYMGTAVLVCAYIAQCFWVLTGENQVRRIRNLYIHSILRQDMSWFDKAEEGSLTTRLATDTQLIQDGISDKFGLLVMCIGQFLAGFIIAFVKGWRLAVVILATIPLLAGTGAAMGYFITKYTLKSQDAYAEAGSVAEQVFSGIRTVYSFSLQNRFAELYSNRLENAMKTGIRRGQVLGFGFGGFMFVLFCTYALSFWYGSKLTREMIMTGSDVLVVFFAMIIGAMALLQLPPNLSAVSSGCGAAYKIYSTIDRVPEIDPDSQEGLKPQSYNANLEFRDVMFKYPTRPDITILKKLNLTIRPGMTVAFVGPSGSGKSTSVQLIQRFYDPNAGSVFLDGHNLRDYNVAWLRSQIGVVSQEPVLFNMSIKQNLLMGISKQVSNDEIVDACKKANCHSFVSQLPDGYDTMVGEHGGMLSGGQKQRIAIARAILKNPPILLLDEATSALDTQSERLVQAALDAASADRTTIVIAHRLSTIRNADLIVVMHQGDLVEQGSHNELLALNGVYADLVKKQEIATKQVGTVTEEPDSEELLRREEREIAQEKQRAAEELDEKDTNDHLFRVTTGASSVDAYELKRRKEKEERKNAKKQSIPMGKVLNQMRSEWHLLAIGVCGAAIAGAVFPCFALIFARVIALLISPDMSPPGPMSGTNLYSFLFVVIGICAFIGFSSQVISFEVAGERYTKRLRSDIFRAFMRQEIGFFDHDDNSLGALTSRLAIDSKNVNELVTKTWGDITQIIVTAITGLSIAFSQTWALTLVILCMTPFIAFATGYESKIHRGFEDKTKKANEQSGEVAGEAIKEIRTVTALNKQNFFETKYHRATDHPHKLAQRKAYMSSIGYALQQGITLYTNAVAFYAGIRFMANGMIDFQQMFTCMMAIMLTAQGVGRASVFTSTLSKAKYSAIAAFDILEREPEIDPDLEGIEPAHSQINGDIAFENITFRYPARPDTSIFNGEFNLHGKSGQTIALVGPSGCGKSTTIGMLQRWYDPISGTVRLDDNNVKNYSLNNLRSHMALVGQEPILFDMTIGENISFGVDESIQVTQEQIEDACRASNIHKFIVGLPQGYDTRVGDKGSQLSGGQKQRIAIARALIRKPRVLLLDEATSALDSESEKLVQAAIDNILEEGGRTTITIAHRLSTIQNADLICVVKNGRVIEQGTHWELLKLSGVYSDLVYQQSLNAH

SEQ ID NO: 31596 - protein, 353 aa, Glomus intraradices
MYNNNKSNTETLAKYLSLDQGGKVQAEYIWIDGDSGLRSKTRTLDFKPADVSEISEWNFDGSSTNQAPGDDSDVLLRPVAIFKDPFRGGDNILVLNECFNNDGTPNRTNHRHSCAKVMKTYTDQHPWFGIEQEYTLFESDGSVLGWPKGGFPGPQGPYYCSVGANVAFGRDVVEAHYRACLYAGVNISGINAEVMPGQWEFQVGPCEGIDMGDHLWIARFLLHRVAEDFGIIVSFHPKPIKGDWNGAGCHTNYSTQAMREEGGIKAIHAAIDKMAARHADHITVYGEDNDQRLTGRHETGHISQFSYGVANRGASIRIPRHVAAEGKGYLEDRRPASNIDPYRVTQIIVESSL

SEQ ID NO: 31597 - protein, 231 aa, Nicotiana benthamiana
MAPKEKGTAAGKVNGVSKEVHYRGVRKRPWGRYAAEIRDPGKKSRVWLGTFDTAEDAARAYDAAAREFRGTKAKTNFLVLEQENVKLANGNRSPSYSSTVENSPPVMPENSPPAVILDTSPLDLSLGGSGSLFSNGVGRFHMYYLEAVQREQVISSYKKSCRTTAEFIAGCGGGASGESDCRTTAEFIAGCGGGASGESDSSSVIDFMGHDLKPTTRPINLDLNLPPPENM

SEQ ID NO: 31598 - protein, 252 aa, Brassica juncea
MAYQTELGGESSSQRKAGRGKIEIKRIENTTNRQVTFCKRRNGLLKKAYELSVLCYAEVALIVFSSRGRLYEYSNNSVKGTIERYKKAISDNSNTGSVAEINAQYYQQESAKLRQQIISIQNSNRQLMGETIGSMSPKELRNLEGRLDRSVNRIRSKKNELLFAEIDYMQKREVDLHNDNQLLRAKIAENERNNPSMSLMPGGSNYEQIMPPPQTQPQPFDSRNYFQVAALQPNNHHYSSAGREDQTALQLV

SEQ ID NO: 31599 - protein, 650 aa, Burkholderia mallei
MGKIIGIDLGTTNSCVAIMEGNQVKVIENSEGARTTPSIIAYMDDNEVLVGAPAKRQSVTNPKNTLFAVKRLIGRRFEGKEVQKDIGLMPYAIIKADNGDAWVEAHGEKLAPPQVSAEVLRKMKKTAEDYLCEPVTEAVITVPAYFNDSQRQATKDAGRIAGLEVKRIINEPTAAALAFGLDKAEKGDRKIAVYDLGGGTFDVSIIEIADVDGEMQFEVLSTNGDTFLGGEDFDQRIIDYIIGEFKKEQGVDLSKDVLALQRLKEAAEKAKIELSSSQQTEINLPYITADASGPKHLNLKVTRAKLEALVEDLVERTIEPCRTAIKDAGVKVSDIDDVILVGGQTRMPKVQEKVKEFFGKEPRRDVNPDEAVAVGAAIQGQVLSGDRKDVLLLDVTPLSLGIETLGGVMTKMINKNTTIPTKHAQVYSTADDNQGAVTIKVFQGEREMAAGNKLLGEFNLEGIPPAPRGVPQIEVTFDIDANGILHVGAKDKATGKENKITIKANSGLSEAEIEKMVKDAEANAAEDHKLRELAESRNQGDALVHSTKKALTEYGDKLEAGEKEKIEAALKELEDVLKNASSDKAAIDAKVEAVATASQKLGEKMYADMQAQQAGSAGVAGAATEGASAQGGAQPADDVVDADFKEVKKD

SEQ ID NO: 31600 - protein, 780 aa, Agrobacterium rhizogenes
MPSINKRKFYILSILHIYMMDLPYNRPRFPPFAITGLPSAAKLKRAISRAFVCYDQFCDELLQYQQRWTDWVFDHGFAEAIEDMALVFQIEPCLHGPRTGTLEVLRSCRTKVFIYTSYRRLRHFVENQCIAQPGDAVLACMIPPYVSDLSLQEMSRAHNSFCPGSHTSIADVQCFIAIQLSSLFVEEGTCDVHGRNGLKTTCRFFRRPAECFSRYDIVAIGSVLFHNALHQPANYNEDLSCFDLRYDYQVFLHERDANDGVGHYPEGTPLPSVAIVGGGLSGLVAAAELLDAGVREIALFTPVDEVRSLGVSPMSNGDARQVLTSFGVMPISGNQVCLSYYLDKFRIPSSLRFPCAGNDHTALYFRKKRYEWPAGQAPPGEFQRISAGWEKLLYHGCERNGRRLIAPMDIFSMLRGRRYEEASEARRAWLREFDNFTFHAALVEIFSCGVESPGGAAWQTTDFAAFGMMRLGGGRVSSCYTLLFSTVLDWIINGYEEDQYISVGGVHLLQALMRIEIFKRKVGFHFDPLRGLAKEGGKVKVCMKDGRSRVFDQVIIGGRGGPDATNITPVSHVTCVGYDIEAPAGNSSATVNAALFMITKQKFWLDDDIPALIWTDGLVRELCCIDIESPSGEGLVIFHYEMNDYLSRPFQSDEKKRRCLDLVRELAAVFPELACHLVPVNEDYEEYVFDGHLKDGFRASLWRENSLKKCQYSQDPHMYDSPLMEHGAVCQIDSKDCVNGALFEEQVKTGIITACTVIRSTGGTLSSLHPLDWNKIYFPA

SEQ ID NO: 31601 - protein, 532 aa, Bacillus cereus E33L
MIKKENSVFYISILLTTLFIIWGVIPASWIQGYDLQSVTSSLNVFILNKFGWFYSLLMTTMIVLAGYLAFSKYGSIRLGKDDEKPQYSYLSWLSMLFGAGMGIGLLFYGITEPISHFGAPLTGEPGTEESAKVAMQYSFFHWGLFPWSLYAIVALTIAYFTFRKQKGSTIGATVTPLFNRSKHSPIGKTVDILAVLATVFGIVPSVGIGAQQIAGGLSYLLPSINNTIGTHLVLIAIFTVLYLTSAQTGLDRGIKYLSNLNFSLAGILLVSFLILGPTVFIMKYFTSTLGSYIEALPSMGLNLGAFSKESSSWIENWTIFYWGWWISWSPFVGTFIARVSRGRTIREFIIGVVLIPTFICTFWFAVFGGTAIHMEMFQSLGIADEIAKNGTEIGLFAVISHLPFSTFLTIIGLILIATFFVTSADSATFVVAMQTSNGNLSPKNSLKLIWGLTITAIAAILLQAGGLNALQIAAIIAALPFSIVVVLMVTSLFKELRKENIITQTKQSPQKIKKLYNRKAPLPELYPIKWTF

SEQ ID NO: 31602 - protein, 398 aa, Bacillus cereus E33L
MHHLLNSRVKQIEISKIRQISEMAARYDNVISLTIGQPDFYTPEHIKSAGQAAILNNKTSYPPTSGYKELLISAAGFLQQKYGLHYDSNSEILVTNGATEGIYIALRSILDEDSEVILPAPIYSGYEPIIRLCGARPVYVDTSSTDFKITAQALENAISEKTRCIILAYPMNPTGATLSKKEMNEIRNVLIDKEIFVVSDEIYSELNLDNEHVSIAQTEGMKYKTIIVNGLSKSHAMTGWRIGFTFAPSYITEQMKKVHQYAVTAVSSISQMAAIDALTVGRNDASVMREEYRKRRDYVLKRLKSMKFDVIKPEGAFYIFPSISKFKITSHQFAIDLLENAKVAVVPGDAFSEFGEGYIRISYASSMVELKEALDRIENYMNTKYESFYRMYSAKLEL

SEQ ID NO: 31603 - protein, 587 aa, Bacillus cereus E33L
MRGLFTGRFEGYSLGHFQKDLLSGMIVGVVAIPLAMSFAIASGVKPEYGIYTTCIAGILISLFGGSKYQIGGPTGAFVPILLGIVITYGYEDLLIAGLLAGIILCLMGIFKLGSLIKFIPRPVTIGFTSGIAVIIFTGQIASFLGLTGIKKHEEFAANLKEIFTHIGTTNVYSVITALICFLVILITPKILPKVPGSLVGVVISTVIATVFFSGHVPTIGTAYGTIPNTLPEFDIPEITLERIKQLIGPAFVIAMLGGIESLLSAVVADGMTNSKHNSNKELIGQGIANIVTPLFGGIPATGAIARTATNIKSGAVSPMSGVIHGGFVLFTLLLLAPYASHIPLASMAPILMVVAWNMSEQRHFVHILKMKTGDSLILLVTFLLTVFTSLTTAVEIGLILAIILFTKRMSNMLVISKVFPDHTKKNDKLLPHVVNKAHDCPQISIYTIEGPLFFGAAQTFEQNILATIHYKPKVLILRMGKVPFIDTTGESYFRNIIQHFKKQGGVLLISGIQSELKVTLDKNGLYAEIGEENFFDHTGEAINCALGHLNTKKCIGCKHFAFHECTGLSQQSQEVNTIKNKTKALEF

SEQ ID NO: 31604 - protein, 1137 aa, Solanum lycopersicum
MESQSSENRRGGGGRTSLNQNKQNNNKDSGLNTSSAASNMKNNASKAALAQYNADAKLMAEFEQSSVSGKSFDYSKSVLFPPHEANEEEITSYLSRIQRGGLVQPFGCMVAIEEPTFKIIGYSENCYDMLGFKPTKMKLGLIGVDARNLFTPSSGDSLAKVMASREISLLNPIWVHSRTTHKPFYAILHRIDVGIVIDLEPANSSDPALLLAGAVQSQKLAVRSISRLQSLPGGDIGVLCDTAVEDVQKLTGYDRVMVYKFHDDNHGEIVSEIRRSDLEPYLGLHYPATDIPQAARFLFKQNRVRMICDCNAQPVKVVQSEELKQPICLVNSTLRSPHECHSKYMANMGSISSLVMAILINSGDSMKLWGLIVCHHTSPRYVPFPLRYACEFFTQAFGLQLNMELQLASQLAEKKTLQMQTLLCDMLLRDVPFGVVTQSPSIMDLVKCDGAALYCGGKCWLLGVTPTEAQVKDIAQWLLVAHKDSTGLSTDCLADAGYPGAALLGDAVCGMATARITSKDFLFWFRSHTAKEVKWGGAKHHPDDKDDGGKMHPRSSFNAFLEVVKSRSLPWEIPEINAIHSLQIIMRESIQENENSSLKTLTTSQQNDADGPSMDELSSVAMEMVRLIETATAPIFGVDPSGLINGWNEKIADLTGLHASEAVGMSLINDITHEDSRGTVEKVLHRALLGEEEKNVEIKLRRFGKDPPGSVIYLVINACTSRDHKNGVVGVSFVAQDVTPEKFIMDKFIQLRGDYEAIVQSLSPLIPPIFASDENACCSEWNAAMERLTGWTKYEVMGRTLPGEVFGGLCRLTGQDALTKFMILFYQAISGHDTKKLPFGFFNRRGEFLEVFLTANKRTDEHGNVCGCFCFLQPMTIDPEASDERQDSKDSLWKYKEYVYVLQQMKNPLNGIQFTHKLLEATGVSDNQKQLLETSEACEKQILSVIDNMDFGGIEDGKVQLNMEEFVLGNVVDAIVSQVMIFLKEKNLQLLHDIPDQIKTLPLYGDQIKLQRVLSDFLLSVVHHAPSPDGWVEIKVLPGLKLIQDGNELIHLQLRMTHPGQGLPAALIDDMSGERNRWTTQEGIALNVAQKLLNVMNGHVRYVRGEDKCYFLIDVELQTLKPTQHGPKLEVTQEIEI

SEQ ID NO: 31605 - protein, 596 aa, Salix gilgiana
MVFQDFDQLSERRRLERQQKLRKKIIIASVSSIAFFVIVGAGVFSLVSNHDISSPGNNGGSPSAATRPAEKAKPISHVARVIKTVCNATTYQDTCQNTLEKGVLGKDPSSVQPKDLLKIAIKAADEEIDKVIKKASSFKFDKPREKAAFDDCLELIEDAKEELKNSVDCIGNDIGKLASNAPDLSNWLSAVMSYQQTCIDGFPEGKLKSDMEKTFKATRELTSNSLAMVSSLVSFLKNFSFSGTLNRRLLAEEQNSPSLDKDGVPGWMSHEDRRILKGADKDKPKPNVSVAKDGSGDFKTISEALAAMPAKYEGRYVIFVKQGVYDETVTVTKKMANITMYGDGSQKTIVTGNKNFADGVQTFRTATFAVLGDGFLCKFMGFRNTAGPEKHQAVAIRVQADRAIFLNCRFEGYQDTLYAQTHRQFYRSCVITGTVDFIFGDATSVFQNCLITVRKPLENQQNIVTAQGRIDGHETTGIVLQSCRIEPDKDLVPVKNKIRSYLGRPWKEFSRTVIMDSTIGDFIHPGGWLPWQGDFGLKTLYYAEYSNKGGGAQTNARIKWPGYHIIKKEEAMKFTIENFYQGDWISASGSPVHLGL

SEQ ID NO: 31606 - protein, 640 aa, Corynebacterium glutamicum
MCGLLGILTANGNAEAFVPALERALPCMRHRGPDDAGTWHDADAAFGFNRLSIIDIAHSHQPLRWGPADEPDRYAMTFNGEIYNYVELRKELSDLGYTFNTSGDGEPIVVGFHHWGESVVEHLRGMFGIAIWDTKEKSLFLARDQFGIKPLFYATTEHGTVFSSEKKTILEMAEEMNLDLGLDKRTIEHYVDLQYVPEPDTLHAQISRLESGCTATVRPGGKLEQKRYFKPQFPVQKVVKGKEQDLFDRIAQVLEDSVEKHMRADVTVGSFLSGGIDSTAIAPLAKRHNPDLLTFTTGFEREGYSEVDVAAESAAAIGAEHIVKIVSPEEYANAIPKIMWYLDDPVADPSLVPLYFVAAEARKHVKVVLSGEGADELFGGYTIYKEPLSLAPFEKIPSPLRKGLGKLSKVLPDGMKGKSLLERGSMTMEERYYGNARSFNFEQMQRVIPWAKREWDHREVTAPIYAQSRNFDPVARMQHLDLFTWMRGDILVKADKINMANSLELRVPFLDKEVFKVAETIPYDLKIANGTTKYALRRALEQIVPPHVLHRKKLGFPVPMRHWLAGDELFGWAQDTIKESGTEDIFNKQAVLDMLNEHRDGVSDHSRRLWTVLSFMVWHGIFVENRIDPQIEDRSYPVEL

SEQ ID NO: 31607 - protein, 391 aa, Acorus gramineus
PYEVPMTAAGALQSYKLAAKAIARLQSLPGGSMERLCDTMVREVFELTGYDRVMAYKFHEDDHGEVVAEITKQGLEPYLGLHYPATDIPQAARFLFMKNKVRMICDCRAKPVKVFQDEKLTIDLAFCGSTLRAPHSCHLQYMENMDSIASLVMAVVINDGDDDDDHVGDNNNDNSKKKRLWGLVVCHNTSPRFVPFPLRYACEFLTQVFAIHVHKELELENQMPEKNILRTQTLLCDMILRDAPLGIVSQTPNIMDLVKCDGAALLYKDKIWQLGTTPTERQIRDIAIWLTDYHMDSTGLSTDSLHDAGYPDALALGDVVCGMAAARITSKDILFWFRSPTTSEIQWGGAKHERSDQDDGRRMHPRSSFKAFLEVVKTRSLPWKDYEMDAI

SEQ ID NO: 31608 - protein, 407 aa, Acorus gramineus
ILHRIDVGLVIDLEPVNPSDVPVTAAGALKSYKLAAKAISRLQSLPSGNISLLCDVLVREVSDLTGYDRVMVYKFHEDEHGEVIAEQRKTDLEPYLGLHYPATDIPQASRFLFMKNKVRIICDCFTPPVKVVQDKKLGQPLSLCGSTLRAPHGCHAQYMANMGSIASLVMAVTINDDDDDDGNGNEQQQKGRKLWGLVVCHHTSPRFIPFPLRYACEFLIQVFSIQLNKEVELAAQMREKHILRTQTVLCDMLLRDAPVGIFTQSPNVMDLVMCDGAALYYKNQFWLLGTTPSEVQIKDLVDWLHECHNGSTGLSTDSLMEASYPGASALGNAACGMAAIKIGGTRDYMFWFRSQTAKEIKWGGAKHDPVDNDEEGQKMHPRSSFKAFLEVVKWRSLPWENAEMDAI

SEQ ID NO: 31609 - protein, 385 aa, Amborella trichopoda
PYEVPMTAAGALQSYKLAAKAISRLQSLPSGNIDRLCHTVVQEVHELTGYDRTMAYKFHEDDHGEVISEITKGGLEPYLGLHYPATDIPQAARFLFMKNGVRMICDCRARHVRVFQDEKLASDLTLCGSTLRAPHSCHLQYMENMDSIASLVMAVVVNEDEEENIADGPKRKRLWGLVVCHNTSPRFVPFPLRYACEFLMQVFAIHVNKEVELEALVREKNILRTQTMLCDMLLRDALLGIVTKNPNVMDLVKCDGATLLYENKLWRLGVTPSEVHIRDLARWLSEYHTDSTGLSTDSLVEAGYPDGVSLGDLVCGMAAVKITETDMLFWSRSHTASEIRWGGAKHDPNDKDDKRRMHPRSSFKAFLEVVKTRSFPWKDYEMDAI

SEQ ID NO: 31610 - protein, 394 aa, Amborella trichopoda
DLEPVNPADVPVTAAGALKSYKLAAKAISKLQSLPSGNIELLCDVLVREVRELTGYDRVMAYKFHEDEHGEVVAEYRRADLDPYLGLHYPATDIPQASRFLFLKNKVRMICDCTASPVKVIQDKKLDKPLSLCGSTLRAPHGCHAQYMANMGSIASLVMSVTINENDEDSSPNEPSFHKGRKLWGLVVCHHTTPRFVPFPLRYACEFLLQVFGIQLNKEVELAAQLREKHILRTQTVLCDMLLRDAPVGIVTQSPNIMDLVKCDGAALYYQKQVWLLGTTPLEAQIRDISGWLLEYHCGSTGLSTDSLMEAGYPGALALGDAVCGMAAVKITSKDFLFWFRSHTAKVIKWGGAKHDPVDRDDGRKMHPRSSFKAFLEVVKQRSLPWEDVEMDAI

SEQ ID NO: 31611 - protein, 392 aa, Annona sp. SM-1999
PYEVPMTAAGALQSYKLAAKAIARLQALPSGNLQKLIDTVVEEVFELTGYDRAMAYKFHDDDHGEVISEITKPGLEPYLGLHYPATDIPQAARFLFMKNKVRMICDCNAKPVKVYQDEKLKLELTLCGSTLRAPHSCHLKYMENMGSIASLVMAVVINESDNEDDNSMVEQQQQQQPKRKRLWGLVVCHNTTPKFVPFPLRYACEVLMQVFAIHVNKELELENQIREKHLRTQTLLCDMLMRDAPLGIVTQSPNIMDLVKCDGAALLYNNKFWRLGLTPSEAHMRHIVSWLNEYHMDSTGLSTDSLHDAGYPGALALGDAVCGMAAVRITSKDILFWFRTHTAAEIRWGGAKHDPSDKDDGRRMHPRSSFKAFLEVVKSSSFPWKDYEMDAI

SEQ ID NO: 31612 - protein, 390 aa, Aquilegia sp. SM-1999
PYEVPMTAAGALQSYKLAAKAIARLQSLPSGSIDRLCDTVVEEVFQLTGYDRVMAYKFHDDDHGEVVSETTKEGLPPYLGLHYPATDIPQAARFLFMKNKIRMICDCRAKHVRVLQDEKLPFELTLCGSTLRAPHSCHLQYMENMDSIASLVMAVVINDGDEEEGTVEGASQSRKRKRLWGLVVCHNTTPRFVPFPLRYACEFLIQVFAIHVNKEFELENQILEKNILRTQTLLCDMLMRNAPIGIVSQSPNIMDLVKCDGAALLYQNKIWRLGLSPSESHIRDIASWLSEYHMDSTGLSTDSLYDAGFPGALSIGDTVCGMAAVRINSKDMLFWFRSHTAGEIRWGGAKHDPGEKDDGRKMHPRSSFKAFLEVVKTRSFPWKDYEMDAI

SEQ ID NO: 31613 - protein, 392 aa, Aquilegia sp. SM-1999
DLEPVNPADVPVTAAGAMKSYKLAAKAISKLQSLPSGNIPFLCEVLVQEISDLTGYDRVMVYKFHEDDHGEVIAEWKISDLEPYLGLHYPATDIPQASRFLFMKNKVRMIWDCTAAPVKVIQDTNLPQPLSLGGSTLRAPHGCHAQYMANMGSVASLVMSVTINDDDDDEVVNGQQKGRKLWGLVVCHHTCPRFVPFPLRYACEFLIQVFSMQINKEVELARQLREKHILQTKTVLCDMLLRDAPIGIFTQSPNVMDLVKCNGAALYYHQKFWLLGVTPTEAQIRDIVEWLVEYHNASTGLSTDSLVEAGYPGASILGNAVCGMAAAKITSKDFLFWFRSHTANEIKWGGAKHDPTEKDDGWKMHPRSSFKAFLDVVKHRSVPWEDIEMDAI

SEQ ID NO: 31614 - protein, 345 aa, Austrobaileya scandens
TGYDRVMAYRFHEDDHGEVVSEIRKSELEPYLGLHYPATDIPQAARFLFMKNKVRMICDCHAKSVTVHQDEKLQFDLTLCGSTLRAPHSCHLQYMANMGSIASLVMAVVVNEGEQDEEETAEPNQQPQLKRKRLWGLVVCHNTTPRFVPFPLRYACEFLIQVFAIHVNKEMELQNQLQEKNILRMQTLLCDMLLRDAPLGIVTQSPNIMDLVKCDGAAVLYGNKVWLLGVTPTESQIQDIASWLSESHMDSTGLSTDSLFEAGYPGALALGAKVCGMAAVKITLKDMLFWFRSHTAAEVRWGGAKHDPVDRDDGRRMHPRSSFKAFLEVVKSRSLPWKEYEMDGI

SEQ ID NO: 31615 - protein, 360 aa, Austrobaileya scandens
PFYAILHRIDAGLIIDLEPVNPADVPITAAGALKSYKLAAKAISRLQSLPSGNIGLLCDVLVQEVSELTGYDRVMAYKFHEDEHGEVIAEYRRSNLEPYIGLHYPATDIPQASRFLFMKNKVRMICDCFAPPIKVIQDKKLAQPLSLCGSTLRAPHGCHAQYMANMGSVASLVMSITVNDDDDETIGEQQNQQKGRKLWGLVVCHHTSSRFVPFPLRYACEFLIQVFGIQLNKEVELAAWMREKHILQMQTLLCDMLLRDAPVGIMTQSPNVMDLIKCDGAALYYGKQLWLLGTTPTEAQIRDIAGWLLEYHGGTTGLSTDSLMEAGYPAAAALGDGVCGMAAAKLTSKDFLFWFRSHTA

SEQ ID NO: 31616 - protein, 396 aa, Brasenia schreberi
PYEVPMTAAGALQSYKLAAKAIARLQSLPSGSVGRLIDTVVEEVHQLTGYDRVMTYKFHEDDHGEVVSEIRKPDLEPYLGLHYPATDIPQAARFLFMKNKVRMICDCRAKPVKVYQDENLKTDLTLCGSTLRAPHSCHLQYMDNMGSIASLVMAVVINEGEDEGDDEPEQNQGQQQQQQQKKKRLWGLVVCHNTTPRFVPFPLRYACEFLMQVFAIHVNKEVELENQMREKNILRTQTLLCDMLLRDAPLGIVTQSPNVMNLVKCDGAALLYGNKLWLLGQTPSESQMRDLAVWLSEYHRDSTGLSTDSLYEAGYPGALAIGDVVCGMAAVRITNSDMLFWFRSPTASEIRWGGAKHDPEEKDDGRRMHPRSSFKAFLEVVKTRSLPWKGFEMDAI

SEQ ID NO: 31617 - protein, 352 aa, Cabomba sp. SM-1999
DLEPVNPADMPSTAAGALKSYKLAAKAISRLQVLPSGNIGLLCDVLVREVSELTGYDRVMAYKFHEDEHGEVIAECKRPDLESYLGLHYPATDIPQASRFLFIKNKVRMICDCTAAPVKVIQNENLEPPLSLCGSTLRFPHGCHVQYMTNMGSIASLVMSVVINESDEATANDQPEAAATSEQPQKGRKLWGLVVCHHRKPRFIPYPLRYACEFLIQVFSVRLNKEVELAIQVREKHILRTQTVLCDMLLRDAPVGIVTQSPNIMDLVKCNGAALYYGKQFWLLGTTPTEAQIRDIIAWLHESHGSSTGLSTDSLMEAGYPRALVLGNAVCGMAAVKITSRDFLFWFRSHTA

SEQ ID NO: 31618 - protein, 390 aa, Calycanthus floridus
PYEVPMTAAGALQSYKLAAKAITRLQSLPSGSMERVVDTVVQEVFELTGYDRVMAYKFHEDDHGEVISEITKPGLEPYLGLHYPATDIPQAARFLFMKNKVRMICDCHAKPVKVCQDEKLTFDLTLCGSTLRAPHSCHLQYMENMGSIASLVMAVVINEGEEDDEVGISQQQQQRRKRLWGLVVCHNTTPRFVPFPLRYACEFLMQVFAIHVSKEIELENQLREKNILRTQTLLCDMLLRDALLGIVTQSPNIMDLVKCDGASLLYGNKMWRLGLTPTESQIHDIAMWVSEYHMDSTGLSTDSLYDAGYPKALSIGDVVCGMAAVRITAKDMLFWFRSHAAAEVRWGGAKHDPSDKDDGRRMHPRSSFKAFLEVVKTRSSPWKDYEMDAI

SEQ ID NO: 31619 - protein, 393 aa, Calycanthus floridus
DLEPVNPDDVPVTAAGALKSYKLAAKAISKLQSLPSGNISLLCDVLVREVSELTGYDRVMAYKFHEDDHGEVIAECRRSDLEPYLGLHYPATDIPQASRFLFMKNKVRMICDCLAPPVKVIQDKRLAQPLSLCGSTLRAPHGCHAQYMANMNSIASLVMSVMVHENDDRQEMSSSRKGRKELWGLVVCHHTTPRLSFPLRYACEFLIQVFGIQLNKEIELAAQMREKHILRTQTVLCDMLQRDAPVGIIRQTPNVMDLVKCDGAALYYRNQFWLLGTTPTDAQIRDIAEWLLEYHSSSTGLSTDSLMEAGYPGASVLGDAVCGMAAIRITSKDFLFWFRSHTAKEIKWGGAKHDPVDQDDDDRKMHPRSSFKAFLEVVKCRSLPWEDIEMDAI

SEQ ID NO: 31620 - protein, 349 aa, Canella winterana
DFEPVKPYEAPMTAAGALQSYKLAAKAIARLQSLPSGSMKRLVDTVVQEVFDLTGYDRVMAYKFHEDDHGEVISEITKPDLEPYLGLHYPSTDIPQAARFLFMKNKVRMICDCHALPVKVYQDDKLTFDLTLCGSTLRAAHSCHSQYMANMGSIASLVMAVVVNEREEEDENSESSEQQQQQKKKRLWGLVVCHNTTPRFVPFPLRYACEFLMQVFAIHVNKELELENQIQEKNILRTQTLLCDMLMRSAPLAIVTQNPNIMDLVKCDGASLLYQSKIWRLGVAPTESQIRDIARWLSDCHMDSTGLSTDSLHDAGYPGALLLGDVVCGMAAVKINSKDMPFWFRSHTA

SEQ ID NO: 31621 - protein, 393 aa, Canella winterana
DLEPVNPTDVPVTAAGALKSYKLAAKSISRLQSLPSGNIQLLCDVLVREVSDLTGYDRVMAYKFHEDEHGEVIAECRRSDLEPYLGLHYPATDIPQASRFLFMKNKVRMICDCSAPPVKVIQDKRLAQSLSLCGSTLRAPHGCHAQYMANMGSIASLVVSVTVSEDDDETESEQQQKGRKLWGLVICHHTCPRFVPFPLRYACEFLIQVFGIQLNKEVDLASQIREKHMLRTQTMLCDMLLRDAPVGIVTQSPNVMDLVKCDGAALYYKNQFWLLGTTPTEAQIRDITNWLVEYHNSTTGLSTDSLAVAGYPGASVLGDAVCGMAAVKFTNKDLLFWFRSHTAKEIMWGGAKHDPVDKDDDGRKLHPRSSFKAFLEVVKRRSLPWEDVEMDAI

SEQ ID NO: 31622 - protein, 391 aa, Chloranthus spicatus
PYEVPMTAAGALQSYKLAAKAIARLQSLPGGSMEKLCDTVVQEVFELTGYDRAMAYKFHEDDHGEVISETTKPGLEPYLGLHYPATDIPQAARFLFMKNKVRMICDCHAKPVKVFKMKKLAFDLTLCGSTLRAPHSCHSQYMVNMNSIASLVMAVVVNEGEEGDSSEPGQQQLQQKKKRLWGLVICHNTTPRFVPFPLRYACEFLMQVFAIHVNKELELENQIQEKNIFRTQTLLCDMLMRDAPLGIVSQNPNIMDLVKCDGAALLYNKKIWRLGLTPSESQIHDISFWLSENHMDSTGFSTDSLNDAGYPGAVAIGNAVCGMAAVWITSKDMLFWFRSHTAAEVRWGGAKHDPEDKDDNRRMHPRSSFMAFLEVVKTRSLPWKDAEMDAI

SEQ ID NO: 31623 - protein, 397 aa, Chloranthus spicatus
DLEPVNPADVPVTAAGALKSYKLAAKAISRLQSLPSGNISLLCDVLVREVSELMGYDRVMAYKFHEDEHGEVIAECRRVDLEPYLGLHYPATDIPQASRFLFMKNKVRMICDCSAAPVKVIQDKRLGQPLSLCGSTLRAPHGCHALYMANMGSIASLVMSVTINEDDDETKSDPQQQQQENRRKLWGLVVCHHTSTRFAPFPLRYACEFLLQVFSLQLNKEVELAAQLREKNMLRMQTLLCDMLLRDTPTGILTQSPNVMDLVKCDGAALYYRNQFWLFGTTPTDVQIRDMAEWLLECHDGSTGLSTDSLMEAGYPCASILGNAVCGMAAVKITSKDFLFWFRSHTAKEVKWGGAKHDPIDKDGDGRKMHPRSSFKAFLEVMKQRSLPWEDMEMDAI

SEQ ID NO: 31624 - protein, 414 aa, Degeneria vitiensis
SGKPFYAIIHRVTGSLIIDFEPVKPYEVPMTAAGALQSYKLAAKAIAKLQALPSGSMEKLVDTIVQEVFELTGYDRAMAYKFHEDDHGEVISEVTKPGLEPYLGLHYPATDIPQAARFLFMKNKVRMICDCHAKPVEVYQDEKLTFDLTLCGSTLRAPHSCHLQYMENMDSIASLVMAVVINEGEDESGGPEQQQQQLKRKRLWGLVVCHNMTPRFVPCPLRYACEFLMQVFAIHVNKEFELENQIREKNILRTQTMPCDMLLRDAPLGIVTQSPNIMDLVKCDGAALLYNNKIWRLGFTPTESQIHDISIWLSEYHTDSTGLSTDSLRDAGYPDALALGDVVCGMAAVRISPKDMLFWFRSPTAAEVRWGGAKHDPCDKDDGRRMHPRSSFKAFLEVVKTRSLPWKDYEMDGI

SEQ ID NO: 31625 - protein, 393 aa, Degeneria vitiensis
DLEPVNPADVPVTAAGALKSYKLAAKAISRLQSLPSGNISLLCDVLVREVSELTGYDRVMAYKFHEDEHGEVIAESRRSDLEPYLGLHYPATDIPQASRFLFMKNKVRMICDCSAPPVKVIQDKRLAQPLSLCGSTLRAPHGCHTQYMANMGSISSLVMSVTINEDDDDMLSEQQQKGRKLWGLVVCHHTSPRFIPFPLRYACEFLIQVFGIQLNKEVELAAQMREKHILRMQTVLCDMLLRDTPVGIITQSPNVMDLVNCDGAALYYRNQFWLLGTTPTEAQIRDIAGWLVEYHDGTTGLSTDSLTEAGYPSAADLGDDVCGMATVKITSKDFLFWFRSHTGKEIKWGGAKHDPVDKDDDGRKMHPRSSFKAFLEVVKQRSLPWEDVEMDAI

SEQ ID NO: 31626 - protein, 388 aa, Drimys winteri
PMTAAGALQSYKLAAKAIARLQSLPGGSLKRLIDTVVLEVFELTGYDRVMAYKFHEDDHGEVISEVTKPDLEPYLGLHYPATDIPQAARFLFMKNKVRMICDCNAKPVKVYQDEKLTFDLTLCGSTLRAPHSCHLQYMENMGSIASLVMAVVINEREEQDENSGSEQQREQPRRKRLWGLVVCHNTTPKFVPFPLRYACEFLAQVFAIHVNKELELENQIQENNILRTQTLLCDMLMRAALLGIVTQSPSILDLVKCDGASLLYQNKIWRLGVAPTESQILDIALWLSEYHMDSTGLSTDSLQDAGHPGALSLGDVVCGMAAVRINSKDTLFWFRSHTAAEIRWGGAKHDPNQKDDGRKMHPRSSFKAFLEVVKTRSSPWADYEMDAI

SEQ ID NO: 31627 - protein, 394 aa, Drimys winteri
DLEPVNPVDVPVTAAGALKSYKLAAKAISKLQYLPSGNISLLCDVLVREVSELTGYDRVMAYKFHGDEHGEVIAECRRSDIEPYLGLHYPATDIPQASRFLFMKNKVRMICDCTARPVKVIQDKKLAQPLSLCGSALRAPHGCHAQYMANMGSIASLVMSVTISEDDDEASTEEQRQKGRKLWGLVVCHHVTPRFVPFPLRYACEFLIQVFGIQLNKEVELEAQLREKNMLRTQTMLCDMLLRDAPVGIVTQSPNVMDLVKCDGAALYYRNQFWLLGITPTEAQIRDIAEWLLEYHNSTTGLSTDSLMEAAYPGASILGDAVCGMAAVKITCKDFLFWFRSHTAKEIKWGGAKHDPGDKDGDGRKMHPRSSFKAFLDVVKQRSLPWEDVEMDAI

SEQ ID NO: 31628 - protein, 392 aa, Eupomatia laurina
PYEVPMTAAGALQSYKLAAKAIARLQALPSGSLEKLIDTVVQEVFELTGYDRAMAYKFHDDDHGEVISEITKPGLEPYLGLHYPATDIPQAARFLFMKNKVRMICDCYAKPVNVYQDEKLAFDLTLCGSTLRAPHSCHLQYMENMGSIASLVMAVVINDGEDEDESTGSGLQPPLLKKKRLWGLVVCHNTTPRFVPFPLRYACEFLMQVFAIHVNKELELENQICEKNILRTQTLLCDMLLRDAPLGIVTQNPNIMDLVKCDGVALLYDNKFWRLGLTPTESQMRDISAWLSEYHMDSTGLSTDSLYDAGYPGALALGDVVCGMAAVRITSKDMLFWFRSHTAAEVRWGGAKHDPNDKDDGRRMHPRSSFKAFLEAVKTRSLPWKDYEMDAI

SEQ ID NO: 31629 - protein, 393 aa, Eupomatia laurina
DLEPVNPADVPVTAAGALKSYKLAAKAISRLQSLPSGNISLLCDVLVRELSELTGYDRVMAYKFHEDEHGEVIAECRRLDLEPYLGLHYPATDIPQASRFLFMKNKVRMICDCSAPPVKVIQDKRLEQPLSLCGSTLRAPHGCHAQYMANMGTIASLVISVTINEDDDETPGEQQQKGRKLWGLVVCHHMSPRFVPFPLRYACEFLIQVFGIQLNKEVELAAQTREKHILRMQTMLCDMLLRDTPIGIVTQSPNVMDLVKCDGAALYYQNQFWLLRTTPTETQIRDIIGWLLEYHGDTTGLSTDSLTEAGYPGAADLGDDVCGMAAVKISSKDFLFWFRSHTAKEIMWGGAKHGPVDKDDDGRKMHPRSSFKAFLEVVKRQSLPWEDMEMDAI

SEQ ID NO: 31630 - protein, 396 aa, Hedycarya angustifolia
DLEPVNPADVPVTAAGALKSYKLAAKAISKLQSLPSGNISVLCDVLVREVSELTGYDRVMAYKFHDDEHGEVIAECRRSNLEPYLGLHYPATDIPQASRFLFMKNKVRMICDCSAPPVKVIQDKSLAQPLSLGGSTLRAPHGCHAQYMANMGSIASLVMSVTINEDDDETSSGSEQQQQKGRKLWGLVVCHHTSPRFVPFPLRYACEFLIQVFGIQLNKEVELAAQMREKHILRTQTVLCDMLLLDAPVGIITKTPNVMDLVKCDGAALYYLNQFWLLGTTPTEAQIRDIVSWLQEYHNGSTGLSTDSLMEANYPGAFVLGDAVCGMAAVRITSKDFLFWFRSHTAKEIKWGGAKHNIVDKDDDGRKMHPRSSFKAFLEVVKRRSLPWEDIEMDAI

SEQ ID NO: 31631 - protein, 398 aa, Hernandia lychnifera
DFEPVKPYEVPMTAAGALQSYKLAAKAIARLQSLSSGSMQKLVDTVVEEVYELTGYDRVMAYKFHDDDHGEVISEIKKPDLEPYLGLHYPATDIPQASRFLFMKNKVRMICDCNMKPVKVYLDEKLTYDLTLCGSTLRAPHSCHLQYMANMGSIASLVMAVVINEGEEERIAQKLHNHHHSQKRKRLWGLVVCHHTTPRFVPFPLRYACEFLMQVVAIHVNKEFELENQIQEKNILRTQTLLCDMLLRDAPLGIVTQSPNIMDLVKCDGAALLYGNKIWKLGTTPTELQIRDISLWLSEYHMDSTGLSTDSLYDAGYPGALSLGDAICGMAAVTITPKDFLFWFRSHTAAKVRWGGAKHDPTDKDDGRTMHPRSSFKAFLEVVKTRSLPWKDYEMDAI

SEQ ID NO: 31632 - protein, 392 aa, Houttuynia cordata
  misc_feature (248)..(248): Xaa can be any naturally occurring amino acid
  unsure (1)..(392): unsure at all Xaa locations
DLEPVNPSDVPVTAAGALKSYKLAARAISRLQSLPSGDISLLCDVLVREVSDLTGYDRVMAYKFHEDEHGEVVAECKRADLEPYLGLHYPATDIPPASRFLFMKNKMRMICDCLAQPVKVIQDKRLPQPLSLAGSTLRAPHGCHAQYMSNMGSIASLVMSVVVSEGDDDSNNGEKTGRKLWGLVVCHHTSPRFIPFPLRYACEFLIQVFAIQLSKEVELAAQMKEKHILRMQTVLCDMLLRDAPMGIXTQSPNVMDLVKCDGAALYYRCQCWLLGTTPTENQIRDLAEWLLQYHNSSTGLSTDSLVDAGYPGAHELGDAVCGMAAIRITSRDFLIWFRSHTAKEIKWGGEKHDPSDKDAFESKMNPRTSFKTFLEVVKRRSLPWEDVEMDAI

SEQ ID NO: 31633 - protein, 414 aa, Idiospermum australiense
SGKPFYAIIHRVTGSLIIDFEPVKPYEAPMTAAGALQSYKLAAKAITRLQSLPSGSMERLVDTVVQEVFELTGYDRVMAYKFHEDDHGEVISEITKPGLEPYLGLHYPATDIPQAARFLFMKNKVRMICDCHARPVKVYQDEKLTFDLTLCGSTLRAPHSCHLQYMENMDSIASLVMAVVINEGEEDDEVESAQQQQQKRKRLWGLVVCHNTTPRFVPFPLRYACEFLMQVFAIHVSKEFELENQLREKNILRTQTLLCDMLLRDAPLGIVTQSPNIMDLVKCDGAALLYGSKIWRLGLTPTDSQIQDIAMWLSEYHMDSTGLSTDSLYDAGYPKALSIDDVVCGMAAVRITAKDMLFWFRSHAAAEVRWGGAKHDPSDKDDGRRMHPRSSFKAFLEVVKTRSLPWKDNEMDAI

SEQ ID NO: 31634 - protein, 395 aa, Idiospermum australiense
DLEPVNPADVLVTAAGGLKSYKLAAKAISKLQSLPSGNISLLCDVLVREVSELTGYDRVMAYKFHEDEHGEVIAECRRSDLEPYIGLHYPATDIPQASRFLFRKNKVRMICDCLAPPVKVIQDKRLAQPLSLCGSTLRAPHGCHAQYMANMNSIASLVISVTVHEDDNETGSEQQQQPKGRKLWGLVVCHHTSPRFVPFPLRYACEFLIQVFGIQLNKEIELAAQMNEKHILRTQTVLCDMLQRNAPVGIITQTPNVMDLVKCDGAALYYRNQFWLLGTTPTEAQIRDIVEWLMEYHSSSTGLSTDSLMEAGYQGAAILGDAVCGMAAIRITSKDFLFWFRSHTAKEIKWGGAKHDPVDQDDDGRKMHPRSSFKAFLEVVKRRSLPWEDVEMDAI

SEQ ID NO: 31635 - protein, 390 aa, Lactoris fernandeziana
PYEVPMTAGALQSYKLAAKAISRLQSLPSGSMERLVDTVVQEVFELTGYDRIMAYKFHEDDHGEVISEVTKPDLEPYLGLHYPATDIPQASRFLFMKNKVRMICDCRAKPVKVYQDEKLSFDLTLCGSTLKAPHSCHLQYMENMGFIASLVMAVVVNEGEEEVDSQESSQQQAPKRKRLWGLVVCHNTTPRFVPFPLRYACEFLMQVFAIHVNKEFELENQILEKNILRTQTLLCDMLFRDAPMGIVTQSPNIMDLVKCDGAVLLYQNKVYRLGLAPTESQIHDIAQWLSEYHKDSTGLSTDSFHDAGYTRARSLGDIVCGMAAVRINSGDMLFWFRSHTAAEVRWGGAKHDPDEKDDGRRMHPRSSFKAFLEVVKYRSFPWKDYEMDAI

SEQ ID NO: 31636 - protein, 393 aa, Lemna gibba
DLEPVNPSDVPVTAAGALKSYKLAAKAISRLQSLPSGNISLLCDVLVREVKDLTGYDRVMAYKFHEDEHGEVVSECRGSDLEPYLGLHYPATDIPQASRFLFLKNKVRMICDCSAQPVRIIQDKRLSQPLSLCGSTLRAPHGCHAQYMKNMGSIASLVMSVTINDEGVDHGGEEQQKSRKLWGLVVCHHSSPRFIPFPLRYACEFLMQVFAIQVNKEVEIAAQKREKHILKTQTFFCDMLLREAPVGIFTQSPNVMDLVKCDGAALYYRNQFRLLGVTPTEAQIKDLCDWLMDWHNNTTGLSTDSLSEAGFPGASSLGDAVCGMAAIKITGKDFVFWFRSHVAKEIKWGGAKDESVGRSEEGRKLYPRSSFQAFLEIVKRRSLPWEDVEMDAI

SEQ ID NO: 31637 - protein, 391 aa, Magnolia x soulangeana
DFEPVKPYEVPMTAAGALQSYKLAAKAIARLQALSSGSMEKLVDTVVQEVFELTGYDRVMAYKFHEDDHGEVISEITKPGLEPYLGLHYPATDIPQAARFLFMKNKVRMICDCNAKPVKVYQDEKLTFDLTLCGSTLRAPHSCHSQYMENMSSIASLVMAVVINEGVDEEEGMEPAQQEQQQLKRKRLWGLVVCHNTTPRFVPFPLRYACEFLMQVFAIHVNKELELENQIQEKNILRTQTLLCDMLLRDALVGIRTQNPNIMDLVKCDGAALFYNNKIWRLGLTPTDSQMRDISVWLSEYHMDSTGLSTDSLYDAGYPGALALGDVVCGMAAVRINPKDMLFWFRSHTAAEVKWGGAKHDPSDKDDGRRMHPRSSFKAFLEVVKTKSLPW

SEQ ID NO: 31638 - protein, 358 aa, Magnolia x soulangeana
PFYAIVHRIDIGLVIDLEPVNPADVPVTAAGALRSYKLTAKAISRLQSLPSGNISLLCDVLVREVSELTGYDRVMAYKFHEDEHGEVIAECRGSDLEPYLGLHYPATDIPQASRFLFMENKVRMTCDCLAPPVKVIQDKKLAQPLILCGSTLRAPHGCHSQYMANMGSIASLVMSVTINEDDDDDTSVSNGRRRKLWGLVVCHHTSPSFVPFPLRYACEFLVQVFGIQLNKEVELPAQMREKHILRMQTVFCDMLLRDAPVGIITQSPNVMDLVKCDGAAFYYRNQFRLLGTTPTEAQIRDIAGWLLEYHDGTTGLSTDSLTEAGYPGAADLGDDVCGMAAIKITSKDYLFWFRSHTA

SEQ ID NO: 31639 - protein, 389 aa, Nelumbo nucifera
PYEVPMTAAGALQSYKLAAKAIARLQALPSGCMDRLCDTVVQEVFELTGYDRVMAYKFHEDDHGEVVSEITKPGLEPYLGLHYPATDIPQAARFLFMKNKVRMICDCRAKHVKVLQDEKLPFDLTLCGSTLRAPHSCHLQYMENMDSIASLVMAVVVNEGDEEGEASGSSQQQKRKKLWGLVVCHNTTPRFVPFPLRYACEFLIQVFAIHVNKEIELENQILEKNILRTQTLLCDMLMRDALLGIISQSPNVMDLVKCDGAALLYKNKIWQLGTTPTEFQIHDIASWLSEYHMDSTGLSTDSFYDAGFPGALSLGDAVCGMAAVRITSKDMLFWFRSHTAAEVRWGGAKHDPDEKDDGRRMHPRSSFKAFLEVVKTRSLPWKDYEMDAI

SEQ ID NO: 31640 - protein, 391 aa, Nelumbo nucifera
DLEPVNPADVPVTAAGALKSYKLAAKSISRLQSLPSGNISLLCDVLVREVSDLTGYDRIMVYKFHEDEHGGVVAECRRPDLESYLGLHYPATDIPQASRFLFMKNKVRMICDCLAPPVKVIHDKKLAQPLSLCASTLRVPHGCHAQYMANMGSIASLVMSVTINDDDNEMESDQPKGRKLWGLVVCHHTSPRFVPFPLRYACEFLVQVFGIQLDKEVELAAQLREKHILKTQTLLCDMLLRNAPVGIFTESPNVMDLVKCDGASLYYKNKFWLLGITPTEAQIRDIAGWLLEHHDGSTGLSTDSLMEAGYPGASVLGDAVCGMAAIKITSKDFLFWFRSHTAKKIKWGGAKHDPVVKDGGRKVHPRSSFKAFLEVVKRRSLPWEDVEMDAI

SEQ ID NO: 31641 - protein, 415 aa, Nymphaea odorata
GKPFYAIVHRVVSGLVMDFEPVKPSELPITAAGALQSYKLAGKAISRLQSLPGGSITRLCDTVVEEVHQLTGYDRVMTYKFHDDDHGEVVSEIRKPDLEPYLGLHYPATDIPQAARFLFMKNKVRMICDCRAKPVKVYQDENLKTDLTLCGSTLRAPHSCHLQYMENMSSIASLVMAVVINEGEDEGEDETDPNQRSQKRKRLWGLVVCHNTSPRFVPFPLRYACEFLAQVFAIHVNKEVELENQNALKKNILRTETLLCDMLLRGSPLGIVSQTPNIMDLVKCDGAAFLYGSKLYLLGRTPAESQIRDIAIWLSEYHKDSTGLSTDSLCEAGYPGALAIGSPVCGMAAVRITANDMLFWFRSHTASEIRWGGAKHDPEEKDDGRRMHPRCSFKAFLEVVKTRSLPWKDFEMDAI

SEQ ID NO: 31642 - protein, 407 aa, Nymphaea alba
PFYGILHRIDVGLVIDLEPVNPTDVPVTAAGALKSYKLAAKAISRLQALPSGNIGLLCDVLVREVSELTGYDRVMAYKFHEDHHGEVIAECKKPDLEPYLGLHYPATDIPQASRFLFMKNKVRMICDCTAPSVKVIQDKQLEAAVELCGSTLRSPHGCHAQYMVNMGSIASLVMSVVIMNHDEEPANDNPQKGSKLWGLVVCHHTSPRFIPFPLRYACEFLIQVFAVQLNKEVELAAQLREKHILRTQTVLCDMLLRDAPVGIVTPSPNVMDLVKCDGAALYYGKQFWLLGTTPTETQVRDIAGWLYECHGGSTGLSTDSLMEAGYSGAVALGDAACGMAAVKITYRDFLFWFRSHTAKEIKWGGAKHDTVDKDAGKRMHPRSSFKTFLEVVKHRSHPWENAEMDAI

SEQ ID NO: 31643 - protein, 394 aa, Sagittaria sp. Mathews 383
PYEVPMTAAGALQSYKLAAKAISRLQSLPGGSMQKLCDTVVQEVFELTGYDRVMAYKFHEDDHGEVVSEVTKPGLDPYLGLHYPATDIPQAARFLFMKNKVRMICDCRAKPVKVYQDEKLAFDLTFCGSTLRAPHSCHLQYMENMDSIASLVMAVIVNEGDEEDEVLGSRAQQQQQQQQRRKRLWGLVVCHNRTPRFIPFPLRYACEFLMQVFAIHVNKEFELENQMREKNILRTQTLLCDMLFRDALLGIISQNPNIMDLVRCDGAALVYQSKIWRLGMAPTESQICDIAAWLSEYHMDSTGLSTDSLHDAGYPGVLALGDSVCGMAAARITSKDILFWFRSHTAAEIRWGGAKHDPADEDDGRRMHPRSSFKAFLEVVKTRSMPWKDYEMDA

SEQ ID NO: 31644 - protein, 397 aa, Sagittaria sp. Mathews 383
DLEPVNLSDVPVTAAGALKSYKLAAKAISRLQSLSSGNISLLCDVLVREVRDLTGYGRVMAYKFHEDEHGEVISESRRSDLEPYLGLHYPATDIPQASRFIFMKNKLRMICDCTAQPVKVIQDKKFTQPLSLCGSTLRAPHGCHAQYMANMGSIASLVMSATISDEDEDDASSGQQRKRRKLWGLVVCHLTSPRFVPFPIRYACEFFMQVFAIQLNKEVELAAQTMEKYIFRTQTFLCDMLLRDAPVGIFTQSPNAMDIVKCDDAALYYKNQFWLLGITPAEGQIRGIAGWLRDCHNTTTGLSTDSLTAFSEAGYRGASTLGDAVCGMTAIKFTSRDFIFWFRSHTAKEIKWRGAKHDPVDKDDDGRKMHPRSSLKAFLDVVKRRSLPWEDVEMDAI

SEQ ID NO: 31645 - protein, 392 aa, Saruma henryi
PYEVPMTAAGALQSYKLAAKAISRLQSVPSGCLDRLIDTVVQEVYELTGYDRVMAYKFHEDDHGEVISEVTKPDLEPYLGLHYPATDIPQAARFLFMKNKVRMICDCRAKSVKVYQDEHLSFDLTLCGSTLRAPHSCHLQYMGNMSSIASLVMAVVINEGEEDDDGPDSTQQQAQPKRKRLWGLVVCHNTTPRFVPFPLRYACEFLMQVFAIHVNKELELENQIREKNILRTQTLLCDMLLRDAPLGIVTQSPNIMDLIKCDGAALLYENKVYRLGVTPTESQLHEIVQWLSEHHMDSTGLSTDSLHEAGYPKALSLGDIVCGMAAVRITTHDMLFWFRSHTAAEVKWGGAKHDPSDKDDGRRMHPRSSFKAFLEVVKTRSLPWKDYEMDAI

SEQ ID NO: 31646 - protein, 391 aa, Saruma henryi
DLEPVNPDDVPVTAAGALKSYKLAAKAISRLQSLPSGNISLLCDVVVREVSDLTGYDRVMAYKFHEDEHGEVIAECKRSDLEPYHGLHFPASDIPQASRFLFMKNKVRMICDCSAPPVKVIQDKRLAQPISLGGSTLRAPHGCHAQYMANMGSIASLVLSVTISEDDDETCSKQKGRKLWGLVVCHHTSPRFIPFPLRYACEFLIQVFGIQLNKEVELAAQMRETHILRTQTMLCDMLLRDAPMTIVTQSPNVMDLVKCDGAALYYRKESWLLGVTPTKAQIQDLAEWLLKDHNGTTGLSTDSLVEAGYPRAHNLGDMVCGMAAVRITNQDFLFWFRSHTAKEVKWGGAKHDPADKDDDRGKMHPRSSFKAFLEVVKRRSLPWEDVEMDAI

SEQ ID NO: 31647 - protein, 414 aa, Saururus cernuus
SGKPFYAIVHRVTGSLIIDFEPVKPFEVPMTAAGALQSYKLAAKAISRLQSLPSGSMERLVDTVVQEVFELTGYDRVMAYKFHEDDHGEVISEVTIPHLEPYIGLHYSATDIPQAARFLFMKNKVRMICDCHAKPVKVYQDDKLSFDLTLCGSTLRAPHSCHLQYMENMGSIASLVMAVVVNEGGDEDKGPDSSQQLGDNRRKRLWGLVVCHNTRPRFVPFPLRYACEFLTQVFAIHVSKELELERQIREKNILRTQTLLCDMLLRDAPMGIVNQSPNIMDLIKCDGAALFYKDKVFRLGNAPSETDIRDIAQWLFAHHMDSTGLSTDSLHDAGYPKAAFLGNLVCGMAAVKITCSDMLFWFRTHTAAEIRWGGAKHDHSERDDGKRMHPRSSFKAFLEVVKTRSLPWKDYEMD

SEQ ID NO: 31648 - protein, 391 aa, Saururus cernuus
DLEPVNPSDVPVTAAGALKSYKLAAKAISRLQSLPSGNISLLCDVLVREVSDLTGYDRVMAYKFHEDEHGEVVSECKRADLEPYLGLHYPATDIPQASRFLFMKNKVRMICDCLAQPVKVIQDKRLAQPLSLAGSTLRAPHGCHAQYMANMGSIASLVMSVMVSEGDDDSNEEKTGRKLWGLVVCHHTSPRFIPFPLRYACEFLIQVFAIQLSKEVELAAQMREKHILRMQTVLCDMLLRDAPMGIMTQSPNVMDLVKCDGAALYYRYQCCLLGTTPTENQIRDITEWLLQYHNSSTGLSTDSLVEAGYPGAHELSDAVCGMAAIRITSKDFLFWFRSHTAKEIKWGGEKHDPLDKDAFESKMNPRTSFKTFLEVVKRRSLPWEDVEMDAI

SEQ ID NO: 31649 - protein, 401 aa, Trochodendron aralioides
GKPFYAIVHRVTGSLIIDFEPVKPYEVPMTAAGALQSYKLAAKAIARLQSLPSGSIERLCDTLVQELFELTGYDRAMVYKFHEDDHGEVVSEITKPGLEPYLGLHYPATDIPQAARFLFMKNKVRMICDCRAKNVKVLQDEKLPFDLTLCGSTLRAPHSCHLQYMENMNSIASLVMAVVVQEGDEQARALVPHSLRRRKRLWGLLVCHHSTPRFVPFPLRYACEFLAQVFAIHVNKELELENQILEKNILRTQTLLCDMLMRDAPLGIVSQSPNIMDLVKCDGAVLLYKNRTWRFGSTPSELQIHDIALWLSEYHMDSTGLSTDSLYDAGFPGALTLGDGVCGMAAVRITSKDMLFWFRSHTAAEVRWGGAKHEPGEKDDGRRMHPRSSFKAFLEVVKSRS

SEQ ID NO: 31650 - protein, 390 aa, Trochodendron aralioides
DLEPVNPADVPVTAAGALKSYTLAAKAISRLQSLPSGNLSLLCDVLVREVSELTGYDRVMVYKFHEHKHGEVVAECRISDLEPYLGLHYPATDIPQASRFLFMKNKIRTICDCLAPPVKVIQDKRLVQPLSLCGSTLRAPHGCHAQYMENMGSIASLVMSVMNHEDEDEIESDRKGRKLWGLVVCHHTSPRFVPFLLRYACEFLIQVFGIQLNKEVELAAQLREKHILRTQTVLCDMLLRDAPVGIVTQSPNVMDLVKCDGAALYYRNTIWLLGVTPTEAQIRDIAGWLLEYHNGSTGLSTDSLMEAGYSDALLLGDAVCGMAAVKITSKDFLFWFRSHTAKEIKWGGVKHDPVDKDDGRKMHPRSSFKAFLEVVKRRSLPWEDVEMDAI

SEQ ID NO: 31651 - protein, 777 aa, Schizophyllum commune
MATEDALPKLPHRPEPAREKTDGSLDEKIDEKLNNNKGEGFQDEPFELETQAQLDRQHVVTTGQDVSRYVVNLRDDEDPALTFRSLVLGTVIAGLGAALCQIYIFKPVLVSVSTVFLLLLIYCIGNAWAVFLPKRSLVKGTRFERYGGIIEFINPGPFMIKEHVVSTLVASTAAYGATSVNNFAVQRLYYDTHVGPLTAVFATFSTLTFGMGLVGILRPLTVYPAEMVYWSNLPQVTVFQALHFNRHESTKRVRVFWWGFTIMFIYELFPAYIFPLLNSVSIFCLASQKAKPSTRDVFTNIFGGGNANEGLGLLNFSFDWQYIGSNYMSYPLLQQANSWIGLGACYVIMAAIYYSNAWDSKNYKMLSTSIFNHNGTVYDQAAVFGKNGILNETALEEYGLPAMTGSNAWANFAQNLAIGALIAHVTLFWSGDMRDAVLHFRNGKKTNDDPHYLAMQKYKEAPWWWYFILLFLAFIAGLIVCIKGETSLPWWSYIVSLAVGAFITPFSTILYGRMGNGIATNNLMKMIPGALNPGRPVANLYFSMWSHDVVSTSIGLAGDLKVGQYTKVPPRVMFLTQLWGCILGAIVNYVVMISIVDAQREVLLDASGTNVWSGQTIQSLNSQAVTWSLAKELYSASGPYVIVPIGLAIGLVPPFIQWLISKRWPTIKGIKVESIILPIIFNYAQTMSKGITSYVSTSIVIGLVSQLWLRQHHPVWYRKYNYILGGAFDGGAQVMVFILSFAVFGASGVERPFPSWAGNPAKGNIDYCNGNGALDAS

SEQ ID NO: 31652 - protein, 287 aa, Solanum lycopersicum
MKRFSFSDSSGKLLYPTEEKKENLGYSNEFQAMLDGLEDEDGIEESGCGTGKKRRLRVDQVQALEKIFEVDNKLDPDRKVKIAQELGLQPRQIAIWFQNRRARWKTKQLERDYNILKSNYEALQHNYTKVEQEKEGLITELKGLKEKLGEETLLSPVFQRPQEILNKLKNSSDFVDSKDGSSDSDSSGVMNEETYNISTLNYQQLMPKVSSYSNSLDHLSLSSSTYTQLMDPRASNSTSSSMRAYNNNNNNNDDNNNSNNQQQQQAVGRIEEAKWFYNRGFLQHLLC

SEQ ID NO: 31653 - protein, 314 aa, Spinacia oleracea
QIASDVEAPPPAPAKVEKHSKKMEEGITVNKFKPKTPYVGRCLLNTKITGDDAPGETWHMVFSHEGEIPYREGQSVGVIPDGEDKNGKPHKLRLYSIASSALGDFGDAKSVSLCVKRLIYTNDAGETIKGVCSNFLCDLKPGAEVKLTGPVGKEMLMPKDPNATIIMLGTGTGIAPFRSFLWKMFFEKHDDYKFNGLAWLFLGVPTSSSLLYKEEFEKMKEKAPDNFRLDFAVSREQTNEKGEKMYIQTRMAQYAVELWEMLKKDNTYFYMCGLKGMEKGIDDIMVSLAAAEGIDWIEYKRQLKKAEQWNVLVY

SEQ ID NO: 31654 - protein, 314 aa, Spinacia oleracea
QIASDVEAPPPAPAKVEKHSKKMEEGITVNKFKPKTPYVGRCLLNTKITGDDAPGETWHMVFSHEGEIPYREGQSVGVIPDGEDKNGKPHKLRLYSIASSALGDFGDAKSVSLCVKRLIYTNDAGETIKGVCSNFLCDLKPGAEVKLTGPVGKEMLMPKDPNATIIMLGTGTGIAPFRSFLWKMFFEKHDDYKFNGLAWLFLGVPTSSSLLYKEEFEKMKEKAPDNFRLDFAVSREQTNEKGEKMYIQTRMAQYAVELWEMLKKDNTYFYMCGLKGMEKGIDDIMVSLAAAEGIDWIEYKRQLKKAEQWNVQVY

SEQ ID NO: 31655 - protein, 314 aa, Spinacia oleracea
QIASDVEAPPPAPAKVEKHSKKMEEGITVNKFKPKTPYVGRCLLNTKITGDDAPGETWHMVFSHEGEIPYREGQSVGVIPDGEDKNGKPHKLRLYSIASSALGDFGDAKSVSLCVKRLIYTNDAGETIKGVCSNFLCDLKPGAEVKLTGPVGKEMLMPKDPNATIIMLGTGTGIAPFRSFLWKMFFEKHDDYKFNGLAWLFLGVPTSSSLLYKEEFEKMKEKAPDNFRLDFAVSREQTNEKGEKMYIQTRMAQYAVELWEMLKKDNTYFYMCGLKGMEKGIDDIMVSLAAAEGIDWIEYKRQLKKAEQWNVAVY

SEQ ID NO: 31656 - protein, 136 aa, Methanocaldococcus jannaschii DSM 2661
MVIIMPGTKQVNVGSLKVGQYVMIDGVPCEIVDISVSKPGKHGGAKARVVGIGIFEKVKKEFVAPTSSKVEVPIIDRRKGQVLAIMGDMVQIMDLQTYETLELPIPEGIEGLEPGGEVEYIEAVGQYKITRVIGGK

SEQ ID NO: 31657 - protein, 304 aa, Anabaena sp.
MTQAKAKHADVPVNLYRPNAPFIGKVISNEPLVKEGGIGIVQHIKFDLTGGNLKYIEGQSIGIIPPGVDKNGKPEKLRLYSIASTRHGDDVDDKTISLCVRQLEYKHPESGETVYGVCSTYLTHIEPGSEVKITGPVGKEMLLPDDPEANVIMLATGTGIAPMRTYLWRMFKDAERAANPEYQFKGFSWLVFGVPTTPNILYKEELEEIQQKYPDNFRLTYAISREQKNPQGGRMYIQDRVAEHADQLWQLIKNQKTHTYICGLRGMEEGIDAALSAAAAKEGVTWSDYQKDLKKAGRWHVATY

SEQ ID NO: 31658 - protein, 553 aa, Escherichia coli
ASIFGVFDIKTDAVELRKKALELSRLMRHRGPDWSGIYASDNAILAHERLSIVDVNAGAQPLYNQQKTHVLAVNGEIYNHQALRAEYGDRYQFQTGSDCEVILALYQEKGPEFLDDLQGMFAFALYDSEKDAYLIGRDHLGIIPLYMGYDEHGQLYVASEMKALVPVCRTIKEFPAGSYLWSQDGEIRSYYHRDWFDYDAVKDNVTDKNELRQALEDSVKSHLMSDVPYGVLLSGGLDSSIISAITKKYAARRVEDQERSEAWWPQLHSFAVGLPGSPDLKAAQEVANHLGTVHHEIHFTVQEGLDAIRDVIYHIETYDVTTIRASTPMYLMSRKIKAMGIKMVLSGEGSDEVFGGYLYFHKAPNAKELHEETVRKLLALHMYDCARANKAMSAWGVEARVPFLDKKFLDVAMRINPQDKMCGNGKMEKHILRECFEAYLPASVAWRQKEQFSDGVGYSWIDTLKEVAAQQVSDQQLETARFRFPYNTPTSKEAYLYREIFEELFPLPSAAECVPGGPSVACSSAKAIEWDEAFKKMDDPSGRAVGVHQSAYK

SEQ ID NO: 31659 - protein, 471 aa, Arabidopsis thaliana
MDEAKEENRRLKSSLSKIKKDFDILQTQYNQLMAKHNEPTKFQSKGHHQDKGEDEDREKVNEREELVSLSLGRRLNSEVPSGSNKEEKNKDVEEAEGDRNYDDNEKSSIQGLSMGIEYKALSNPNEKLEIDHNQETMSLEISNNNKIRSQNSFGFKNDGDDHEDEDEILPQNLVKKTRVSMNDGCQWRKYGQKIAKGNPCPRAYYRCTIAASCPVRKQVQRCSEDMSILISTYEGTHNHPLPMSATAMASATSAAASMLLSGASSSSSAAADLHGLNFSLSGNNITPKPKTHFLQSPSSSGHPTVTLDLTTSSSSQQPFLSMLNRFSSPPSNVSRSNSYPSTNLNFSNNTNTLMNWGGGGNPSDQYRAAYGNINTHQQSPYHKIIQTRTAGSSFDPFGRSSSSHSPQINLDHIGIKNIISHQVPSLPAETIKAITTDPSFQSALATALSSIMGGDLKIDHNVTRNEAEKSP

SEQ ID NO: 31660 - protein, 349 aa, Vicia faba
MDMPPPIMHDSDRYDFVRDIGSGNFGVARLMTDKLTKDLVAVKYIERGDKIDENVKREIINHRSLRHPNIVRFKEVILTPTHLAIVMEYASGGEMSDRISKAGRFTEDEARFFFQQLISGVSYCHSMQVCHRDLKLENTLLDGDPALHLKICDFGYSKSSVLHSQPKSTVGTPAYIAPEVLLKQEYDGKIADVWSCGVTLYVMLVGSYPFEDPDNPKDFRKTIQRVLSVQYSVPDFVQISPECRDIISRIFVFDPAERITIPEIMKNEWFRKNLPADLVNENIMDNQFEEPDQPMQSMDTIMQIISEATVPAAGSYYFDEFIEVDEDMDEIDSDYELDVDSSGEIVYAI

SEQ ID NO: 31661 - protein, 356 aa, Camellia sinensis
MSLLSDLINLNLSDTTEKVIAEYIWIGGSGMDLRSKARTLSGPVSDPKKLPKWNYDGSSTGQAPGEDSEVIIYPQAIFKDPFRRGNNILVMCDTYTPGGEPIPTNKRFNAAKIFSHPDVVAEEPWYGIEQEYTLLQKQVKWPLGWPLGGFPGPQGPYYCGIGVDKAYGRDIVDSHYKACLYAGVNISGINGEVMPGQWEFQVGPSVGISAGDELWVARYILERITEIAGVVVSFDPKPIEGDWNGAGAHTNYSTKSTRSDGGFEVIKKAIEKLGLRHKEHIAAYGEGNERRLTGRHETADINTFLWGVANRGASIRVGRDTEKAGKGYFEDRRPASNMDPYVVTSMIAETTLLWKP

SEQ ID NO: 31662 - protein, 356 aa, Camellia sinensis
MAQLSDLINMNLSDSTEKIIAEYIWIGGTGLDLRSKARTLSGPVNDPKKLPKWNYDGSSTGQAPGEDSEVIIYPQAIFKDPFRKGNNILVMCDAYTPAGEPIPTNKRYNAEKIFSHTDVVAEEPWYGIEQEYTLLQKDVKWPIGWPKGGYPGPQGPYYCGAGADKAFGRDIVDSHYKACLYAGINISGINGEVMPGQWEFQVGPAVGISAGDELWVARYILERITEIAGVVVSFDPKPIEGDWNGAGAHTNYSTKSMRKDGGYQVIKKAIEKLGLKHKEHIAAYGEGNERRLTGRHETADINTFLWGVANRGASVRVGRDTEKAGKGYFEDRRPASNMDPYVVTSMIAATTILWKP

SEQ ID NO: 31663 - protein, 119 aa, Desulfotalea psychrophila
MLHQMMKAKLHRATISAADLNYEGSLTIDTDLLKASGIRPYERIYVYNVNNGERFETYAIEGEAGSGAIQLNGAAARKGMIGDFLIIVTYALCSDDEVDEHRPNVVLLNPDNTIKEIVK

SEQ ID NO: 31664 - protein, 120 aa, Helicobacter hepaticus
MQFEMLYSKIHRAKVSDANLNYVGSITIDKTLAQSANLLAGMKVEIVNINNGERFSTYVIYGDKKGEICLNGAAARKVQIGDIIIIIAYATYTHNELEHYKPTIVQVNESNQILSITNEV

SEQ ID NO: 31665 - protein, 566 aa, Mycobacterium tuberculosis
MDVSHHHHHHGMATARPAKARNEGQWALGHREPLNANEELKKAGNPLDVRERIENIYAKQGFDSIDKTDLRGRFRWWGLYTQREQGYDGTWTGDDNIDKLEAKYFMMRVRCDGGALSAAALRTLGQISTEFARDTADISDRQNVQYHWIEVENVPEIWRRLDDVGLQTTEACGDCPRVVLGSPLAGESLDEVLDPTWAIEEIVRRYIGKPDFADLPRKYKTAISGLQDVAHEINDVAFIGVNHPEHGPGLDLWVGGGLSTNPMLAQRVGAWVPLGEVPEVWAAVTSVFRDYGYRRLRAKARLKFLIKDWGIAKFREVLETEYLKRPLIDGPAPEPVKHPIDHVGVQRLKNGLNAVGVAPIAGRVSGTILTAVADLMARAGSDRIRFTPYQKLVILDIPDALLDDLIAGLDALGLQSRPSHWRRNLMACSGIEFCKLSFAETRVRAQHLVPELERRLEDINSQLDVPITVNINGCPNSCARIQIADIGFKGQMIDDGHGGSVEGFQVHLGGHLGLDAGFGRKLRQHKVTSDELGDYIDRVVRNFVKHRSEGERFAQWVIRAEEDDLR

SEQ ID NO: 31666 - protein, 292 aa, Escherichia coli
DKSYCGFIAIVGRPNVGKSTLLNKLLGQKISITSRKAQTTRHRIVGIHTEGAYQAIYVDTPGLHMEEKRAINRLMNKAASSSIGDVELVIFVVEGTRWTPDDEMVLNKLREGKAPVILAVNKVDNVQEKADLLPHLQFLASQMNFLDIVPISAETGLNVDTIAAIVRKHLPEATHHFPEDYITDRSQRFMASEIIREKLMRFLGAELPYSVTVEIERFVSNERGGYDINGLILVEREGQKKMVIGNKGAKIKTIGIEARKDMQEMFEAPVHLELWVKVKSGWADDERALRSL

SEQ ID NO: 31667 - protein, 348 aa, Schizophyllum commune
TSNDLLQPFLALDQGDKVQAEYVWIDGDGGLRSKTTTVSKKVTDIGQLRIWDFDGSSTNQAPGNDSDVYLRPAAIFKDPFRGGDNILLLAECYNNDGTPNRTNHRHNAKKTMDLAKDEHPWFGIEQEYTLFGEDGRPYGWPKGGFPGPQGPYYCGAGAGKVFARDLIEAHYRCCLYAGINISGINAEVMPSQWEFQVGPCEGITMGDHLWMARYLLIRVAEQWGITVSFHPKPLAGDWNGAGGHTNYSTEGMRNPGGIQAISAAIEKLAKKHNEHIAVYGEDNDLRLTGRHETGHIGSFSSGVANRGASIRIPRNVAAQGFGYLEDRRPASNIDPYRVTDMIVQTTCL

SEQ ID NO: 31668 - protein, 585 aa, Mannheimia succiniciproducens MBEL55E
MQKLQENDLSTSQTFKRLWPTIAPFKIGLIAAAAALVLNALTDSGLIYLLKPLLDDGFGKADTSFLKLMAVLVIVFIFIRGITSFISSYCLAWVSGKVVMTMRRRLFKHLMYMPVSFFDQNSTGRLLSRITYDSEQVANSSSNALVTIVREGAYIISLLAVMIATSWQLSVVLFIIGPVIAVLIRLVSKIFRRLSKNMQNSMGELTATAEQMLKGHKVVLSFGGQQIEEQRFNEVSNDMRRKGMKMVVADAISDPIVQIIASLALSAVLYLATIPSIMSQNLSAGSFTVVFSSMLAMLRPLKSLTNVNSQFQRGMAACQTLFDILDLDTEKDKGKYEAERVKGDVSFKDVSFTYQGKDQPALKHLSFDIPHGKTFALVGRSGSGKSTIANLVTRFYDINQGEILLDGVNVQDYTLSNLRTHCSVVSQQVHLFNDTIANNIAYAAKDKYSREQIIAAAKAAHAMEFIEPLENGLDTVIGENGASLSGGQRQRLAIARALLRDSPVLILDEATSALDTESERAIQAALEELQKDRTVLVIAHRLSTIEKADEILVIDHGEICERGSHEELLALNGAYKQLHKMQFNG

SEQ ID NO: 31669 - protein, 582 aa, Pectobacterium atrosepticum
MLNDKDLSTWQTFRRLWPMISPFKAGLAVAAIALIINAAGDTLMLSLLKPLLDEGFGKADRSVLLWMPLVVIGLMLVRGASGFVSSYCVSWVSGKVVMNMRRRLFSHIMGMPVAFFDQQSTGTLLSRITYDSEQVAASSSGALITVVREGASIIGLFILMFYYSWQLSIILIVIAPIVSIAMRMVSKRFRSISKNMQDTMGHVTTSTEQMLKGHKEVLMFGGQDVETKRFEQVSNRMRQQGMKMVSASSISDPIIQLIASLALAFVLYAASFPSVMETLTAGTITVVFSSMIALMRPLKSLTNVNAQFQRGMAACQTLFAILDMEQERDTGKREIERAKGELEFRQVNFAYPARENLALKNINLHIPVGKTVALVGRSGSGKSTIASLITRFYDIQSGEILLDGHDLREYRLSSLRNQVALVSQNVHLFNDTIANNIAYARNENYSREEIERAAKMAYAMDFINKMEHGLDTVIGENGVMLSGGQRQRIAIARALLRDSPILILDEATSALDTESERAIQAALDELQKDRTALVIAHRLSTIEKADEILVVEDGRIIERGNHTALLATNGAYAQLHRMQFGE

SEQ ID NO: 31670 - protein, 583 aa, Vibrio vulnificus YJ016
MSINTDESTWRTFKRLWTFIRLYKSGLAVAVVALIINAVSDTYMVSLLKPLLDEGFGSAESDFLRTLPLLVFGLMFIRGISSFVSTYCLSWVSGNVVMQVRRMVFNHYMQMPVSYFDKEKSGSLLSRITYDSEQVSAATSQALVSIVREGTSIIGLLVLMFYNSWQLSLVLILVAPVVAWAIGFVSKRFRKISKNMQTTMGIVTSSAEQMLKGHKVVLSYGGQEVEKSRFDVVSNQMRQQSMKLITAQAAANPIIQMIASIAIVVVLYLASVDTIKDQLTPGTFTVVFSAMFGLMRPLKALTNVTSQFQRGMAAAQTLFALVDLEPEKNTGTYSVERAKGEVNVKDISFTYEGAEKPALSHVSFDIPRGKTVALVGRSGSGKSTIANLFTRFYDVDSGEIQLDGVDVRDYELKNLRTQFALVSQNVHLFNDTIANNIAYAAGDKYSREDIERAAELAHAMEFISKMENGLDTVVGENGASLSGGQRQRVAIARALLRDAPVLILDEATSALDTESERAIQSALDELQKNKTVLVIAHRLSTIEKADQILVIDDGAVVERGSHSELIEKDGAYAQLHRIQFGEG

SEQ ID NO: 31671 - protein, 431 aa, Arachis hypogaea
GRGEFGVTYLCIDRGSRELLACKSISKRKLRTAVDVEDVRRKVAIMRHLPRSSSIVSLREACEDDNAVHLVMELCEGGELFDRIVARGRYTERAAAVVARTVVEVVQLCHRHGVIHRDLKPENFLFANKKENSPLKAIDFGLSVFFKPGEKFSEIVGSPYYMAPEVLKRNYGPEIDIWSAGVILYILLCGVPPFWAESEQGGAQAILRGLIDFKREPWPSISESAKSLVKQMLEPDPKLRLTAKQVLEHPWIQMLRRAPNIPLGDAVKSRLKQFSMMNRFQKKALRVIADFLSNEEVEDIKDIFQKMDTDNDGIVSIEELKAEFQNFGSQLAESEIQMLLEAVNTNGKGTLDYGEFVAVSLHLKRMANDEHLRKAFSYFDKDGNGYIEPDELRNALMEDGTDDCADVANDIFQEVDTDKDGRISYEEFVAM

SEQ ID NO: 31672 - protein, 290 aa, Aeromonas hydrophila
MKKTRAFLKWAGGKYSLVEEIAERLPAGRVLLEPFVGAGSVFLNTDYDAYVLNDINPDLIGLYNHLKRTPDSFIAEARKLFVAEHNHKAAYYRLRTQFNQADTSFERALLFLFLNRHGFNGLCRYNKKGGFNVPFGSYKKPYFPEKELWAFAEKAQKATFICESYADAIQRAEEDWVIYCDPPYAPLSTTASFTTYSAGGFTLDDQAVLARLARHTAARKGVPVLISNHDIELTRELYRGARLDEILVKRTISRNGGTRNKVAGLLALYPPGIEPEQGYYPSDAELAPLG

SEQ ID NO: 31673 - protein, 572 aa, Aspergillus nidulans FGSC A4
MPTKKHPNDSTHLPTKIKNFFRINSSSSTSSHQSSNHVNSSDRDTGSSTPVKHEPKSTFRQSRFLPMIGRNRSATVASEGNPLDEAISPTATANPYFVHQGQPALQHRNDGSIPSSPPDTPELQVDGVSAAEQATTANKEELARKLRRVASAPNAQGLFTATDSDGRPQTAELGKEPLVHSGAAGSPVGLVEVSSNTDQDGNLTVPQPGSGKLPAVTQVRTSSGGFRRTYSSNSIKVRNVEVGPASFDKIKLIGKGDVGKVYLVREKKSTRLYAMKVLSKKEMIKRNKIKRALAEQEILATSNHPFIVTLYHSFQSEDYLYLCMEYCSGGEFFRALQTRPGKCISEDAARFYAAEVTAALEYLHLMGFIYRDLKPENILLHQSGHIMLSDFDLSKQSGPGGAPTMIPARSGNSNTSLPTIDTKSCIADFRTNSFVGTEEYIAPEVIKGCGHTSAVDWWTLGILIYEMLYGTTPFKGKNRNATFGNILRDEVPFPEQGGAQQISKYVITEFCRGNETVNFRNVKESASVDIGEKNPSKMKGVPLNSGLATPNGEIADPFEEFNSVTLHHDGDF

SEQ ID NO: 31674 - protein, 472 aa, Aspergillus nidulans FGSC A4
MSSPEYDPSIPDGGDTTKLDVNAPFVGYEFHAVYIAACTFIVYLILPGIGFLYSGLTRRKSAMTFLFQAFLVLAVTTFQWMFWGYSLTYSRDGGPYIGTLQNFGLMDALAAPSPGSAVLPEVLFCLYQLLFGSCTVMIVVGGAFERGGILASLVFAFVWETIVYCPLARWTWSSHGWLYNLPSVDFAGGGPVHIASGCAALAYAVVLGKRKGYPDASMKRPHNTTLVFLGTVFIWTGWLGFNGGSTLNASVRSYMAVMNTNIAGSTGVLGWVLVDMIRNKGKFSMVGACEGAIAGLVGITPCAGCVTFWLGALVGFLTGIVCSACKNLNEWIRVDEGMDVFKLHGVGGMVGSFLTGIFADQYISALDGDSLIPGAINGEGVQVGKQLAEICAISAYSFGVTWVILMVMKFIPYLGLRANEEAEMVGLDRSFFVDEQIGDYSMLDGINSSPLMGVSKTPSSEVQQTAAETKRA

SEQ ID NO: 31675 - protein, 847 aa, Aspergillus nidulans FGSC A4
MSRTSSAPSQKSLISRALKAERDVITASSQSQALDAAIDAAEHYMKALALTSSSKDRNVLDAKCKEWLTRAEKIKGSEDWRSVAQSRRSRLRTPASTRKLTTREDIILLQGAKLNGFIFPPWKAEPSLTEFETGTNGDVLFTDKPDLHLSNLQRDIFAGWKRPHELLSGQVDDAGMPLNPVMTVSGNTDLVQDVLTDCSVVASLCATTSRSERGLDDTLLPIVYPCIHNSMKSDISPSGKYIFRFYFNGCFRKVVIDDRLPSSKTSRSLYMIDRNHRNFMWPALVEKAYLKLRGGYEFPGSNSGTDLWVLTGWIPEQVFLHSDEVTADQIWSDLFKSFHSGDVLLTIGTGKLTEREQKELGLVSEHDYAILDMKELKGRRQFLIKNPWAGTDAVYPALFADPGPFPNSPFLSPGTFWMDCEMVLQNFENLYLNWNPGIFAYQEDIHFTWDLSTGKGMAGCFVKNPQFSVYTERGGVVWLLLGRHLRTIESRASEEDERFGFISIYVFKGGKRVALSDGALHRGPYVDSPNTLMKLDVPPRSTYTAVVSEESLPRVSQNFTISAFSDSPVRISHAPNKYICVTKVQGSWTPTTAGGNAESARYSLNPQFSIVLSDPTDISIVLEPSDQELATHVKLFWSGGKRIARVRSRDIVADSGDYRRGGSLVEKQDLDPGEYTIVVSTFAPDQYGSFTLWVSTNITCEVTQLPSEAAGRRAVLSDIGVLLPGQDRMLAPLTTPRLTRVKLIARSRESRIGNRPVGPSPLLMTVELGQGPYKEILATSEDGDHSDSISGVRVEDFDLQPGLEERGGVWIVLERIGGPGGQVEDHFEVEALGEERVEIGEWIVEDA

SEQ ID NO: 31676 - protein, 939 aa, Aspergillus nidulans FGSC A4
MTGRNAPRSKNGCSTCRRRKVKCGEERPVCKRCSALGITCEWAAVVKRGRSHTPVPIQPARARRPTTTAAATSSTAEQPPLDFNSLALSPQFSQMLCPEALFPEIWTFLPAAFTAPTPLYPSLSGTDIACSNSLMLMEQDQIYFQYFPSSSVVFYYIKSWAWSGFSYLYQGPAASSKVVMRMILALAANDMHRNGLLVRSPGRPSAEDHARYHYGLAVKEFRQLLETREKPLSQPELEIVFASMFLMISYEWQFGQSVQDLQLHLRGVRSLLESHSKLFEGKEVDEVLMFMDTVQSEAAPQVSFIPEQLLLWIIYIDSGCRSMGTADSLTEYVLQSGNQAIHPDRLYRCARLWGRCFWGKQYPDQEVSDDMENYRALELLHAGMTLRYKIWQALSDDAVQTNNQAELLLKEIKATREVWFFQTVLDFAGPASTRRTLNTINMAVSTFYAQVLFHRRLLYPPGPPSPFQRVAVTNIIEIARKQYASDPRLLRRIHWPLLMAIIETDDISQQRIDGTISINSHMTKMSIQTAWEACNKTDTLFILVCSVFCWLIIPAVGLAYSGYSTRFNSLASFYPGLLAVAVCSVQWWMIGYSLAYSEGNAFIGGLSKAFHIGVLAEPIGTIPEILFSEFQLIFCATVCAIAIGGACERGRLLPLIPFIFLWSTFIYAPLAHMVWSDNGFLAQLGALDFAGGTPVHICSGATATAMSIYLSYPLFRSRRSTKRTPQHLRLHKPHNTLCQLLALMIIWNAWLAFDAGTTLALNFKSIMAACVTNLCAASGALTWAGLTYAETGKFSLDSTFLGAIAGLVLITPSAGFIDLSTSVAFGVVGAVAGRQALRIKFTKGAALRRWVDNGDTFATHCLGGLLGTVATGLFAQREVAAYDGVTIIAGGCVFDSNWRQLGVQLVEALIGFTWSFVGSYVLYALVDCVPGLEVLATDE

SEQ ID NO: 31677 - protein, 307 aa, Aspergillus nidulans FGSC A4
MAKNLHAKIPPSDILIIRDVNEESTARFVREARDTAKSSGASNVLPEVIVADNAREIAEKSNVIITSLPEPQHVKDVFYSMLRQGTLPALEKERIFIDTSTIDPASTKEIANAIHSTNQGRFVDAPVSGGVVGARAGTLSFMFGASSRTGELVERVKAILLLMGKKAWHMGGAGTGVSAKLANNYILAINNIATAEAMNLGMRCGLDPKALQDLVSASTGRCWPMDVNNPVPGVVEGAPASRDYEGGFGISLMNKDLRLALTAAKESGTPLALAEVARVVYNVVEAEHRGKDFSVVYKWMRDQSHPQ

SEQ ID NO: 31678 - protein, 695 aa, Aspergillus nidulans FGSC A4
MAQLDTLDVVVLAVLLAGSIAYFTKGTFWAVAKDPYASSGPAMNGVAKAGKSRNIIEKMDETGKNCVIFYGSQTGTAEDYASRLAKEGSQRFGLKTMVADIEEYDYENLDQFPEDKVAFFVLATYGEGEPTDNAVEFYQFITGDDVSFEGGGSAEDKPLSSLKYVAFGLGNNTYEHYNAMVRQVDAALTKLGAQRIGSAGEGDDGAGTMEEDFLAWKEPMWAALSEAMNLQEREASYEPVFCVTEDESLTPEDNSVYLGEPTKGHLEGQPNGPYSAHNPYIAPIVESRELFTVKDRNCLHMEISIAGTNLTYQTGDHIAIWPTNAGAEVDRFLNVFGLEEKRHSVINIKGIDVTAKVPIPTPTTYDAAVRYYMEVCAPVSRQFVSTLAAFAPDEETKTEIVRLGSDKDYFHEKITNQCFNIAQALQSITSKPFSNVPFSLLIEGLNKIQPRYYSISSSSLVQKDKISITAVVESTRLPGATHIVKGVTTNYLLALKQKQNGDPSPDPHGQTYAINGPRNKYDGIHVPVHVRHSNFKLPSDPSRPIIMIGPGTGVAPFRGFIQERAALAARGEKVGPTVLFFGCRKRDEDFLYKDEWKVFQDQLGDSLKIITAFSRESEKKVYVQHRLKEHAELVSDLLKQKATFYVCGDAANMAREVNLVLGQIIAAQRGLPAEKGEEMVKHMRSSGSYQEDVWS

SEQ ID NO: 31679 - protein, 314 aa, Aspergillus nidulans FGSC A4
MSRIGWYGLGSMGLAMATNLQKHLATKSTLNSLLYSNRTMSRGESLKALGAKPETNFSKLVSQCGIIFTMTNKDKVSNDDVLRSLISSVTEDPTQSLKDKIFVDCSTVHPQTVGLTVAKLKEKQADFLAAPVFGGNPIAVDGKLVFAIAGPKRASDIVKPLIQDIMGRKVIDCGEDATKSSMLKIAGNIITINLMEAVGEAQVFAERTGLGSDVMEKLIGEAFGPVAGGLTTGAYAPPLDSRPGFGVSLAIKDAKHAFDIAKENNVKLPGLEVATKNMVSAREYAGQCLDSSSMYGVLRQKAGMEFWNEKSRKG

SEQ ID NO: 31680 - protein, 131 aa, Aspergillus nidulans FGSC A4
MSNEWTNSVWGCFSPIETCFMSWCCPCMVYGKQSERLQDPALKNGSNVNGDCCLFVLANCCGLAWVLSMMKRRDMREKFGIKGSVGEDCILSCCCPCCVLVQQEKELDAQASRFQSATGYQAPTSMAYTPA

SEQ ID NO: 31681 - protein, 327 aa, Aspergillus nidulans FGSC A4
MPSALLIGDITHARKEWEDLSSILTLKEFPSGNREDFIRNLKDGKYDDLVAIYRSNTSTKFTGPFDAELISLLPKSLKYICHNGAGYDNIDIPACSEKGISVSSTPVAVNNATADVGIFLMIGALRQAYVPLTAIREGKWHGQTTLGHDPKGKVLGILGMGGIGREMANRARAFGMTIQYHNRSRLSPELEQGAKYVSFDDLLATSDVLSLNLALNPSTRHIIGEKEFQKMKDGVVIVNTARGALIDEKALVAALESKKVMSAGLDVYENEPIVELGLLNNPRVMLLPHIGTMTYETQKEMEILVLDNLRSAVEKGELITQVPEQKK

SEQ ID NO: 31682 - protein, 255 aa, Aspergillus nidulans FGSC A4
MANSRLSDRYAFEKPNDRRALDLMNAAAVEVLKDLPDLAIAYGVSDEYRFDLTNSRRILSSIPPVSSLSGGAPHYIYLWGNYFPDTPLQPPHLPSFDGRAVVYPTIRNLRDYMSWRQVDCHINNLYNTTFWMMVLKGGMSNTDAENELKGTLSSDKNEILFKRFGINYNNEEEIYKKGSVVYRQYQLEERKPLKAPEEEGPTVQESISKSQQEKLRKLRRKAQVIVEHVDIIKDEFWERRPWILSGKPGRLPAEA

SEQ ID NO: 31683 - protein, 574 aa, Aspergillus nidulans FGSC A4
MDPAVARELSRLDPAVPFRASSGHLHHTWARTFYSRPQLYIQPQSLAEIQKVVNLARRCRRRLVVVGSGHSPSDLTCSSAWMVNLDKFNRILNVDRETGIVTVEAGIRLRDLGKQLEQEYGLTLSNLGSIDSQSIAGVIATGTHGSSLAHGLISECIVSLTLMLANGQLVRCSADSNQALFRAALVSLGALGIVVEVSFRSEPSFNIAWKQTRRSLSSVLDEWSSGLWTSHEFVRVWWMPYGKSVIHWYADKTDLPLKPPPRTFYGESIGYHVYHNLLALSNYFPRILPWVEWFVFGMQYGFRAEKTVTEAVEKGRTGLLMNCLYSQFVNEWALPLEKGPEAITRLSAWLHGDTETARIPFPVDGLWVHCPVEVRVADTTLNKYPRPFLDPSSADGPTLYLNATLYRPYHKDPPCKDRYYEAFEWLMRDMGAKPHWAKNFKSMGQELRQMYGENMNEWLKVRQDVDADGMFLGEWHCRTLALSDDRAPGSGSSVTSGLPLMEREKARRQAKFRGAGDGLEWIGDNQWHTDAKETIGVLSTMEEKHNSSSPTTATSEESFDLLASSEASVLIPEP

SEQ ID NO: 31684 - protein, 927 aa, Aspergillus nidulans FGSC A4
MNTDKYTDKANKALQDALELTIEHSNAELYPVHLAVALLDPSQNEDDGPSLHPSHGDSTSLFRQVVERAHGDVQLLHRGLMKRLVKLPSQDPPPETRSISAPFRKVLTAAADLSKTQKDSYIAVDHLIQAVCQDSTVQAALKDANVPNVKLIDNAIQQIRGTRRVDSKTADAESENENLKKFTIDMTALAREGKIDPVIGREEEIRRVIRILSRRTKNNPVLIGEPGVGKTTIVEGLARRIVNADIPASLSQCKLLSLDVGSLVAGSKYRGEFEERLKGVLKEIEESKETIVLFVDEIHLLMGAGASGEGGMDAANLLKPMLARGQLHCIGATTLGEYRKYIEKDAAFERRFQQVLVKEPTVSETISILRGLKEKYEVHHGSVRILDAAIVTAATLAARYLTARRLPDSAVDLIDEAAAAVRVARESEPEALDNLERKHRQLQIEIHALKREKDEASKARLQAAEQEAANVIEELRPMRQKYESEKQRNKAIQDAKTKLDNLKNKQEEAERSGDTETAADLKYYAIPETQQHIEMLEKQRAEADEERRNRQGDAGEPLLADEVGPDQINEIVARWTGIPVTRLKTSEKDKLLEMEKHLGKIVVGQREAVKSISDAIRLQRSGLSNPNSPPSFLFCGPSGTGKTLLTKALAEFLFDDPKSMIRFDMSEYQERHSLSRMIGAPPGYVGHDAGGQLTESLRRRPFSILLFDEVEKAAKEVLTVLLQLMDDGRITDGQGRVVDARNCIVVMTSNLGAEYLARPTTKDGKIDPQTRELVMGALRNYFLPEFLNRISSIVIFNRLTKKEIRKIVDLRLDEVQRRLEQNGRNVVIECTEEVKDYLGQSGYSPAYGARPLGRIIEREVLNRLAVLILRGSIQDGEVARVVMRDGRIDVIPNHEMAIDEDQDMTDEDDFDAMAEMEDNGGDMDLYE

SEQ ID NO: 31685 - protein, 555 aa, Aspergillus nidulans FGSC A4
MATQRTSLRTLTSLFAKRSVCFCSPPNRLSAIHPYSRGYATDTEPKESIDAAIASDAPSHLNPSPEDYSRFIFQDRCRSTIYAGDGGNGCVSFQREKYIPEGPPNGGDGGSGGSVYIQAVEGLTSLHKLARSGVIRATRGKNGQGKSKGGKRGEDVLIQVPVGTVVREVDRYDPVAEEQRRRALERKMKKEKAKSGEGEDEDERQDLDFQPIRHDRWALYPGANPSDFLTTVFPSNPPRRQNIAALEPRAPIYLDLSQHMDKPVLLAAGGAGGLGNPHWVSRENPRPKFASRGEGGKRLELEFELKLLADVGLVGKPNAGKSTLLRSLTNSRTRIGNWAFTTLEPNIGTVVIDNDKGRPLVELKNKPPRKRFTIADIPGLIKGAHLDRGLGLGFLRHIERAGILAFVVDLSAGDPVQELQELWNELGKYEELRDMGGTSNESGDDPTWDLPMRSLPELQGDSDKAISQPKDRLPELDFPANHTKPWFVVATKCDLPKTRERFKALQEYLCGVEQGKHEHPSGYAKGWKEGISAIPVSAINAENVQQIPKLVMQLL

SEQ ID NO: 31686 - protein, 440 aa, Aspergillus nidulans FGSC A4
MADHEQEQEPLSIAIIGGGIIGLMTALGLLHRNIGKVTIYERASAWPDIGAAFAFTGIARECMQRLDPAILSALSKVAQRNPHDKVRYWDGFHPKSKEEAQDPEKSVLFEIEEKNMAYWACLRGVFHAEMARLLPERVVRFGKRLVAYEDGGDQKVVLRFEDGEVEEADIVIACDGVHSTARRVLLGAEHPAANARYSRKAVYRALVPMPAAIDALGTEKAHVQIAHCGPDAHIVSFPVNNAQIYNVFLFTHDSNEWTHGHTMTVPSSKEEILSAVENWGPHIKELASLFPEQLSKYAIFDQADHPLPYYAAGRVALAGDAAHASSPFHGAGACMGVEDALVLAELLEKVQNGSAFKEKKSNIELALKTYSDVRIERSQWLVKSSREMGDLYEWRYEDIGGDGVKCKAEWERRSRVIWDFDVQGMVDQAREAYERAVVKV

SEQ ID NO: 31687 - protein, 417 aa, Aspergillus nidulans FGSC A4
MATERLNSILSHLRPGNKGVAAITQKNPDDVVITLSLRTPLTKARKGGFKDTELDYLVYALLKEVIAKSQIDPNLIEDVCLGNVNDGKAAYLVRAASLAAGIPHTAGASSVNRFCSSGLKAVQDIANQISLGAIDIGVAVGAEIMSAGGDRLNKPFNEEVLKNQEAADCMQPMGQTSENVGKDFNISRAQQDVYAAESFRRAEVAQKAGWFDDEIVPITTRVKDPKTGEERSVTLTKDDGVRYGTTVESLSKIRPAFPQFGDKSTGGNSSQVTDGAAAVLLMRRSKAIELGQPILAKFVGATVAGVPPRVMGIGPTAAIPKLLSKFNLDKNDVDIYEINEAFASMAVYCVEKLGLDHAKVNPRGGAIALGHPLGATGARQIATILSEARRTKAKVLVTSMCIGTGQGMAGLFVNEQV

SEQ ID NO: 31688 - protein, 800 aa, Aspergillus nidulans FGSC A4
MASRLQLSRSRLLRPSNLTYTPSNRLVRPCPSLRILPRARLPSLSTNIAAPLSSSSIRNYASGRPHPPGGTHRMNLGGEPEKAALEQYGVDLTAKAKAGKLDPVIGRDSEIHRTIQVLSRRTKNNPVLIGAAGTGKTAVLEGLAQRIVQGDVPESIKGKRVIALDLGSLIAGAKFRGDFEERLKSVLKEVEEAQGGVILFIDELHTLLGLGKAEGSIDASNLLKPALSRGELQCCGATTLNEYRLIEKDVALARRFQPIQVGEPSVAATISILRGIKDKYEVHHGVRITDGALVAAATYSNRYITDRFLPDKAIDLVDEAASALRLQQESKPDIIRELDRDITTIQIELESLRKETDISSRERREKLEEDLKAKREESRKLTEIWEKEKAEIESLKRTKEELERTRFELEQAQREGNFAKAGELRYSKIPSLEAKLPKEGDEQKDPQSTLIHDSVTADDIGAVVSRTTGIPVSKLMAGEVEKLIHMEDTLRQSVRGQDEALSAVANAVRMQRAGLSGENRPLASFMFLGPTGVGKTELCKKMAEFLFSTETAVVRFDMSEFQEKHTISRLIGSPAGYVGYDDAGQLTEAVRRKPYAVLLFDEFEKAHRDISALLLQVLDEGFLTDAQGHKVDFRNTLIVLTSNLGADLLIGADPIHSSKASTDGEITPELKKAVMDVVQQAYPPEFLNRIDEFIVFKRLSREALRDIVDIRIKELQSRLDDRRMTLQVDDEIKDWLCEKGYDPKFGARPLNRLISKEIGNRLADKIIRGEVTSGQMARVAFNANNDGLEVTAVAQGEEQA

SEQ ID NO: 31689 - protein, 922 aa, Aspergillus nidulans FGSC A4
MASAGPATADGGAGHSHAASGHHLHATNVQSKRRTMIATPTGQWSLGKTLGAGSMGKVKVGKHLETGEQVAIKIVPRQSTEEHRSQREAERADRSKEVRTAREAAIVSLVNHPYICGMRDVVRTNYHWYMLFELVNGGQMLDYIISHGKLKEKQARKFARQIASALDYCHRNSIVHRDLKIENILISKTGDIKIIDFGLSNLFSPRSLLKTFCGSLYFAAPELLQARQYTGPEVDVWSFGIVLYVLVCGKVPFDDQSMPKLHAKIKSGVFEYPPGLTAECRHIISRMLVTDPKQRASLTEIMNHPWMNKGFSGPPDNHLPHREPLQLPLDPEVIEKMTGFEFGKPEYITAQLTKIIESEEYQHAIALNAREHPVPAHTDKKRGVFDFYKRRNSASRDTLSAPSAEAVQLGNDPLNAYSPLLSVYYLVKEKLDRERSESNPGALSIAQAPGDMLQVPDLAPPEAAHTNQYQVPGEKDTGRRSRPRARTHGDDEITEGMKNASLAPNHAQASHSPAASQPDTPAKKESTAAGLLRRFSTRRTKDRSRDRERSRLASPHQPSLNVQPPADSASPLSRGFSMRKNRRTEPSATAIPSTGSQPQHQDLLKTPGSVEPASRSNKYLERSISVSSGEPRHRRSRRTEGDSGSQPPQTSGSEYSAVPKDSTAGREQKIAPRTHASRTMSLGHARRESIQARRARRDAAREANVPEETDGEISGPGAALESANEEDLSKPVYLKGLFSVSTTSSKPLAFIRADIIRVLKQLAVDYVEIKGGFSCRHAPSIELDKVVDNGPPSPERQGQVSNHRRRISLGGLLNHDDGREELARTTTRRRHRAPDRSFVSNSEVSDEYLETRDTTVTSGERVVGETTTRVQSDTGGNLVLRFEILIVKVPLFSLHGIQFKKVSGGMWQYREMAKKILDALRL

SEQ ID NO: 31690 - protein, 478 aa, Aspergillus nidulans FGSC A4
MSTYPVAYNGTGVNGGDSLREDLNIYYSSGDIAWVITSTALVLLMIPGVGFFYSGLARRKSALSLIWLSLMSIGVVSFQWFFWGYSLAFSHTAGKYIGNLDNFGFKGVLGAPSVGSTKVPDLLFAVFQGMFAAITVALAVGAVAERGRMLPCMVFVFIWSTIIYDPVACWTWNASGWVFQLGGLDFAGGTPVHIVSGTTALAYSLMLGKRRGHGTHELNYRPHNVTHVVIGTVFLWVGWFGFNAGSALSANLRAVMAAVVTNLAASVGGVTWCLLDYRLERKWSTVGFCSGVISGLVAITPGSGFVTPWAAFIFGVVGAAACNFATKVKYLIRVDDALDIFAVHGIGGLVGNLLTGLFAADYIAHLDGSTEIDGGWINHNYIQLGYQLADSVTGMAYSFFGSCIILFIINMIPGLSLRVPEEDEVLGIDDAEIGEFAYDYVELTRDVINGTTEPMDGASKRSTTPTGPVEPSPAELKA

SEQ ID NO: 31691 - protein, 94 aa, Aspergillus nidulans FGSC A4
MSDPSAPTPEAPAPVEHLNIKVTDNNNEVFFKIKRTTTLKKLMDAFCDRQGKQPSTVRFLFDGTRVRPEDTPDTLDMADGDTLEVHQEQIGGGL

SEQ ID NO: 31692 - protein, 812 aa, Aspergillus nidulans FGSC A4
MSGRTPVTIVVEHLDPELGTWSALEYGCIARESHAAGSRFLLSSVPKSLQMPDDLAATKGLEVEHRSVEEVFSDRQSKICLLDPSAKVELSPADGDTFEVFLFGGILDRTSELRKKGYEGRRLGPVQMTTDTAVRVTRMVVHDRVPLEEIQYIDNPEIVINEHERTEMPFRYVKDSKGKPIMPEGMVELIKKDAEKTSSLLSLKCGKPTDPDIPFLAQSAADYYVESLPGAPEGPLLKMHAGHIEVDPEHNGHLFFWHYQNRHIANRQRTIIWLNGGPGCSSMDGALMEIGPYRLKDNETLEYNEGSWDEFANLLFVDQPVGTGFSFANTNSYLHELDEMAAQFITFLEKWFAVFPEYERDDIYIAGESYAGQYIPYIAKAIQDRNKDIHEKQSSSARWNLRGLLIGNGWISPAEQYPAYLSFAYEEGLVEEGSKLGKELETLLSICKSKMETGPKISITDCEAVLNKLLDKTVDSNNQCINMYDIRLRDGSCGTTWPPDLVDVKPYLHTYEVIQALNISPEKESGWDECDGNVGAAFRPQKSEPSVKLLPGLLESGIEILLFSGDKDLICNHVGTEQLISNMKWAGGTGFETSPGVWAPRHDWTFEDEPAGYYQYARNLTYVLLYNASHMAPFDLPRRTRDMVDRFMHVDIASIGGAPADSRIDGEPLPQTSVGGQPNSTVHQEEEQQKIKETEWNAYAKSGEAVLVVVIIGVLVWGFLIWRSRRRHNGYSGIAIKSPSRTSIMGRFHNNHSNGADVEAGDFDEAELDDLHSPGLDRENYAVGEDSDDEAHRQDLPRAQESSSKSENNLVT

SEQ ID NO: 31693 - protein, 406 aa, Aspergillus nidulans FGSC A4
MASLPPVYIVSYARTPVGSFLGSLSSQTAPQLARPPKAFLTHLHLAALERADGIKPSDVQEVFFGNVLSANVGQNPARQCALGAGLETSTVCTTVNKVCASGLKAVILGAQTIMTGNADVVVAGGTESMSNTPHYLPNLRTGAKYGNQTMVDGIVKDGLTDVGKQELMGLQAEECAQDHGFNRQQQDDYAIRSYEKAQAAQAAGLFNDEIAPIDLPGFRGKPGVTVTQDDEPKNLNPDKLRAMKPAFIPGTGTVTAPNSSPLNDGAAAVVLVSEAKLKELNLKPVAKILGWGEAAQQPSKFTTAPALAIPRALKHAGVSQDAVDAFEINEAFSVVALANLKLLGLSEDKVNIHGGAVAIGHPLGASGARILTTLLGVLKARKGKVGCAGICNGGGGASALVVEYIA

SEQ ID NO: 31694 - protein, 482 aa, Aspergillus nidulans FGSC A4
MGHLKQQCRIPLASAMSTLGASTPNAFSRLPMTPPEPVDSVLVPPNTVSKDAASVTTAVHVISTERAALAHLERLYQTDQLAQEHLSRAVDQIAGTIRNGGKLVCCGVGKSGKIAQKLEATMNSLGIYSTFLHPTEALHGDLGMIRPNDTLLLISFSGRTPELLLLLPHIPPTVTIVALTSHLHPSTCPLMSFQPMEKGILLPAPIHEDEETSIGVCAPTSSTTVALSLGDALAIATARKLHTTPGRGPAEVFKSFHPGGAIGAASTVSTPLSMSSSSASLTSHPSEFLQGPVRQPQLRHRHEKITPFSDPGVEYQDRMQSDSDAESEKSVPASPPPNTIANMISVPLSRIPTVSSPASISGAVHSNIRLLDILLTAIQHPDANSWVFVAPDILIPPRKLRYLSSKGYVDMDVSSLNAPYLAPRERWTFISDDCTIEEAKEWFPPNDPRPVSVVAVVRGQDSEDVLGVFEIEDLWGGNDGND

SEQ ID NO: 31695 - protein, 499 aa, Aspergillus nidulans FGSC A4
MTTRTTVPNASQRALSTAAVRCLTLDNINSNVKAAKYAVRGELAVKAEEYRVRLAQGDKTLPFDSVIFANIGNPQQLDQKPITFFRQVLSLMENPLLLSNKDALRTSFGYQDDVIERAEKLLAEVQSVGAYSHSQGAPLIRESVAKFIEERDGFPADPQSLYLTGGASSGVNTILNVICNGPNAGVLVPIPQYPLYTATLSLLNAQCVPYHLEEQKAWGTDIGTIKKSLEQAKAAGTDVRAIVVINPGNPTGASLSPADIKSVLDIAAEEKLVVIADEVYQTNVFIGEFTSFKKRLRELQQEVPGKYDNVELVSLHSTSKGMVGECGHRGGYFELVGFDPLVAAQVYKFISIMLCPPVIGQCLVELMVNPPKEGEPSHELYQKEYNGIREGLRQRAFALYEAFQRMEGVECQEPQGAMYLFPTISLPPKAIEAAAAENRAADEFYCLRLLDATGVCVVPGSGFGQKENTLHFRTTFLAPGTDWVERIVKFHSEFMAKYK

SEQ ID NO: 31696 - protein, 320 aa, Aspergillus nidulans FGSC A4
MATNSIKLLTGNSHPELANLVADRLGIELTKIMVLQYSNQETSVTIGESVRDEDVFILQSTRPNDINDGLMELLIMINACKTASARRITAVIPNFPYARQDKKDKSRAPITAKLMANMLQTAGCNHVITMDLHASQIQGFFNVPVDNLYAEPSMLKWIRENLDVSNCVIVSPDAGGAKRATAIADRLDLQFALIHKERPRPNEVSRMVLVGSVKDKVAIIVDDMADTCGTLVKAADTVMQHGAKEVNAIVVHGILSGKAIDNVNNSCLKRIVVTNTVPHKEKKELCDKIETIDISPTLAEACRRTHNGESVSFLFSHTVA

SEQ ID NO: 31697 - protein, 280 aa, Aspergillus nidulans FGSC A4
MAIPYATGLPADNQPLPSFRELLPPHLHEEIESTSYFNSQHNSRQPRERPASSHELGLNSVPREHASSRSSRPSPVLPPIRDLQSYPDRATGVYPDPRGLPPPPEITARPVGPHGYPHAAPAVPGPLADRNADAYRGVPPMHGQVRYHYPSMAYQSDPDHASVPSLSHAPQSNFGILGDSTDARNRRRRGNLPKPVTEILKAWFHAHLDHPYPSEEDKQMLMSRTGLTINQISNWFINARRRHLPALRNQRRTGGSDLDERQSLSDMEQTSPEPSPHRRL

SEQ ID NO: 31698 - protein, 674 aa, Aspergillus nidulans FGSC A4
MARPSSGRGVAKPFATWTTIFYLLLVFIAPLAFFGSAHAQEDDSVQENYGTVIGIDLGTTYSCVGVMQNGKVEILVNDQGNRITPSYVAFTDEERLVGDAAKNQYAANPKRTIFDIKRLIGRKYDEADVQRDIKNYPFKVVNKDGKPNVKVDVNQTPKTLSPEEVSAMVLGKMKEIAEGYLGKKVTHAVVTVPAYFNDAQRQATKDAGTIAGLNVLRVVNEPTAAAIAYGLDKGSEERQVIVYDLGGGTFDVSLLSIDDGVFEVLATAGDVHLGGEDFDHRVMDHFVKQYNKKNNVDVTKDLKAMGKLKREVEKAKRTLSSQMSTRIEIEAFHNGQDFSETLTRAKFEELNMDLFKKTLKPVEQVLKDAKVSKADIDDIVLVGGSTRIPKVQAMLEEFFDGKKASKGINPDEAVAFGAAVQGGVLSGVEGTESIVLMDVNPLTLGIETTGGVMTKLIPRNTVIPTRKSQIFSTAADNQPTVLIQVYEGERTLTKANNLLGKFELTGIPPAPRGVPQIEVSFDLDANGILKVGASDKGTGKAESITITNDKGRLTQEEIDRMVAEAEEFAEEDRAIKAKIEARNSLENYAFSLKNQVNDENGLGGQIDEDDKQTILDAVKEVNDWLEENGASATTEDFEEQKEQLSNVAYPITSKLYGSAPPTEEDDDEYGHDEL

SEQ ID NO: 31699 - protein, 448 aa, Aspergillus nidulans FGSC A4
MTPSTKPKTFHVAIVGGGIAGLSLAIALHHRDVSVKIYEQAHAFAEVGAGVSFGPNAVEAMKLCHSGIYEAFKKVCTRNLWPEKEKVWFDYLDGYTHNEEEYNAASSGKESKRQKIAFTITNSLGQTGVHRAHFLDELVKLVPQEIAQFNKRLQNITERGDGKLVLKFADGVEDEADVVIGCDGIKSRVRQILVGEDHPSAHPSFTHKYAYRGLVPMDKAIEAIGEELASNSCMHMGPNNHMLTFPVNGGKTLNIVAFHTTPDTWTDRTRLTRDGTREEALRDFAGYGPNVTKLLKLCDPKLSIWAIFDLGVHPVPTFHKGRLAISGDAAHATSPHHGAGAGYCLEDTAVLATLLSDPRVQNNSDIETALAVFDACRRERTQWLVQSSRFIGDCYEWRAEGVGRDFRKIEEAINRRNAIITDADVGGMCREAKEMLGQRLGGEERAAL

SEQ ID NO: 31700 - protein, 291 aa, Triticum aestivum; identical to SEQ ID NO: 571

SEQ ID NO: 31701 - protein, 1343 aa, Aspergillus nidulans FGSC A4
MSPLETNPLSPETAMREPAETSTTEEQASTPHAADEKKILSDLSAPSSTTATPADKEHRPKSSSSNNAVSVNEVDALIAHLPEDERQVLKTQLEEIKVNISFFGLWRYATKMDILIMVISTICAIAAGAALPLFTAPSTFQRIMLYQISYDEFYDELTKNVLYFVYLGIGEFVTVYVSTVGFIYTGEHATQKIREYYLESILRQNIGYFDKLGAGEVTTRITADTNLIQDGISEKVGLTLTALATFVTAFIIAYVKYWKLALICSSTIVALVLTMGGGSQFIIKYSKKSLDSYGAGGTVAEEVISSIRNATAFGTQDKLAKQYEVHLDEAEKWGTKNQIVMGFMIGAMFGLMYSNYGLGFWMGSRFLVDGAVDVGDILTVLMAILIGSFSLGNVSPNAQAFTNAVAAAAKIFGTIDRQSPLDPYSNEGKTLDHFEGHIELRNVKHIYPSRPEVTVMEDVSLSMPAGKTTALVGPSGSGKSTVVGLVERFYMPVRGTVLLDGHDIKDLNLRWLRQQISLVSQEPVLFGTTIYKNIRHGLIGTKYENESEDKVRELIENAAKMANAHDFITALPEGYETNVGQRGFLLSGGQKQRIAIARAVVSDPKILLLDEATSALDTKSEGVVQAALERAAEGRTTIVIAHRLSTIKTAHNIVVLVNGKIAEQGTHDELVDRGGAYRKLVEAQRINEQKEADALEDADAEDLTNADIAKIKTASSASSDLDGKPTTIDRTGTHKSVSSAILSKRPPETTPKYSLWTLLKFVASFNRPEIPYMLIGLVFSVLAGGGQPTQAVLYAKAISTLSLPESQYSKLRHDADFWSLMFFVVGIIQFITQSTNGAAFAVCSERLIRRARSTAFRTILRQDIAFFDKEENSTGALTSFLSTETKHLSGVSGVTLGTILMTSTTLGAAIIIALAIGWKLALVCISVVPVLLACGFYRFYMLAQFQSRSKLAYEGSANFACEATSSIRTVASLTRERDVWEIYHAQLDAQGRTSLISVLRSSLLYASSQALVFFCVALGFWYGGTLLGHHEYDIFRFFVCFSEILFGAQSAGTVFSFAPDMGKAKNAAAEFRRLFDRKPQIDNWSEEGEKLETVEGEIEFRNVHFRYPTRPEQPVLRGLDLTVKPGQYVALVGPSGCGKSTTIALLERFYDAIAGSILVDGKDISKLNINSYRSFLSLVSQEPTLYQGTIKENILLGIVEDDVPEEFLIKACKDANIYDFIMSLPEGFNTVVGSKGGMLSGGQKQRVAIARALLRDPKILLLDEATSALDSESEKVVQAALDAAARGRTTIAVAHRLSTIQKADVIYVFDQGKIVESGTHSELVQKKGRYYELVNLQSLGKGH

SEQ ID NO: 31702 - protein, 434 aa, Aspergillus nidulans FGSC A4
MSKPAIGFVGLGAMGFGMATHLVKQGYPVHGFDVFPASVERFKAAGGIPASSLRESAEGKSYYVVMVASSPQAQSVLFAEDGIVQHLPPNAVLMLCSTVSSMYAQSVVTELQNRGRSDIRFVDCPVSGGALRAANGTLSIMAGASDEALAAARDLLQEMSDENKLYLVPGGVGAGSNMKMVHQVLAAIHILGASEAQGFAAQLGLDARATAEKIQSSDAWTWMHENRFPRMVEEDWNPGVSALTIILKDAGIITTTARQQRFPSPLCSTAEQTYISALLHGWGPKDDSAMVRQYYAKPLSDVTPCTDAEAATELVLDYMRGVNLVAAAEAVAFARYLNVDLSMFHVLVSQAAGASKIFIEQGLEMIEGRIGDKAPAGSPTVDQVATKLESAVQKARDLHCPLHLGNEALNLLFMAQRHGWGDQSSTSVIRVYGQ

SEQ ID NO: 31703 - protein, 1284 aa, Aspergillus nidulans FGSC A4
MKSTAESKETPSQDESTTSVPCTEAPLVEEGEEASFGAYKRIFTFAGRTELILQAVAILAACASGAGIALQNLIFGQFVTVITDFTNGISTPADFRDNAAELALYFVYLGIARLVLSYTYNTLLTYAAYRIVRNIRHAYLKAALSQEVAYYDFGSGGSIAAQATSNGKLIQAGASDKIGLLFQGLAAFVTAFIIAFVVQWKLTLICICIPVATIGTTGVVAAVEAGHETRILQIHAQANSFAEGILAGVKAVHAFGMRDSLVRKFDEYLVEAHKVGKKISPLLGLLFSAEYTIIYLGYGLAFWQGIHMFGRGEIGTAGDIFTVLLSVVIASINLTLLAPYSIEFSRAASAAAQLFRLIDRESEINPYGKEGLEPERVLGDVELENVTFSYPTRPGITVLDNFSLKVPAGKVTALVGQSGSGKSTIVGLLERWYNPTSGAIRLDGNLISELNVGWLRRNVRLVQQEPVLFQGSVFDNIRYGLVGTPWENASREEQMERVQEAAKLAYAHEFISELTDGYDTLIGERGGLLSGGQKQRVAIARSVVSQPKVLLLDEATSALDPHAETIVQKALDKAAEGRTTIVIAHKLATIRKADNIVVMSKGHIVEQGTHESLIAKDGVYAGLVKIQNLAVNASAHDNVNEEGEGEDVALLEVTETAVTRYPTSIRGRMNSIKDRDDYENHKHMDMLAALAYLVRECPELKWAYLVVLLGCLGGCAMYPGQAILMSRVVEVFTLSGDAMLDKGDFYASMLIVLAAGCLICYLAVGYATNTIAQHLSHWFRRLILHDMLRQDIQFFDREENTTGALVSRIDSYPHAILELMGYNIALVVIAVLQVVTCGILAIAFSWKLGLVVVFGGIPPLVGAGMVRIRVDSRLDRQTSKKYGTSSSIASEAVNAIRTVSSLAIEETVLRRYTEELDHAVSSSVKPMAATMICFGLTQCIEYWFQALGFWYGCRLVSLGETSMYSFFVAFLSVFFAGQASAQLFQWSTSITKGINATNYIAWLHQLQPTVRETPENHDKGPGSGAPIAMDNVRFSYPLRPDAPILKGVNLKINKGQFIAFVGSSGCGKSTMIAMLERFYDPTTGSITIDASTLTDINPISYRNIVALVQQEPTLFQGTIRDNISLGVFNPNTQPFFSDKDAVKSVSDEQIESALRAANAWDFVSSLPQGIYTPAGSGGSQLSGGQRQRIAIARALIRDPKILLLDEATSALDTESEKIVQKALEGAARDGDRLTVAVAHRLSTIKDANVICVFFGGKIAEMGTHQELIVRGGLYRRMCEAQALD

SEQ ID NO: 31704 - protein, 409 aa, Aspergillus nidulans FGSC A4
MFNKLSGQPESYEKKSLYRFGRTLGAGTYGIVREADCSSGKVAVKIILKRNVRGNERMVYDELDLLQKLNHPHIVHFVDWFESKDKFYIVTQLATGGELFDRICEYGKFTEKDASQTIRQVLDAVNYLHQRNIVHRDLKPENLLYLTRDLDSQLVLADFGIAKMLDNPAEVLTSMAGSFGYAAPEVMLKQGHGKAVDIWSLGVITYTLLCGYSPFRSENLTDLIEECRSGRVVFHERYWKDVSKDAKDFILSLLQVDPAQRPTSEEALKHPWLKGESASDRDLLPEIRAYIARSRLKRGIEIIKLANRIEALKMQEEDEEDIPSAVDVQASEASDKSGLSPFPALSTENSNTHPASTGNGESGGTKKRSLSKIARGAIFREVVLAKVREMKENEEREKVEREARERAHS

SEQ ID NO: 31705 - protein, 507 aa, Aspergillus nidulans FGSC A4
MSSVAPFALKQASRAYARRLTAAQHALPWRALATPSYRTFVSETKAGNAQVSVDTAIKQEQKDFLKQTGVQPQNAELPASGITGDTAMSPAAGILKQATIMDQGTRPIYLDAQATTPTDPRVLDAMLPYLTGIYGNPHSRTHAYGWESEKAVEQARGYVANLIGADAKEIIFTSGATESNNMSIKGVARFFGRSGKKKHIITSQTEHKCVLDSCRHLQDEGFDVTYLPVQSNGLIKLEDLEAAMRPDTALVSIMAVNNEIGVVQPLEEIGKLCRSKKIFFHTDAAQAVGKIPIDVNKMNIDLLSVSSHKIYGPKGIGACYVRRRPRVRLEPIISGGGQERGLRSGTLAPHLVVGFGEACRVAAQDMEYDSKYISRLSKRLTDGLLAMEHTSLNGDPERRYPGCVNVSFAYVEGESLLMALKDIALSSGSACTSASLEPSYVLRALGSSDESAHSSIRFGIGRFTTEAEIDYVLKAVQERVHFLRELSPLWELVQEGIDLNTIEWSGH

SEQ ID NO: 31706 - protein, 827 aa, Aspergillus nidulans FGSC A4
MPGDIPTKVGHGLAKVLRLKLPEKPQPDAVTRGESTFSVGTFDTYSYVEPEPTAAEWFAEITPSWKEIGLYFYRLFPFLSWITRYNTTWLIGDLVAGITVGAVVVPQGMAYAQLAQLPVEYGLYSSFMGVLIYWFFATSKDITIGPVAVMSTLVGNIVTEAAETLPDVEPHVIASCLAVICGGIVTFMGLARLGFIVDFIPLPAITAFMTGSAINICSGQVSTMLGETDKVNTRGATYNTIIQTLRALPSSTLDAAMGVTACAMLYIIRFACNTAAKKQPHRAKMWFFISTLRTVFVILFYTMISAATNLHRRDNPAFKVLGTVPRGFKHAAVPTVNAEIIKTFASELPAAVIVLLIEHIAISKSFGRVNNYTIDPSQELVAIGVTNLLGPFLGGYPATGSFSRTAIKSKAGVRTPLAGVITAVVVLLAIYALPALFWYIPKASLAGVIIHAVGDLITPPNVVYQFYRVSPLDCVIFFVGVIVTVFTSIEIGVYCTVCISVAVLLFRVAKARGEFLGRVTIHSVVGDHVLEESKPGLGDADRTRSIFLPLNHADGSNPEIEIEQPYPGIFIYRFSEGFNYPNANHYTDYLVETIFQKTRRTNPFTYSNPGDRPWNNPGPRKGKQEEDRSHLPTLRAVILDFSSVNNVDVTSVQNLIDVRNQLDIYASPHTVQWHFAHVKNRWTKRALAAAGFGYPTPQSEDGFHRWKPIFSVTEIEGQSSAAAHAEIVANENTRQASSHGHDLESGIKNPSHTAERETHGIEESSNSSIGEDDKLQRDLKDSKAYQNRRKMAVVQGVNLPFFHIDITSALESALANSQEEPADVSSD

SEQ ID NO: 31707 - protein, 368 aa, Aspergillus nidulans FGSC A4
MSAPIYLGVIGVGGVGTAFLNQLARLPNAPKLILLARSSQTLLSPTPSYSPTIPAAEWKTAVETPSLTKSGALTPDEIATYLASAPGRSILVDNTSDPALASNYPVFLRKGISVVTPNKKGFSSDLSLWKEIFAAAAEGKALVYHESTVGAGLPVISTLKDLVNTGDEVTRIEGVFSGTLSFLFNTFAPASGSSSAKWSEVVSQAKELGYTEPDPRDDLNGMDVARKLTILARIAGLDVQSPDSFPIESLIPAELTSLPSSADGIAQFMARLPEFDSQMAAIKEGAEKAGKVVRYVGSVDVAKKEVRVGLQQFDKDSAIAGLKGSDNIISFYTRRYGSNPLIVQGAGAGGDVTAMGVTADLLKVIERL

SEQ ID NO: 31708 - protein, 828 aa, Aspergillus nidulans FGSC A4
MASPNSLSTAHATALHQQQYRQMSRASSVSRSGSRRSSPEVHNSVALRSNAASISKQYSAGDSSDDEVPEPKFSASVKALLDEDDGNASPRLRTRGLNEYRPNLRVGSAASSNERRSRTTSPLDQSNGSPAPRVVRIGSVLGSGSKLRREGSHLTSGENAEVEAEAKHYSSDFITPGPRTRSVRISTSRTHTRSPTSASPSGRRSASRSPLHEEGSADRPEEEGKSRYDDYAPIIGTSSVLRSRNPEDIGIQSSLRVKRVGRLTGTFLNGPARRGVLRRQSEEDQSPSYLSDSKEAEGGDNNDYNYKSARASSPKVSWADPEQPQKTTDYRRISSGDGPFSRSSSPKSYVSHSKSTPGSSSDASSKPSSSKEPIFKVPPPPTLPSTRDQENEPPPTFKRTKPQGFDFLDKPEKLSVVYGDDKKDQELPAGTSPRKILSNRSNNTPHRPAPPPPKMSVLETATATGGAATASQSRKKRSQVSINHKPFTRLDCIGRGGSSRVYRVMAENYKIFALKRVNLEDVDPTTLAGYKGEIDLLKKLENVDRVVRLFDWELNSDKRTLSVLMEIGESDLEKVLTYKLNAEDATFDINFTRFYWKEMLECVQAVHEYNVVHSDLKPANFLLVQGRLKLIDFGIANAIQDNTVNVHREQQVGTPNYMSPEALVDSNASLGLPASVGKMMKLGKPSDVWSLGCILYKMVYGQPPFAKIAKYYERIMAIPNPKVKIDFPAFGVGGIQVPPGLIRTLKGCLQRDQTLRPTISDLLGQRDPFLYPDAQLEGAVPITQDVLGRILVNVVNHCRVRGVPNDEELAAWPAGFFAKIKAALEENP

SEQ ID NO: 31709 - protein, 434 aa, Aspergillus nidulans FGSC A4
MSNTDFLGRAIDTVKKAIESDNEGEYEKAYQQYYSALELFMLALKWEKNPKSKEMIRAKTGEYMDRAEKLKNHLASQDSRKKPSAVGANGKVSQGSGKGGKEDDDNEDADSKKLRSALAGAILSEKPNVKWEDVAGLEGAKEALKEAVILPIKFPHLFTGRRQPWKGILLYGPPGTGKSYLAKAVATEANSTFFSVSSSDLVSKWMGESERLVKQLFNMARENKPAIIFIDEVDALCGARGENDSEASRRIKTELLVQMDGVGNDSKGVLILGATNIPWQLDAAIRRRFQRRVHISLPDINARMKMFMLAVGSTPCHMTQADYRSLAEQSEGYSGSDISIAVQDALMQPIRKIQTATHYKKVLHEGQEKLTPCSPGDNGAMEMRWENIEADQLLEPPLVLKDFIKAIRNSRPTVSQEDLKRNAEWTQEFGSEGA

SEQ ID NO: 31710 - protein, 404 aa, Aspergillus nidulans FGSC A4
MASQVQPGQKPKVQPCRYKTGKTLGAGSYSVVKECVHIDTGQYYAAKVINKRLMVGREHMVRNEIAILKQVSTGHQNILTLVDYFETMNNLYLVTDLALGGELFDRICRKGSYYESDAADLVRAILSAVAYLHDHGIVHRDLKPENLLFRTPEDNADLLIADFGLSRIMDEEQLHVLTTTCGTPGYMAPEIFDKSGHGKPVDIWAIGVITYFMLCGYTPFDRETNLEEVQAIATANFSFTPVEYWRGVSQEARDFIKRCLTVNPKKRMTAHQALQHPWINPPYDTTDDLGSGEDLLPNIKKNFNARRTLHKAIDTVRAINKLRENGGLMMDGIMSVDPKPEHVNGSEVVEDRTTPRERENEDAMEIDSRSNARGQTEQQIREQERKVKETVAGLWSRTAPRSER

SEQ ID NO: 31711 - protein, 755 aa, Aspergillus nidulans FGSC A4
MTESDHTRSLRDRIIELFRPPASVTFLPRMTVHNNTMGDFDESAGSNSSQVDSRTPLLGSYDRREPPCGMGNSCNHGTFTPRVESDDWRTNAMPEYGGERYPIGSTSRRSTSAAPSAQGLENFPAGASTPLTIKYSKSQYISYYIPFFTWISQYRLSYLRGDICAALTVASIYIPMGLSLSNIAHAPPINGLYSFVLQPFIYAILGSSPLLVVGPEAAGSLLTGAIVKESVNQGSSGEDDEAANAIVVGVATALAGLMILVAGIFRLGFLDNVLSRPFLRGFITAIGFVIFVDQFIPELGLAAEAKAAGVTHGSTVDKLLFIIRNITHSHSLTAAVAFTSFAIIMVFRTLKKLLQPRYPQVIYFPDRILVVVISAVLTQQLRWHEQGLEVLGPTKNSGNGVFNFEWPFQPKYAEYLRTALSTSFIIAILGFFESSVAAKGLTGVASVGVQGMQVSPNREMVALGFANVVGGCFMSLPAFGGYARSKVNASTGARSPMSNICLSVVAIICIMVLLPYLYYLPKAVLSSMISVVAYSLIEECPHDLAFFIRLRGWSELALMLLIFLSTIFYSLELGIALGMGLSVLILIRHSTKPRIQILGKVAGSDRFDNAELHPENVESVEGALVVKIPEPLTFANTGDLKNRLRRLEMYGTNRAHPSMPRIRPPEHNRNVIFDVHGVTSIDGSGAQVLYEIVDGYAQAGTRVFFCRVPNRSVYRMFQRSGIVERCGGMSHFVGHVDEALKLTDSETRPLSASSA

SEQ ID NO: 31712 - protein, 435 aa, Aspergillus nidulans FGSC A4
MVRNIVVIGGTSHPQLTQTICDILGIPPADVLLSKFSVGETRVEIKESVRGKDVYILQSGGGKVNDHLLELLITISACKTASARRVTAVLPLFPYSRQSDIPYNKSGAPLVKSSLEGKGASNGYTFESTPTTPHPGKLEVGNPINGVSIDNLQKSLAKAQLEESSGSPVKKRLPNGLSRSDTMESLKSDSSKSTLPNGLLDDSQDKINKFEPRPGYKQWVAQAGTLVADLLTCAGADHVITMDLHDPQYQGFFDIPVDNLYGRPLLKNYIMRNIANYKEAVVVSPDAGGAKRATAIADSMGMEFALIHKERRPTRITDRQNATMMLVGDVKDRTAILIDDLADTSNTITRAAKLLKKEGASQVYALVTHGILSGDAIDRINASALDKVVVTNSVSQTEHLRRCPKLEVLEVGHVFAEAIRRVHHGESISALFQYE

SEQ ID NO: 31713 - protein, 227 aa, Aspergillus nidulans FGSC A4
MFDYDGTLTPIVKDPQSAIPSDRVLRTLKTLAADPRNAVWIISGRDQAFLDEWMGHIPELGLSAEHGCFIRMPRSDNWQNLAETTDMGWQKEVMEIYQHFTERTQGSFIERKKVALTWHYRRADPEYGAFQARECRKQLEEHVSKTWDVEVMAGKANLEVRPRFVNKGFIATRLVQAYEDGKVPEFILCSGDDFTDEGMLFPFLATPKLRHELLLTYLRYVPCLEEI

SEQ ID NO: 31714 - protein, 426 aa, Aspergillus nidulans FGSC A4
MLKNVLRRGALRLVRQRASYATSALTPQQKQIVKATIPALEQHGVTITTLFYKEMLERHPELNNIFNSSHQATGVQPAALAHAVWAYASNIDHPEALATAVSRIGHKHASLGVRSEHYPIVGEHLLRAIKKVLGDAVTPPVADAWTAAYQQLADIFISFEDDLYKQATQTPGGWTGWRKFVIADKVHESEEIISFQLVPQDNGRLPTYKPGQFVSVRCFVPELGVYQPRQYSLSDIPNQRYFQISVKKEFASGARPAGRISNVLHESLPKGSEVEISMPFGDFVLDTNATTPVVLMSGGVGLTPMMSMLKTVTNNSKSRPAVFVHAVRNGRVHAMKETLANIMTDNPQVKRAIFYEQVEEGDKQGVDYDYVGRVDVSKIKDLVFLPDADYYICGPSPFMKAQSEALETLGVRPDRIHMEVFGSPTP

SEQ ID NO: 31715 - protein, 1266 aa, Aspergillus nidulans FGSC A4
MSSGLGEKARTVLDVKDDDPDRQSGTKAYFRVWGYSSVQDHVIRVTGLFAAIACGAALPLMTLVFGTLIDNFNDWGAGKLSPDEFRSHVSQNALWFTYLFISIFVLSSFNTACLRLTATRCVRALRHDFIRSILRQDLSYFDNCLPGTVATVLSNNADLVEIGLGEKLGIAIEGVAQLCAAFVVAFARQWKLTLVVAATLPLAMLVIVVTVILETRITTKILAIYSKAGGIAEEALASTHIVKAYNAASKLQARYDSYLERATQLGVKRGPIRGIQYGAQFAIMFCAYALAWFYGIRLLVKGEIESGGYLITVLTSVLIGSQSLTLIGPFIGEVSKTAAAAQELFQVIDRKPNIDSLSSDGRTLTGVTGHISFRNVSFAYPSRPSVRVLDDVTVDFEAGKTTAIVGSSGSGKSTILALVSRFFDPVSGSVLLDGHPIHELNIRWLRGQIGSVQQEPVLFSESIFANVCHGFFRTDMDLLPEHERRIRVQEACEAAFAHHFIQGLPEQYDTPVGAGDGLLSGGQKQRIAIARSIIRNPPILLLDEATSALDPNAEGTVQAALNNVSKTRTTIIVAHRLSTVQRADNIVVLRKGRVVEQGSHRELLAKKGTYFDLVAAQTEDGIISTAGDQTGTSEADSVLVKKAAVEDYNSAMSSQSSKATAHEKRVPLLKCLFILLRGRLQLWPLFFCGLIVSIGAGSVFPVQAVVFSRAILIFQFPLPAMASEMLHKGNFWGIIYIVLAVSVLICYAGLGFFFTVAASFLSGTYRSRYFAAMLNQDVSFFEEEDQSAGVMTGQLSTDPQRIEDLISLCLGFILLVVVNVLASCILALAVGWRLALVAIFGCLPPLFLAGYVRVRLEITCQERTTRLYLESARFATEAISAIRTVASLTLEEKVIQMYDERLSHTSPKFIRITLVSAILLGLCESLYLATLGLIFWYGVKLLSQGEYNVETFFMVFVAVIFGGQAAGFLLGYTVNTAKAHTAANNIIHILGSRPSINASTGKQETVQLDSDTAIEFKDVHFSYPARPTVPVLQGLSFKVKKGEHIGLVGASGCGKTTVISLLERFYEAGSGEIFINGIPLHDIDVHSHRARIGLVTQNPTLYQGSIRDNVLIGISISHQNEELDSQIEEKLTKAYKDANIQDFIQSLPEGQQTDPGTRGLALSGGQRQRIAIARALIRDPELLLFDEATSALDTENERLVQEAIERVSHGPGRTTISVAHRLTTVRRCDRILVLHEGRVEEEGTHAELMARGGRYYQMVLAQGLDR

SEQ ID NO: 31716 - protein, 159 aa, Aspergillus nidulans FGSC A4
MADEAHEVTFESADAGASATYPMQCSALRKNGFVVIKNRPCKIVDMSTSKTGKHGHAKVHLVAIDIFTGKKYEDLSPSTHNMDVPNVSRKEYQLLDVTDDGFLSLMDDSGDTKDDVKVPEGEVGERINKMFKEEEKDCNVVILTSMGEQMCMEVKEAPK

SEQ ID NO: 31717 - protein, 311 aa, Aspergillus nidulans FGSC A4
MASQSDKSVLGMPGFVVDFLMGGVSAAVSKTAAAPIERVKLLIQTQDEMLRSGRLDRKYNGLMDCFRRTTQAEGVVSLWRGNTANVIRYFPTQALNFAFRDTYKSMFAYKKDRDGYAKWMAGNLASGGMAGATSLLFVYSLDYARTRLANDAKSTKGGGERQFNGLIDVYKKTLASDGIVGLYRGFGPSVLGIVVYRGLYFGMYDSLKPVVLTGALEGSFLVSFLLGWGVTTGAGIASYPLDTVRRRMMMTSGEAVKYSSSFDAFRQIIAREGVKSLFKGAGANILRGVAGAGVLSIYDQVQLILFGKKFK

SEQ ID NO: 31718 - protein, 345 aa, Aspergillus nidulans FGSC A4
MKYMSLDQRGSVMAEYIWIDAHGGTRSKTKTLSKAPSSVDELPEWNFDGSSTAQAPGDNSDVYLRPVAMYPDPFRRGDNILVLCETWDSDGSPNKFNYRHDCARLMETHAKEEFWFGLEQEYTLLGPDGWPYGWPKGGFPGAQGPYYCGVGTGKVYCRDIVEAHYRACLYAGVKISGINAEVMPSQWEYQVGPCHGIEMGDHLWISRFLLHRVAEEFGVKISFDPKPIKGDWNGAGLHTNVSTTSTRAEGGIKAIESYMKKLEARHVEHIAVYGEGNEERLTGRHETGNIDKFSYGVADRGGSIRIPRQVAKDGKGYFEDRRPASNADPYQITGIIAETVSFSNR

SEQ ID NO: 31719 - protein, 980 aa, Aspergillus nidulans FGSC A4
MAIQDWVEQPPAIRLVAPGSIPFIKHATAAGYHYDSTPTRLTARFIKRTSFPTSNQWRRQFSAARPAFKEIQDAYILSAARTPTAKFNGSFVSVSAPQLGAVAIKSAIEKSSVPVEKITDVYMGNVLQGSVGQAPARQASIFAGLSPNVESVTVNKVCASGLKAVVFAAQNIQLGLAEAQIAGGMESMSRVPYYLPRSSQLPPFGEIKLEDGLIKDGLWDVYNQFHMGICAENTAKKYEISREMQDEYAIASYERAQKAWAENKFAEEIAPVTVKSKKGDTVVERDEGYENLRADKLRTLKPAFLRDGTGTVTAGNASTMNDGASALVLANKELAREFGAGKRALARIVSSADAAIDPVDFPVAPAKAVPIALERAGITKDQVAVWEFNEAFAAVIEANKKEQILGLEGARVNELGGAISLGHALGSSGSRILTTLLHQLQAGDLFSSQNGDPRPPFHDWYNSEHGPLRLRLPFITNGFRYRAVDGVEPEWVALYDITDMDELTRETYLSLRGDTIKTPREKATMAQIDVGRKLYDLLQDEKASDFKPLEDQPDTAASGHVLISNTSTLPADKEDDLKAWYKEEHIPMLARVPGWRRSRLFVTASIDPKAQREFVALHEFTPQNGLGGPEHKASMETPWRARIADALTSKTRRVYNWAYTFGPAPRELGSLASPDTIGPWSSNDGRTRTLPDQTNPAVESYITTPDGVEIPYRLEGSTDPHSSVIVLSNSILVDYTIWDSFVKSFLAEERNRKFRILRYNTRGRSAAAGETPINVDVLAGDIIALLDALRIPQAILIGVSLGGVTVLNTSLLYPSRVKTFISCDTNSSAPETNRKAWNDRAAIAESEGATHPETKEPIIGEELSEVTVRRWFTEKSYETQPEVPAKVKDVVRANSLVGFKKAMQALCAYDVRERMQKASVKGLFVAGDSDGVLPKTMKQMAEDLKVEGGAELKIVPGAGHLPMVEQPEAFKAVVNDFLHA

SEQ ID NO: 31720 - protein, 1285 aa, Aspergillus nidulans FGSC A4
MATLDREDDFTDMVYTPPLSTRSRSNSRLRGRPQQPPQENLKQFWEQFNSRFPGKVYTVLPDNPYARTKAARAPKGIIKGQDAGKSYEQARKECERAVNRIAKECRRLNQKYSDPHFDIEMDLKGGTRNCLDGLDKQNDEMRPMGVKRVTEIFEKPQFYVNGPTASDVRQGRDGDCWFMAALCTMGNKAGLIEKICVHRDEEVGVYGFVFYRDGEWQQCIVDDKLYLRAADYDESIDERPVWDNINRKDTEEEYRRAFQVGSRALYFAQCVDENETWLPLLEKAYAKAHGDYSAIEGGFVGEAVEDLTGGVTSDLLTSNILNKDKFWNDELMQVNKEFLFGCGTGLYSNWLTPNHRGPPRDRKGISENHSYSIMDVKEIDGVRLVKLRNPWGKKEWNGAWSDGSEQWTPQWMEKLNHKFGNDGFFWISYEDLLKKYQHFDRTRLFGPEWTITQQWTSLNVPWSADYHTTKFRLNVTKAGPVVLVLSQLDTRYFKGLIGEYDFVLKFRLEKEGEEDYIVRSVNNSLISRSTNAEVDLEPGSYHILMKITAYRCGSESTEETVRRLASTRREKLVQIGLSYDLAHAKGIVHETEAEKQEREEREYRRKAAERKKLREETKKRLQREWIRNQKLVARRARAEERLATKAAKLQISDRNAGSERVLSDSPVESPSDMNGHVDGTDVPVENGSVPSIRFDETHMVLTPQSSHDTYSMRSCRHRSTNSISRHRRRTHNRDQDLLEGFEFDSDIDMPPEEPLTIRAPSMQTSLSDGHDSTTDPWNAVCVVGLRVYSKDEMLSLEVVRPVPEHETEAALDIDDPALSATSEKDRATANVIINLPRGPLFHAVHVTDKPQSNGSETNPSRRPDDAVSDQALADKTSSTVVTINYRLGEMPFDENQIPLHSRLQIQRGEAEPQPLYYRYPTPVHDTLAGLDWVLGNLQPTRLGVVGTHIGGSLALMLALTEPRSIHAVAAIEPVCDWTALDEYCTSTNSPATSRRRRHAPVDLVPLLEARERFFASHERYFDSFASPILFLRSPGRDTPKVFPRYRTGPEYPIPVRVVGEDDPEEEPDLWDPYELYDEIDLSNSKSSAVDYSGQEAQPPARRRKALSRWPPYGLDYGNSGPPERYSRQPVKRLNVTLPWVRIFTFADHQSKESTSPSAIKSPKASTPTSQVSEVDETQGQKAPTRRRRTRNDTVLSHQATEMVDVMRRACFFGKESGFGEKRVTLSSVGVSSSDTSTSDAATSAPEQREYLSEAITMRTGSWLAETLDLDIKENLKADNTRTRDR

SEQ ID NO: 31721 - protein, 102 aa, Aspergillus nidulans FGSC A4
MSSAKVKAQQIIDENGVVVFSKSYCPYCKASKSLLSELGAKYYALELDTIDDGADLQNALEEISGQRTVPNIYIAKKHIGGNSDLQGIKKDLPALLKDAGAL

SEQ ID NO: 31722 - protein, 1250 aa, Aspergillus nidulans FGSC A4
MTVYIASLFLPYTVSFRPPEESQALPSSPLSQHQAPESVSTTPNPAVSLFEKRNKTPNVGLTPGATTDHERIFTSDPNKAADPNRSEYPFPNPDNGYDYEHLTESEAHSPAWGVRTALNQPKPQSAFLASPSILRHQEPLNLSTDSLPKVDGPSSVPPKKHFRKPSGRSHNRKPSFSENEWKITTAEQGNGGLRNAVRAAAETGQLEDKVWVGTLGMPTDALTESTKATISEKLEGEYDCLMVDVSDSDFDGHYTHFCKTILWPVFHYQIPDNPKSKAYEDHSWVYYVKLNQVFAERIARNWRRGDTIWVQDYHLLLVPAMLRKLLPDAQIGFFLHVAFPSSEVFRCLAPRKELLEGMLGANLVGFQTEEYCRHFLQTCSRILSVEATNDGLQLEDRFVNVRKFPIGIDPLSWDKRRKAADVEQWIKTISDRYAGKRLIVARDKIDQVRGIRQKLLSYELFLNTHPEWREKVVLIQVATSTTEQPELEAMISDIVMRINSTHSTLAHQPLVFLKQDLAFPQYLALISVADAMMITSLREGMNLTSHEFVYCQDGKYGAQRYGSLILSEFTGSASVFGNHALLVNPWDYHQCADAIHTALSRSEEKRQQVWTQLHEAVLQNSTSNWVKSFSETLSRVWHEQSSREIMAVPRLPMNKLEDRYRQAKRRLIILDYEGTLASWGSPKSIIVTTPQRAITTLADLTEDPRNVVYVMSARMPEELERLFRLVSGLGLIAENGCFIREPYSETWSKLTNQDQTDAWKTAVRQMLEYYRQRAEGSWIEQRHCSLVFHYEAAEDHAAACRLASECADHINDACANQGVHAILVDGVLVVEATSTNKASAAELAWRSCLKQENDAGRPDFLLAIGDSRDDEPVFRWANKLESAHAVSYAMTVTLGSRSTEARATLTQGVAGTAHGAQFEEAIRVTPLGHNRYSAFLQKSFCIGTVPHGGYTSAVLYRLALVHFATAHPNLYKGEPATPISMHLTFLRRTAEGPAKLRVHDMKLGKRTSSLHVELLQPKDQAQSGTEIDEREMEVKVAGYITVSPASSEVGVSAKTNWELHPKPVSGSRSDGGVDFDRLSKTGRDEAWARQDPPFAQFRKATTQVELYGIDPALKKRKNGIVDQWARLKPEGQLTRWSNEAVVFLTDMFPMALDGFDTMADGRESGSATGGAGPTAKYWFPTVSLSIDFKKRLPPAGEEWLYSRVVTKEVRDGRTDLDVTILDAKGEIVALSTQIGLVVSASRNIGKRARL

SEQ ID NO: 31723 - protein, 277 aa, Aspergillus nidulans FGSC A4
MADSDDEYIGGLSGDEGDDDIIRETRGAVGQAPKRRKQKGGAEFELARTWETLVEGADGTISSTVGGLLEASKRKRLLKDTTPLQRGIIRHIILILDLSQSMMEKDLRPTRYLLTLRYAQEFVREFFEQNPISQVGVIGLRDGLALRISDMSGNPTEHISAIQDLRSQDPKGLPSLQNGLEMARGALFHTPSHGTREIFIVFGSLLSSDPGDIHQTITTLIDDKIRVGIVGLAAQCAKIIFVLIVISLLMRWYIIALVVRAGLSAIPRTIYLEFKKV

SEQ ID NO: 31724 - protein, 149 aa, Aspergillus nidulans FGSC A4
MFSRTAISFTLRRSLFRPQLSPQFPNQLPSVLQARLLSTETKAAIDKAVASAPVVLFMKGTPETPQCGFSRASIQILGLQGVDPKKFVAFNVLEDPELRQGIKEYSDWPTIPQLYLNKEFIGGCDILMSMHQNGELSKLLEEKGVLVAE

SEQ ID NO: 31725 - protein, 571 aa, Aspergillus nidulans FGSC A4
MCGIFACHHHPDVQAFKPTALRMAKAVRHRGPDWSGSFIADKTILCHERLCIVGVDSGAQPLVNDDESLALAVNGEIYNHRIVRKTLDVEYNYKTHSDCEVIIPLYMKYGLDAPKHLDGMFAWVLYDKKEDRVIAARDPIGICSFYIGWSSQTPGAVYFASELKSLHPVCDKVEAFPPGHVFDSKSGEFSRYFQPSWWDPTNVPSTPVDYKAIRESLTRSVRKRLMAEVPYGVLLSGGLDSSLVASIAQRETLRMQKASSGVKSEANGELVGIDDENELSTVNSFQQLQSFSIGLPGAPDTEAAMEVAKFLGTKHHALTFTIEDGLNALSDVIYHLETYDVTTIRASTPMYLLSRKIKGLGVKMVLSGEGSDEIFGGYLYFHAAPNKEEFHKETVRRVKNLHLADCLRANKSTSAWGLEARVPFLDKAFIETSMSVDPQEKMITKDRIEKYILRKAFDTSDEPDVEPYLPDKILWRQKEQFSDGVGYSWIDGLKDHAELHVTDEMMKNPKPEWGDDIPTTKEAYWYRMMFDEHFPSYCASTVERWVPTWSKQSDPSGRAIATHNAKYDDAE

SEQ ID NO: 31726 - protein, 156 aa, Euphorbia esula
HEDHFESKADAGASKTYPQQAGTIRKNGYIVIKNRPCKVVEVSTSKTGKHGHAKCHFVGIDIFNGKKLEDIVPSSHNCDVPHVTRTDYQLIDISEDGFVSLLTENGNTKDDLRLPTDESLLSQIKDGFGDGKDLVVTVMSSMGEEQICALKDIGPK

SEQ ID NO: 31727 - protein, 739 aa, Aspergillus nidulans FGSC A4
MASPGRYDNGEGSSTPKLGSSPIATSAHRSRSPAPDSVRHASIARLASPVPSISNSVSSRQIPVPVSVGESQDLSRVDNLSSLPGPGQSMIASALQDSLGRSPPRFGTPPRRTESPVSNQNPQIRSNYGSFDQKPWREGSEYSAAPYEDPEIVKRHLVQPLESRDTQSSGYGTDNADDEFSSLRLQGGDITRQVYRWAEDAEEGGSVRKPQRSRSFHLNRPTPEEDTMNINSIRVPGGFRRDYLRRAVGSPRPGQSDAGDGASPAPRQLPTSSFLEFLTLYGHFAGEELEEDDEVLGPHEYFSSDTWDEAEEREPGEDSALLHPEAPGKRRRKPRGGTGTNTRTGAALLLLKSFVGTGVLFLPRAFLNGGMLFSSLVLLAVSLLSFYCFVLLVNARLKIEGSFGDIGGALYGKNMRRIILGSIVLSQLGFVSAYIVFTAENLQAFVLAVSNCKSFIDIKFMVLMQLIIFLPLSLIRDISKLGFTALIADLFILLGLVYLFYYDFLTISTQGVAEIASFNPSTWTLFIGTAIFTYEGVGLIIPIQESMKHPKQFTGVLAGVMVIITIIFLAAGAVSYAAYGHATKTVILLNLPQDDKLVNAVQFLYSLAILLSTPLQLFPAIRIMENELFTRSGKYNPGIKWKKNGFRFFLVMICAFVAWGGADDLDKFVSLVGSFACVPLIYVYPPLLHLKACAETKRQKLADIALTVLGVVSCIYTTALTLNNWVNGNNSKAPGYCDS

SEQ ID NO: 31728 - protein, 403 aa, Aspergillus nidulans FGSC A4
MRLVKNKIEYGGAGSVTLIPEEPEDMWHAYNLIVPGDLLYATAIRRVTTTAASTGSTSSSRVRLTLEIRVKNLDFDPQNSQLHVSGQIVNETPHTKIGQHHTLDLELNRQFTLEKGTGQDGEGSGWDSVAVEALKDAVDEGGNRRAEAVAVVMQEGLAHICFIGQFRTVLKQKVEISVPRKRAGGSDHDKTMTKFYQTTLDTLLRHMEFNLSSTSMTSNDPVRPVLLASPGFTATAFQKHIQSVANTTTPALKRLLPSIVVVHSASGYLHSLTEVLQSPTVKALLSDTKHARETKLMDDFYEQLRKETNKATYGPREVENAVEQGAVGRGGGILIISNRLFRSQDIAERKRWVALVDRVRDVEGGEVRVLSSEHESGKRLDGLGGIAAILTFPISDDLEEDSE

SEQ ID NO: 31729 - protein, 585 aa, Aspergillus nidulans FGSC A4
MADIATRELRQPIDIAEYLFRRLHEVGIRSVHGVPGDYNLAALDYLPKCGLHWVGNCNELNAGYAADGYARVNGIAALVTTFGVGELSAINAIAGAYSEFVPIIHIVGQPHSRSQKDGLLLHHTLGNGDYNVFSSMNKGISVTTANLNDTYDAATLIDNAIRECWIHSRPVYLALPTDMITKKIEGERLKTPIDLSLPANDPEKEDYVVDVVLKYLHAAKNPVILVDACAIRHRVLEEVHDLIEVSGLPTFVAPMGKGAVNETHRCYGGVYAGTGSNPGVREQVESSDLILSIGAIKSDFNTAGFSYRIGQLNTIDFHSTYVRVRYSEYPDTNMKGVLRKVIQRLGFIKADPVPHISNALPEHEKNSSEQRITHAWMWPMVGQWLKENDIVITETGTANFGIWDTRFPSGVTAISQVLWGSIGYSVGACQGAALAAKEQGNRRTVLWVGDGSLQLTLQEISTMIRNNLNPIIFVICNEGYTIERFIHGWDESYNDIQTWDIKGLPVAFGGKGRYKGYKVTTRDELTKLFASEEFSSAPCLQVSLCDLTHYLSDANFEQLVEVHMPREDAPASLKITAEAAASRNK

SEQ ID NO: 31730 - protein, 420 aa, Aspergillus nidulans FGSC A4
MPRKSILSVNAGSSSVKITFYSYTKTPSVIATAQVSGITAPPATFKYSVGSKQKKEELKEKISSGPDAFKLLLHRCFTDSDLKDVASADDLAYICHRVVHGGDFESPVVINEETYHQLEDLEDLAPLHNFAALEIVRLCKKELPNVQSITFFDSSFHKSLPPYVKTYPIDQETARRNKLRKYGFHGISYSFILRSVAEYLNKPVEKTSLIALHIGSGASVCAIKDGKSIDTSMGLTPLAGLPGATRSGDIDPSLVFHYTNEAGKLSPASTKEMHISTAEEILNKKSGWKVLTGTTDFSQIAVEDPPSEQHKLAFDILVDRIVGYIGNYYVKLDGQVEGIVFAGGIGEKSALLRKAVIEQTRCLGFAVDPEKNQHGPGDDETVVDITASGRSDVKRVFICQTDEQFEMAYNCTKTQGLDKQ

SEQ ID NO: 31731 - protein, 697 aa, Aspergillus nidulans FGSC A4
MMPLRPSKSALRTLHYQRYIASGRRAFASAVSTPHRFSTQKRDQSTATATASTSRPRPSPAFNQEPSRNEVSPLQNRQLPELDDSYGILILFVQIFVGLSGGEIFHEMMLRLGVKHVFGYPGGAILPVFDAIYNSKHFDFILPRHEQGAGHMAEGYARASGKPGVVLVTSGPGATNVITPMQDAFSDGTPMVVFCGQVVTTSIGTDSFQEADVVGISRACTKWNVMVKSVAELPRRIQEAFEIATSGRPGPVLVDLPKDITAGILRKPIPMQSTLPSRPSAATLAAKELSEKQLHSTINRVARLVNVAKKPVLYVGQGILENPDGPKLLKELADKACIPVTTTLQGLGGFDELDPKSLHMLGMHGSAYANLAMQEADLIIALGARFDDRVTGSIAKFAPQAKLAASENRGGIVHFEIMPKNINKVVQANEAVEGDCAENIRHLLPLVEPVSERPEWFAQINDWKTRFPLSLYEKQTPDGPIKPQALIEKLSDLTAHMKDRTIITTGVGQHQMWAAQHFRWRRPRSMITSGGLGTMGYGLPAAIGAKVARPDCLVIDIDGDASFNMTLTELTTAAQFNIGIKVLLLNNEEQGMVTQWQNLFYEDRYSHTHQKNPDFVRLAEAMGVAAERCTKPSEVESKLKWLIESDGPALLEVFTDRKVPVLPMVPGGSGLHEFLVFDEAKDRERRALMKKRNPNGV

SEQ ID NO: 31732 - protein, 332 aa, Aspergillus nidulans FGSC A4
MQSTKPFVLFFNPVKFARPFYEQLQKVAHTEVVTSRNRTEFFQDLQDKYRNIFAIYRTSSSGAVAGKFDTEFINRLPPSCKYICHNGADACAKRGIVVTNAPDPVTDATADLAVFLLLGALRQLNPAMNSLRAGRFKTGVAVGNDPQGKVLGILGMGRIGRAIKKRCDPFGLKTVYHNRTVLAPEQAAGAEYVSFDKLLAESDIISVNVPLTGQTKQLIGAAELAKMKRGVIIVNTARGAILDEAALADALESGHVGAAGLDVYEREPEVNEKLLKQERALMVPHVGTHTAETLAKMETWAMENARRAITGEALLSPVPEHQGLALQARSRV

SEQ ID NO: 31733 - protein, 409 aa, Aspergillus nidulans FGSC A4
MVQIKDFAVEQWMDKYETTAKYNVAETCSASISVRDLQALCEDPALNPLDGVLDRKLTYGEIRGSKQLRSTLANLYSVRTPTPLPSDNILVTAGAIQANFLLLYTLVGPGDHVICHYPTYQQLYSVPESLGAEVSLWKSKEAEGWKLDLEELKGLIRPNTKLIIINNPQNPTGAIIPQGTLDEIVEIARSSSIYVFCDEVYRPLFHSISPMDPDFPSSVLSLGYERAIVTGSLSKAYSLAGIRVGWIASRDRTVIEACASSRDYTTISVSQLDDAVASYALAPTTIHALLKRNIELGRTNLGILEKFIESHRWACDWVKPRAGTTAFVRFNKMGKPVNDTAFCEMLLERTGVMLVPGSLCFGGGEDFLGYVRIGYVCETQVLEEGLAKLKAFLEDDYEEVPAVKRKTQS

SEQ ID NO: 31734 - protein, 552 aa, Aspergillus nidulans FGSC A4
MRVLPATLLVGAATAATPAQQVLGGLQDFGNAVQDAMHENLPKINKPLEAFQEQLKSLYEAREFWEEVANAFPQNLDHNPVFSLPKKHTRRPDSHWDHIVRGADVQSVWVTGENGEKEREIEGKLEAYDLRIKKTDPSSLGIDPDVKQYTGYLDDNENDKHLFYWFFESRNDPKNDPVVLWLNGGPGCSSLTGLFMELGPSSIDENIKPVYNPYAWNSNASVIFLDQPVNVGYSYSGSTVSDTVAAGKDVYALLTLFFKQFPEYAEQDFHIAGESYAGHYIPVFTSEILSHQKRNINLKSVLIGNGLTDGLTQYEYYRPMACGEGGYPAVLDESSCRSMDNALGRCQSMIESCYNSESAWVCVPASIYCNNALLAPYQRTGQNVYDVRGKCEDESNLCYKGMGYVSEYLNKPEVRAAVGAEVDGYDSCNFDINRNFLFHGDWMKPYHRLVPGILEQIPVLIYAGDADFICNWLGNKAWTEALEWPGHKEFAAAPMEDLKIVDNEHTGKKIGQIKTHGNFTFMRLYGGGHMVPMDQPEASLEFFNRWLGGEWF

SEQ ID NO: 31735 - protein, 504 aa, Aspergillus nidulans FGSC A4
MPGVEKSSQNESRLLLVSNRLPITIKRSEDGKYDFSMSSGGLVSGLSGLSKTTTFQWYGWPGLEVPEEEIPTLKNRLKEEYNAIPVFIDDELADRHYNGFSNSILWPLFHYHPGEITFDESAWEAYKEANRLFAQAVASQVQDGDLIWVHDYHLMLLPEMLREEIGNTKKNIKIGFFLHTPFPSSEIYRILPVRNELLLGLLHCDLIGFHTYDYTRHFLSACSRLLGLPTTPNGIEFQGKIIACGAFPIGIDPEKFKEGLKKEKVQKRIATLEQKFQGVKLMVGVDRLDYIKGVPQKLHALEVFLSDHPEWVGKVVLVQVAVPSRQDVEEYQNLRAVVNELVGRINGKFGTVEFMPIHFLHKSVNFDELIALYAVSDACVVSSTRDGMNLVSYEYIATQEKRHGSLVLSEFAGAAQSLNGSIIVNPWNTEELAAAYHEAVTMSDEQRALNFSKLDKYVNKYTSAFWGQSFVTELTRISEQAAGKLPTKETPVNGETSKLETSSQ

SEQ ID NO: 31736 - protein, 339 aa, Aspergillus nidulans FGSC A4
MDTPTRPSISPGPATNPLSAHSTWNSLSSLADLVTPKATNRADFIAECKSGALDGVVVAYRTFDSVSITGLFDEELVNALPSSLVYLAHCGAGYDQISTQACTARNPPLRVSNVPTAVDDATADVNMFLIIGALRNFNAGMHALRQGHWRGLTPPRLGHDPENKVLGILGMGGIGRNLKRKAESFGMKVIYHNRRELSAELAGGAKYVSFEELLKQSDVISLNLPLNKNTRHIISTEQFNQMKDGVVIVNTARGAVMDEDALVKALDNGKVYSAGLDVFEDEPKIHPGLVENPNVLLVPHMGTWTVETQTAMEEWAIENVRMALETGKLKTPVPEQADL

SEQ ID NO: 31737 - protein, 413 aa, Aspergillus nidulans FGSC A4
MASPIPRGLRQVLQKSPSDIVILSSLRTPVTRAKKGGFKDAYPEELLAHVLRATLEANPNLDPALIEDVCIGSVLQELGGAKAGRMAQIHAGFPHSVPFHTINRQCSSGLAAISTIGNSIRAGALNIGVGGGMESMTRNYGSRAIPTVLWPELKESPSKDSRDCIMPMGITSENVASRYGISREDQDAFAANSHKKAAAAQNAGLFDSEIVPVKTLSYDAQNPEAPPTEITVTKDDGVRANISVEKMASLKPAFSETGSSTAGNSSQVSDGAAAALLMRRSTATELGLTSSIKARWVGTAVAGCAPDEMGVGPAVAIPKLLQMLDVNISDVGIWELNEAFASQALYCARKLGIDEAKINPKGGAIAIGHPLGATGARQVATLLPELERTGQEIGVVSMCIGTGMGMAGMFVRE

SEQ ID NO: 31738 - protein, 596 aa, Aspergillus nidulans FGSC A4
MRRAALQALRSSRRAPAWRVGGRTPPISFTSSPSLGLRSYSTPKLSASLQSSMHLRTFSVAAVSAVVASGAWYAYQGDGSQTPAAAGTSSQTRSFTSTAHAEQPSEPSRRALLVDNDQFYTATLSGEQPLQKNTDDSDRRLLEMLTPEQATQKLRKNEESYLVNRGKGVVRYDVVQVPSNSPIEDDHAEKIVEVPASTSAANEGQSSSDWMFWAVFDGHSGWTTSAKLRNVLISYVARELNATYKSASSDPSLVLPSSEAVDAAIKQGFVRLDNDIVHGSVNQVFKSNSRRAAAELLAPALSGSCALLAFYDSQTRDLKVACAGDSRAVLGRRSENGKWTATPLSEDQTGGTPSEMKRLREEHPGEPNVVRNGRILGQLEPSRSFGDAFYKWSKETQEKIKRQFFGRTPHPLLKTPPYVTAEPIITTTKVDPSQGDFLVLATDGLWEMLSNEEVVGLVGQWIEEQKAAAGAGTGNKSWVRSLFGSQPTQLPVEAPKETSTDGQRRPIRQQQYDISGAASRFVVEDKNAATHLVRNAMGGKDKDMLCALLTLPSPYSRRYRDDVTVEVIFFGESPDNRTISINEEASASEDNIKAKL

SEQ ID NO: 31739 - protein, 559 aa, Aspergillus nidulans FGSC A4
MDTKDKKIFTFSEVDELDHPTSTYIYSVPSSGTLSHKGGEKDTVTGRIDIVHASTPSKSWSLSSLRDVLIEVFLPAGYPHSVSDDYTAYQIFDSLQAFSSSIAGLLASRAVLQGVGVGNANASPTSALLLHILQDTSGRIATILFAHRVGTALEPECKMYRFAADIFNDLAMLLDCFSPMVPAGFNRVTVLSAAGVLRALCGVAGGSSKASLSAHFARWGNLAEVNAETVISLIGMLVGSFVVSHITSFTATWLTLVFLLSMHLSLNYAAVRSVQMTTLNRQRANIVFSTLLSSDPDLADFVSSPSRKDERRASLKQQEHTHQNPNHIRPITPEQVAKEERIFAAGAALKWHSPPSQFSSSSRLLPEVQLLGSCQVGVSLRQFLCQAPYTTSSTSNTLKTDLPLEEITTLFHEEEYILFLTPSSKITFLGHTTTGLSAAVLIKRRDTSASTGLPSLKSKSNPHLKAWMHALFAAKILASSSAWSSHTRSYDLRSSNTLHVEDILRILSRTLNYLNEGDRFETYIESLRKAGWEVDGDGEGSGSALETRIGRRVVVSFNS

SEQ ID NO: 31740 - protein, 390 aa, Aspergillus nidulans FGSC A4
MATKTLEARFEHLSVKDDSGNGNKGTSYPKHKSSLSTAVSLSGLGVAGQLTSGANRSNLLKLALQNTNDNKVNAMNANASQSPGKGTQNPASLRNLDENGEYEQPAPRKLHLGMFEIGKPLGKGKFGRVYLAKERSSGFVCALKVLHKSELQQGGVQKQVRREIEIQSNLRHPNVLRLFGHFQDSKRIFLILEFAGRGELYKHLRKEHRFPEWKAAHYIAQMASALKYLHKKHVMHRDIKPENILVGIHGEIKISDFGWSVHAPNNRRQTMCGTLDYLPPEMLTSNPQGNFYNEKVDLWSLGVLTYEFLVGEAPFEDTPVMTQRRIQRGDMQVPSFVSPEAKDLIKRLLVLDPEKRISLDEIQRHPWILKHCVKDDRTIKRGSAPHAANE

SEQ ID NO: 31741 - protein, 320 aa, Aspergillus nidulans FGSC A4
MILKRVTAPRIGWMLARNNQYGLGSMGLTMAANLQRYLAKSPDERNLTYFNRTLSAGDPLRELGAIPAASLLDLVKKSDVIFTMVPSISVTSPSNKILTETFNAITSSSTIIDKKTFVNRSTVHPETTASISDILSGLDAVFLAAPVFGGPAVAQSGQLVFAFGGPSQNQNQLDIRRYIVGVMGKKVIECGTEARSVSLLKIGGNIITLNLMEAVGEAQVSAERTGLGTAAMEELITESFWNCCRGYSKRLTTGIYAPPLNTRPGFGVSLTIKDADHALSIASAANAKLPGWNWRAFTCGLLENTGESTRRAKRTGYTPV

SEQ ID NO: 31742 - protein, 830 aa, Aspergillus nidulans FGSC A4
MAKPTVLFVTNQELGQATVVLSVAYEFLIRQSYNVHIASSRQLEPEVSKLNAQAARATQLQSSSTTANFHTLPGRTMFEAAMNRGNSSSSSSGSWFNAHNIGLFGARQAYTMLCGVMVPWTGDEYIAVYHRCIEIIKKVQPRIVVIEPLCAQAIDACRTLRCNLWKFPVLCSGYSFPLPWRHILPNAFLAICAGLTFANSRVFKAIDERRHAEGITGPYPVMASLAKNPTPLLIASRPEIDFPCFVPDSIISCGPILRPCAPINEECPELAEWLLRGPTVLVNLGSNVCFDRDQTRKFAHGLRMLLDARPDIQVLWKLKPDRKVEAALWIAEAVEGIFDEVFAGRVRIEEWLPVEPICILESGQICCMVHHGGANSYNEAIRAGVPQIVLPVWFDTYDFAARVEYLGVGVWGSKMSAPAINGPELGKALLCVLHSNESSTIRDQAKTIAAEIGFSEGRVVACTGLGLLQSMAHIDVKTGAEWRNDHFLSTSLLNNRPHLFIDSKLGIIQHHTVQMASETVAWIGLGNIGRGMSRNIALKGPQKTPVILYNRTASKASAFAESINAEKPQAAVAVSSLPAAVKDASIAFICVGDDSALDQIINTITSDDSPDLQGKIIVDCSTVHPDTSRRVHATLSSKGTSFIACPVFGAPNAADAGQMVVVPAGSRAAINRIQPFLEGVTSKAVLDVGPEAEKDVGRASLLKVLGNTFILNTVETLAEGLVAAEKSGLGIDVYQQWVTTMFPGPFAKYAERMATGEYFKREEPLFAVDLARKDLRHAADLAKAAGMTLPSVKVTDDLLKVVKEEKGEKGDIAGVYGAIRKASGLPYDNQ

SEQ ID NO: 31743 - protein, 746 aa, Aspergillus nidulans FGSC A4
MQLSSYKETAVGEAVDKDNNAPAENLEGQIQVHDDVEYVKGHPVIRTGADISRFIVSDRDDGDPALTFRSIVLGTVFTALSSVITILYVFKPYQVQVSAVFLQLLVFIFGKAWAIFTPRPERVKWRWLQSVLRFMSFGQDFGIKEHVVAALIASSGNNGLSGVEVRAVERLFYGLHISASTAVLSTFSIALCGFVLAGVLRPLIVYPAEMVYWSTLPQVVLYQNLHFNPRNNKRRLIKFGWALGIAAVWELFPAYMMTWLGGFSVVCLASLRAPMHTRKIITTIFGGASSNEGMGLLNFSLDWQYIQSTYLSLPLKQQVNSWIGYAIFYVVMAGTYYGNAWDAKSFPFMSTSLFHSNGTTFSPDSVINSQGTIDYVKLEQVGLPSLTSSTVWGYLTQNLAIGALISHVLIFYWKDMETAWKQARSRTQPDPHYQGMLKYKEVPMWWYYASFVLAFFAGLIVTIKGETTLPAWGYIISLILGSFIAPFSCVLYGLYGTGVSTNQLSKMVAGALHPGRPLAGLYFASWSHQVILLSVNLANWLKIGQYTKVPHRIMFATQVYGTLLGAALNYVVMITIVTSQREILLDPIGNNVWSGSLVQSLNSQAITWSLAKEIYGTHGRYLIVPLGLIIGLVFPAIHWGLSKIFPRIRNWPLNTTIILAHAGQVYYGTTAWVGSAIVVGIFSQFWLRRRLPRVYNEYNYLIGAALDGGSQLVIFILSFAVLGASGTERPFPTWWGNPDGNPDHCL

SEQ ID NO: 31744 - protein, 535 aa, Aspergillus nidulans FGSC A4
MYNAHRGMVPAPNSRLNELLDQLRQEFENQSRSTGEFEHQLTGQLQEMEMIRQKVYQLEQAQLKMKQDYEAEIRMLRHELESRGVQPVASHVAVPAQHGGPSQAPPPALGHGPSNLFGGIMANQGGYGPPPPPTASPGPGKRPRAPPGPATPQQAHQLAYPESRVSPQLARPTPPNQPVVRDRPGNMLANWNPEDLPPSQKKEGVDWYAVFNPEVQRVLDVELVHHLVHDSVVCCVRFSRDGKYLATGCNRSAQIFDVTLGQNVAVLQDESVDKSGDLYIRSVCFSPDGKYLATGAEDKQIRVWDIATRTIKHIFSGHEQDIYSLDFAGNGRYIASGSGDKTVRLWDIAEGKLVYTLSIEDGVTTVAMSPDGLYVAAGSLDKTVRVWDTTTGYLVERLENPDGHKDSVYSVAFAPNGKELVSGSLDKTIKLWELNLPRQQYNSAGKGGKCHRTFEGHKDFVLSVCLTPDGHWVMSGSKDRGVQFWDPITGNAQMMLQGHKNSVISVAPSPTGNLFATGSGDMRARIWRYSAYTGR

SEQ ID NO: 31745 - protein, 462 aa, Aspergillus nidulans FGSC A4
MRGVQIFSGNSHPLLTETVCERLGTSPAKVELGKFSNGETNVNVGVSVRNQDVYIIQSGSEKINDSVMELLIMISACKGGSAKSITVAGVDHVITLDLHASQMQGFFSKPVDNLFAEPFIARWIRNNVPGWKEAVVVSKNAGGTKRVTSLADTLKLNFGIVTTDRRRQKPGPTLADSTVFFEALDQETTPLPKEQDPFIARTHIENPDALQSRESQADLNELDSLRPETPSGARRPSELEAVNEYTDVRVRDVITGRLVQGHLVDDDYPPSGPTSMAVSGDATPGQLPSQESEAIPDSMVDSVVSTTSSMPGDHALGGSFDAADSSDEEEGSTKRNVEQEKTITLVGDVRDRTVFLVDDMIDKSGSWIAAAETVVKRGGAKKVYCIATHGLFGDSSLEQLEACESINYIVVTNTFPISPQVARKSRKLIIIDISSLLSESIRRHHYGESDWAVCNLHDYEGR

SEQ ID NO: 31746 - protein, 412 aa, Aspergillus nidulans FGSC A4
MLVPVSLLALSLSSVAAAHSSHQTPLTGPLQKLWYNTLPGDGGTQADSVFSGISTFGRLPYFPCLASEEERFDIAFIGAPFDTGTSYRPGARFGPSGIRQGSRRLNLYGGYNVPLQANPFSNDLKVLDCGDIPVTSYASLSPMSIPEDVCADCRRYDNAWAIQQIEEGHNSLLMRKPYTSANEYGLSRAGKTLPRIITLGGDHTITLPLLRSINKAYGPVTVIHFDSHLDTWKPKVFGGSPSEVASINHGTYFYHAAMEGLLRNDTNIHAGIRTTLSGPSDYENDGYVGFEIVEAREIDTIGTEGIIKKIRDRVGNDPSTPIYLSIDIDTIDPAFAPATGTPETGGWSTRELRTLIRGLDGLNLIGADIVEVAPAYDTNAELTTMAAADVLYEVLTIMVKKGPLTVDERSDL

SEQ ID NO: 31747 - protein, 311 aa, Aspergillus nidulans FGSC A4
MGANNRYSYVETPLEMTPPSQRRPRLLPAQTDRDTHPTDDTPLAIEKTQHALQDTPCPDIRNHPANHAPLAHDIPEHASVQMHAEQNPDPPSSPGPLPVKTNPYTQNNEPNSQNISVAPDANPLQSPRLPYFPPPARAPTAPTPAPTDSVGYHQPGQISHPNQQIKGGGWSHNLCDCSSIGTCLLGIACPCILYGRTQHRLSRRSRKEDPTNMLGYETCNGSCTAMALLCGCQWLLAAIQHSRTRKAYAIQGSIASDCVRATCCTCCTLIQDEKEIRKREEERANASRAAGAALVSPYLAPGPMSYGPPQK

SEQ ID NO: 31748 - protein, 533 aa, Aspergillus nidulans FGSC A4
MPPKGASKPAARATTTSKKKTATTASTTKNSRGRAAATTKTTVKSTATRKTTKADEVGATKKTAAPAKKRRADAEDAETSRSTKRARVVKPAAAKPRPKVVINNAPTAKLNVYVCGEGSSGELGLGVGKNVIDVKRPRLNPHLLPDDVGVVQVAVGGMHCVALTHDNKVLTWGVNDQGALGRDTTWEGGYKDMDNRDSDSDSDSDSDDNPDLNPHECTPTAIPSSAFPHGTVIVEVAAGDSSSFALTDEGQVYGWGTFRSNDGILGFDAKTKVQTTPKLLPDLKKIKHLVCGDNHVLALNDKGAVLSWGSGQQNQLGRRIIERNKLNGLQPREFGLPKGIVHIGAGAFHSFAVHQSGKVFAWGLNSFGETGIRENAGDSEAAIVHPTVVDSLSKKNVTQICGGAHHSIAATQDGECLVWGRLDGYQTGLKIDTLPDDAVIKDERDRPRILIEPTAVPGIKAKAVAAGSDHSIAIDTSGRPWSWGFSATYQTGQGTQDDVEVATVIENTAVRGKSLNWAGGGGQFSVFTEPVEL

SEQ ID NO: 31749 - protein, 410 aa, Aspergillus nidulans FGSC A4
MSLSPEQIQLIKATVPVLQEHGTTITKVFYDNMLTAHPELKTVFNVSNKVHGHQPQALAGALFAYASYIDNLGVLSPAVERICHKHASLAIQPDGYQIVGKFLLEAMGQVLGDALTPPLLEAWAAAYWQLANIMIGKEAELYKSADGWTDFRDFRVARKEPESDVITSFYLEPVDGKPLPSFLPGQYVSIQVQVPQLNHAQCRQYSLSDQPKPTYYRISVRKDLGLDASDPSAPAHPGYVSNILHDNINVGDIVKLTHPYGDFHLTDAAASSPLVLISAGVGLTPMTSMVNTLRTAESNTRPVHFIHGAHTSASRAFQAHLQSLPNLKTTYFLTAPTESDKQGENYTYKGRVDLSKIADEDLFLGDKQTEYYICGPTAFMLDTQKALVARGVDQSRVHMELFGTGGVPAA

SEQ ID NO: 31750 - protein, 826 aa, Aspergillus nidulans FGSC A4
MTNPGSTDKIQNLMKSFLFRHRAVGFIDADGNGRLYPLVHGQGSYWHPSSACRLPDESDFWPAISPLCQREVTEWRMTGWLWFQSKQPGSLNWKEKIDGRIIPTGTGTRKSDWDSLANGVQCGLSESPINNVESNDTVDRNAVLDDHDAEKILPYEADDSPFPEFFSLRQPSVRISALVAQLVAYPIGCAWAKWMPLGWLNPDRRFNIKEHALITIMANVSFGSAAATQVIEAMVKFYHMPSQGGFQILLCITTQLFGFGVAGMVSRWLVEPATMIWPQVLSNAALLSTLHSKSNKVADGWTITRQKFFLLVFVGGALWYFLPGYLFTALSMFSFVCWIAPTNVVVNQLFGQKTGLGMSLLTLDWSQVVFANDSPLLVPFWAGLNVMGSFVLFFWILVPIIYYTNTWYSAYLPLLDSNTFDNTGRMYDTRRVMNINNGTVNVEAYRNYSPMFIPAGFAVTYGVAFANLTGIFVHTALYHGKDLLQQWSGRHKKDIHSRLMQSYTPVPWWWFGAVSLLMFILSIVNNEVWETRLPAWGVLLAFVLPIIYFIPVGIIKALTNITSNQLNLITEFIGGYAFLGKPVANMAFKFYGYVTVSQGLEFVADMKLAHYLHIAPRTLFFAQGLATLIGAIVQCGVTVFMLTRFEGICTPHADGGFTCPHGLVTFSSSLIWGALGPARNFSPGQIYGNLLWFFLAGPVVVIITYLLGRRWKAANYISWPVAFGAMSMVPPATGINFSSWWVVNVIFNGLVKRKRPAWWSKYNYVLSAALDSGVAVSTVVIFFCIMLPAGPLRWWGNEVFMRTADGRGTPWKTVPPHERFGPTTWE

SEQ ID NO: 31751 - protein, 114 aa, Elaeis guineensis
TGYAFVYFEDEHDAEDAIRGPDDIPFGYSRRRLSVKWSRQGERGPRHGFRSMTNMRPTKTLFVINFDPIRTRVRDIERHFEPYGKILNVQIRRNFAFVQFETQEEATKALECQI

SEQ ID NO: 31752 - protein, 248 aa, Azoarcus sp. CIB
MQMKATVPITVASLKVACSQCNLVELCLPFGMSESEIDRLDELVGARRKIKRQQNLYRAGDPFEAIYAIRAGSFKTDVLLEDGREQVTGFQMTGEMLGLDGISTETHSCNAIALEDSEVCVIAYSKLEELSRVVEGLQLQFHKVMSREIVRDHGVMTLLGSMRAEERLAAFLLNMSQRFTARGFSPAEFHLRMTREEIGSYLGLKLETVSRAFSKFQDDGLIAVQQKHIRILDIIGLKRLIQHPSPRP

SEQ ID NO: 31753 - protein, 250 aa, Salix discolor
MGRGRVQLKRIENKINRQVTFSKRRTGLLKKAHEISVLCDAEVALIVFSHKGKLFEYSTDDCMEKILERYERYSYEERQLAATDFDSPGNWTLEYNRLKAKVELLQRNHRNYLGEDLDSMSLKELQNLEQQIDTALKHIRARKNHLMSQSISELQRKEKAIQVQNNMLVKQIKEKEKKDKAVAQPALWDDQQNQGPHASSFLLSQPAGLPLPCLNIGGCYQEETDPEVRRNELDHALEPTYSFHLGGYGA

SEQ ID NO: 31754 - protein, 250 aa, Salix discolor
MGRGRVQLKRIENKINRQVTFSKRRTGLLKKAHEISVLCDAEVALIVFSHKGKLFEYSTDDCMEKILERYERYSYEERQLATTDFDSQGNWTLEYNRLKAKVELLQRNHRNYLGEDLDSMSLKELQNLEQQIDTALKHIRARKNHLMSQSISELQRKEKAIQVQNNMLVKQIKEKEKKDKAVAQPAPIWDDQQNQGPHASSFLLSQPAGLPLPCLNIGGCYQEEAPEVRRNELDHALEPTYSFHLGGYGA

SEQ ID NO: 31755 - protein, 589 aa, Aspergillus nidulans FGSC A4
MAAFEKTYRSTPINPPLYQDASPEAKNITYKKDWNYSLLDCCSPGSLCFLTCCLPCLTFGRTQARAQDPTLKSYSSINSECLIFTGLTLCWSQWIIQTIRRGEMRERHGISGSCCGDCCATFWCGCCTLVQEEKEMELRTRPELTGYQGGSLKTVCELIILSYPTAHIEGIQMRRNCRSMGSSPVLGVPGLHSLSQHLIRDERGAELCRQPSDACDSAPEQQADDSYTFISSNQTHFKPPKRRHARRNVTPMQVELQIPAPEPCAAVANKPFNFSATDMVLFHHLISSKDLGGSNRMAISQFTRLGFSFHYLLHLLLAISSFHLARHGGDDHLSQIAGHSGDYLAEGERHYSLAVGVVAAQIPSLGKENGLALYAAALLIFLCSVARGPQPLEYLAFRDDGQAGSLALFMGVRTVLETCTASFAIDASLMHAADHKEPSSDGEGKLNSWARNPTVLNEYSSELSQLSQILLTVPSNCDAASYHQAFEHLQCIYQSLYSPDSKLNELDLWPTIFGWLYTLPSPFLTALQCRESVSLVLFSFFLVLLKELDSAWFLRDWPEHILIGILHNLESSHQPFIRWPMEVLKCPSY

SEQ ID NO: 31756 - protein, 544 aa, Aspergillus nidulans FGSC A4
MASEGMAPFTPEYASYNWTGAPSDYSSLATNELGGNSRVENLNKWYQSGDQAYIIVASAMVMLMVPGLGFLYSGLARRKSALSMIWACMGSMCVVTFQWYFWGYSLAFSPTATNGYIGNLRNFGLMKVLADPSPGSPLVPNLLYAFYQMQFCAVTAAIIMGAVAERGRLLPAMVFTFVWATIVYCPIACWVWNVNGWAFNYGVLDYAGGGPVEICSGLSALAYSMVLGRRQERMMLNFRPHNVSLILLGTVFLWFGWLGFNGGSSFGANMRATMACWNTNLTAAFGAITWVILDWRLARKWSMVGWCSGTISGLVAATPASGFLPPWASVVLGIVTGIVCNYSTKVKYWIRIDDSMDVFAEHGVAGIVGLIFNAFFADDAIVGLDGVNTGSEMGGWLIHNWKQLYIQIAFIVAASAYSFVVSAIVAYAINAIPGLKLRASEEAELLGMDDDQLGEFAYDYVEVRRDYLAWTPQKHDQHADGHEVPAAARYGIGEHSEMMLDGEAPTGATNSRGSEVSGVQEINVKEESQRPAPPTDAEKAAQGL

SEQ ID NO: 31757 - protein, 430 aa, Aspergillus nidulans FGSC A4
MKLTWAGLWALAGTALCCSHHDEESVPQEVREELLKKWNQEWSFSGHASFAHLKPVKCLVEPDEKYDIAIIGAPFDTAVSYRPAGARFGPRAIRAASARQMAGTSYNTRAGINPYSSWATIKDCGDIPITPFDNGLAERQMYEAFLELGTRSPVTPASSEYGSKGISAGKSKLVTLGGDHSVALPALRALYQIYQKPITVLHFDAHLDTWNPVRYSAYWQSEQSAFNHGSFFHKASREGLICNSTSAHAGLRTRLTGIDDSDYTAPGTPEQGFMRIHADDIDELGGPMGVVNKIMERIGLDLDQPVYLSVDIDVLDPSTAPGTGTPEPGGWTTREFIRILRGIEKLNIVGADIVEVSPSYDNKGETTALAAAQVAYEIITSMVKNGAGKDLGGWYGRKESVTQESVPVVDAEAEVEAEVPEPESVLKDEL

SEQ ID NO: 31758 - protein, 369 aa, Aspergillus nidulans FGSC A4
MEYSPQYQQQHGQHPHPASHMTGAYPTAPQNPGSALGSMTSPTNPQTHIQQAHPTHQASPVVPSQSHYQQAQNAPGSMHQQMNFPQSYGVTTAMPPQPYGISPTQAAAMATAAASGQFYPTHGDSIAGQMAQGPRGSPRMAGVPVKTDRNPRSPPQIPGQMPPMGSQVPLTPTAQMQQRRMSHVGSPHVQNAQPVMNHVGRPSVPPPMPPPQHPVQQTQTSPDMMPSGAEESPLYVNAKQFHRILKRRVARQKLEEQLRLTSKGRKPYLHESRHNHAMRRPRGPGGRFLTADEVAAMEKKNAAGGQENADPNASKAVSDSSPASQKRKASDGNNENPNSAKKAKTGAQKASNNADESEAESGGPSDEDG

SEQ ID NO: 31759 - protein, 275 aa, Aspergillus nidulans FGSC A4
MSTLFEVTSEESFGPHLASIPSDTLIVLYFHAPWAAPCAQMRAVLSALASQYPATTPPTVSFISVNAEELPDISEEYDVTAVPYVVLLRNGQVLETISGSEATKVRDAVERYAGAGSAGASANGAASAIPPALTAVPREDVNTPTTATQAPVAGAASGAGAAPALTPEQSKEALFARLSELVKAAPVMLFMKGTPSAPQCGFSRQLVGILRERSVKYGFFNILADEDVRQGLKEFADWPTFPQLWVNGELVGGLDIVKEELENDPNFLDSFSINK

SEQ ID NO: 31760 - protein, 794 aa, Aspergillus nidulans FGSC A4
MEKDTPVRITSANDSVPSDDAPSAGLDTVEQLKHLKEHHHWDPNLPDEVVDEVNDALHATDKDRRQSIVASLLENSPYPEVRAAVPNIDEGGHSNTFRAWAIGMFLATVGSALNMLFSMRQPYIVIPSYVAQVVAYPIGVAWAKVMPHKTIRMFGMSVNLNPGPYSKKEHAIAVIMANATFGGGAAYATDVLLAQRAFYKQRFDWAFEIFMCISTQMLGFGMAGFFHRFLVTPAAMIWPSTLINSALFTALHDRSRPDPSKVSGWTIGRYRMFLYCLIGSFLWYWFPGYIAPFLSVFAWVTWIKPNNVVINQLFGGWTGLSLIPMTFDWTQISGFNFSPLIAPWHGIANTLLGMFIFFWVVTPALHYTGTHWAKYLPISDSNSYDNTGQVYNVTRILTPQMTLDKAKYEAYSPLFLSTTFSLAYGLSFATIIAVLIHAILFHGKDIWVRFRQIGHEDEDVHARLMARFKPVPLWWYGAITLIMIGMALGVTLGYPTNLSWWAFFIALIMGAVWFVPCGIIQASTNIQIGLNVITEFVIGYMQPGRPMAMMLFKTYGYISMYQGLYFCQDMKLGHYMKIPPRVTFAAQMISCLWSSIVQICVMNWALGAISSVCTLDQPNRYTCPNGRVFFNASIIWGTIGPARMFSPGQLYASLQWFWLAGAALPVAIYIAAKLLRNTKYARYVRLLNAPIIFGGSSFIPPATPLNYLSWGIIGFIFNKWIRDRWRGWWMQYNYVLSAGLDVGLALCTILIFLTLNLTNTEFPSWWGTNIAANTMDAAGTAVQVTEVKFGPESW

SEQ ID NO: 31761 - protein, 348 aa, Aspergillus nidulans FGSC A4
MSKPVILHLGDPIKYNPALYSTFSSHFTIVRPSLSELRRDEFKTALRENRFGSFHALFRPFWNTGGEMGRWDKELIDLLPKSVKIFASAGAGFDWVDTQYLAEKGILYCNGAAASSESVADMALFLILASFRNLAWSHSAAVSQNPRAFLDAHQNSPLTARNPRGHSLGIIGMGQIGFMIAKKVYAAFGMQILYHDIVRKSQDIERSVNATFFESLDDMLAESDCVIVATPFAGKTLLTAELFDKFKRGSRFVNIARGSLVDEGALVGALESGILMGVGMDVHADEPNVHPRLASHPKVMMMSHNAGGTVDTHIGFERLAMENILAFFKEGRAMTPVNAHLIKPKSVL

SEQ ID NO: 31762 - protein, 387 aa, Aspergillus nidulans FGSC A4
MDFLAVGLVSILSPVLAREITFPPIAAIQSDQFILGQHEKNIDIVSGSQFSGLTTFAHIPYVNCFIDSEAESTPYDIAMLGAPFDTGVTARPGARYGPGGIRLGSRRIQGWNIYTGQNVFESWAKLVDCGDAPLTWLDNTVALKQLDLAHKVLSFSLSVFSGNARLRLWQVISSRATNSTENGRTPRIVTLGGDHTTTLSALRSTYKHFGPVSVIHFDSHIGKLLLSMEHPLLIVVDTWEPEGLIRDNSIHVGIRGPVIRPKGDIRNDIRCGFSIIKARDLDRLGVAGVVEEIKTRVGNSKVYISVDIDVLDPAFAPAVATGTAEPGGFTTRELLSILDALRGLPVVGGDVVEVAPIYDTMAETTTLAAAEVAHSLLGLMIDTPVVD

SEQ ID NO: 31763 - protein, 695 aa, Aspergillus nidulans FGSC A4
MAQFTVRRGAEAQQNDKDICSSAFKACSKLTKPAQLHGAEELSAEKVQSPETEAYTEADSADESQYYFDSAEFKNIPDLVRTVVGFEDDPSLPVLTFRSILLSAISCTLGSIVSQLTYFRTTTAPFPVFFVIQASDPLDRFLARILPAYKVPLGRVSFSLNPGPWSPKEHAIVGIAANAGSRGQWANYAYQTRAHLYSGLHSPQWAYPVRATLIDDPEFIFPLSLQQVTLYRSMDTRNRTGKKRALDQMKVFWILLLATFVWQFLPEYLFPFVASLAPLCWIASRNHMVNFIGAGRGGMGLLNITLNWSNIASVVITYLYSVQAIICLAFVLTCWILIPIADSGKLWGSPAYDIMSNGVFQKNGSAYPFNDLSKLVRSLTIEAEDNREWAALTLVPIVMLFGIVVSKKIYMPIWTYFVALGFGAAAMLPMSFVYAMPGFSIKVGYLNELIYGYMIEAKGSSRHPLGQLAYRIISGNVWYDARTVLEDQKIGHYLHLPPRQVVGIQIIANMLALPVNYGVTRWVLATKFEYVSGQKTDPLVQWTGHEFQSYNTAGIQYALVGPKKLFASDFFRPILWGFLAGAVAPILMWLLHRRFPRARFDLWNTTIFFASAAVFYGNLSTGPFTTFLVGTFTNFYLFRYRRVFWNKWAYISGAATDTGFNANLLFIFIFLGSTGTKMVHWWGNNADSVERCFAL

SEQ ID NO: 31764 - protein, 580 aa, Aspergillus nidulans FGSC A4
MPEPSLSSSHHGSHHGSQRDEAILSQHLDPQYTAALHEEAILPDNGDGTASNATDVSEPQSSLLLQGGDMHRDLYRLDAKTKRARMDKRAATFSAAPRGSDLFEEAVAPLEPGSFRRNFIRQQGQDHPALHRSFLEYLDLYGNFAGEDLEESEEETEQGEEETQQEAERRPLLGTQRHRRSRSYRPGDASNVKTFFTLLKAFIGTGIIFLPKAFRNGGILFSSVALVTVALISTLCFHLLLECRRRYGGGYGDLGEQIAGSKLRSLILSSVAISQIGFVCACIIFTAENLRAFFVAIMPETVHSLSTLRLIVLQLVVLIPLTMIRNISKLGPIALLADAFILFGLGYIYCYDIASLASRGLAPRVDLFNSDSFTLTIGSCIFTFEGIGLILPIQSSMKKPQCFDNLLYTVMFIITVLFTGVGALSYATFGADTKTEIISNLPQNSRLVNTVQFLYSIAILVGTPIQLFPPVRIIEGNLFGSASGKRDPGIKWKKNSFRTVAVLACGVIAALGAGDLDKFVSLIGSFACVPLVYIYPAYLHWKGVAESPWAQRGDIAMMVLGFGFMVYTTAATVSVWVADS

SEQ ID NO: 31765 - protein, 469 aa, Aspergillus nidulans FGSC A4
MQTALQRDPNTGISILIVGGGIAGLSFAIEAHRKGHNVRVIERRSAGKTDGEIIAITGPALHTPHKWPGFMDKARKEAVPPGITMRKYDGTTIGTFPVGDPSNPSLPIYRSKLHRVLGEYAAQLGIEVELETSGFGYFEGESDAGVILADGRRLTADLVVAADGVGSLSWELVMGTKQPPVSSGFVLYRVTFPVGPALENPVVAREFEGYKNRAFLHAGPGAHMVSWYCNPLYIPNSQSVDDGADANGFYGVKEDNTTAAEDWAKNTSIDKALEAVEGWEPFVSELIKATPNRTLLDWKLMWRDPQPKWVSDGGRVVQIGDAAHPFLPTSASGGTMAMEDAFSLAACLKIAGKQDISTATKVHNHLRFERVSCAQKMGFKNRELYHKTDWDAVAKNPKIMGKMVGDWLLKHDPEKYAYENYEKCKNFLLHGEPFANTNAVPGYTYKPWTVKELLEASERGEAIVDEGKW

SEQ ID NO: 31766 - protein, 756 aa, Aspergillus nidulans FGSC A4
MVQSSHDRDDDVPVQFNPTEFGMTEEDLEAAKHRIDEVSDSQVREVVQNVLQFHRNDFNFPSAILHRFSEFSRTPEVSQSDRPETVLLRAQVRLLVALILTNSPYPEVRAIVGNKDDPQTPCSTIRSWAIGLLFVVGGSAVNQLFSIRQPPIGIAPMAIQLLSYPLGKAAEQLLPDVGFSFCGVRHSLNPGPFSPKEHLLITIMANVLPQYYGQSYASAFSYQVLLSLSSDLMGYGLAGLVRKFLVYPSFCLFPQCLTTLALTKALHGAFGPFRRTYNMSRSRFFMYAFVGMFCYAWFPGYLFERLSIFNWLSWISPSNVNLAAITGIQTGLGLNPFPTFDWNMVTAALDPLVVPLLATLNVFAGAIVSGVLIAIFWFTNIYWASYLPINTNRLFNRWGTAYNVSEILDSHALLDQARYEQYSTAFLAPSSLVRYAFFFATYSATISYSIFYHGQAIMAGFRNLVRKTGGVTASATDIHSRLMRTYKEGDHAISKQLADTQVANRLLHPVSEIWYAALNVLALTLAVVIITAWPTSTNVGVIFVAFCVSAAFLVPVGQIYALTGIAINLKGPMDARKSPFSQLFQAIRSTDVTAPFLTTRYTTLANALPFISDLKLAHYAKLPPWHTFSAQVIATVVSAVHWPSQDVWPWRSLLGFTRCVPDRSHPASDTLLRTTTIILLAAHKSSDAAARGNHLVAAFSSAIAIASLLIYFSLQSNNIELPWWGNYADSGCEEHACTRLSLTGEEYFGPREGEWA

SEQ ID NO: 31767 - protein, 580 aa, Aspergillus nidulans FGSC A4
METTTTTLAEYLFKRLHQLGVDSIFGLPGDYNLQLLDYVAPSRLHWIGSCNELNAGYAADAYSRVKGIGALVTTFGVGELSAVNAIAGAYAERAPVVHVVGTPVRESQESRALIHHTFNDGEYKRFDRMQEHITVAQAILTDHRSAPAEIDRVLQQCLLHSRPVRIAIPLDMVSLRVPKMALEHKICVPLPCRQPQLEDKALKAILDRMYSAKKPVILVDGEVRSAKIMEEVEHIVKSTEWPTFTSGFGKSLVDETLPNVYGVFTPRYKDFIDSSDLVLCFGPHFSNTNSYLYQTVPQQHKTIFFHPTSVQIDSEIIRDLPANHFLPQLIGHLEVAKLNRYTCNFDHPSSVAPPDVQASDLVTQAGGFWHRMSSFFQEGDIILAETGTASYGANEFRLPPKTRLFKAVTWLSIGYMLPATLGASLAQHDLIARSEYHDFLEARSILFIGDGSFQLTAQELATIIHRKLNVIIFLINNDGYTIERAIHGRNQGYNNITPWRYLKGLEFFGAPTEGEYAAHTWQVRTWGDLEKVLTDERMIKGKGVRMVEVFMDRLDVPPPLDRILEMQIERENGVQCDKPQ

SEQ ID NO: 31768 - protein, 474 aa, Aspergillus nidulans FGSC A4
MADKKRQLLIISNRLPLSLQKVDGKYESTLSSGGLVTALSGVSKSTNVRWFGWPGSNIEDPEERKTANEALAENNAVGIFLDEALAHSHYNVFSNGIAWPILHYQSGVDFNEDAWKSYKKVNEIFADSVAESASDGDLIWIHDYHLLLLPAYLRDRLEKQGKKCPIGFTLHTPFPAEDFWRALPVQKELLAGVLACDLIGFHTDEYKRNFIECCSRGLDVSVKDDSIVYQGHTARTGTFVVGVDPAKFTDGLQTTEVKNRIKELEDEYKHKTVILGVDRLDYTKGLVQKLQGYDYFLRQHPELKNKVRLIQVAIPSREDVKEYQELERELSMLVGKINGEHSTPDGTPIIYLHHSVPFTDLTALYRIADICLITSRRDGMNLVAAEYVACQKDRFGVLVLSELAGAASFMSKGSITFNPSSAQQLADAVYKAATMSPEEKKQGYLQLEEFITNNTRYAPHLPTSSAQQLWYTDQ

SEQ ID NO: 31769 - protein, 310 aa, Aspergillus nidulans FGSC A4
MPPSIDAYTPLEVVEFVSRAGSVKGHMRLDKIFLSSLSAGCLLALACGTTLSTNASPWFTENAPGLIRTISALVFPYGLVLIILTGADLCTGSFMFTTVAALHRRLSWPKMLLHWFITFWGNLCGSLFVVAIIFGYGEVFSADPFRSAVISFATKKQVTPEFHSIFLRGIGCNWLVCLACFLGLQGRDMASKIIGIWLPIYAFVSLGFDHVVANMTFIPLAIWLDAPGISVGLYIWKGIIPTLLGNIVGGGLFVGTYYWYMYLLQTNPVTLTGLRKTKAGESEGTVTPRQDDVEANAGTVQGVEGSKMGG

SEQ ID NO: 31770 - protein, 1413 aa, Aspergillus nidulans FGSC A4
MADLKPPFTEEAARAKVKIAQNLWNAQDPVRVSQAYTPGCIWRNRTSFFSGTEAIVDFLTAKWKRERNYRLRKELFSFTDNRIAVQFWYEFQDANDSMRWKRCYGLEDWTFDRESGKMCKRMMSGNDILLGPDGNGEGRCDYRLLTQRWDHPTYHPYNRNRRLQQLDLNHFCRARISLAMEETSPFPDSKTMRSPLTDASNRINNCHTPTTERRLMREEHALTSPVPMSIVDSPLSPRNNAENNGPPPVGDSRACSKRNSAVSAASIVSAKGKRKTHVGPWQLGRTLGSGATGRVRLAKHAVTGQTAAVKIVSKKCAAISQSDSIAAMDRNAGTFIGAGGRQMPSGIEREVVIMKLIEHPNVISLYDVWENRGELYLVLEYVEGGELFDYVSNHGPLPEEEAVRLFRQIIAGLGYCHRFNICHRDLKPENILLDGEHNIKLADFGMAALQPAGHWLNTSCGSPHYAAPEIIYGRKYRGDKADLWSCGIILFALLTGFLPFDGEDLHATLQLVRKGDYMIPPHVSAEAADLIQRILQKKPDDRISMKDIWKHPLLKKYEKFHQAICNHYLGPPPPLSPQDCGPPVVRQDIDVDLLRNLQTLWHDVKPERLIEKLISLEPTQERLFYHALVKFRNEQLENYEGQPLRYSTSDYHHISRGQARLSKHLRSRSQNGSQRRSRAPSVKETGKRRPSTRELKPSASVETYDPYRSPFNRVPDKSPQYAHVTIHREAPETSPKPAEVEVDSSNPFLDDEQEIECQQSPPFTLVRKRKQNFNSVKSFQSKTSLISSRRALNSASTPRSVSYKRNVTFHHNRNRSQSSASAKAKRAHCNRQPSEASLISGFDDDPFSDSRSSSLLPAQPAVVRGAGIAVKNSVQRRVQHSDFVWRDEARKVSHELSQICEEAFNGSSLSTGCTDTTCVSPETPATSVSLASPGVSNHQMDSSSSTVCLAATPPADSPKTSHVRRELEETRRRLIEHSMKDGSKEIPQCLAPVIDHLDRLIEQEKTRRPGKVSTKEDYSSMSDLFCGSPVEPTQLSVLSEELNTGRRSDDTPSSKKDRQVSGSTAASSQISRGKRSIRMVPHSSYQSISNTEPRAVHRPAAALIDRPENDRGNALASRVGSNHRHNRTPCELDPIDEHPASPRRSAVRSTDHKKWSWFRKSQNIEEDFVKAPTVVKPLHPSSATVIVHEVHPARNTAENQPKLGKPPSDSQKVSFWSFIKRKKGKNADPESTATNPVLESRRDDERQRAHPGPKLSENKTATKPRRSIRSSGISNNWFARVFQFKPATRVVALNASKIKGRKEIYKMLRDWKQYGMEDIYLDKPNSIIYGRVGESNFLHLRPVDFSADFYTVIEDGRQANLSVVRFRQERGAASSFNRVVDTLCMVMKQRGLLVEDPARAKRMAQVLDAFPNA

SEQ ID NO: 31771 - protein, 693 aa, Aspergillus nidulans FGSC A4
MCGISAVLSLSEGSICPQALASQMNESLQLIKHRGPDARGQWLSSDYRVGLGHARLSVIDLNPAGNQPFHDPEGTVHAVVNGEIYDHKKYRAKLAHQYEFRSNSDCEIVTALYRHYGISFLNKLRGEFALVLWDAKRKLFLAARDRYGIKSLYYTVVNNRLLVATEIKSFLPFGWQPEWSIENLLRKGWLWDTEMYFKGVHRLEPGQYMVSQNYKFPVVKTYWDMDYPDKRTPFPQTEEQIVLELRKRMLESVRLRLRADVGVGFYLSGGLDSSAIAGMAKYLIQQGEPLGNDSSGDISKMSCYTIRFGEGSGVDESGIKDTFVPEVSDRRLTKSELYPVTLTEEDIASRFEDTVWYTETPIPDVNGMGRVAVGELAHSHGKKVILTGEGSDEHFGGYPDMLSKMFVEPDLSWHPPPFKMPNSSKVFEAGREAVPAAVESLASTKRMLNNSSIFARVDSFYMFPLASATVESEEPDPETAFAESLGAQTLSNISENWHPLNSASYQWTKSILANYILRYIGDGADMVYQIETRPPFLDHHVTEYANRIPPSLKIRYDPVKNDLREKYILREAMRPFITDEVMNRTKRAYLGPSNYREDGPLHRVVKSLLTEDNVNKLGFVDWDRLQEHIVKGFRDGDPRYFRSSLFVAQLVVLSQRFGVKVATTTDALPVTSEILDRTQNNDNMTTVQDRSRL

SEQ ID NO: 31772 - protein, 525 aa, Aspergillus nidulans FGSC A4
MNGQLQSNPDILSTLKDIPSASHNGNWVVQKFGGTSVGKFAHNIIDQVVLPSLSHNKVAVVCSARSSSTKAEGTTNRLLRAARDAENSQSKQYLSFVEAVRLEHVDVVESQINSAELRTQLTSAINAECERVLKVLEAAQTLGEISARCVDKVISTGEKLSCRLMAAFLQDRGVDSEYVDLSEIVDFHISGQGLDQEFYDNLAAALGRKVHACENKVPVITGYFGTIPGGLLDQIGRGYTDLCAALVAVGVQAGELQVWKEVDGIFTADPRKVPTARLLPAITPAEAAELTFYGSEVIHPFTMEQVIRAKIPIRIKNVMNPKGDGTVIFPDSTYELERTTPGHDPRLFRTRSPSLLQRPKRPTAVTIKHNILVINVHSNKRSLSHGFFAGIFSVLDRWKLSIDLISTSEVHVSMALHSERPLLNGVGRDEYQIIDEDLKGALSDLQRYGTVDIIPGMAILSLVGKQMKNMVGVAGRMFSTLGENNVNIEMISQGASEINISCVIEERDADRALNIIHTSLFTFLD

SEQ ID NO: 31773 - protein, 628 aa, Aspergillus nidulans FGSC A4
MTEALAEATAKLVLDEETGEMVSKNELKKRTQKRAKKAAAAAAKANQAQKPATPKPKTEVKPAEETPLDPDAMFKQGFLANVFRERPMKPVLTRFPPEPNGYLHLGHCKAIAVNFGFARYHGGETILRFDDTNPEAEEEKYFTAIEDIIQWLGFKPARITHSSDHFQKLYEHAEKLIQLGKAYVCHCSDTEIKLQRGGENHGARYRCKDAEQDVETNLKKFRDMKDGKYEPQTAFLRMRQDIDNPNPQMWDLAAYRVLKKEHHKAPGWVIFPTYDFAHCLCDSFEGITHSLCTTEFVLSRESYEWLNSTLGVYEPMQREYGRLNVSGTIMSKRGLKKLVDGGYVRAWDDPRLYTVIALRRRGVPPEAILSFVNELGVTTANSVINIARFEQSIRTYLESRVPRLMLVLDPLPVVIEDFDTLSAEQLNLDIPFSPKDPAMGSHQVGFTKTVYIDRSDFREEDAKGYFRLAPGKSVGLWKAPYPIKATTFTKDADGKITEVRAVLDKDGGKPKTYIHWVPEGSRKLEVRIHDQLFKSDEPAAAEGGFLADINPNSETIYADAMIESGFDEVRRRAPWPEAAGETSEGTPRPETVRFQGMRVAYFAMDSDSTDSHVVLNRIVSLKQDTGKA

SEQ ID NO: 31774 - protein, 347 aa, Aspergillus nidulans FGSC A4
MKSADRFSPVKMEDAFANSLPTTPSLEVPVLTVSPADTSLQTKNVVAQTKPEEKKPAKKRKSWGQELPVPKTNLPPRKRAKTEDEKEQRRIERVLRNRAAAQTSRERKRLEMEKLESEKIDMEQQNQFLLQRLAQMEAENNRLSQQVAQLSAEVRGSRHSTPTSSSPASVSPTLTPTLFKQEGDEVPLDRIPFPTPSVTDYSPTLKPSSLADDVVRPAVSVGGLEGDESALTLFDLGASIKHEPTHDLTAPLSDDDFRRLFNGDSSLESDSSLLEDGFAFDVLDSGDLSAFPFDSMVDFDTEPVTLEDLEQTNGLSDSASCKAASLQPSHGASTSRCDGQGIAAGSA

SEQ ID NO: 31775 - protein, 400 aa, Nicotiana tabacum
MNFKNFADTPQTESNSGMSMGSGNFPLARQYSVCSLTFDELQSTCGLGKDLGSMNLEDLLKNIWTAEESQVVASSAGVGNLQREGSLTLPRTLSQKTVDELWRDFQKETTVSSKDVSGTEWPNLGQRQSTLGEMTLEEFLVRAGVVREDMQPTGSSTDVRFTGGLSQPSTNNNGLNIAFQQPTQTPGLLSNQFEDNNMLNVVSATSSQQILNVAFTSPMQLGTNVQLANAGAREPAVSMSSPSVNTSTIVQGSVMQGGTKGLAGLRNGVTPAKRGSPGNQLSPDMMSKKVLDRSSLSPSPYAFIEGGKGRRPCNSLEKVVERRRKRMIKNRESAARSRARKQAYTLELEAEVEKLKEINKELHKKQAEFIEMQKNQLMEKMNMPWGNKLRCLRRTLTGPW

SEQ ID NO: 31776 - protein, 258 aa, Jatropha curcas
MESKNRKWLQERSNSTGNNLNQNSNTAETRYRGVRKRPWGRYAAEIRDPGKKTRVWLGTFDTAEEAARAYDAAAREFRGSKAKTNFPTVTELNNAAAAAVAAGAVTVARSPSQSSTVESSSPTPPRAASPPPPLDLTLNIPSHQHHHLRHGHFPTGVIFPGGAWISLAAEAHPVFFFDAFSVQGESNNNNKNNIINNNKIHSKNINLCRLDRTVMVSSGVHSDSDSSSVVVDYDHDRSPCNKGLSLDLDLNFPPAEVA

SEQ ID NO: 31777 - protein, 126 aa, uncultured bacterium
RQLYSRDDLKNDESFGFKTIHCDEFQSEGVDKIVQRIRKRVGDNPLYLSIDIDVLDPAYAPGTGTPEIAGMSTREMVNVIRGLSGMKLISADVVEVSPAYDHAEVTSLAAATIIYEITNLFAKVKG

SEQ ID NO: 31778 - protein, 432 aa, Crocosphaera watsonii WH 8501
MAVKIGLLGLGTVGTGTAQILLDPTGRNPLLEEITISKVGVRSPDKPRQVELSEGVITTDLESIVNDPEIAIVVELLGGLEPARSLILQAIANKKHVVTANKAVIARYGDEIYEAANEAGVYVLLEAAVGGGIPIIKPLKQSLGANRIVSIIGIINGTTNYILTKMTSDGADFGEVLAEAQQLGYAEADPTADVDGLDAADKIAILASLGFAGRVKREDIYCEGIREISATDITYAEQLGFVIKLLAIAQGTEGENSQQLELRVHPTLVPKNHPLASINGVYNAVLVEGKPLGQVMFFGPGAGAGPTASAVVSDIMNIVAILKSSGTNNNLDPLLSCVHQHFCQITPIEAINTRFYARFLTKDLPGVIGYLGTTFGDHQVSLESVVQIGFQGELAEIVVVTHYVREGNFNTALDEIRNLEAIDSIPSIVRVL

SEQ ID NO: 31779 - protein, 496 aa, Crocosphaera watsonii WH 8501
MVSTRTKKDVPIWQPLKVIARSFSPYWIACIPLAAIITIVWNKAVVAESVELITAEGNSEAIAQLQGTLNAIWVLIAAILVIFMNAGFGMLETGFCRQKNAVNILSKNLIVFALATLAYWAIGYSLMFGGPENPFIGFGGWFLSGEPATYGLDPFPAGLPISVAFLFQAAFAGTAATIVSGAVAERIKFTDFIIFSLLLVGISYPITGHWVWTGNGWLGSIGFSDFAGSTVVHSVGGWAALMGAAILGPRMGKYVEGRPQAIPGHNMSIATLGCLILWIGWFGFNPGSQLAADEAVPYIAVTTNLAAAAGGVAATFVAWFKDGKPDLSMIINGILAGLVGITAGCDGVSYFGAVIIGAVAGVIVVYSVSMIDSLLKIDDPVGAVSVHLVNGIWGTLAVGLFNTESGLFYGGGFAQLGSQIVGIVAIGAFTAIFSGIVWTVLKSTMGIRVSPEEELEGLDVGEHGMEAYAGFLKETDTFSGSGSSTADEDVTTGAGI

SEQ ID NO: 31780 - protein, 480 aa, Crocosphaera watsonii WH 8501
MTISFENLGLSDARVNKLQRLGFESPTEIQEKAIPLILESNDILGQSQTGTGKTAAYSLPILEQIDTKNPNVQTLILTPTRELAQQVAEALKDFSTERRLYILTVYGGQSIERQIRSLERGVQIVVGTPGRVIDLLERKKLVLDCLRWAVLDEADEMLSMGFIDDVKTILRKTPETRNTACFSATMPREIRDLVNQFLKSPVTVSVERKQAAPTHIDQHLYYVPRGWSKRKALQPILEMEDPESAIIFVRTKQTASELTTRLQEIGHSVDEYHGNLSQSQRERLVYRFRDGKIKLVVATDIAARGLDVENLSHVINYDLPDNSETYIHRIGRTGRAGKTGTAISLIEPVDRRMVRQIERKLRQKLETCKIPSRSQVEAKRIEKLQNEIKESLAGERMASFLPLVRELSDEYDPQAIAAAALQMIYDQDCPEWMKTDWEVPESAVPKPVIKRKGKYNPNNSKRHGNSNRGNRKKVIHPQTR

SEQ ID NO: 31781 - protein, 639 aa, Crocosphaera watsonii WH 8501
MGKVVGIDLGTTNSCVAVMEGGKPTVIANAEGFRTTPSVVAYAKNGDRLVGQIAKRQGVMNPDNTFYSVKRFIGRKHEEVTNEATEVSYKVLRDSNANVKLDCPAQSKQFAPEEISAQVLRKLVEDASKYLGETVTEAVITVPAYFNDSQRQATKDAGKIAGIEVKRIINEPTAASLAYGLDKKSNETILVFDLGGGTFDVSILEVGDGVFEVLATSGDTHLGGDDFDKKIVDFLAGEFQKNEGIDLRKDKQALQRLTEAAEKAKIELSSVTQSEINLPFITATQEGPKHLDTTLTRAQFEELCSDLIDRSRIPVEKSMKDAKLSNSDIDEVVLVGGSTRIPAVQELVQKILNKEPNKGVNPDEVVAMGAAIQGGVLAGEVKDILLLDVTPLSLGVETLGGVMTKIIPRNTTIPTKKSEVFSTAVDGQSNVEIHVLQGEREMANDNKDLGLFRLDGIPAAPRGVPQIEVTFDIDANGILNVTAKDKGTGKEQSISITGASTLPDNEVDRMVKEAEANANEDKERREKIDRKNQADSLVYQADKQLSELGDKIPEADKTKAEGLIKDLKDAIAQDDDDKIKSLTEELQQLLYSIGSSVYQQAGGAPGEAPGADAGTPPGGGTSSGGDDVIDAEFSESDPK

SEQ ID NO: 31782 - protein, 162 aa, Crocosphaera watsonii WH 8501
MSHNNSIGNYLIQRLLELGVNHVFGVPGDFVLGFNKLLENSDLEFINTCDEQGAGFAADAYARLRGLGVVCVTYCVGGLKIANTTAQCFAEKSPVVVISGSPGINERIKNPLLHHKVKEFDTQYKGFQEITVAATVLDNPDTAQVNRTIIHDYTSSFPQFGD

SEQ ID NO: 31783 - protein, 525 aa, Crocosphaera watsonii WH 8501
MAKVLVSDPIDQVGVEILSQVAQVDVKTGLPPEELVKIIPEYDAMMLRSGTRVTKEIIEAATQLKIIGRAGVGVDNIDVQAATRQGIVVVNSPEGNTIAAAEHALAMMLSLSRHIPEANQSVKNDKWERKRFIGAEVYKKTLGVVGLGKIGSHVANVAKSMGMKLLAYDPFISKERADQLGCTLVDLDLLFAESDYITLHIPKTKETTHIINKESLSKMKPNARIINCARGGTIDESALAEAIAEGKIAGAALDVFEEEPLKESKLREHENIILTPHLGASTAEAQVNVAVDVAEQIRDVLLGLPARSAVNIPGLTPDVMEKMRPYLQLAETLGNLVGQLAGGRIERLTVRLQGELASTKGQPIVVASIKGLLSQALRERVNYVNAAIEAKERGIRIIETHDASIRDYSDSLHLAAQGSLGEHSVTGALLSDGEIRITDVDGFPINVPPSNYMLFTVHRDMPGIIGKIGSLLGSFNVNIASMQVGRKIVRGDAVMALSLDDPLPEGLLNEITKVDGIRDAYTVKL

SEQ ID NO: 31784 - protein, 1551 aa, Crocosphaera watsonii WH 8501
MDERTIMNMNQNTPNQPNVTYMGIPSLVEERDACGVGFIADVKGKGSHKLIQQTLTALSCMEHRGGCSADNDSGDGSGVMTAIPRELLSPWFSEKGLTMPPVEQLGVGMVFLPQDSSNREEDRSHVESVVKDANLTVLGWREVPVNPDILGVQAKENQPRIEQIMVTSPDGLSGDELDRVLYIVRSQIGKRLADNFYICSFSCRTIVYKGMVRSEVLGEFYQDLSDPNYISRFAVYHRRFSTNTMPKWPLAQPMRLLGHNGEINTLIGNINSMATREVKLNAPGWKPEELTALTPIVNTANSDSYNLDSALELLVRTGCSPLEAAMILVPEAYKNQLNLRDYPEITDFYDYYSGFQEPWDGPALLAFSDGKMVGACLDRNGLRPARYCITKDDYVVVGSEAGVVDLPAADIIEKGKLGPGQTIAVDLTSQEVLKNWQIKQRIAKKHPYGEWLQTHRQQLTHETFSHTLLLNDAKQLLQQQTAFGYTAEDLDMIVVPMAIQGKEPTFCMGDDIPLAVLSDKPHLLYDYFKQRFAQVTNPPIDPLRESLVMSLEMLLGSKGNLLDPQAEDAKLIKIDSPVLNETELQRIKNADFNTTELSTLFDITSGPDGLKVALEKLCQQATEAVEKGAKILILSDRVGANGRSTLEGNINETSSYIPPLLAVGTVHHHLIKQGLRLETSLVVDTAQCWSTHHFACLVGYGASAVCPYLTLETIRQSNKLEDISIPKALDNYRHAVEAGLLKILSKMGISLLASYHGAQIFEAIGLGMELVDTAFKGTTSRVGGLNIAELAQEVITVHSKAFPNLTDKRLTNYGFINSRSKGEYHMNTPKMSKHLHKAVKAYKIGQNGANKEAYDHYEHYKKYLEERPVTALRDLLDFNPDRPSIALEEVEPVEDIVKRFCTGGMSLGALSREAHETLAIAMNRLGGKSNSGEGGEDPTRFNVLSDVDSEGHSPTFPHLNGLRNGDSVSSAIKQIASGRFGVTPEYLMNGKQLEIKMAQGAKPGEGGQLPGKKVSPYIAMLRRSKAGVTLISPPPHHDIYSIEDLAQLIFDLHQINPSAKVSVKLVAEIGIGTIAAGVAKANADIIQISGHDGGTGASPLSSIKHAGCPWELGVTEVHRMLMENKLRDRVILRADGGLKTGWDVIMAALMGAEQYGFGSIAMIAEGCIMARICHTNQCPVGVATQMERLRERFTGIPENVVNFFYFIAEEVRSILAKLGYRSLDEVVGRTDLLKMRSEVNLTKTQSLNLDCLLNLPDVKSDRSWLNHQDVHSNGPVLDDQLLADAAISSAINTHGTIAKNVKIVNTDRTVGARISGVLAKKYGNTGFSGELTFNFTGAAGQSFAAFNLPGMIMHLEGEANDYVCKGMHGGEVVIVPPKNSIFEAADNVIVGNTCLYGSTGGVLYANGRAGERFGVRNSMGKAVIEGAGDHCCEYMTGGVIVVLGSVGRNVGAGMTGGIGYFLDEDYSFPEKVNPENVDIQHICTEAGEAQLKELIEAHFERTGSKKAEHILNNWGEYVSKFWQVVPPSEANSPETNPNPVMIEEKTLTPAK

SEQ ID NO: 31785 - protein, 619 aa, Crocosphaera watsonii WH 8501
MVSSIAKITPFLAETPQRCTGAYALIDSLVRHGVKHIFGYPGGAILPIYDELYRAEARGELQHFLVRHEQGASHAADGYARATGKVGVCFGTSGPGATNLVTGIATAHLDSIPMVVVTGQVGRAAIGSDAFQETDIFGITLPIVKHSYVVRYAQDMAGIVAEAFHIASTGRPGPVLIDVPKDVGLEECDYIPVEPGQVKLPGYHPTVKGNPRQVNGALSLIETSQRPLLYVGGGAIAANAHVQIQEFAERFQIPVTTTLMGLGSFDEHHPLSVGMLGMHGTAYANFAVSECDLLIAVGARFDDRVTGKLDEFASRARVIHIDIDPAEVGKNRRPDVPIVGDVAQVLEQLLQRSREIDVPLDPQKTEAWLHRINRWRQQYPLVAPHYDGTISPQEVIAEIAQQAPHAYYTTDVGQHQMWAAQFLNNGPRRWISSAGLGTMGYGMPAAMGAKVALPEEEVICISGDASFQMNLQELATLSQYGIAAKTVIINNGWQGMVRQWQQAFFGERYSSSNMQSGMPDFELLAKAFGIKGITVTEHSQLSGAIAEMLAHDGPVLMDVHVKKDENCYPMVAPGKSNAQMLGLPELKPTIFMKELTRCTSCGVDNPVTNKFCPECGAKV

SEQ ID NO: 31786 - protein, 243 aa, Crocosphaera watsonii WH 8501
METQKEKILVVDDEASIRRILETRLSMIGYDVVTAADGEEALDIFHEAIPDLVVLDVMMPKLDGYGVCQELRKESDIPIIMLTALGDVADRITGLELGADDYVVKPFSPKELEARIRSVLRRVEKNGAPGIPSSGVIAIASIKIDTNKRQVYKGDERIRLTGMEFSLLELLVSRSGEPFSRSEILQEVWGYTPERHVDTRVVDVHISRLRAKLEDDPSNPELILTARGTGYLFQRILEPGEEP

SEQ ID NO: 31787 - protein, 232 aa, Crocosphaera watsonii WH 8501
MKKILGMMLSLALVAVPLKSVAEPILQRIERTGTIRAGAWKDAKPFGYVNEKGEWVGYSIDIMRVIQSQVETALDKPIKLELVEVDTQNFLDHVRDRKVDISCGPTSFTWNRERYIDFSISYFVTGTQVLVKKGVTIDSVEELKTKRIGLEANTTNEAVLKTLAPDLQVIVVNSRSDGFAKLQQGVIDGYAGDGILLEALKPRFRTSKCSIKKYIVLKSPKIIPGQEYFSFH

SEQ ID NO: 31788 - protein, 484 aa, Crocosphaera watsonii WH 8501
MVDQIGIIITFIFFLLLFTGVGTYSATQKKATTTDYLLASRSVNPWLTALSAMATGQSGLLFIGQVGFAYKMGISTIWLTIGWAIGDYLAWWLVFKPLREQSEATASDTVSAFLAQNIKGYRLISLISALITLAFLGSYAAAQLVAGSKALNSVFGWNYNLGIIIGAIIVVIYCFSGGIRASIWTDALQGILMLGSLLLLLVVAVIKCGGLSSLWQSLDSIDPNLVSFSSQSLPLGFIPFLIGWMVAGFGVVGQPHIMVRAMAIDSAKNLGFARNLKTSLGLTNSFSALGIGLTARVLLPELGSSGDPELALPYLSLELLPVFLVGLILAGLFSATMSTADSQILSCSAALTQDIFPQMSKSYNFAKIGTLSVTAIVLVIALAGDNNVFALVTFSWSILASGLGPLLLVKVWQQPVNTATAIAMMIIGITTALTWKLLLNLSGAIYEVLPGMVAGIAVYGVYRLFFGEQANPPSSPQGGKGNRE

SEQ ID NO: 31789 - protein, 189 aa, Crocosphaera watsonii WH 8501
MTTTLTPYTQLQKALFLDRDGVVIKYVPYLSKVEQVELPLGAGEALKRWQDAGYLLIIITNQAGVGRGYYTLEDVEKVHNHIIEEYGKFGVTFTDIFICPHHPQDNCLCRKPAPKMIIDASKKHGVSLSQSLCVGDAPSDVQCAINAECQPVLVLTGRGKETLQNIAQYSRKVEIFDSLQDTVKLIPSP

SEQ ID NO: 31790 - protein, 297 aa, Crocosphaera watsonii WH 8501
MTEKLAFIGLGLMGGFMAANLAKKGFAVNGWNRTPNRPGITIAQGAGATICPSIETAVREAEVIFTCVGDVPDVNEVIFEDKGIINYAKPGSLIVDFSTIGTQAARDIGTQLKAQQFRFLDAPISGGDIGAKQGSLTIMVGGEKKDFDECLPYFEAMGKNIIYCGSTGNGQAVKMCNQALCAVHMVALCEALKMAEKQDIDPNLMIEVCSTGAAGSWALGNLGPKMTESDLEPGFAIKHLLKDLRLVQEIMAQSEYQLPGVTLAENFLKVVANLDNGEGKEQGTQAMIRYYNQEKNA

SEQ ID NO: 31791 - protein, 324 aa, Crocosphaera watsonii WH 8501
MINQVKPQQIKQLSILEDDNYQDGLKPSPVLKWAGGKTQLLPEIKKQYPQQLQQGKIKTYIEPFFGGGAVFFDIYHNFEIEQAYLFDKNIELIILYKVIQNDVNALIEELSILESKYLTLDTENRKEFYYQLRDDYNTFDKQTDANNYRQEWINRAAYTIFLNKTCFNGLYRVNSKGYFNVPMGRYKKPKILNQDNLIAVHESFKIVEIQHTDFAEVLNYADESTFIYYDPPYRPISETSNFNSYSSLEFNDDEQKRLRDVFTKTSKQGALQILSNSDPTNYIDDPFFDELYQDFNISRILASRMINSKGKKRGKIREILVNNY

SEQ ID NO: 31792 - protein, 373 aa, Crocosphaera watsonii WH 8501
MPTKTTKITPVTTKLNSLFVSPTQVIQGEGIISQAGKGISRLGKRPLLVGGKQTLELISAHLKPIFKQFKLTAAFDSYAPDCSETSLKNLTEATQNHQADLIIGVGGGKALDTAKLLAYQQQLPIVTIPTSGATCAAWTALSNVYSNQGAFQYDVPLSRCPDLLILDYNLIKAAPKRTLVAGIGDAIAKWYEASVSSGQSEATLTIAAVQQARVLRDILLQKSVKALDKIGGEDWREVVNATVLLAGVIGGLGGANCRTVAAHAVHNGLTHIPAAHHALHGEKVAYGILVQLRLEEMIQGNKLAATSRQQLLKFYEEIGLPRSLEDLGLSQVTLEELRQAAIVTCHPNSDIHRLPFKVSPEQLLSAMVSTVGA

SEQ ID NO: 31793 - protein, 350 aa, Crocosphaera watsonii WH 8501
MFNKPYFILIALLLTMPLTACGGGSQTSDNPTPTSSSRLDTIKQRGTLICGVNGEVPGFSFVDENGQYSGLDVDVCRAIAAALFDDPEKVEYRKLSAQERFPAVQSGEVDVLNRNTTWTISRDTTNGMEFAPTIFYDGQGIMVTTASGVTDIQGLAGKSICVLAGTTTEQNLADQMRKKGITDYNPVTFDDVDALYAAYQQGRCEGVTADRSQLVARRSILPNSNDHNILNVVLSKEPLGPAVKNNDSDWFDAVKWITFSLIQAEEFGINSENLATFEKSEDPNIRRFLGLDDKLGEGIGLPNDFASRVVKHVGNYGEVYDRNIGKPLGLERGPNQLWTEGGLLYSPPFR

SEQ ID NO: 31794 - protein, 128 aa, Crocosphaera watsonii WH 8501
MSYAIIEAGGTQLRVEPGRFYDLNRLTANEDGSYVIDKVLLINNDDEVTIGQPFIEGATVEGTVMEERRGRKIIVYKMRPKKKTRKKRGHRQELSRLMINSISVNGSVIVDTAPDTTPETTPDTTEGE

SEQ ID NO: 31795 - protein, 636 aa, Crocosphaera watsonii WH 8501
MKDICSLTSRQNQTQTTIQEKQRDLTRPQHSRQRRFKGWGKLITSTLFLQLLLMAGPSWGQDKEEEYSYGQLLNDIDAGKVTLVEIDPRLQRAKVTLRGQEEPREVRLLQQNPELINSLKANDVKIDYNPSPDNSAMVRLMLQLPPILLILIIVIAVIRRSASMSGQAMNFSKSRARFQMEAKTGISFGDVAGIDEAKEELEEVVTFLKEPEKFTAIGAKIPKGVLLIGPPGTGKTLLAKAVAGEAGVPFFSISGSEFVEMFVGVGASRVRDLFKKAKENAPCLIFIDEIDAVGRQRGVGYGGGNDEREQTLNQLLTEMDGFEGNTGIIVIAATNRPDVLDKALMRPGRFDRQVNVDYPDIKGRQRILEVHAKDKKMDTQVSLEMVAKRTTGFTGADLSNLLNEAAIFTARRRKEAITMAEINDAIDRVRVGMEGTPLLDGKNKRLIAYHELGHAIVATMLQDHDPVEKVTLIPRGQALGLTWFLPGEEFGLESRNYILAKISSTLGGRAAEEVIFGEDEVTNGATRDIEMVTDYARGMVTRFGMSELGLLALEDDNQDNYAAFDKMAAKIDNQIRCIVEKCHEQAKTIVRENRVVMDHLVEILIDKETIEGEEFRQLLEEFKEPVDSGIELCKSI

SEQ ID NO: 31796 - protein, 516 aa, Crocosphaera watsonii WH 8501
MVQSTQPKKKVKLNKFEKLKAEKDGLDIKDQLEHFAEIGWQAMDKSDLELRLKWVGIFYRPLTPGKFMLRLRMPNGILTSEQMRVLGHIVQRYGEDGNADITTRQNLQLRGIRLEDIPDIFNRLQEVNLTSMQSGMDNVRNITGSPMAGLDADELIDTRELVQKVQDMITNHGAGNYDFTNLPRKFNIALEGGRDNSVHAEINDIAFVPAYKNGELGFNVVVGGFFSASRCDAAIPLNAWVPPTEAAVIDLCRAILTIFRNNGLRGNRQKARLMWLIDEWGLNKFRAEVEQELGYQLETEAEKDAIDWEKRDHLGVFPQKQAGLNYVGMHVPVGRLYAEDMLDFARLAEVYGNGELRLTVEQNVLISHIPQENLETFLEEPILEKFSISPKPLQRALVSCTGAQFCSFALVETKNRAVALAKELDEALEIPKTVRIHWTGCPNSCGQPQVADIGLMGTKVRKDGQTVEGVNLYMGGKVGKDAHLGTCVQKRIACDDLIPVLTDILIENFGAKRKLP

SEQ ID NO: 31797 - protein, 406 aa, Crocosphaera watsonii WH 8501
MYSSALGATSGQTTAYGSRMFVYEVVGLSQNTDNDSLDYPIRRSGSVFITVPYGRMNQEMRRISRMGGRIVSIQPVDAETPLKSTSNGSSTAKVAQPQASNQTEKKRKSMTQAKTKIPTNIYRQKSPYVGKCIENYALVAEGGSGIVQHVTFDISGGDLHYLEGQSLAIIPPGTDAKGKPHKSRLYSIASTRHGDKVDDKTISLCVRQLEYEHPETKETVYGVCSTYLCNLEVGADVAMWGPVGKEMLLPDEEDANIIMLATGTGIAPFRSFLWRMFFENNPEYKFKGKSWLIFGVPYSANVLYKDQLEEIQTKYPDNFDLTYAISREQKNSEGGRMYIQHRVAEQAEKLWTMLQDPKTHLYMCGLKGMESGLEEGLRDFASKQGVEWPDFVKQLKKEHRWHVEVY

SEQ ID NO: 31798 - protein, 726 aa, Crocosphaera watsonii WH 8501
MSKTIIVSNRLPVKIERNQAGEFEYKTSEGGLATGLGSVYKEGDNIWVGWPGLAVNKTEDKEEICSRLKESNMSPVFLTKNEIEEYYEGFSNETLWPNFHYFNQYAVYSDVFWNTYKKVNKKFAKKLEEIIEDGDKIWIHDYQLLVLPAMIRETHPNSSIGFFLHIPFPSYESFRLLPWRTDLLTGMLGADFIGFHTYDYVRHFLSSVNRLVGITDNDGHMNVGNRLAMADAIPMGIDYNRYAQAAADPETLASEVKYRISLGDVKLILSIDRLDYSKGIPQRLRAFEQFIEENEEFREEVSLLILVVPSRDQVPMYANLKKEIELLVGSINGKFGTINWRPIHYFYRSYPLHSLSAFYRMSHVALVTPLRDGMNLVCKEFVASKLDKKGVLILSETAGSAKELSDAILINPNDTNQMVEAMKEALKMPEEEQIARMETMQKSLKRYDINAWVKLFMKGLEQVKEEQENLRTKPISSVVKNKLLQEYRSSKKRIIFLDYDGTLVGFYANPNDSVPDAELEELMTKLTADTNNQVVVISGRGRDFLEKWLSKFNVDFIAEHGVWHKENGKEWECFVELDTSWQEEFDRVLEMYVDRTPGSFIERKDFSMVWHYRKVEPGLGELRSRELANLLKYLSADKDLQVQEGDMVIEIKNARVNKGVAAASWLKKNDYDFSFACGDDWTDEDTFKAMPEDAFTVKVGSSSSAAKYRVENFKDIRKLLLSLANQ

SEQ ID NO: 31799 - protein, 323 aa, Crocosphaera watsonii WH 8501
MPNLAMSSLSDNNRLSLFSGSSNIPLAQEVARYLGMDIGPLIRKRFADGELYIQIQESIRGCDVYLIQPCCNPVNDHFMELLIMIDACRRASARQITAVIPYYGYARADRKTAGRESITAKLVANLIVEAGANRVLAMDLHSAQIQGYFDIPFDHIYSTPVLLDYFATKDLSDIVIVSPDVGGVARARAFAKKLDDAPLAIIDKRRQSHNVAEVMNVIGDVKGKTAVLVDDMIDTAGTITEGAKLLREEGARQVYACATHAVFSGPAIERLSSGVLEEVIVTNTIPIPEEAHFPQLTVLSVANLLGEAIWRIHEDTSVSSMFR

SEQ ID NO: 31800 - protein, 469 aa, Crocosphaera watsonii WH 8501
MTDCIYLDNNATTKIDEEVIGAMMPYLTIYYGNPSSMHSFGGQVAKAVQKAREQVAALLGAEHSEIIFTSCGTEGDNAAICAALTAQPDKHHIITTEVEHSAVLNFCKHLEKQGYSVTYLGVDSQGRLDLGEVQAALTGNTALVTMMYANNETGVIFPVEEVGKLAKEYGALFHVDAVQAVGKVPMDMSKSSIDLLTLSGHKLHAPKGVGALYARKGINFPAFMIGGHQERGRRGGTENVPGIIALGKACELAQSHLENLSHERQLRDYLETSLLTLISDTVVNGTTEERLANTTNIAFKYVEGEGILSSLNQYGICASAGSACTSGSMEPSHVLKAMGLPNSVLQGSIRFSLSRYTTQEEINRVIEIVPDIISHLRSITPRIEDETTSSPTKEQEKANLIQQILEEEVKPFLAQDGGDIDLYDIEGDLVKVVLKGACDACPSSTATLKLAIEARLKDRVDPELTVIAV

SEQ ID NO: 31801 - protein, 712 aa, Crocosphaera watsonii WH 8501
MIEGSTALTNLEILLSSNGVEFEPRFYESTSAMFADYDAGNIDALSTDRSLIYGRLDTLSEPDAHHILDVEFSSEPIAMVLPEDDSQWNNVVKWVINATIEAEELGLNSDNIEQILAVNKDENPNNDSDPAIRRFLGIESQLGEALGLPNDFAYNIVKLVGNYDEIYDRHFPDLERDRNLLYSDGGLLYSPPFSGSFDEDNATIIDNDDRDLLQEIKDRGILKLGINGQKPGFSFPDENGSYIGFDVDLGKAIAVAVFNDSNKIEFVEREDRVTWLTNVANGVVDVTAAQVTQNLVRDGKAGVDFISPYLYTGQGFLVRKDSGILNLATLNGHEVGLFSGTTAEQNLQDAMKEYGGTFIPVYYDNLDEMLAGYAQGDIDAIINDLPLLGGLIDTFSNPDEHLLLDDVISKEPLSMVVDENQSDWKDAVSWVQYGLLQAEEYGITQDNIDQILADNTDSNPDNDSDISTRIFLGIEGNAGELLGLENDYMVNVIKAVGNYGEIYERHFDSDILPRDFNQLSGDFGLQIPYPQGITVNPTNDVSINNEPPVFGSLGNETLDAGIDPGFDGTDDIVFGGSGNDLIDTVAGTGGNRVYGQSGNDTLTLGGNDRAFGGTGDDRFILLGGDNIVTGGAGADQFWIANAEIPESPHTVTDFDLEDDLLNIAGLGVGSFNELTLSNEDGNALIAFEENKLAQLIGVNADSLSADHFGLIQ

SEQ ID NO: 31802 - protein, 500 aa, Crocosphaera watsonii WH 8501
MCGIAGIWGQTEQTNVEAMMKSIIHRGPDAKGIFTVPNGSGILGHQRLSIMDVDGGDQPIYSKANTQAIIGNGEIYNYPKLQPELAKKYKFLTKSDTEAVLHLYEEKNTTAVGELDGMFAFAIIDDNKFIAARDPIGIKPLYYSEKDGNFWFASELKAITQFCENVEEFPPGHFFSSETGFSQYYSLPDIPPELDANVDELLQEIRETVEASVVKRLMSDVPLGAFLSGGLDSSIIAAIAKKHKSELHTFSVGIAGSKDINAARLVSDYLGTIHHEYIITPEEAIAKLPEIIYYLESFDQDLVRSGIPCYFTSRLASEYVKVILTGEGADELFAGYTYYKDIPSDDTLHRELRRSVNSLHNINLQRVDRLTMAHSIEGRVPFLDLKMIELGQKVPAHLKLKGTPPVEKWILRKAFEDILPEEIVWRKKEQFDEGSGTVDLLTETLKDVMNEQQAQQYQKEHPDIKLRSAEECYYHQIFMKAFDNPDALLTNVARWAETRF

SEQ ID NO: 31803 - protein, 314 aa, Crocosphaera watsonii WH 8501
MNDNLNLSNLPTIPVAPEGFKSGFVGIIGRPNVGKSTLMNQLIGQKIAITSPVSQTTRNRLRGILTTEKAQIIFVDTPGIHKPHHSLGKIIVKNAKTAINAVDIILLVVDSSTKSGGGDRYIIDLLKTVNQPIILGLNKSDQQPENYQEIDESYASLIQDYNWPILKFSALTGDGLENLQNSLIEQLDFGPYYYPPDLITDQPERFIMGELIREQILQMTRQEIPHSVAIAIEKVEETPKVTKIFAAINVERNSQKGIMIGQKGSMLKAIGTAAREQIQKLIAGEVYLKLFVKVEPQWRQSNLRLAEFGYRVEE

SEQ ID NO: 31804 - protein, 300 aa, Crocosphaera watsonii WH 8501
MMKKKFVLFALTLLLTATSQNAVWAGEILERIRQTGVITAGTRKDATPFAYINEKGEWVGYSIDILEIIRQNVEKELGKPIRLKLVEVTPQNRFNKVKNKEIDIECASSTFTWERDKIIDFSVSYFASGTKIMRKKGSSLGTIDSLAGRRIGVIPNTTNEQAIKIQQPAAIIVPIKNRIEGLEKLKKGEIEAIAGDGIVLQALQLENNNGDRFEVVPEFPYVYEAYACMIPEDESAWRGMVNYSLVKFMEGIISDQPQQVEMYEKWFGEETGVTPYSREAINDYFQGIVDGYEWIPLISY

SEQ ID NO: 31805 - protein, 197 aa, Crocosphaera watsonii WH 8501
MSSFEYNQERDSEDIDRVTLSDEKGSTLDCYIENAVEGNDGTYLLLMPVDVPVVILSWDGEEEDSSDGYEISNAVLLEDPTEIEEIFADAKAVLAELDLTLKLTAFTVTLTGELPPIEDDGVLTLEVDSDEPSIDSEELQFLKDFYHNKHKYSIYTPLSPLLFLAKYNLLGKIELVSPEDKQMQVILEELLFDEMEE

SEQ ID NO: 31806 - protein, 261 aa, Crocosphaera watsonii WH 8501
MDNSLTRKLVLILTLGVFLNLGNNHLVIAATLEEIKERGKLLVAVKDNIRPLGFLDHKNQLQGLEIDLARQLAQDILGDPQALILQPVSNQERLQKVIDGEVDLAIARVTINSSRGRLVNFSPYYYLDGTGIITNNGRIRAVDHLRESKIAVLEGSSTIAVIRAELPQAKLIGVKSYQEAMTLLETEKVEAFVADNSILTGWVQQYPQYYRLPVRLSGEALGVVMPKGLQYASLRSRINQAIGRWKASGWLAELLERWGLP

SEQ ID NO: 31807 - protein, 405 aa, Crocosphaera watsonii WH 8501
MKILVLNAGSSSQKTCLYNIEENILPKHPPKPLWTGNIDWTVAKDHGILTVKANNFKQKITINNGDKAEAIPKMLATLIAGETKVIEQLSDINIVGHRVVHGGTKYTEATKINPEVKAKIAELIPLAPNHNPAHIQGIEAIEKVLGNVPQVAMFDTAFHQTIPLENAAYPIPFEWVDKGIRRYGFHGISHQYCANRAAEILNQPLSSLKLINCHLGNGCSLTAIKDGKSLDTTMGFTPLEGLMMGTRSGSIDPAILLYLIREYSLTPEDLNTLLNKESGLKGVSGISADLRAILQGIKENNSRAQLAFDMYIHRLRSQIGSMLAVLGGLDALMFTAGVGENAALVREKACEAFEFLGLKLDKTKNESSPVDQNIATVDSSVNILVIHTEEDWAIAQQCWHLFTGK

SEQ ID NO: 31808 - protein, 599 aa, Crocosphaera watsonii WH 8501
MALIVQKYGGTSVGSVERVQSVAQRIHRTVQQGNTVVVVVSAMGKTTDTLVNLAQEITANPSRREMDMLLSTGEQVTIALMTMALQEIGQPAISLTGAQVGIVTEAEYSRARILSIKPDRIKRHLDQAQVVVVAGFQGVSSRENLEITTLGRGGSDTSAVALAAALKANFCEIYTDVPGILTTDPRLVPSARLMEEITCDEMLELASLGAKVLHPRAVEIARNYGVSLVVRSSWSDAPGTRVVSPIPKPRSLEGLEITKAVDGVEYDGDQGKISLLRVPDRPGIAARLFGEIAHQQVDVDLIIQSIHEGNSNDIAFTVVKNILSKAEAVTEAIAPALRSTPSNPTEAEVMIETGVAKISIAGAGMIGRPGIAAKMFKTLAEANINIEMISTSEVKVSCVVAKEDGDRGIKVLCEAFDVQLSPNPVASQTVALAPPVRGVALDMKQAQIAIRHVQDKPGMAASIFGVLAENNISVDTIIQSQRCRILAGKPTRDIAFTVAQVDVEAACRALNNLSDGFDQVVIDEDIAKVSIVGAGMIGQPGVAAKFFGALAQEKINIKMIATSEIKISCVVPKEEGVKALKYVHDAFELAGVETVEVPA

SEQ ID NO: 31809 - protein, 361 aa, Crocosphaera watsonii WH 8501
MKIGVPKEIKDQEFRVGLSPNSVRVLCDRGHQVAVETQAGIGSGFSDQEYEQAGAKIVTSAAQAWEQDLVVKVKEPLKQEYDYLNTCKILFTYLHLAADKELTQALISSKITAIAYETVELPDGRLPLLTPMSIIAGRLSVQFGARYLEKQQGGRGVLLGGIPGVAAGRVVILGGGIVGTEAAKMAVGMGAQVQIFDINVDRLAYLESIFGSRVQLLYSNAAALEKAVPDADLLIGAVLVTGKRAPTLVSRELVSKMRPGSVIVDVAVDQGGCIETLRTTSHSSPTYVEEGVLHFGVPNMPGAVPWTATQALNNSTLPYVLKLANQGLDALEKDVSLGKGVNVQDGLLVHPAVQELFKDLI

SEQ ID NO: 31810 - protein, 395 aa, Crocosphaera watsonii WH 8501
MIQLANRVTQVTPSLTLAITAKAKEMKAQGVDICSFSSGEPDFDTPQYIKDAAVSALDQGKTKYGAVAGEPGLREAIARKLNNDSQLNYSPNNVIVTNGGKHSLFNLMLALIEPGDEVIIPAPYWLSYPEMVKLAQGNPIIVDTTAETDYKITPEQLRQAITSKTKLFVLNSPSNPTGTVYNPAEIKALAEVIVEHNLWVVSDEIYEKILYDGVVHISIGSLGEEILKRTIISNGFAKSYSMTGWRIGYLAGPEPLIKAVSTIQSHSTSNVCTFAQYGAIAALESPKSPPCLQTMRDAFSQRRQVILEKIRAIPQLSCPTPMGSFYVFVDISKTGLNSLEFCDQLLEKQQVAAIPGKAFGADHCIRLSYATDLASIEKGMDRIERFVQETKVNQL

SEQ ID NO: 31811 - protein, 392 aa, Crocosphaera watsonii WH 8501
MQIYLDYSATTPPRSKVVSYVNQILREEWGNPSSLHQWGQRAAMTMEIARTQVASLINANDPESVIFTSGGTEADNLAILGVARQYDTPQHLIISRVEHPAISEPVRYLEGLGWEVTRLPVNRQGIINPLDLKPAIQSNTVLISIIHGQSEVGTVQPIEELGNIAHAHGILFHTDAVQSAGRVTIDVQRLPIDLLSLSAHKIYGIQGAGALYVRNGLKIEPLLLGGGQEGKTRSGTQAVGMIAGFGLAAELAATEMIAESSRLIGLRDRLFDLMANCPYLVPTGDRLYRLPHHVSFVINYPFETDKTEKVTGKMIVRQMNLAGIAISAGSACHSGKLSPSPILLAMGYSEKEALRGIRLTLGIETTLEDIDWTAMVLKQVLNRLMPKLAIVN

SEQ ID NO: 31812 - protein, 385 aa, Crocosphaera watsonii WH 8501
MLKIAVPKESDLGELRVALVPDTVARFIKLGFEVLVQSGAGLGAHFDDSEYEAAGATIINGAKELWESADILLKVAPPGEQQGEEEMNWLKPGATLISFLNPLANPEQVQALAQRKINSFSMEMIPRTSRAQSMDALSSQANIAGYKSALLAAASLSRLFPMMTTAAGTIPPAKVLVIGAGVAGLQAIATARRLGAVVEAFDVRPAVKEEVQSVGAKFIEIPIEEDTATSQGYAKEVGQNTQEKIRQVLTEHIKKSDVVITTAQVQGKRAPLIVTEEMVCEMSSGAVIVDLAAGQGGNCACTEAGKDVYYNGVTIIGPLNLPSTLPVDSSKVYAKNLLTLVKYLVKDGAIDFNFEDDIVEATCVTYEGEIRNDRIKQALANLVQA

SEQ ID NO: 31813 - protein, 197 aa, Crocosphaera watsonii WH 8501
MMDISALPQAILCDRDGTLIEDEHFLNDPTKIRWIDGVKSLLKRFHQAGVKILVITNQSGVARDYFGTETVETIHGQLQTDIREMGGEIADFYYCPHHPDGTHPVYGGLCNCRKPAPGMFFNAIKDHQLTPELCWVIGDRLRDLEPGIALGMRAFLVQTGAGKDHTKLLSEQAYQTQVTVIPSFRNLLTFAVASLSE

SEQ ID NO: 31814 - protein, 542 aa, Crocosphaera watsonii WH 8501
MRTRCCPVLRNSWIPLSSPLLGYRSSSSAFRMTWLTTLMIISTTISYHTVVYLENETKPTGISDFVCSVFWRHLTMFNRKKIDIPRLQPSWRAIIGEFPPNQSSQSLWHCQGFSLVEGVPKLSKNKRFAVVGDVSLSNTDLLLKRLAINPSRWQEDHQTLIAWGWEELGKDCLHYLRGIFSFVVWDTHEKQGWAIRDRVGGRTLYYYQQDSTFYISPRLKNLSPYFKKNLDLIALRDYLCTGFIPGKRTLWQGVKELRPGTILSLPQEKIETYWTPQENISQSPLSFDKSSEILRELLETIIQEYLPPQEPVGVYLSGGLDSSCVTALAKQFHQETVHTYSIHFGEDYPNELEFSSLVAAHCQTKHHILAISPQEMWENLPITMANLDSPIGDPLTVPNYLLAQLAKQDVKVILNGEGSDPCFGGPKNQPMLLHSLYHNSEQKIDLLSSYLTSFKKCFLDLPNLLNPDIFKQVKDAPSVFEADLLSSADYLNRLMLLNIKFKGSDHILNKVNNLTLSGLLEGRSPLFDSRVVDKIFIHSSSL

SEQ ID NO: 31815 - protein, 388 aa, Crocosphaera watsonii WH 8501
MSQRPIYLDCHATTPMDKRVLEAMLPYFTEHFGNPSSINHLYGWEAEAAVKKARETIANAINCSPEEIIFTSGATEANNLAIKGVAEAYFSQGQHIITVESEHRAVLDPCKYLEILGFEITYLPVQKDGLIDLELLEKSIRNETILVSVMTANNEIGVLQPLQAIGEICQKKDVLFHSDAAQAIGKIPLDVKEMNINLLSLTAHKVYGPKGIGALYIRRRDPRVNIAPQLHGGGQEKEIRSGTLYTPQIVGFGKAIELSLEELETENKRQTELRDRLQKQLLSLEGVHLNGHPTQRLAGNINVSIEGVDGAALLLALQGNVALSSGSACTSTTTKPSHVLKALGHSDKLAYSSLRFGLGRFTTCQEIDIISKLIIDTVKSLRQTIINH

SEQ ID NO: 31816 - protein, 433 aa, Crocosphaera watsonii WH 8501
MREVAEQLQAKVLYGEKRLNNLVFNYLIAAMQMQHAITQLNDNDLVVTPSDRGDVIMGALQAHHSTNYPNLAGILLTTECHLENSIAQLIAGLSHPLPILWVDTYTYPTASRLQTIYSSLEAGDMEKINWSIELFDKYVNLSILEHLIDEIEIDGITPKMFTYNLIQTAKANKRHIVLPEGKDNRILKAVATLTSQDIVDITLLGERNRIERTIQSYGIQLDIDKLNIIDPIKSPKLEQYTQTLYKARKNKGVTLENAKDMLMDVSYFGTMMVYAGDADGMVSGAINTTGNTIRPALQIIKTKPEYKQVSSVFFMCLEDRVLVYGDCAINANPTAEQLAEIAIISAETSQTFGVFPRVALLSYSSGNSGIGEDVERVKQATIVAKKRHPDLLFEGPIQYDAAVDRTVAAQKMPDSKVAGEATVFVFPDLKYRQ

SEQ ID NO: 31817 - protein, 256 aa, Crocosphaera watsonii WH 8501
MSDVILSIKNLTANVEGTPILKGVNLDIKAGEIHAIMGRNGSGKSTLSKVLAGHPDYEITGGEVIYKGENILDKSPDERALEGIFLAFQYPLEIPGVSNLDFLRVAYNARRKHLGLEEIDTFDFEDLVEEKLEVVKMNSAFLERSLNEGFSGGEKKRNEILQMALLEPTLGILDEIDSGLDIDALRIVSNGVNQLATPDNAFLLITHYQRLLNYIEPHHIHVMYDGQIVISGGKELALELEESGYDFIEEKLLAQA

SEQ ID NO: 31818 - protein, 107 aa, Crocosphaera watsonii WH 8501
MTPELKDRIDQLVNNNKILVFMKGAKLMPQCGFSNNVVQVLNSLGVSYETVDVLADEEIRQGIKEYSSWPTIPQVYINGEFIGGADIVYEMYQKGELQQMIEVALAS

SEQ ID NO: 31819 - protein, 493 aa, Crocosphaera watsonii WH 8501
MTRSSDFFLSRQESTPLIDVLTTLKNKPDAAFYVPGHKRGQGISDSLRYLLGEGVFQADIPELPELGSLFAPDEAMAKAQILASEAFGADRTWFLVNGSTCGIIAAIAATCNPGDKIIVPRNVHQSFIMGLIVSGAVPIFLNPEYDPIWDLTLSITPYSLEKVLKENSDVKAVFLVYPTYHGVCGDIRSIVAITRRYNIPLLVDEAHGAHFKFHDALPPSALSLGADLTVQSTHKVLGAMTQASMLHIQGARIDPQKISQALQLVESTSPSYILLSSLDGARQQMALQGERLLTHTLELAQIAVENIKKIDNLGVLEFTEKRPGFHDLDITRLTVNVTALGISGLEVDDIFREKLQVTAELPMLSHLAFVISIGNTKKDINQLINAFRILNHSFSSSPDLPLSSAPHPLHPSPLKLSPREAFFAPKQSVAIEQCIGKISGELICPYPPGIPVLMPGEIITSEAIAYLKKIQKLGGMITGCTDTNLNKLNIILN

SEQ ID NO: 31820 - protein, 550 aa, Crocosphaera watsonii WH 8501
MGEMNTAELLVKCLENEGVEYIFGLPGEENLHILEALQDSSIQFITTRHEQGAAFMADVYGRLTGKAGVCLSTLGPGATNLMTGVADANLDGAPLVAITGQVGTDRMHIESHQYLDLVAMFAPVTKWNKQIVRPSITPEITRKAFKLAQSEKPGAVHIDLPENIAAMPVEGQPLKRDDQEKTYASYRSLNAAAMAISKAKNPLILVGNGTIRAQASEALTEFATTLNIPVANTFMGKGAVPYTHPLSLWTVGLQQRDVITCAFEQSDLVIAVGYDLIEYSPKKWNPEGKTPIIHIGMEPAEIDSSYIPLVEVVGDISDSLMDILKRADRQGKSTSIATGLRSKLVTEYENYAHDEGFPIKPQKIIYDLRQVMGPEDIVISDVGAHKMWMARHYHCDSPNTCLISNGFAAMGIAIPGAIAAKLVAPDKRVVAVTGDGGFMMNCQELETALRAGTPFVTLIFNDNGYGLIEWKQINQFGKSSFIKFTNPDFVKFAESMGLKGYRVESADDLVPTLKTALEQGVPAVIDCPVDYEENIRFSQKSGDLSCQVWE

SEQ ID NO: 31821 - protein, 209 aa, Crocosphaera watsonii WH 8501
MIYLDSAIISDAKIARQYGWVKGITTNPTLLGKSDLSPGETLQQLANLSPGELYYQLTATEAEKMIAEGKKAHQLIGEKTVLKIPATTIGFQVTATLSPQIPCAVTAIYSGAQAAIAKEAGAKYAIAYVNRATRLLGDGLALVKQMAKVLEGSKTEILAASLKSPQEAADALQAGAHHLTIPLDILKAMTTHEFSEKTVVEFNEKGQGI

SEQ ID NO: 31822 - protein, 225 aa, Crocosphaera watsonii WH 8501
MELSVPQDKPLAAVFQRIGGGAYPPVVEAFDRGKTIFFPGDPAERVYFLLKGAVKLSRVYEAGEEITVALLRENSVFGVLSLITGQRSDRFYHAVAFTPVELLSSPIEQVEQALKSHPDLSLLMLQGLSSRILQTEMMIETLAHRDMGSRLVSFLLILCRDFGVPTPEGIRIDLKLSHQAIAEAIGSTRVTVTRLLGDLRQEEMISIHKKKITVHNPVALSQQFA

SEQ ID NO: 31823 - protein, 350 aa, Crocosphaera watsonii WH 8501
MQFIDRAEIEVEGGKGGDGIIAFRREKYVPAGGPAGGNGGKGGSVILQAEGNLQTLLDFRYARRFKADNGKRGGPNNCTGAMGKDIIIEVPCGTVIYDLETQEMLGDLVEQGQTLCVAEGGKGGLGNKHFLSNKNRAPEYALPGLEGELRNLRLELKLLAEVGIIGLPNAGKSTLIASLSAARPKIADYPFTTLVPNLGVVRKPTGDGTVFADIPGLIAGAHEGVGLGHEFLRHIERTRLLLHLVDVTSDDPLQDYEVIQQELNAYGRGLCDRPQIIALNKVDACDQETLKLIKEELQPLSDSPVFTISAVTKTGVAELLQAIWNRLEQVNLNDENSSSQLVGTRRELSL

SEQ ID NO: 31824 - protein, 382 aa, Crocosphaera watsonii WH 8501
MDNALLAQLIGISGYIIYITTSAGVYGIFALGLNLQWGFTGLINFGVVGFMTLGAYTSVLLTRQGFPFIVAVLAGAILAAILGLLIGLSTLRLREDYLAIVTIGVSELVRLVALNEEWLTNGALGLRQYPLPLNIEATLPIKLLLILVLTLLAVYAEWTLYKSLAFQWKQNKEIQGKSYQPRKPFSLIIWGVLATSLILLAFITGTTALWFYTYKSGLMVLVLSVLAIIYASLEFLVHSPWGRILKAIREDEEVPRALGKNILLYKLQSFMLGGAIAGTSGAFFAWQLTTIYPDKFEPLITFNTWIIVVLGGSGSNAGTLLGAVIFWAYDSLTRFVLPQLQILSPSQLGYFRIMVIGLILMVLMVWRPQGILGKKEELTLGR

SEQ ID NO: 31825 - protein, 400 aa, Crocosphaera watsonii WH 8501
MGRAKKVVLAYSGGVDTSVCIPYLKQEWGVDEVITLAADLGQGDELGPIQAKALKSGAVESLVEDATTEFVTDYAFKAIKANALYENRYPLSTALARPLIAKLLVDAAEKYGADAVAHGCTAKGNDQVRFDLGILALNPTLKVLAPAREWNMSREQTIAYGEQFGLEFPVKKSSPFSIDRNLLGRSIEAGPLEDPMTEPPEEIYLMTKAIADTPDTPEYVEIGFEKGIPVSLNGQTLDPVALISQLNDLVGKHGVGRIDMIENRVVGIKSREIYEAPALLVLIDAHRDLESLTLTADVTQYKKGIEETYSHLIYQGLWYSPLKESLDAFIDHTQERVTGMVRIKLFKGNATIVGRQSDYSIYSPHLSTYGEDDQFDHKAAEGFIYIWGLPTRVWAEKTKG

SEQ ID NO: 31826 - protein, 503 aa, Crocosphaera watsonii WH 8501
MKISWRTLLLWTLPLLVVGFFLWQGAFPATSTPMGNNTANTRMTYGRFLEYLDSGRILSVDLYEGGRTAIVEAVDPEIQDRVQRSRVDLPMNAPDLISKIRQSDVDLESHPIRNEGALWGFLGNLLFPILLIGALFFLFRRSSNLPGGPGQAMNFGKSKARFQMEAKTDIMFDDVAGIDEAKEELQEVVTFLKQPERFTAVGARIPKGVLLVGPPGTGKTLLAKAIAGEAGVPFFSISGSEFVEMFVGVGASRVRDLFKKAKENAPCLIFIDEIDAVGRQRGAGIGGGNDEREQTLNQLLTEMDGFEGNTGIIIIAATNRPDVLDSALMRPGRFDRQVIVDAPDFKGRIEILEVHARNKKLAPDVSIETIARRTPGFSGADLANLLNEAAILTARRRKEAVTLLEIDDAVDRVVAGMEGTPLVDSKSKRLIAYHEVGHAIVGTLVKDHDPVQKVTLIPRGTSSRFDLVYPQRRTRVNYQSTAYGPHCRSFRRSCSGRRGIWLR

SEQ ID NO: 31827 - protein, 355 aa, Schizosaccharomyces pombe
MSDSKLADSLNCLSVSTPSTTANPGRQQLLRLAVSNQRQVNNVSLANGKENKRTSNSKFNSSLRKIEEPIAGVPSSAGPQWREFHIGMFEIGKPLGKGKFGRVYLAKEKKTGFIVALKTLHKSELVQSKIEKQVRREIEIQSNLRHKNILRLYGHFHDEKRIYLILEFAGRGELYQHLRRAKRFSEEVASKYIFQMANALSYLHKKHVIHRDIKPENILLGIDGEIKLSDFGWSVHAPSNRRTTLCGTLDYLPPEMVEGKEHTEKVDLWSLGVLTYEFLVGAPPFEDMSGHSATYKRIAKVDLKIPSFVPPDARDLISRLLQHNPEKRMSLEQVMRHPWIVKYKDSWTRKSSESS

SEQ ID NO: 31828 - protein, 241 aa, Ipomoea batatas
MGRGRVELKRIENKISRQVTFSKRRSGLLKKAHEISVLCDAEVGLIVFSTKGKLFEYSTDSSMENILDRYERYSYAEQRMTTNDSEQQQNWSCQYPKLVSRIELLQRSTRNFLGDDLEPLGLRELQSLEQQLDTGLKRIRTRKNQLMHESISELQKKERALQVQNNILAKQLEQQKLVLNSASTSMPPQPLVSPLPLPNLTIGSIARATEAAKNSENRGQAPPCSTSLVPPWMLRHPNNKD

SEQ ID NO: 31829 - protein, 220 aa, Ipomoea batatas
MVRGKTQMRRIENATSRQVTFSKRRNGLLKKAFELSVLCDAEVALIIFSPRGKLYEFASSSMREIIERYRRHTADVQSENPSVEQEQDMQHLQHETECLAKKIDYLEASKRRLLGEDLGACAMEELQQIEQQLERSVNIIRARKMEVYAEQIKRLRDKEESLKAENAVLWDKYNGLQPQQVSNEGNEKESAEGSEKSDVETELFIGLPESRAKPVLSNER

SEQ ID NO: 31830 - protein, 230 aa, Beta vulgaris
  misc_feature (199)..(199): Xaa can be any naturally occurring amino acid
  misc_feature (212)..(212): Xaa can be any naturally occurring amino acid
  unsure (1)..(230): unsure at all Xaa locations
MGRGKIEIKRIENTTNRQVTFCKRRNGLLKKAYELSVLCDAEVALIVFSSRGRLYEYANHSVKGTIDRYKKACSNQSGAGSVAEANAQYYQQEAAKLRNQIRTATENNRLLSRHMMGEGLSSLSMKELKNLETKLERGISRIRSKKNELLFAEIEFMQKREIELHNNNQFLRARISENERAQQSMSLMPGGSDYDLVPXQSFDSRNYFQVNXLQPSSQYARQDQTPLQLV

SEQ ID NO: 31831 - protein, 234 aa, Dendrobium thyrsiflorum
MGRGKIEIKRIENTTNRQVTFCKRRNGLLKKAYELSVLCDAEIALIVFSTRGRLYEYSNHSIKATIEKYKKACADSSNPGSLVEVNSQQYYQQESAKLRHQIQLLQNSNRHLMGEGLSSLTLKELKQLENRLERGITRVRSKKHELLFAEIEYMQKREVELQNDNMYLRAKINDNERAEQANIVQAGADFDTLPNFDSRNYYQVNILETAAHYSHHQDQTALHLGYETKADHSA

SEQ ID NO: 31832 - protein, 277 aa, Lactobacillus reuteri
MNKKTKKFLSLGAIMSLALFLAACSNKPITSHSTGIWDHYIIYNCSQFIIWLSKHFGGYGMGIIIFTIIIRIILLPLMFYQTKTMMKTQELAPQLKAIQKKYSSRDRESMQKMQMETHKLYKEAGVNPWASMLPLLVQLPVMWGLYQAIWRTSALRNGTFLWLQLGHPDPYYIMPILAALFTFISSWLSMASMPEKNSMTTTMTWFMPIMVFFMALGFSSAITLYWVVTNAFQVVQTLIIQNPFKIRREREEKQRAEKAKRRKIEKAKRRAYQSRRK

SEQ ID NO: 31833 - protein, 551 aa, Lactobacillus reuteri
MNNNRKKNNFTHNVLFYAVMFLCIMGIAYFFFGGNASTGQSKTVSQSEFISELKSNKVKSVQLQPNGGVYKVTGTYRKPQSNNDNSANNTGFALTPQRNNKVTQFQSSVLESDVTVSQLQNYANRHNVKISTRAEESNSVWMNLLLTVLPLVIMIFFFYMMMGQAGQGGGGRGVMSFGKTKAKPSDAKKNKVRFSDVAGEEEEKQELVEIVEFLKNPKKFTKLGARIPSGVLLEGPPGTGKTLLAKAVAGESGVPFFSISGSDFVEMFVGVGASRVRDLFDQAKKAAPAIIFIDEIDAVGRRRGNGMGGGHDEREQTLNQLLVEMDGFQGDEGIIVMAATNRSDVLDPALLRPGRFDRKILVGRPDVKGREAILRVHAKNKPMASDVDLKEIAKQTPGFVGADLANLLNEAALLAARRNKTEIDAADLDEAEDRVIAGPAKHNRVQSEQERKTVAYHEAGHTIVGLVLNDARVVHKVTIVPRGRAGGYAIMLPREDQMLMSKKNAMEQIAGLMGGRAAEELVFKSQSSGASNDFEQATQIARSMVTQYGNE

SEQ ID NO: 31834 - protein, 606 aa, Lactobacillus reuteri
MRRGPQVPEQAQHFWPTTKRLIAYLRPWRVGVIVSILLAVISVILSILAPKILGEATTIIYDGMLKGYAEMKAGAHLSTLPINFTRIWQIGITVILLYLFSGLFSFLQLQIMTRVSQRVVYNLRQDFEEKMRRVPIKYYDTHNNGDIMSRMVNDMDNIAGTLQQSLIQIITSVLTVIGVFILMLTISWKLTIIALVTIPLSILVVAFVAPTSQRLFGRQQAALGKINDQVEETYAAHTIVRTFNKEEDEEKEFNRRNHQYYQSAWKAQFFSSLMMPMMIFIRNVGYLVVAVVGAIQVIHGQITLGNVQAFLQYTNQFSQPIAQIANLSNTIQQTIASAERIFEVLDEPEMDDKIKETPVLAGTNLPKVEFKDIQFSYTDEPLIQDFNLKAPRDKMVAIVGPTGAGKTTIINLLERFYDPQGGHIYLNGQDISSMTRDDLRKHIAIVLQDTWLFTGTIFENIKYGNENASDEEVYHAAKMARADAFIRELPDGYQTVLDESASNISQGQRQLLTIARAFLADPEILILDEATSSVDTRTEVLIQEAMNALQQERTSFVVAHRLSTIRKADQIVVVNHGKIIETGNHESLMNQKGFYAALYNSQFAGN

SEQ ID NO: 31835 - protein, 283 aa, Lactobacillus reuteri
MKKAKAIWLLILLVVPVLLLSGCESVTKRADTQDTWNRIERRKRVIVGLDDSFVPMDFRQKNGKLVGYDVDLARAVFKQYGIKVDFQPIDWSMKETELKNGTIDLLWNGYSVNPSRAKKVAFSRYYLENRQILVTKKKSNIKNLNGMTGKTLGVQNGSTGVTVLDEKPKLLKDKIKHHTPVLYDTFPNAFIDLNANRIQGILMDEVYANYYIKHQPNSNSYRTYISKELPMEHFAVGMRKGDKTLKKKINQGLGNLQKNGELRKLNEKWFGQDNNYLGPDNTK

SEQ ID NO: 31836 - protein, 317 aa, Vibrio cholerae
QHFYQRMFSHNPELKHIFNMTHQKTGRQSVALFEAIAAYAKHIDNLAALTSAVERIAHKHTSFNIQPEHYQIVGHHLLETLRELAPDAFTQPVEEAWTAAYFFLAQVFIDREGALYLERKQALGGWRDGRTFVVREKQVESAYVTSFVLVPADGGAVLDYQPGQYIGIEVTPEGSDYREIRQYSLSHASNGREYRISVKREGVGSDNPGLVSHYLHNNVKVGDSVKLYAPAGDFFYVERERPVVLISAGVGATPMQAILHTLAKQNKSGVTYLYACNSAKEHTFAQEAAQLIAQQGWMQQVWYRDESADDVLQGEMQ

SEQ ID NO: 31837 - protein, 317 aa, Vibrio cholerae
QHFYQRMFSHNPELKHIFNMTHQKTGRQSVALFEAIAAYAKHIDNLAALTSAVERIAHKHTSFNIQPEHYQIVGHHLLETLRELAPDAFTQPVEEAWTAAYFFLAQVFIDREGALYLERKQALGGWRDGRTFVVREKQVESAYVTSFVLVPADGGAVLDYQPGQYIGIEVTPEGSDYREIRQYSLSHASNGREYRISVKREGVGSDNPGLVSHYLHNNVKVGDSVKLYAPAGDFFYVERERPVVLISAGVGATPMQAILHTLAKQNKSGVTYLYACNSAKEHTFAQETAQLIAQQGWMQQVWYRDESADDVLQGEMQ

SEQ ID NO: 31838 - protein, 317 aa, Vibrio cholerae
QHFYQRMFSHNPELKHIFNMTHQKTGRQSVALFEAIAAYAKHIDNLAALTSAVERIAHKHTSFNIQPEHYQIVGHHLLETLRELAPDAFTQPVEEAWTAAYFFLAQVFIDREGALYLERKQALGGWRDGRTFVVREKQVESAYVTSFVLVPADGGAVLDYQPGQYIGIEVTPEGSDYREIRQYSLSHASNGREYRISVKREGVDSDNPGLVSHYLHNNVKVGDSVKLYAPAGDFFYVERERPVVLISAGVGATPMQAILHTLAKQNKSGVTYLYACNSAKEHTFAQETAQLIAQQGWMQQVWYRDESADDVLQGEMQ

SEQ ID NO: 31839 - protein, 317 aa, Vibrio cholerae
QHFYQRMFSHNPELKHIFNMTHQKTGRQSVALFEAIAAYAKHIDNLAALTSAVERIAHKHTSFNIQPEHYQIVGHHLLETLRELAPDAFTQPVEEAWTAAYFFLAQVFIDREGALYLERKQALGGWRDGRTFVVREKQVESAYVTSFVLVPADGGAVLDYLPGQYIGIEVTPEGSDYREIRQYSLSHASNGREYRVSVKREGGDSDNPGLVSHYLHNNVKVGDSVKLYAPAGDFFYVERERPVVLISAGVGATPMQAILHTLAKQNKSGVTYLYACNSAKEHTFAQETAQLIAQQGWMQQVWYRDESADDVLQGEMQ

SEQ ID NO: 31840 - protein, 412 aa, Vibrio cholerae
KLGFEVCIESKAGALASFDDAAYTAAGATIGSREEIWACPLILKVNAPSDDEIALLKEGATLVSFIWPAQNPALMEKLSSKNINVLAMDAVPRISRAQALDALSSMANIAGYRAVVEAAHEFGRFFTGQITAAGKVSPAKVFVAGAGVAGLAAIGAAGSLGAIVRAFDVRPEVKEQVQSMGAEFLEVNFQETAGSGDGYAKEMSDEFNRKAAELYAAQAKDVDIIITTALIPGKPAPKLITKEMVDSMKAGSVIVDLAAANGGNCEYTVKDQVITTDNGVKVIGYTDMVGRLPTQSSQLYATNLVNLLKLLCKEKDGNIDINFEDVVLRGVTVVKAGEITWPAPPIQVSAQPQQKAKVQPTKAQKKEPEPTSPVKKLVGLAVGVGLFAWVASVAPAAFLGHFTVFVLACVVG

SEQ ID NO: 31841 - protein, 412 aa, Vibrio cholerae
KLGFEVCIESKAGALASFDDAAYTAVGATIGSREEIWACPLILKVNAPSDDEIALLKEGATLVSFIWPAQNPALMEKLSSKNINVLAMDAVPRISRAQALDALSSMANIAGYRAVVEAAHEFGRFFTGQITAAGKVPPAKVFVAGAGVAGLAAIGAAGSLGAIVRAFDVRPEVKEQVQSMGAEFLEVNFQETAGSGDGYAKEMSDEFNRKAAELYAAQAKDVDIIITTALIPGKPAPKLITKEMVDSMKAGSVIVDLAAANGGNCEYTVKDQVITTDNGVKVIGYTDMVGRLPTQSSQLYATNLVNLLKLLCKEKDGNIDINFEDVVLRGVTVVKAGEITWPAPPIQVSAQPQQKAKVQPTKAQKKEPEPTSPVKKLVGLAVGVGLFAWVASVAPAAFLGHFTVFVLACVVG

SEQ ID NO: 31842 - protein, 412 aa, Vibrio cholerae
KLGFEVCIESKAGALASFDDAAYTAAGATIGSREEIWACPLILKVNAPSDDEIALLKEGATLVSFIWPAQNPALMEKLSSKNINVLAMDAVPRISRAQALDALSSMANIAGYRAVVEAAHEFGRFFTGQITAAGKVPPAKVFVAGAGVAGLAAIGAAGSLGAIVRAFDVRPEVKEQVQSMGAEFLEVNFQETAGSGDGYAKEMSDEFNRKAAELYAAQAKDVDIIITTALIPGKPAPKLITKEMVDSMKAGSVIVDLAAANGGNCEYTVKDQVITTDNGVKVIGYTDMVGRLPTQSSQLYATNLVNLLKLLCKEKDGNIDINFEDVVLRGVTVVKAGEITWPAPPIQVSAQPQQKAKVQPTKAQKKEPEPTSPVKKLVGLAVGVGLFAWVASVAPAAFLGHFTVFVLACVVG

SEQ ID NO: 31843 - protein, 412 aa, Vibrio cholerae
KLGFEVCIESKAGALASFDDAAYTAAGATIGSREEIWACPLILKVNAPSDDEIALLKEGATLVSLIWPAQNPALMEKLSSKNINVLAMDAVPRISRAQALDALSSMANIAGYRAVVEAAHEFGRFFTGQITAAGKVPPAKVFVAGAGVAGLAAIGAAGSLGAIVRAFDVRPEVKEQVQSMGAEFLEVNFQETAGSGDGYAKEMSDEFNRKAAELYAAQAKDVDIIITTALIPGKPAPKLITKEMVDSMKAGSVIVDLAAANGGNCEYTVKDQVITTDNGVKVIGYTDMVGRLPTQSSQLYATNLVNLLKLLCKEKDGNIDINFEDVVLRGVTVVKAGEITWPAPPIQVSAQPQQKAKVQPTKAQKKEPEPTSPVKKLVGLAVGVGLFAWVASVAPAAFLGHFTVFVLACVVG

SEQ ID NO: 31844 - protein, 401 aa, Klebsiella sp. PAMU-1.2
MRDAYICDGIRTPIGRYGGALASVRADDLAAIPLRELLSRNPKFDPASIDDVILGCANQAGEDNRNVAHMATLLAGYPHSVPGTTINRLCGSGLDAIGFAARAIKAGEADVMIAGGVESMSRAPFVMGKASAPYQRQAELFDTTIGWRFVNPLMQRQFGTDSMPETAENVAELLNISRADQDAFAFRSQQRTAQAQRGGILAQEIVPVDIIGRKGAVNVVRDDEHPRADTTIEQLSRLKTPFRQGGVVTAGNASGVNDGAAALIIASSQQAIVQGLTPRARIVAMATAGVEPKFMGLGPVPAVRKVLERAGLNINDMDLIELNEAFAAQALGVLRQLGLADDPPHVNPNGGAIALGHPLGMSGARLALSASLELQRRSGRYALCTMCIGVGQGIAMILERV

SEQ ID NO: 31845 - protein, 587 aa, Haemophilus influenzae 86-028NP
MQEQKLQENDFSTLQTFKRLWPMIKPFKAGLIASGIALVFNALADSGLIYLLKPLLDDGFGKANHSFLKIMAFVVVGMIILRGVTNFISNYCLAWVSGKVVMTMRRRLFKHLMFMPVSFFDRNSTGKLLSRITYDSEMIASSSSGSLITIVREGAYIISLLAVMFYTSWELTLVLFVIGPIIAVLITIVSKIFRKLSKNLQDSMGELTATTEQMLKGHKVVISFGGQFVEEERFNKVSNNMRRKGMKMVTADSISDPVVQIIASLALVAVLFLATTPLIAEDNLSAGSFTVVFSSMLAMMRPLKSLTNVNSQFQRGMAACQTLFAILDLEPEKDNGTYKAEPAKGALEFKNVSFAYQGKEELALNNISFSVPAGKTVALVGRSGSGKSTIANLVTRFYDIEQGEILLDGVNIQDYRLSNLRENCAVVSQQVHLFNDTIANNIAYAAQDKYSREEIIAAAKAAYALEFIEKLPQGFDTVIGENGASLSGGQRQRLAIARALLRNSPVLILDEATSALDTESERAIQSALDELKKDRTVIVIAHRLSTIENADEILVIDHGEIRERGNHKALLEQNGAYKQLYSMQFSG

SEQ ID NO: 31846 - protein, 815 aa, Haemophilus influenzae 86-028NP
MRVLKFGGTSLANPERFSQAAKLIEQAHLEEQAAGVLSAPAKITNHLVALSEKAALNQSTDTHFNEAIEIFYNIINGLHAENNQFDLNGTKALIDAEFAQIKGLLEEIRQAGKVEDAVKATIDCRGEKLSIAMMKAWFEARGYSVHIVDPVKQLLAKGGYLESSVEIEESTKRVDAANIAKDKVVLMAGFTAGNEKGELVLLGRNGSDYSAACLAACLGASVCEIWTDVDGVYTCDPRLVPDARLLPTLSYREAMELSYFGAKVIHPRTIGPLLPQNIPCVIKNTGNPSAPGSIIDGNVKSESLQVKGITNLDNLAMFNVSGPGMQGMVGMASRVFSAMSGAGISVILITQSSSEYSISFCVPVKSAEVAKTVLETEFANELNEHQLESIEVIKDLSIISVVGDGMKQAKGIAARFFSALAQANISIVAIAQGSSERSISAVVPQNKAIEAVKATHQALFNNKKVVDMFLVGVGGVGGELIEQVKRQKEYLAKKNVEIRVCAIANSNRMLLDENGLNLEDWKNDLENATQPSDFDVLLSFIKLHHVVNPVFVDCTSAESVAGLYARALKEGFHVVTPNKKANTRELVYYNELRQNAQASQHKFLYETNVGAGLPVIENLQNLLAAGDELEYFEGILSGSLSFIFGKLEEGLSLSEVTALAREKGFTEPDPRDDLSGQDVARKLLILAREAGIELELSDVEVEGVLPKGFSEGKSADEFMAMLPQLDKEFKTRVATAKAEGKVLRYVGKISEGKCKVSIVAVDLNNPLYKVKDGENALAFYTRYYQPIPLLLRGYGAGNAVTAAGIFADILRTLQH

SEQ ID NO: 31847 - protein, 411 aa, Haemophilus influenzae 86-028NP
MSDSVILALGIAAFTVIVLVLVAIILFAKSKLVDSGDITIDINDDPEKAITLPAGGKLLGALASKGIFVSSACGGGGSCGQCIVKVKNGGGEILPTELSHINKREAKEGYRLACQVNVKGNMEVELPEEIFGVKKWECTVISNDNKATFIKELKLAIPEGEEVPFRAGGYIQIEAEPHVVNYKDFDIPEEYHEDWDKYDLWRYVSKVDEHIIRAYSMASYPEEKGIIMLNVRIATPPPRQPDAPPGQMSSYIWSLKAGDKVTISGPFGEFFAKETNAEMVFIGGGAGMAPMRSHIFDQLKRLHSKRKMSFWYGARSKREIFYQEDFDQLQAENPNFVWHVALSDALPEDNWTGYTGFIHNVLYENYLKNHEAPEDCEYYMCGPPVMNAAVIKMLKDLGVEDENILLDDFGG

SEQ ID NO: 31848 - protein, 286 aa, Haemophilus influenzae 86-028NP
MLRPKKQSLKPKLKHRPFLKWAGGKFRLTDEINKAFPNKKNCLIEPFVGAGAIFLNSNFERYILADINPDLINLFNIVKENVEGYIEDCKPIFFADDANTPDYYYAKRRQFNASTDPFERSIIFLYLNRFGFNGLCRYNSKNEFNVPFGAYKTHYFPEDELRYFAHKAQSAVFLCCDFQKTFEFADKDSVIYCDPPYAPLQQETNFTGYAGNEFGLVQQRALADLAKSIQKEKQISILISNHDTKFTREIYNGAKFKRVKVQRSISQNPEKRVKVKELIAIFGARK

SEQ ID NO: 31849 - protein, 613 aa, Haemophilus influenzae 86-028NP
MTDKITFNDLGLPEFILKAVSDLGFETPSPIQQACIPHLLNGNDVLGMAQTGSGKTAAFALPLLAQIDPSEKHPQMLVMAPTRELAIQVADACEQFVKYAHGTRIVTLYGGQRYDIQLRALKQGAQVVVGTPGRILDHIRRRTLNLSELRFIVLDEADEMLRMGFIDDVETVMAELPENHQTALFSATMPEPIRRITKRFMNDPQEVKIKVNNENAPDIDQSCWYVHGVRKNEALLRFLEVEDFDAAIIFARTKTGTLDITELLEKNGFRSAALNGDMTQQLREQTLDRLRNGSLDIVVATDVAARGIDIERISLVVNYDIPLDAESYVHRIGRTGRAGRSGRALLFVEPRERRLLRNIEHLMKKGINEVELPNHLVLQECRRKKFVAKITKQLEHHDLEQYRSLLEDLFTADQDQEDIAAAMLMLLQGKQKLILPPDPPMEKRRRERNDRGDRRENPRSAERRGERKGYGNPQPMDLYRIEVGRADGVEVRHIVGAIANEGDINSRYIGHIKLYDDYTTVELPQGMPKELLQQFAKTRVLNKQMQMSFLGAVKSDNSRGSDDFNGKRKGRGGDFRGERGRERGNDNRGNRKFNEKSNRTFSDKPRRDRRSSF

SEQ ID NO: 31850 - protein, 406 aa, Haemophilus influenzae 86-028NP
MKMKLPIYLDYAATCPVDERVAKKMMAFLTIDGTFGNPASRSHKFGWQAEEAVDIARNQIADLIGSDSREIVFTSGATESDNLAIKGAAHFYQTKGKHIITCKTEHKAVLDTCRQLEREGFEVTYLSPEADGLIDLEKFKAALRPDTILASIMHANNEIGVLQDIKAIGELCRANKTIFHVDATQSVGKVEINLEELAVDLMSMSSHKLYGPKGVGALYVRRKPRIRLEAIIHGGGHERGMRSGTLPVHQIVGMGEAYRIAKEEMASEMPRLKALRDRLYNGLKDIEETYVNGSMEHRLDSNLNISFNYVEGESLMMALRDIAVSSGSACTSASLEPSYVLRALGLNDELAHSSIRFTLGRYTTEEEIDYTINLMKGAVEKLRALSPLWDMFKEGIDLNTIEWSAH

SEQ ID NO: 31851 - protein, 410 aa, Haemophilus influenzae 86-028NP
MTNKVSLDKSKIKFVLFEGVHQSALDTLHAAGYSNIDYYKKALDGDELKEAIKDAHFIGLRSRTHLTAEMIEAAPKLIAVGCFCIGTNQVDLNAAKARGIPVFNAPFSNTRSVAELVLGEILLLMRNVPQANAEVHRGVWNKSATGSYEVRGKKLGIIGYGHIGSQLSIIAESLGMDVYFYDIENKLPLGNAKQVRSLEELLSSCDVVSLHVPELPSTKNLMNATRIAQLKQGAILINAARGTVVDIDALAQALKDGKLQGAAIDVFPVEPASINEEFVSPLREFDNVILTPHIGGSTAEAQENIGFEVAGKFVKYSDNGSTLSSVNFPEVSLPEHEGTKRLLHIHENRPGILNKLNQIFVEANLNIAAQYLQTDPKIGYVVVDVETNDASPLLTKLKEIDGTIRARVLY

SEQ ID NO: 31852 - protein, 362 aa, Haemophilus influenzae 86-028NP
MQPTLFIDRDGTLIDEPKTDFQIDSLEKLKLEPKVIPALLRLKAKYRFVIVSNQDGLGTDAFPQTNFDKPHNVMMALFESQGITFDEVLICPHKPEENCLCRKPKIKLLDHYIRKNLFDIDRSFVIGDRETDVQLAENLGIRAIQYDPQKMNWDLIAEKLLGETVTNCGKRPPRFAEVIRQTKETDIKVQIWLDEAGVNEIKTGVGFFDHMLDQIATHGGFRMNVQCKGDLWIDEHHTVEDTALALGQALKQAIGDKRGIARFGFVLPMDECKAECALDLSGRPWIKFNACFKRDKVGDFSTELTEHFFQSLAFSMLATIHLNVTGNNDHHKIESLFKAFGRTLRQAIRIEGNEMPSSKGVL

SEQ ID NO: 31853 - protein, 328 aa, Haemophilus influenzae 86-028NP
MLHFAHIFQNKDHTMNITKPFPLPTGYFGIPLGLAALSLAWFHLENLFPAARMVSDVLGIVASVVWILFILMYAYKLRYYFEEVRAEYHSPVRFSFIALIPITTMLVGDILYRWNPLIAEVLIWIGTIGQLLFSTLRVSELWQGGVFEQKSTHPPFYLPAVAANFTSASSLALLGYHDLAYLFFGAGMIAWIIFEPVLLQHLRISSLEPQFRATIGIVLAPAFVCVSAYLSINHCEVDTLAKILWGYGFLQLFFLLRLFPWIVEKGLNIGLWTFSFGLASMANSATAFYHGNVLQGVSIFAFVFSNVMIGLLVLMTIYKLTKGQFFLK

SEQ ID NO: 31854 - protein, 330 aa, Haemophilus influenzae 86-028NP
MKKTFILQQQEISFVKNTFTQNLIEQLGIIEVQGPILSQVGNGMQDNLSGIEKAVQVNVKCIPNAIFEVVHSLAKWKRHTLARFNFKEDEGLFVHMKALRPDEDSLDPTHSVYVDQWDWEKVIPEGRRNFAYLKETVNSIYRAIRLTELAVEARFDIPSILPKQITFVHSEDLVKRYPDLSSKERENAICKEYGAVFLIGIGGKLSDGKPHDGRAPDYDDWTTESENGYKGLNGDILVWNDQLGKAFELSSMGIRVDESALRLQVGLTGDEDRLKMDWHQDLLNGKLPLTIGGGIGQSRLAMLLLRKKHIGEVQSSVWPKEMLEEFSNIL

SEQ ID NO: 31855 - protein, 184 aa, Haemophilus influenzae 86-028NP
MNKAIFLDRDGTLNIDYGYVHEIDNFKFIDGAIDALRELKKMGYMLVLVTNQSGIARGYFSEDQFLQLTEWMDWSLAEQDVDLDGIYYCPHHSEGKGEYKEDCDCRKPKSGMLLQAIKELKIDPTQSIMVGDKVEDLKAGIGAKVKMNVLVRTGKPVTGEGEGIADYVLDSIVDLPRILKRLKK

SEQ ID NO: 31856 - protein, 393 aa, Haemophilus influenzae 86-028NP
MENVVIVSAVRTPIGSFNGALSSVSAVDLGAIVIQEAIKRANIESALVNEVIMGNVLQAGLGQNPARQAALKAGIEKEIPSLTINKVCGSGLKSVALGAQSIISGDADIVVVGGMENMSQAPYLLDSKVRQGVKMGNLTLRDTMIEDGLTCASNHYHMGITAENIAEQYGISRQAQDELALRSQTLASQAVQLGVFDKEIIPVMVKTRKGDIIVSRDEYPKADTTAEGLAKLKPAFKKEGTVTAGNASGINDGAAALILVSESKAHALGLKAIAKIRSYASGGVDPSVMGLGPVPATQKALKKAGINLDDIDLIEANEAFASQFLGVGKDLNLDMNKTNIHGGAIALGHPIGASGARILVTLLHNLIEKDKKLGLATLCIGGGQGISMIVERL

SEQ ID NO: 31857 - protein, 484 aa, Haemophilus influenzae 86-028NP
MNLGIILPLIIYLTFVFGAAIFAYVKRTKGDFLTEYYVGNRSMTGFVLAMTTASTYASASSFVGGPGAAYKYGLGWVLLAMIQVPAVWLALGALGKKFALLSRETNALTINDLFFYRYKNKYLVWLSSLALLLAFFAAMNVQFIGGARLLETTIGISYTQALLLFALTVGIYTFIGGFRAVVLTDTIQGTVMIFGTIILLVGTIYALGGVESAVNKLTEIDPDLVTPYGPNGMLDFQFMASFWILVCFGVVGLPHTAVRCMAFKDSKALHRGMLIGTIVLSIIMLGMHLAGALGRAVIPNLTVSDQVIPTLMLKVLPPIVAGIFLAAPMSAIMSTIDAQLIQSSSIFVKDLYLSTKPEAAKNEKKVSYFSSIITLILTALLIFAALNPPDMIIWLNLFAFGGLEAAFLWVIVLGIYWDKANAYGALSSMIIGLGSYILLTQLGVKLFNFHQIVPSLAFGLIAFLVGNKLGERRIEKTQLKATAL

SEQ ID NO: 31858 - protein, 541 aa, Haemophilus influenzae 86-028NP
MDSRRSLLVLALIFISFLVYQQWQLDKNPPVQTEQTTSITATSDVPASSPSNSQAIADSQTRGRIITLENDVFRLKIDTLGGDVISSELLKYDAELDSKTPFELLKDTKEHIYIAQSGLIGKNGIDTRSGRAQYQIEGDNFKLAEGQESLSVPLLFEKDGVTYQKIFVLKRGSYDLGVDYKIDNQSGQAIEVEPYGQLKHSIIESSGNVAMPTYTGGAYSSSETNYKKYSFADMQDNNLSIDTKAGWVAVLQHYFVSAWIPNQDVNNQLYTITDSKNNVASIGYRGPVVTIPAGSQETITSSLWTGPKLQNQMATVANNLDLTVDYGWAWFIAKPLFWLLTFIQGIVSNWGLAIICVTIVVKAILYPLTKAQYTSMAKMRILQPKMQEMRERFGDDRQRMSQEMMKLYKEEKVNPLGGCLPILLQMPIFIALYWTFLEAVELRHAPFFGWIQDLSAQDPYYILPILMGISMFLLQKMSPTPVTDPTQQKVMNFMPLVFMFFFLWFPSGLVLYWLVSNLITIAQQQLIYRGLEKKGLHSRKK

SEQ ID NO: 31859 - protein, 120 aa, Haemophilus influenzae 86-028NP
MIKCLPRLFIGNIMETLDKIKKQISENPILIYMKGSPKLPSCGFSARASEALMHCKVPFGYVDILQHPDIRAELPTYANWPTFPQLWVEGELIGGCDIILEMYQAGELQTLLAEVAAKHA

SEQ ID NO: 31860 - protein, 711 aa, Haemophilus influenzae 86-028NP
MSRTIILIPVSTGVGLTSISLGLIHSLEQKGTKVAFMKPVSQPSTGEDKLDRTTSIIRTSTSLETAEPFMLSVAESLIGQNQSDVLLEKIVANHQQLTKNNDIVVVEGLIPTRKHGYANNINYEIAQALDAEIVLVAAPATETPTELKDRVEAAASLFGGKNNPNLLGVVVNKFNAPVDESGRTRPDLAEIFDSFQHNHISETEVNKLFAGSAIKLLACVPWNANLIATRAIDLVKHLGASIINEGEINRRIRGITFCARSLPNMVEHFRAGSLLVASADRPDVLVAAALAASNGIEIGGILLTGGYKIDAQINKLCQPTFEKAKLPIFRIEGNTWQTALSLQSFNLEVPVDDKERIENIKQYISQHFNADFINNLVADSSRLPRLSPPAFRFQLTELARAAKKRIVLPEGDEPRTIKAAVLCAERGIAECVLLADPASVQRVAEAQGVKLGKGITIINPADVRENYVDRLVELRKAKGMTETAAREQLEDTVVLGTMMLEANEVDGLVSGAVHTTANTIRPPMQIIKTAPGSSIVSSIFFMLLPDQVLVYGDCAVNPDPTAEQLAEIAIQSADSAKAFGIDPKVAMISYSTGTSGSGADVEKVKEATRIAKEKRPDLLIDGPLQYDAAVMEDVARSKAPNSPVAGKATVFVFPDLNTGNTTYKAVQRSADLVSIGPMLQGMRKPVNDLSRGALVDDIVYTIALTAIQATQ

SEQ ID NO: 31861 - protein, 401 aa, Haemophilus influenzae 86-028NP
MSKLVLILNCGSSSLKFAILDPATGEEKLSGLAEAFFLPEARIKWKLNGEKGNADLGAGAAHTEALNFIASNILTDELKNSIAAIGHRIVHGGEKYTQSVIVTDEVVKGIEDAAQFAPLHNPAHLIGIREAFNAFPHLKDKNVVVFDTAFHQTMSEEAFLYALPYSLYKEHGVRRYGAHGTSHYFISREVAEYVGKPADQVNAIICHLGNGGSVSVVRNGQCIDTSMGLTPLEGLVMGTRCGDIDPAIVFYLYKTLGMSMEQIEETLVKKSGLLGLTEVTSDCRYAEDNYDNASKPEAKRALNVYSYRLAKYIGAYMAVLGDDHLDAIAFTGGIGENSAHVRELALNHLKLFGIKIDNERNLAARFGKDGVITTDDSAFKAIVLPTNEELVIAQDTARLCF

SEQ ID NO: 31862 - protein, 315 aa, Haemophilus influenzae 86-028NP
MPDIKLFAGNATPELAKRISERLYISLGDATVARFSDGEIQVQINENVRGADVFIIQSTCAPTNDNLMELVVMVDALRRASAGRITAVIPYFGYARQDRRVRSARVPITAKVVADLLSIVGIDRVLTCDLHAEQIQGFFDVPVDNVFGSPVLIHDILKKSDLENPIVVSPDIGGVVRARAVAKLLNDTDMAIIDKRRPRANVAQVMHIIGDIADRDCILVDDMIDTGGTLCKAAEALKERGAKRVFAYATHAVFSGAAAKNLASDAIDEVVVTDTIPLSEEMKAIGKVRVLTLSSMLAEAIRRISNEESISAMFN

SEQ ID NO: 31863 - protein, 404 aa, Haemophilus influenzae 86-028NP
MSYTFSTYETLALASLVLLLGYFLVKRINVLKTFNIPEPVVGGFIVAIGLLIWHKIDGTSFNFDKNLQTTMMLVFFTSIGLSANFSRLIKGGKPLVVFLFIAALLIFGQNVIGIASSMALGIHPAYGLLAGSVTLTGGHGTGAAWADTFAHQFNLQGATEIAIACATFGLVFGGIIGGPVARFLLNRQKQGENPENDEVDDIQEAFEHPTYKRKITARSLIETIAMISVCLLIGQYLDVQTKGTALQLPTFVWCLFTGVIVRNILSNIFRFQVAESAIDVLGSVGLSIFLAIALMSLRLWELAGLAIDVLIVLAIQVAFMAAFAIFITYRAMGKDYDAVVLSAGHCGFGLGATPTAIANMQAVTSRFGPSHKAFLIVPMVGAFFIDLINAALLKVSFAVVNMLA

SEQ ID NO: 31864 - protein, 557 aa, Haemophilus influenzae 86-028NP
MMSHTETSLGAENTRTHNFITQIIDEDLASGKHKSVHTRFPPEPNGYLHIGHAKSICLNFGLAKEYQGLCNLRFDDTNPVKEDVEYVDSIKADVEWLGFKWEGEPRYASDYFDALYGYAAELIKKGLAYVDELSPDEMREYRGTLTEPGKNSPYRDRTIEENLALFEKMKNGEFAEGKASLRAKIDMASPFMVMRDPVIYRIKFASHHQTGDKWCIYPMYDFTHCISDAIERITHSICTLEFQDNRRLYDWVLENISIERPLPHQYEFSRLNLEGTLTSKRKLLKLVNDEIVDGWNDPRMPTISGLRRRGYTPASLREFCRRIGVTKQDNVVEYSALEACIREDLNENAPRAMAVIDPVRVVIENFESEAVLTAPNHPNRPELGERQLPFTKELYIDRADFREEANKQYKRLVLGKEVRLRNAYVIKAERVEKDANGEITTIFCTYDPETLGKNPADGRKVKGVIHWVSAVNNHPAEFRLYDRLFTVPNPGAEDDIESVLNPNSLVIKQGFVEQSLANAEAEKGYQFEREGYFCADSKDSRPEHLVFNLTVSLKEGF

SEQ ID NO: 31865 - protein, 756 aa, Haemophilus influenzae 86-028NP
MSEQLRQAALDFHEFPIPGKIEVTPTKSLATQRDLALAYSPGVAEPCLEIEKDPAASYKYTARGNLVAVISNGTAVLGLGNIGALAGKPVMEGKGVLFKKFAGINVFDIEVNEHDPDKLVDIIASLEPTFGGVNLEDIKAPECFYIEQKLRERMNIPVFHDDQHGTAIISAAAIINSLRIVGKKIEDVRLVASGAGAASIACLNLLLSLGMKRENITVCDSKGVVYKGRDDKMDQTKKDYAIEDNGWRKLGDAMPNADIFLGCSAAGALTQDMVKTMAAHPIILALANPNPEITPPEAKAVRPDAIVCTGRSDYPNQVNNVLCFPFIFRGALDVGATTINEEMKRAAVYAIADLALEEQNEVVTSAYGGEGATFGADYVIPRPFDPRLIVRIAPAVAKAAMESGVATRPIQNWDIYIDQLTQFVYKTNLFMRPIFSQAKSAKQRIILAEGEENKALHATQEVISMGLANPILIGRRSVIEEKIKKLGLRLTAGVDFEIVDNEDNPRYEECWKHYYELTKRKGITPAIAKRVVRSNTTVLASTLLSLGYADALVCGLFGSYGKHLASIRDIIGLKDGVKTAAALNSLVLPTGNVFLTDTHVNSNPTAEELAEITLMAAEEIHRFGIEPAVALLSHSNFGSSDSLGAPKMREVLQIVKERNPHLMIDGEMRGDLAMNEAHRKEVMPDSPLKGSANLLVFPDLSASRISYSLLRSTTTAITVGPILMGMNKSAHILNPGASVRRIINMIAYAAVKAQQE

SEQ ID NO: 31866 - protein, 564 aa, Haemophilus influenzae 86-028NP
MSVQQLISRLTDIVGSRYIITDPTKTEAYRSGYRFGTGNALAVVRPATLLEFWNIVKVCVEHDVIVINQAANTGLTGGSTPDGNDYDRDIVVINTMRIDGIKLINNASQVICLPGSTLNELENQLKPFGREPHSVIGSSCIGASVIGGICNNSGGALVQRGPAYTEMALYAQLNEKGELELKNHLGIDLGETPEEILTNLQEKRYQVKDIRQDCGHGHDHYYCNYVRQVDEGSPARFNADPARHYEASGCAGKLAVFAVRLDTFPLEKETAVFYIGTNQTSVLSDIRRHMLVNFEVLPISGEYIHRDAFDIAAKYGKDTFWVIKKFGTHWLPKLFSLKSNVDRIGKKFFFLPQHLSDKLMQTVSKFIPEHLPQSLWDYRNKYEHHLIIKMGGKGIQEAREYLESYIADGSKGGYFECNAIETQAAMLHRFAVASAAIRYRAIHEKEVEEIVALDVALRRNDQDWFEVLPPEIDNRIISKLYYGHFMCHVFHQDYIVKKGYDYEELEYEMLKLLDKRGAQYPAEHNVGHLYEAKPTLRKFYKELDPTNSFNPGIGKTTRKKYWAE

SEQ ID NO: 31867 - protein, 337 aa, Haemophilus influenzae 86-028NP
MPNFSFVFFYDSAKITPISTALLGRKMNYLKIAQDSLSVESNALLQLSQRLGEDFNQVIDLILACEGRLVIGGIGKSGLIGKKMVATFASTGTPSFFLHPTEAFHGDLGMLKPIDIVMLISYSGETDDVNKLIPSLKNFGNKIIAVTSNKNSTLARHADYVLDITVEREVCPNNLAPTTSALVTLALGDALAVSLITARNFQPADFAKFHPGGSLGRRLLCKVKDQMQTRLPTILPNTNFTDCLTVMNEGRMGVALVMENEQLKGIITDGDIRRALTANGAETLNKTAKDFMTSSPKTIHQDEFLSKAEDFMKAKKIHSLVVVNDENHVVGLVEFSS

SEQ ID NO: 31868 - protein, 669 aa, Haemophilus influenzae 86-028NP
MTKRTSFNPLVIGVTLFFILLLMAMIFIAPEQTQALLNQAKSGIFANFSWFYVLTFSVFLGFLLILSVSSLGNIKLGQDEEEPEFSFLSWLAMLFAAGMGVGLMFFGVAEPLTHYLSDITVGSAEHKQQEALLHTLFHWGIHAWAVYGTIALALAYFGFRYKLPLALRSCFYPLLKDRINGKIGDAIDVMALLATLFGIITTLGFGSSQLGAGLEQIGWISQNSFALQVGVIVVVMCLAVFSAISGIGKGVKILSEINLTLAFCLLLFVLISGPTLYLLSAFSDNIGNYFSNLVQLSFKTYAYEQEHTSWFSGWTVLYWAWWCSWAPFVGLFIARISKGRTIREFIFGVLVIPSLFGILWFTVFGNTAVWLNDGIAAGGLGEFISSPEILLFKFLNYLPLPTITGFVSLLVISLFFITSADSGIYVLNNIASRDKSLASPAWQAIMWGTLMSVVAIVLMQSGGLANLQTMTLIVALPFALLMLVMCFSLWKGLIADKKYFSTKVNPTSIFWSGDKWKSHLEQMMNQTQEKDILRFLKNTALPAMRELRQELTGKYNLSVEINTLFEQEEPALELVIHKESMRDFMYGIKSVGREVSEQLINDENLPHIQHSVTYEPYTYFFDGRVGYDVQYMDQDELIADMLKQYERYLSLLDDVGQELMAHEQTELAE

SEQ ID NO: 31869 - protein, 444 aa, Haemophilus influenzae 86-028NP
MSNTILQNLPKGQKVGIAFSGGLDTSAALLWMRQKGAVPYAYTANLGQPDEDDYNAIPKKAMAYGAENARLIDCRSQLAHEGIAAIQCGAFHISTGGIPYFNTTPLGRAVTGTMLVAAMKEDDVNIWGDGSTFKGNDIERFYRYGLLTNPNLKIYKPWLDVQFIEELGGRLEMSQFLIENGFDYKMSVEKAYSTDSNMLGATHEAKDLEQLSTGMKIVKPIMGVAFWDEKVEIKPETVTVTFEDGVPVALNGKHFDNAVDLILEANRIGGRHGLGMSDQIENRIIEAKSRGIYEAPGMALLHIAYERLVTGIHNEDTIEQYRINGIRLGRLLYQGRWFDPQALMLRETAQRWVAKAITGTVTLELRRGNDFTILNTESPNLTYEAERLSMEKVEDAPFDPVDRIGQLTMRNLDVSDTRGKLGIYAQTGLLSAIKDSVLPQLGKK

SEQ ID NO: 31870 - protein, 353 aa, Pseudomonas sp. M1
MSYQVTIEPTGEQIEVEEGQTILQAALRQGVWLPFACGHGTCATCKCQVLEGEVDLGAASSFALMDMERDEGKVLACCAIPQSDLVIEADIDVDPDFAGHPVRDYHAVVSRLVDLSPTIKGVHLKLDRPMAFQAGQYVNLQLPGIEGTRAFSLANPPSRPDEVELHVRLVEGGAATGFIHDGLREGDAVEVSGPYGQFFVRGSQAGDLIFIAGGSGLSSPQSMILDLLEQGDARRITLFQGARTRAELYNRELFEELATRYANFTYVPALSQAAEDGQWSGFRGYVHDAAKKHFDGRFGGHKAYLCGPPPMIDAAITCLMQGRLFERDIFMERFYSAADGAAEGQRSALFKRI

SEQ ID NO: 31871 - protein, 325 aa, Phelipanche ramosa
MDNTKSINSLLTLTISSLILLSLSITPCQAQLSPTFYDSICPNALSTIRTSIRRAVAAERRMAASLIRLHFHDCFVQGCDASILLDDSPTIQSEKSAGPNVNSVRGYDVIETAKREVESICPRNVSCADIVALAARDASVAVGGPTWTVKLGRRDSTTANPNEANTDLPSPFASLQTLITAFDDKGLSETDMVALSGSHTIGQSRCFLFRSRIYSNGTDIDPNFASTRRRQCPQTGGDNNLAPLDLVTPNSFDNNYFRNLIQRKGLLESDQVLFNGGSTNALVTSYSNNPRLFATDFASAMVRMSEIQPLLGSNGIIRRVCNVIN

SEQ ID NO: 31872 - protein, 220 aa, Capsicum chinense
MQDSTTRAFASSSSSSGDGNNDAGDFECNICFELAQDPIVTLCGHLYCWPCLYRWLRLHPQCHECPVCKALIQEEKLVPLYGRGRTFTDPRSKPIPGLEIPSRPAGQRPETAPQPEPNNFPNLGFGHMGGFFPTATARFGNFSMFAGFGGLLPSLLSFQFHGFPGPTAYPTTSNHPFGYTPAYHGAHVRNAHDTAQVQADSNLKFMFLLVGFLVLIYLLG

SEQ ID NO: 31873 - protein, 418 aa, Candida albicans SC5314
MKLYIFVLVACVSSQTIFRSPSLLDQLYGELHGRTNTAPNLQVQAEDPNQMVTQKVLAMRSKLTLPDKDDTSDIAIDQNMFGGILTYAHFNHFNCFISDDFDKHSTTDQQTTKNIDIAIVGAPFDTGTSYRPGARFGPESIRSNSRRLGSAWKSTKKRFNYPVNPYDETTHNYSIIDCGDVAMTPFDNRIALNQLYRGHRSISKHPGNVNQHPKIITLGGDHTITLMAIKNAHEQLRTKIRVFHFDSHIDTWDPKKLGGGITDYMSLNHGTFLHYATELGYIETKGNYHVGIRAPYIDANYDKQHDADCGFHIIQANDIDKIGVQGIIDELAKDPNIPTYISVDIDVLDPAYAPGTGTMEAGGFTTRELLSILDGLKNKVNVIGGDVVEVSPPYDTNSEITSLAATSVVDSLLKLMIV

SEQ ID NO: 31874 - protein, 324 aa, Candida albicans SC5314
MHERTQNSIKLIAGNSHPELCESIAQRLSLSIAKIGAFQYTNQETAVAVGESVRDEDVYIIQTGCGEEQINDFLMELLMIINACRVASARRITAVIPSFPYARQDKKDKSRAPITAKLVANLIQTAGCDHVITMDLHASQIQGFFRVPVDNLYAEPSVLRYIKENYKQSDIIMVSPDAGGAKRVASLADKLDIQFALIHKERQKANEVSKMVLVGDVTDKICLLIDDMADTCGTLCKAADVLLESKARKVVCMITHGIFSGNAIERLNNSKLEKVICTNSLPVQDKLKQCDKIEMLDISSTLAEAIRRLHNGESVSYLFNNVPE

SEQ ID NO: 31875 - protein, 945 aa, Candida albicans SC5314
MTKKGHEYIQLSTFSEHENEHEPESSSTTSSPPPPGIRQYEKQHEWNFTDLQLQFVLLRLGVISDEVYHNQNFSLSDPDIHISKEVEYMINKIDQLSISEAIEIIRDALADHNGDVNFLIEDYQLLERLISQIPNNIESQKSNQNVETNLDELPEMKYPMQSTFKNKTYLTIIDWSLQIRLEAALIHYHSPYPEIRAITDPFDDPNTPVETFRAYFIALFWTFIGSLINSFFYHRMPGISLGTHTIQILLLPSGKLWEKLIPLNKTITINNTKINLNPGPWNFKEMMLSTIIYSCSASTPYSINNIFVMKLDRFYGLKWVNWIFQILFTVSTQLLGFSFAMIMKKVCVYPSKAIWPTILPTIALNRALMNQDNASNNSIVHGWKISPYSFFLVTFTLSFIYNWIPSYFFKALSLFNWPTWFNPNSIHLVNITGSNVGLGFNPIPSFDWNVIGGSSMVIPFYTFVNRYLGTFLGFIIILIVYYTNNNWTAYLPINSNRLFNKKAQLYNVHDILNDDNKLFDNEKYQQIGPPYFSAANLVIYGAYFCLYPFAILYHGLTEWNSMKTSFINVWTSIVDAFKSESEMGVSVESNDDNNLSLHRQYGRYANDPHCKMMAHYPDVPDWWFITILVVSTSFAIAAVWFYPVETPIWGIFFTIAINFIFLIPLTSIASVTGFSFGLNVLVELIVGYAIPNSGIALITLKAYGYNIDSQASNYITDQKLAHYAKIPPRAIFKGQLLSTLLNIIISLSVANWQLNNVENICDPHQKDNFKCPGANTYFYSSIQYGEIGPAKVFGGLYPILKWCFLLGVLLVFPCVWLKRNGPTKIFQRYFQPTIIIGGMLDFAPYNLSYFTGGLYISYIFMFYIKKNYLLWWEKYNYILTSALSAGVAFSALIIFFTVQYHPHPLHWWGNSIGQQGIEGGEISPIWKNIDTAPDGYIGLRKGHFP

SEQ ID NO: 31876 - protein, 507 aa, Candida albicans SC5314
MDDSDEEYMGSKSPSSKLPSTAPEKSASPGGAKSGMSARTRSSRRGEVSDLKGANGYAWEDEYQRSWDIVKDDEQGGNSFEAMVQSIIENRKKKIMKNPSTPFQRGIIRTLIIIIDGSSAMSEKDLRPTRLSMTLNYLQEFVVEFFDQNPISRLGIILMRNGVANLVSEVSGSPQYHVDKIRNLKARQHNRFEPKGDPSLQNSLEMARSLLKFNFGSTSNNSKNSKEILVIFGALFTSDPGDIHKTIDSLVKDEIKASVIGLSAQVAICQELVNRTNNEPRNSQSKHYGVIMNESHFKELLMESVTPLPLTESEKQIQESEQNGVPVLRMGFPTKVQPTLTSAIGGSDYIVEFPHLNASFPTQGSEDSKDVVEIQTNKPAAAVATTSSSVIGYQCPQCKCKVCNLPTICPVCGLMLILSTHLARSYHHLVPLAPYKEVKVSPIYDSTYCFGCQLKFPEGVKLGTHKGTLESMTSSRYRCLKCSQDFCINCDVFVHEVLHNCPGCENN

SEQ ID NO: 31877 - protein, 320 aa, Candida albicans SC5314
MSTNSIKLLASDVHRGLAELVSKRLGLRLTPSELKRESTGEVQFSIGESVRDEDIFIICQIGSGEVNDRVFELMIMINACKTASARRITVILPNFPYARQDRKDKSRAPITAKLMADMLTTAGCDHVITMDLHASQIQGFFDVPVDNLYAEPSVVRYIKETIDYSEAIIISPDAGGAKRAAGLADRLDLNFALIHKERARANEVSRMVLVGDVTDKICVIVDDMADTCGTLAKAAEVLLDNNAKDVIAIVTHGILSGNAIKNINNSKLKKVVCTNTVPFEDKLKLCPKLDTIDISAVIAESIRRLHNGESISYLFKNAPL

SEQ ID NO: 31878 - protein, 535 aa, Candida albicans SC5314
MSAEEVIQYISRRKLFTENNEYNESYLLLFTIASSMIWIMIPGLAFLYSGLARRKSALSMIWIVIMSSFVGIFQWYFWGYSLAFSDTSKNSFIGDLHFFGFKNLLGASDDKTTYPDIAYSLFQLQFLLVTLAIIAGGCIAERGRFLPALVFMFCWATVVYCPVVYWIWGGGWASSYRSGALDYAGGGPVEILSGMSAFVYSAFLGRRNETLMINYRPHNISTIFLGTSLLYVGWLFFNGFSCGNPSLKVAYSMMNTHLCGAFGAISWCLLDFRLENKWSMVAVCSGCISGLVAATPSSGMIPLWASVILGITAGIVCNLSTKIKYLLHVDDSLDVWAEHGMAGVVGLIFNALFGSATVIGYDGVTDHQGGWIDHNWKQLYIQIVYILATMAYSGVVTAILCFVINKIPGLHLRIDYNGEEAGVDEDQIGEFAYDYVEVRRDFLDWGIPTVNPTYQNSINDHQQQQQPEVPEITSQQKRVGGGLSGIEETEEKQVQGIPIKRQTQIIDGTTTQSNSDTTSNTSIQEKHDPVEYRPS

SEQ ID NO: 31879 - protein, 410 aa, Candida albicans SC5314
MSSKQQYLKKNPDDVVVVAAYRTALTKGGRGGFKDVGSDFLLKKLTEEFVKKTGVDPKIIQDAAIGNVLNRRAGDFEHRGALLSAGLPYSVPFVALNRQCSSGLMAISQVANKIKTGEIECGLAGGVESMTKNYGPEALIAIDPAYEKDPEFVKNGIPMGITNENVCAKFNISRDVQDQFAAESYQKAEKAQKEGKFDDEILPIEVFQEDEDAEDEDEDEDEDAEPKEKLVVISKDEGIRPGVTKEKLAKIKPAFKSDGVSSAGNSSQVSDGAALVLLMKRSFAEKNGFKPLAKYISCGVAGVPPEIMGIGPAVAIPKVLKQTGLSVSDIDIYEINEAFAGQCLYSIESCNIPREKVNLNGGAIALGHPLGCTGARQYATILRLLKPGEFGVTSMCIGTGMGAASVLVRE

SEQ ID NO: 31880 - protein, 534 aa, Candida albicans SC5314
MSAEEVIQYISRRKLFTENNEYNESYLLLFTIASSMIWIMIPGLAFLYSGLARRKSALSMIWIVIMSSFVGIFQWYFWGYSLAFSDTSKNSFIGDLHFFGFKNLLGASDDKTTYPDIAYSLFQLQFLLVTLAIIAGGCIAERGRFLPALVFMFCWATVVYCPVVYWIWGGGWASSYRSGALDYAGGGPVEILSGMSAFVYSAFLGRRNETLMINYRPHNISTIFLGTSLLYVGWLFFNGFSCGNPSLKVAYSMMNTHLCGAFGAISWCLLDFRLENKWSMVAVCSGCISGLVAATPSSGMIPLWASVILGITAGIVCNLSTKIKYLLHVDDSLDVWAEHGMAGVVGLIFNALFGSATVIGYDGVTDHQGGWIDHNWKQLYIQIVYILATMAYSGVVTAILCFVINKIPGLHLRIDYNGEEAGVDEDQIGEFAYDYVEVRRDFLDWGIPTVNPTYQNSINDQQQQQQPEVPEITSQQKRGGGLSGIEEAEEKQVQGIPIKRQTQIIDGTTTQSNSDTTSNTSIQEKHDPVEYRPS

SEQ ID NO: 31881 - protein, 359 aa, Candida albicans SC5314
MSKSVNVAIIGSGVVGSSYLSQLNNLKSNIAFNVIYLAKTSEEALYSKDYSPVDLSTYETAPTQPTLSLDDLVKFIKGAKKPTVLVDNTSSPAIANYYPTFIKEGISIATPNKKAFSSDLKEWKEILQTAELPGAGLVYHECTVGAALPIISPLKDLIATGDKVDKIEGIFSGTLSYIFNEFSKTEKSDVKFSDVVKKAKELGYTEPDPRDDLNGLDVARKVTILARISGLEVEGPTSFPVESLIPKELECVESVAEFMEKLPNYDADIQKVKDEAFAENKVLRFVGKVDLNTNKVSVEIGKYGFDHPFASLKGSDNVVSIKTGRYPNPLIVQGAGAGAEITAHGVLADTIKIAERIAN

SEQ ID NO: 31882 - protein, 342 aa, Candida albicans SC5314
MTTGTSKPKVLLVGEFIYSKQKWSELEEIAEVIQSESTTREQFIQDLKTKYNDITCIARTFYSINETGRFDADLAQHMPKTLKSVSHCGAGYDQVDVEPFTRLGVQVSNVTEPVERPTADVAVFLVLACMRNFLQGRQILMNGEWPSNGDKEAAGAPLGHTPQGKVVGILGMGGIGRAIRDRLKPFGFDGIVYYNRKQLSPELEKGAEYVTMDELFKQSDVIIIGVPLNAKTRHLIDKEAIQKMKDGVVLVNIARGAIIDEKHLPELIKSGKIGAFGADVFEHEPEVSAELVNLPNVVALPHMGTHSVEALTNMEEWVVCNVETFIKTGKLKTIVPEQQGIF

SEQ ID NO: 31883 - protein, 888 aa, Candida albicans SC5314
MAPQQVNAFSANGSIPSPKEFEGKGKLKLSGRILNVMTSLPLQIISDYDNKTGQYYWDVETVRGNSALYSSQHFLAENKEWETHLIAWTGELINKKKDTSSLTADTLQDDPLYLDEEDKSKIEKKLCDASGTPNIHPVWLLRRDQGRWRKYAENVLWPVFHYIQGQPSDGKAETDAWHDYVKFNEAYLNKIKSVYKPGDIIWIHDYYLLLLPQLLRMEFPNAYIGFFLHVPFPSSEYFRCLSKRSQLLDGMLGADKIGFQSDSFQRHFISCCARVLGCEVNRDSVSAYGTTISVETLPIGIDTEKIEHDAFSSELGVEEKVQALKQVYKGKKLIVGRDRLDKVRGVIQKLEGFEIFLDMYPEWRETVVLIQVSSPGYSHSANVETRVTEIISRINSKYGNLNHTPVLHYQMRVAKEEYLALLRVADLALITSVRDGMNTTSLEFVICQKYNNSPLILSEFTGTATVLKDAIMVNPWDSVGVAKTINDALMLSTKEKVSLESKLYEKVLSNTVQNWTSTFICDILSHSIVTHSNSYTPALNRPLLLNNYKESQRRLFLFDYDGTLTPIVQDPAAAIPSDKLNRILDVLSSDPKNQIWIISGRDQAFLEKWMGNKNVGLSAEHGCFMKDIGSKEWVNLAASFDMSWQEKVDDIFKYYTEKTPGSNIERKKVALTWHYRRADPDLGNFQAEKCMKELNDTVAKEYDVEVMAGKANIEVRPKFVNKGEIVKRLVLHPHGAKQEKHPTGHCTKDIPIEELPDFMLCLGDDLTDEDMFNSLNEINKKWKGDNRPTNKFGSYGVYPVAVGPASKKTVAIAHLNEPRQVLETLGLLAGLVSIFESAGTVDLDDRGHLANSVSSERSKHAVSKAVSLRKKASQEKEIVKEDPTNGAK

SEQ ID NO: 31884 - protein, 156 aa, Candida albicans SC5314
MDYFQTEKTTETRQQRQQKKRPVRNSIICTLSLSYQPNFVMSSLIGWLSSWFQNEPITPELKKEIESNINSHKVLVYSKSYCPYCTSTKTLLQSLNQDYKVIELDQIPKGSAIQNGLQELTGQRTVPNVFINGKHIGGNSDIQALHSQGKLKPLFG

SEQ ID NO: 31885 - protein, 127 aa, Candida albicans SC5314
MIDKMSSILAWGFNLWYQPPPPTAQTEKEIEHTINSHKIVIYSKTYCPFCDQTKHLLNEQYPQESYEVINLNILDDGLTIQNQLYANTGQYMVPIIFINGQHVGGNSEVQQLHTNGKLQELLNPQKY

SEQ ID NO: 31886 - protein, 342 aa, Candida albicans SC5314
MTTGTSKPKVLLVGEFIYSKQKWSELEEIAEVIQSESTTREQFIQDLKTKYNDITCIARTFYSINETGRFDADLAQHMPQTLKSVSHCGAGYDQVDVEPFTRLEVQVSNVTEPVERPTADVAIFLVLACMRNFLQGRQILMNGEWPSNGDKEAAGAPLGHTPQGKVVGILGMGGIGRAIRDRLKPFGFDGIVYYNRKQLSPELEKGAEYVTMDELFKQSDVIIIGVPLNAKTRHLIDKEAIQKMKDGVVLVNIARGAIIDEKHLPELIKSGKIGAFGADVFEHEPEVSAELVNLPNVVALPHMGTHSVEALTNMEEWVVCNVETFIKTGKLKTIVPEQQGIF

SEQ ID NO: 31887 - protein, 442 aa, Candida albicans SC5314
MLSSRIPKGKLLKQTSATSYLNLAKSIPITTARYRPNQYYANELAKPNVFTIHNIPSPCFSQVRNFHSSFPRKLQMQQTEQGDNRPALEKFGSDLTQLAKEGKLDPVIGRDHEIRRTIQILSRRTKNNPVLIGNAGTGKTAVMEGLAQRIIRGEVPDSMKDKQIITLDLAGIISGAKYRGDFESKLKSILKEVEEKNGKVILFIDEFHLLMGLGKAEGSIDASNLLKPALARGKLSMCGATTIEEYRKYVEKDAALARRFSPVTVNEPTVEDTISILRGLKERYEVHHGVRIMDSALVTAALYSNRYITDRFLPDKAIDLVDEASSTLRLQHESRPDAIATLDRQIMTIEIELESLRKEEDQLSIDRKHKLEKELEVKKSELKELTDQWESEKRAIDAVKNAKSELEKAKYELEQATREGDYARASRIQYASIPELQDKIQD

SEQ ID NO: 31888 - protein, 1462 aa, Candida albicans SC5314
MSTVVNRRSSHQFDSPSNHLDHSSSMNVDKVVQSVTNATKRLSQISTNTNNSNKKRKTQNKIGPWKLGRTLGRGSTGRVRLAKNTTTGQLAAVKIVPKSNFKKLENPKYKRSKEDATRLPYGIEREIIIMKLISHPNIMGLYDVWENKNDLYLILEYIEGGELFDYLIKRGKLQEYEAINYFKQIINGINYLHQFNICHRDLKPENLLLDFNKNIKIADFGMAALEVKEKLLETSCGSPHYASPEIVAGKNYHGAPSDIWSCGIILFALLTGHLPFDDENIRKLLLKVQSGKFNMPPELSFEAKDLITKMLKVNPRERITIDAILTHPLLAKYPEPTVSYSSTTTLDINSINIKQIESVDKIDKEILKNLSVLFHNCDEKTIISRLLSPNRCPEKMFYYLLMKYRNEHLSNSNSFNSSNDVDSARSLPRSTSYVKTTVTDHATGEKHTTVKKIQQSSSIYSNRSLLKKSTSAKGNVLSNITNRPNTPKQFSASSSFNKKKALHSKTQIYASRSRNASSRSLKSNSSTGRNGNNASVTSVNKIPEITGATVLQPIPSMAMNRGDEQQNKTKKNLTGTFGNKSLLNFQLICEEVFENDKENSKPVSKTPVSQLPPPPPPPIETPTSRTNSVKRGKTWSLARRERELAEQVRQRNEARENKLKAEELARKELEQEKKRIAEEKKRLEQQERELDEKQKLQEKQKAALEKLQKHQSAHDFEGLFASNRRSVTDMAPSSGMSSLDPRAHMVSRANTIGSPNLSSSSVNIDENASKVLHKFGIDVAPSPKRFSRASKTSTSKNLSSFLAPTVSRNLSSQLKTSSSKNLAGYLHGTTDTNGSAIAAKKKDDSTNEALTIEEFNAKERTSMSPSISKASVNKRNSNQSSYYRSMFSDNGNDDNVTKVRTGESHLSVQEEEEMDMENAIDEDISLIPNPRFSRFSFGGLLGSNTVANEEGDWTIMNSTLNHSNTVVRGTHNKSSTMLGLGIKMRDTTTIKEDEEFEDEKPFISVPSSEDDEGNTHKNKRGGLRDSGNYDFDEEHSVASTANTEYSDVASQGQQMPGSHTIHQLETELSNFDLLSYRVADIGKVNKHKPSIVDSKETLLKNHSSDEATIEVKEDNNEHDFNDKIKQHYDDNGDSEEDDEDEDEEEEDDDDDDDARSSFEARPHSHNYSLAEITSESPVGGGYESPSIANDFKKSRHSTGIFSTTQFPRSPYVVNNNGDSNKDENSQQQTKHMLNDGHKGLITSPVQDTFGSKKPVESNSLFRRLSLNPNRAAPKAPAPPPPSAPISSAAKANISQPLSSPTKGHNRFSRISIGSKNMLQKEDKSTKSNWFKKFFHSLTTPSAKDQSGNSSSKVASKDIKIIDTSLTAAQLIRVIKYQLELKKIEGSISKVDIDEEFGLISGVIPSKFANGRKLKFKIEVIDLINSSSLHVIKMKGNDKGFQSLVNIVTFIIKKEEQDKISRR

SEQ ID NO: 31889 - protein, 439 aa, Candida albicans SC5314
MSGVSDFLSKGIDLVQKAIDADTATRYEEAYKLYYNGLDYLMLAIKYEKNPKSKELVKSKFTEYLTRAEQLKDHLEKQAQNKSTAESSVNGSTKAKKSNGDSNGSGDDNDDADTKKLRGALAGAILSEKPNVKWSDIAGLDAAKEALKEAVILPVKFPQLFVGNRKPTSGILLYGPPGTGKSYLAKAVATEANSTFFSVSSSDLVSKWMGESERLVKQLFTMARENKPSIIFIDEVDALCGPRGEGESEASRRIKTELLVQMNGVGNDSQGVLVLGATNIPWQLDAAVRRRFERRIYIALPDVEARTRMFEINIGDVPCECTPHDYRTLAEMTDGYSGHDVAVVVRDALMQPIRKIQQATHFKPVIDETDGKEKLTPCSPGDEGAREMNWMDLATDELKEPPLTIKDFIKAIKNNRPTVNEADIAQHVKFTEDFGQEGN

SEQ ID NO: 31890 - protein, 439 aa, Candida albicans SC5314
MSGASDFLSKGIDLVQKAIDADTATRYEEAYKLYYNGLDYLMLAIKYEKNPKSKELVKSKFTEYLTRAEQLKDHLEKQAQNKSTAESSVNGSTKAKKSNGDGNGSGDDNDDADTKKLRGALAGAILSEKPNVKWSDIAGLDAAKEALKEAVILPVKFPQLFVGNRKPTSGILLYGPPGTGKSYLAKAVATEANSTFFSVSSSDLVSKWMGESERLVKQLFTMARENKPSIIFIDEVDALCGPRGEGESEASRRIKTELLVQMNGVGNDSQGVLVLGATNIPWQLDAAVRRRFERRIYIALPDVEARTRMFEINIGDVPCECTPHDYRTLAEMTDGYSGHDVAVVVRDALMQPIRKIQQATHFKPVIDETDGKEKLTPCSPGDEGAREMNWMDLATDELKEPPLTIKDFIKAIKNNRPTVNEADIAQHVKFTEDFGQEGN

SEQ ID NO: 31891 - protein, 253 aa, Candida albicans SC5314
MGVIEIESEQQFTELTKADPSKLIALYFHTPWAGPCKTMNQVFKTLADSKESDNSIIFLSINADELPEISEIFEVSAVPYFILIRNQTILKELSGADPKEFIQALNQFSNNTNSTTTSNNDNVQASINSTTANTNSNNTTTNAPEVEESEEALNERLNKLTKAAPIMLFMKGSPSSPQCGFSRQLVAILREHQVRFGFFDILKDDSVRQGLKKFSDWPTFPQLYINGEFQGGLDIIKESIEDDEKFFEHALEA

SEQ ID NO: 31892 - protein, 695 aa, Candida albicans SC5314
MTGVLEVVKSITSNEGFVSEVPHLYGGEEHHKVKSHEFDSNSINNTNYNSNVFVPAYDEREVTVKEWFQYIFANPLKMIADYLISLFPILKWILHYNIRWLYGDLVAGITVGVVLVPQSMSYAQLAGLEAQYGLYSSFVGVFIYSFFATSKDVSIGPVAVMSLQVSKVIAHVQDKFGDKYAAPEIATFLSLICGGIALGIGLLRLGFILEFISIPAVMGFMTGSAFNIITGQVPGLMGYNSKVNTRDSTYLVVVNTLKHLPDSTVDAAFGLIPLFILYLWKFSTDYAQKRYPRHKMYFFYFQQLRNAIVIIVATAISWGIVHPKKVAFNGPSSKFKPPIKTIGDVPSGLRHVGVMSIPDGIISAMASEIPVSTVILLLEHIAISKSFGRINDYKVVPDQEVIAIGVNNLIGTFFNAYPATGSFSRSALKAKCGVRTPLAGIFTGAVVLLALYALTKAFYYIPKATLSAVIIHAVSDLIANYKITWSFWKMSPIDCGIFLIAVILTVFVTIEAGIYFAIAASVVVLLVRVAIPHGQFLGKIQIAEVVNPIIEQTGSHDEHNASASDGTSYSSDLEIHQVLSEGTNYKSTDEAGKLKAKEDIKPVEGVTTSALQRNNPQVKFHTRWVPLNNENINAGIKVQPPPPGVLVFKPVETFTYPNASRQVDKVSDEAKRLTRRGKPFDYSKMGQDLGMIQAH

SEQ ID NO: 31893 - protein, 268 aa, Candida albicans SC5314
MANSKYEYVKLFEKENYLLPDTYIIIRVDGKGFHKFSQFYEFEKPNDLKALQVMNSAAEKLMSKYSDVMLAYGDSDEYSFLLRKNCQLYERREMKLTTLFSSLMSTYYMYFWSQYFPDKPLHIDHLPNFDARAVLYPDFKHIRNYFSWRQVDCHINNLYNTTFWNLVLKLKMTPQQAEQRLMGTVASDKNEILFKECGVNYNNESEMYKKGTIIVREFENYETEDEAELSKRQVQRLEKKRKKAELKIYHVDIINDDSWWKSRPWLKD

SEQ ID NO: 31894 - protein, 799 aa, Candida albicans SC5314
MSTKTDISTEELVSLFSKAGFEEKKSAEIVKNKKVASALYNILGSNFPKTDDKKLSLLHQLAIHESKNGKVPNHDFIIDGIQKGDLKTALQVTEGIKYLQNNATVDKEKFDEASGVGIEITPEEAKVEISKYLDSIKTDLESKRYSILPKVLGEVKTQPSLKWAPPNLFKPILDEEFLARLGPKDERDVKKKEKKAKTPANAAATKKQDTGSEPERSMFSEGFLGDLHKPGEEPQMYPELLEEHKKFICDKVYTRFPPEPNGFLHIGHSKAIMVNFGYAQFNKGNCYLRFDDTNPEAEEEVYFNSIKEMVSWLGYKPWKITYSSDYFDELYELAIKLIKSDKAYICHCTPEEVKASRGLKEDGTLGGERVACKHRFQTVEHNLREFENMKNGKYNVGEATLRMKQDLNSPSPQMWDLVAYRVLNTPHHRTGDKWKIYPTYDFTHCLVDSFENITHSLCTTEFVLSRESYEWLCDALHVYRPAQREYGRLNLTGTIMSKRKIAKLVNEGYVRGWDDPRLYTLEGIKRRGVPPGAILSFINTLGVTTSTTNIQTVRFESAVRNYLDQTTPRLMMVLHPIEVVIDNLDESFSLDVEIPYKPGKDEKSMGYRKLTFSKHIYIDENDVRAEPADKEFYRLAPGQPVGLMRVPFNISFKSIEEKDGKKIVHVNYDEGVKAKPKTYIQWIPKDTAVHIKEVRIYNQLFKSENPSAHPEGYLKDINPDSEEVLRNAVVEENLKDIVAKSPMNIEIPGSAFNIKENKGNNTVRFQALREGYFCLDKDSKEDGLILNRIVSLKEDAAKK

SEQ ID NO: 31895 - protein, 488 aa, Candida albicans SC5314
MYKSIFKTTGRLGKTVSSRNFVTTLPKPLATSSSPATNAPNKTSNPKTGELHVSTPVDTAKISIEPPEGSSISLKSASRDASLFGTRPIYLDVQATTPVDPRVLDKMLEFYTGLYGNPHSSTHAYGWETDKEVEKARTYIADVINADPKEIIFTSGATETNNMAIKGVPRFYKKTKKHIITTQTEHKCVLDSARHMQDEGFEVTYLPVSSEGLINLDDLKKAIRKDTVLVSIMAVNNEIGVIQPLKEIGKICRENKVFFHTDAAQAYGKIPIDVNEMNIDLLSISSHKIYGPKGIGACYVRRRPRVRLDPIITGGGQERGLRSGTLAPPLVAGFGEAARLMKQESSFDKRHIEKLSSKLKNGLLSIPSTQFNGCNDAKSQYPGCVNVSFAYIEGESLLMALKDIALSSGSACTSASLEPSYVLHALGADDALAHSSIRFGIGRFTTEAEVDYVIQAINERVDFLRKMSPLWEMVQEGIDLNTIEWSGH

SEQ ID NO: 31896 - protein, 765 aa, Candida albicans SC5314
MKFFIDDLPVLFPYPRIYPEQYSYMCDIKKTLDVGGNCILEMPSGTGKTVSLLSLTVAYQMHYPEHRKIVYCSRTMSEIEKALIELHKLMEFRANELGEVEDFRGLGLTSRKNLCLHPTISKERKGVVVDEKCRRITNGQLKEKIEKGVPTEDSLCSFHEKLYDLEPHNLVPPGVYSFDALIKYCKEEGTCPYFTVRRMIPFCNIIIYSYHYLLDPKIAERVSRELSKDSIVIFDEAHNIDNVCIESLSLDLTDETLKKASRGANKLGEAIEDMKAQDSEKLQNEYEQLVEGLRQAEIARDQELFMANPVLPQDLLDEAIPGNIRKGEHFIAFLKRFIEYLKTRMKVLHVISETPTSFLQHLKELTYIERKPLRFCSERLSLLVRTLEVTEIDDFNALKDIATFATLVSTYDSGFQLILEPYETEGSTVPNPILHFTCLDASIAIKPVFDRFSSVIITSGTISPLDMYPKMLKFETVIQESYAMTLARRSFLPMIVTKGSDQVSISSRFEIRNDPSVVRNYGSLLIEFAKITPDGMVVFFPSYLYMESIISMWQSMGVLDEVWKHKLILVETPDAQETSLALETYRKACSNGRGAVLLSVARGKVSEGIDFDHHYGRTVLMIGIPFQYTESRILKARLEFMRDHFQIKENDFLSFDAMRHAAQCLGRVLRGKDDYGIMVLADRRFARKKNQLPKWIAQALNDSDTNLSTDMALATAKKFLRSLAQPTNPKDSEGVSIWNIEQLQEYQQQFQKDEMDIDEEDLDLL

SEQ ID NO: 31897 - protein, 826 aa, Candida albicans SC5314
MTGVLEVVKSITSNEGFVSEVPHLYGGEEHHKVKSHEFDSNSINNTNYNSNVFVPAYDEREVTVKEWFQYIFANPLKMIADYLISLFPILKWILHYNIRWLYGDLVAGITVGVVLVPQSMSYAQLAGLEAQYGLYSSFVGVFIYSFFATSKDVSIGPVAVMSLQVSKVIAHVQDKFGDKYAAPEIATFLSLICGGIALGIGLLRLGFILEFISIPAVMGFMTGSAFNIITGQVPGLMGYNSKVNTRDSTYLVVVNTLKHLPDSTVDAAFGLIPLFILYLWKFSTDYAQKRYPRHKMYFFYFQQLRNAIVIIVATAISWGIVHPKKVAFNGPSSKFKPPIKTIGDVPSGLRHVGVMSIPDGIISAMASEIPVSTVILLLEHIAISKSFGRINDYKVVPDQEVIAIGVNNLIGTFFNAYPATGSFSRSALKAKCGVRTPLAGIFTGAVVLLALYALTKAFYYIPKATLSAVIIHAVSDLIANYKITWSFWKMSPIDCGIFLIAVILTVFVTIEAGIYFAIAASVVVLLVRVAIPHGQFLGKIQIAEVVNPIIEQTGSHDEHNASASDGTSYSSDLEIHQVLSEGTNYKSTDEAGKLKAKEDIKPVEGVTTSALQRNNPQVKFHTRWVPLNNENINAGIKVQPPPPGVLVFKPVETFTYPNASRQVDKVSDEAKRLTRRGKPFDYSKIGSRPWNDPGPLRWNLPWSKKEKVEEKVEDNRPILRIVHFDFSTVASIDVTAIQALVDLRKALNAYADREVEFHFSGILSPWIRRGLLNAGFGTYEDGLLSTNNYVNIAAGYKDLEDHVDEPYYAATGTNTPFFHLDIPNYS

SEQ ID NO: 31898 - protein, 520 aa, Candida albicans SC5314
MLRVNSRLLTTRKSQFMFTSNSLRFLATFKPADPLTTHDINPQTVEAKYAVRGKIPIIADELNELIQKQPQSHGLPFSKIINANIGNPQQLEQRPLTWYRQVLSLLQYPDLLKNGDPETVKSLYPEDVIERAQSILKHIGSIGAYSHSQGASYFRQSIAEFITNRDGGYVSHANNIFLTSGASTAVSYLLQILSVNENSGFLIPIPQYPLYTATIALNNAKPIGYYLDESNHWSTNPQEIRELIETNQSQGINIKALVVINPGNPTGAILSSQDIIELIDIAAEYGIVLIADEVYQENIFKGKFVSFKKILSELIEQDPQTYKHVQLASLHSTSKGVSGECGQRGGYMELVGFKPEVKDVVFKLASINLCSVVSGQALMELMINPPQEGDPSYPLYKSETESIHNDLESRAESLYQAFLQMEDIKCNKPMGAMYIFPTLDFDPARYHKLYSRAKNSNLQIDDIYCIELLEGTGICCVPGNGFGQKPDTYHLRTTFLPPGKEWIDKWINFHKSFIKKYKDE

SEQ ID NO: 31899 - protein, 557 aa, Candida albicans SC5314
MTDIPESLKPFVTKKVIHSTWAGTFLCKPQAIFQPRNVEEIQELIKQARLHGKTIMTVGSGHSPSDLTMTTEWLCNLDKFNHVLLEEPYYAPKSPTDDTPEIKFVDLTVEAGTRIFELNEYLKRNNLAIQNLGSISDQSIAGLISTGTHGSTQYHGLVSQQVVSVKFLNSAGELITCSSVDKPEYFRAILLSLGKIGIITHVTLRTCPKYTIKSKQEIINFETLLNNWDNLWLESEFIRIWWFPYTNKCVLWRANKSTDPLSDPRPSWYGTKLGRFFYESLLWVSVHLFPRLTPFVEKFVFGQQYGEVETLGKGDIAVQNSVEGLNMDCLFSQFVNEWSSPLNSGPEILTELKKIITDASQTGDFFVHAPIEVRCSNVTYSDEPFTDDKNQKSLYPSQEWLSNRSKTSAGPIPGNNLRPYLDNSPKLPYSKDGKITNDQLTLFINATMYRPFGTNVETHKWFQLFEDVMSKAGGKPHWAKNFIGLTQDEKYDKQQDLKTQLEFGGKPFYTMLGFKPVMQDWFGKDLVAFNKVRKETDPDGVFLSGKVWAERNGILLD

SEQ ID NO: 31900 - protein, 400 aa, Candida albicans SC5314
MPIDINTKAKCYFDTRPLTKGERKIIKDSIPILEYLDIQFGEKFFKRLIKQFPQYKPYFNETHLKLLRQPRSFHHCLLEFARNIDDLRPMKDFIMRIASKHVARQVSPDQYRVFGQVLVEVMMDQFPKEFVDQEFVEAWTMAFRILANILINIEVREYQDKPWYGFKAFRVTRLQPECVGTKSFFITPVDGTPVPIPKRGQYLCMRWKFPGEKQERLREYTISEFPKNNEYRITVRYIPGGKVTTYIHEKLAVGDIVQVSPPCGDCYYRSSKRNMVMLAGGNGVVALAPMIEKGLAEGRKVKFLYSNRSTETRSFGQFFRDLKQKYGDQLEVVEYLSRRRVIDPIDKYYRRSLTVEDLDFIVPEDDVYLIGPRTYMKMIEDYLKGRGVNVTLDYFGPQEV

SEQ ID NO: 31901 - protein, 783 aa, Candida albicans SC5314
MIILPSVRNLLFLSSRKSIKVLPARQYLQNLTFTSTRLNLIHSTPSSYLLKTACLSQFRTYATTPSSNLPPSQVLVKSHLDATNLKKKEIKQERFEEFQKQENKKTFKQNLRTIGRIIKLGKPDWKLFVLAIGFILCAVLYPTTAVKLVGSVLDSFNNNIKDEDGDLIVWGYKVSTVFAVMIPFMAVSAVCFWARIWVLKLLGERLVARLRARVMKNLLRHDQEFFDNDTHKVGDLISRLSSDAYIVSRSITSNLPDGLKNLLFGLLSSYMMYSINPMLFGMMLLISPPITIGSVFYGEKIRKLSTNLQNATAGLTKVSEETLNSIKLINAFTGEQKELRKYSTRLRRVVDVAKQEAFAQSNYSVSIYSLYHTGYLACVALGVYLMTKGTMSAGDVVAFTMYSEFFNSALYSLTTTYLELMKGAGAGVKLFALIDYKNKVPAIQGEKVTTWRPTSVKDDIQFNDVTFSYPTRPNHTIFDHCNFKIVGGTSTCIVAPSGAGKSTVASLLLRAYDIQSGEILIGGKNIKDIQVRDLRRYIIGIVQQEPVLLSGTILENIVYGLTSSEINRLTMQDIIDVSKQANCHDFIVTFPDGYDTIIGNRGASLSGGQKQRIAIARALIKRPKVLILDEATSALDSKSESLINETLKNLTNEGSMTIISIAHRLSTISKSEFVVVLGKHGQVVETGKFVELFSDPDSELSKLLDESATSQAAADRQEEEEELQQENRHKTQEDEREHINREAEEIENEQIKYSKAKNLIESLPSDMKQQLLTEINIEEKHAD

SEQ ID NO: 31902 - protein, 119 aa, Candida albicans SC5314
MFRTLLTKRLFNTSTMVSSQVKNKVEQLIKTKPVFIASKSYCPYCKATKSTIEAITKDAYILELDEVDDGAEIQEALLEITGQRTVPNVFIGGQHIGGNSDVQALKSSDKLDDKIKAAL

SEQ ID NO: 31903 - protein, 514 aa, Candida albicans SC5314
MSMYPQRTQHQQRLTELLDAIKTEFDYASNEASSFKKVQEDYDSKYQQQAAEMQQIRQTVYDLELAHRKIKEAYEEEILRLKNELDTRDRQMKNGFQQQQQQQQQQQQQQQQQQQQIVAPPAAPPAPPTPVTSLSVIDKSQYIVNPTQRANHVKEIPPFLQDLDIAKANPEFKKQHLEYYVLYNPAFSKDLDIDMVHSLDHSSVVCCVRFSRDGKFIATGCNKTTQVFNVTTGELVAKLIDESSNENKDDNTTASGDLYIRSVCFSPDGKLLATGAEDKLIRIWDLSTKRIIKILRGHEQDIYSLDFFPDGDRLVSGSGDRSVRIWDLRTSQCSLTLSIEDGVTTVAVSPDGKLIAAGSLDRTVRVWDSTTGFLVERLDSGNENGNGHEDSVYSVAFSNNGEQIASGSLDRTVKLWHLEGKSDKKSTCEVTYIGHKDFVLSVCCTPDNEYILSGSKDRGVIFWDQASGNPLLMLQGHRNSVISVAVSLNSKGTEGIFATGSGDCKARIWKWTKK

SEQ ID NO: 31904 - protein, 2110 aa, Candida albicans SC5314
MFTIMTKFQKTNHGLLLCQWLKVYINPELEKDACGVGFTCHLKGVPSHKIVSDAKSLLCNMTHRGGELNPQDGDGAGLLSSIPHKFLKREFQYYCNVELPAKGQYGVGNVFFKKDDAVFEKSKKTFESIADSLGLKVLGWREVPHDSSILGAAALSREPYILQPAVVYKEIWGQEVSDDEFDSKYRKDFEKRLFILRKQASHTIGLHNWFYICSLSNKTIVYKGQLAPKQVYSYYHDLVNAEYESHFALVHSRFSTNTFPSWDRAQPLRLAAHNGEINTLRGNKNWMRAKEGVMKSKLFGDEMDKLFPIIEEGGSDSAAFDNVLELLVINGVVSLPEAVMMMIPEAWQNDENIDPKKKAFYEWAACLMEPWDGPALFTFADDRYCGANLDRNGLRPCRYYVIDDDRMICASEVGVIEIQPEKVIQKGRLQPGRMLLVDTKEGRIVDDRELKSKVASRYDFKSWVLANMISLQDLNEKLASRKIDINAKPIDVNVNVQSDPRLIAAGYSHEQILFVLAPMAEGNEALGSMGNDNALACISEQPKLLYEYFRQLFAQVTNPPIDPIREKIVMSLECYVGPQGNLLEMKPDQLNRLLLKSPILTSSELLAIKNIQTVYPSWSVANIDITFEKSEGIQGYINTIDRICQAASQAIADDNQIIILSDVATSAERLPISALIAVGAVHHHLVRQKQRSKVALIIETQEAKEVHHACCLVGYGADAINPYLAMETLVRMKHQGLLKNESLTEEKIIQNYKGSIDAGILKVMSKMGISTLASYKGAQIFEALGIDNSVIDRCFAGTASRIKGVTFEYIAQDAFTLHERGYPTRDTIKPIGLPETGEYHWRDGGDAHINDPAAIASLQDAVRNKNERAYEAYAKKENEAVRNCTLRGLLDFEFESSTEVPIDQVEPWTEIVRRFFTGAMSYGSISMESHSTLAVAMNRLGGKSNTGEGGEDAARSQVLENGDTMRSAIKQVASGRFGVTSYYLADADELQIKMAQGAKPGEGGELPGHKVSAEIGKTRHSTPGVGLISPPPHHDIYSIEDLKQLLYDLKCANPRARTSVKLVSEVGVGIVAAGVAKAGSENILVSGGDGGTGAAKLTSIKYAGLPWELGLAESHQTLVLNDLRGRVILQTDGQIRTGRDIAIACLLGAEEWGFATSPLIAMGCIYMRKCHLGTCPVGIATQDPELRKKFEGTPEHVINFFYYLANDLRKFMAKLGFRTINEMVGRTEKLKVRDDLRNTKNANIDLSPILTPAHTIRPGVATHCVRKQDHKLHIRVDNKLIDESELTLAKGLPVTIDCEVVNTDRSLGTTLSYRVSKTFGEQGLPHDTIHVNVTGSAGQSFGAFLASGVTLELEGDANDYIGKGLSGGRIIVYPPRESKFKAEDQIIAGNTAFFGATSGSAFIRGIAAERFAVRNSGAIIVTEGTGDHGCEYMSGGRVVVLGATGRNFASGMCGGIAYVLDMAQDFSEKVNRAQVELSQVTETEEIAFLRNLIEDHRHYTGSEVADNILNDFNRYLPRFVKVLPNDYKKVLEKEKKLAEEAKKKELSSFLKSIKEDPESDVTNGEAYKIKKGHVHHPNKGKNEPKVADVEDTIFNTEFEKKAPVKLDKLRGFMKYKRRNEKYRDAKARTKDWNEMTSRLTKEELKYETARCMDCGVPFCTSDTGCPISNVIPKWNELVFNDRWYDALQRLMMTNNFPEFTGRICPAPCNGACVLGINEDPVNIKSVECAIIDHGFEQGWIKPTPPAHRTGKTVAVIGSGPAGLAAADQLNKAGHLVTVYERSDRPGGLLMYGIPNMKLDKGIVKRRTDLLAAEGIEFICNTTVGEDITVSELKSQFDAVVFAVGSTIPRDLRIPGRELKNINFAMQLLHSNTKALLDDQLEDIRKNLAGKNVVVIGGGDTGNDCLGTSTRHGAKSVTNFELLPNPPNARPKDNPWPQWPRIFRVDYGHTEVATHYGKDPREYSILSKEFVGDEEGNVKGIKTVRVEWKRSDSGAWQMAEVPGSEEFFPAEVVLLSMGFLGPEADNLEVQKTKRGTITTVDPNVYKVDKDDNVFAAGDCRRGQSLVVWGIQEGRQCAREVDEYLMGSTRLPGNGSVEQRNYKLLEELAEKV

SEQ ID NO: 31905 - protein, 2126 aa, Candida albicans SC5314
MSPSASYLPQEEFSTTNVYDYDEVPENKSWASSLPVAKGLYNPELEKDACGVGFTCHLKGVPSHKIVSDAKSLLCNMTHRGGELNPQDGDGAGLLSSIPHKFLKREFQYYCNVELPAKGQYGVGNVFFKKDDAVFEKSKKTFESIADSLGLKVLGWREVPHDSSILGAAALSREPYILQPAVVYKEIWGQKVSDDEFDSKYRKDFEKRLFILRKQASHTIGLHNWFYICSLSNKTIVYKGQLAPKQVYSYYHDLVNAEYESHFALVHSRFSTNTFPSWDRAQPLRLAAHNGEINTLRGNKNWMRAKEGVMKSKLFGDEMDKLFPIIEEGGSDSAAFDNVLELLVINGVVSLPEAVMMMIPEAWQNDENIDPKKKAFYEWAACLMEPWDGPALFTFADDRYCGANLDRNGLRPCRYYVIDDDRMICASEVGVIEIQPEKVIQKGRLQPGRMLLVDTKEGRIVDDRELKSKVASRYDFKSWVLANMISLQDLNEKLASRKIDINAKPIDVNVNVQSDPRLIAAGYSHEQILFVLAPMAEGNEALGSMGNDNALACISEQPKLLYEYFRQLFAQVTNPPIDPIREKIVMSLECYVGPQGNLLEMKPDQLNRLLLKSPILTSSELLAIKNIQTVYPSWSVANIDITFEKSEGIQGYINTIDRICQAASQAIADDNQIIILSDVATSAERLPISALIAVGAVHHHLVRQKQRSKVALIIETQEAKEVHHACCLVGYGADAINPYLAMETLVRMKHQGLLKNESLTEEKIIQNYKGSIDAGILKVMSKMGISTLASYKGAQIFEALGIDNSVIDRCFAGTASRIKGVTFEYIAQDAFTLHERGYPTRDTIKPIGLPETGEYHWRDGGDAHINDPAAIASLQDAVRNKNERAYEAYAKKENEAVRNCTLRGLLDFEFESSTEVPIDQVEPWTEIVRRFFTGAMSYGSISMESHSTLAVAMNRLGGKSNTGEGGEDAARSQVLENGDTMRSAIKQVASGRFGVTSYYLADADELQIKMAQGAKPGEGGELPGHKVSAEIGKTRHSTPGVGLISPPPHHDIYSIEDLKQLLYDLKCANPRARTSVKLVSEVGVGIVAAGVAKAGSENILVSGGDGGTGAAKLTSIKYAGLPWELGLAESHQTLVLNDLRGRVILQTDGQIRTGRDIAIACLLGAEEWGFATSPLIAMGCIYMRKCHLGTCPVGIATQDPELRKKFEGTPEHVINFFYYLANDLRKFMAKLGFRTINEMVGRTEKLKVRDDLRNTKNANIDLSPILTPAHTIRPGVATHCVRKQDHKLHIRVDNKLIDESELTLAKGLPVTIDCEVVNTDRSLGTTLSYRVSKTFGEQGLPHDTIHVNVTGSAGQSFGAFLASGVTLELEGDANDYIGKGLSGGRIIVYPPRESKFKAEDQIIAGNTAFFGATSGSAFIRGIAAERFAVRNSGAIIVTEGTGDHGCEYMSGGRVVVLGATGRNFASGMCGGIAYVLDMAQDFSEKVNRAQVELSQVTETEEIAFLRNLIEDHRHYTGSEVADNILNDFNRYLPRFVKVLPNDYKKVLEKEKKLAEEAKKKELSSFLKSIKEDPESDVTNGEAYKIKKGHVHHPNKGKNEPKVADVEDTIFNTEFEKKAPVKLDKLRGFMKYKRRNEKYRDAKARTKDWNEMTSRLTKEELKYETARCMDCGVPFCTSDTGCPISNVIPKWNELVFNDRWYDALQRLMMTNNFPEFTGRICPAPCNGACVLGINEDPVNIKSVECAIIDHGFEQGWIKPTPPAHRTGKTVAVIGSGPAGLAAADQLNKAGHLVTVYERSDRPGGLLMYGIPNMKLDKGIVKRRTDLLAAEGIEFICNTTVGEDITVSELKSQFDAVVFAVGSTIPRDLRIPGRELKNINFAMQLLHSNTKALLDDQLEDIRKNLAGKNVVVIGGGDTGNDCLGTSTRHGAKSVTNFELLPNPPNARPKDNPWPQWPRIFRVDYGHTEVATHYGKDPREYSILSKEFVGDEEGNVKGIKTVRVEWKRSDSGAWQMAEVPGSEEFFPAEVVLLSMGFLGPEADNLEVQKTKRGTITTVDPNVYKVDKDDNVFAAGDCRRGQSLVVWGIQEGRQCAREVDEYLMGSTRLPGNGSVEQRNYKLLEELAEKV

SEQ ID NO: 31906 - protein, 493 aa, Candida albicans SC5314
MTNSVIGQLKNFLTALNLLSIHSSRKEIFFFLNYKRDSKNLLNENFIYLFFFSFFSFLLFLFHSIYTHTYTQNTNRNMSKGKVCLAYSGGLDTSVILAWLLEQGYEVIAFLANIGQEEDFEEAEKKALAIGATKFVVVDVRKEFVEKVCFPAIQSNAIYENVYLLGTSLARPVIAQAQIKVAEENGCFAVSHGCTGKGNDQVRFELSFYALKPDVVVIAPWRDPEFFQRFAGRKDLLDYAASKNIPVAQTKAKPWSTDENLAHISFEAGILENPDTTPPKDMWKLTVDPTDAPDKPETFSVVFEKGLPVKLILDDSKKEITDPVELFIEANSLARRNGVGRIDIVENRFIGIKSRGCYETPGLTILRNTHVDLEGLTLDREVRAIRDQFVTPTWAKILYNGMYFTPEGEYVRSMIPPSQVTVNGVVRAAAYKGSVTILGRSSDTEKLYDETESSMDELTGFSPEDTSGFIAVQAIRIKKYGEAAREKGKPLDL

SEQ ID NO: 31907 - protein, 408 aa, Candida albicans SC5314
MDRLNQLSGQLKPTSKQSLTQKNPDDVVIVAAYRTAIGKGFKGSFKSVQSEFILTEFLKEFIKKTGVDASLIEDVAIGNVLNQAAGATEHRGASLAAGIPYTAAFLAINRLCSSGLMAISDIANKIKTGEIECGLAGGIESMSKNYGSPKVIPKIDPHLADDEQMSKCLIPMGITNENVANEFNIPREKQDAFAAKSYSKAEKAISSGAFKDEILPIRSIIRSPDGSEKEIIVDTDEGPRKGVDAASLSKLKPAFGGTTTAGNASQISDGAAGVLLMKRSLAEAKGYPIVAKYIACSTVGVPPEIMGVGPAYAIPEVLKRTGLTVDDVDVFEINEAFAAQCLYSAEQCNVPEEKLNINGGAIALGHPLGCTGARQYATILRLLKPGEIGLTSMCIGSGMGAASILIKE

SEQ ID NO: 31908 - protein, 783 aa, Candida albicans SC5314
MDKIRAVISGGEKPPVDTDNDHNTDFEADRKMPDLDIVVSKSQEFDPVTSHLVNDIMEDEYAAVHVEDDSPYPEVRAAVPSTDDPTLPQNTIRAWVIGLILTTVGCGMNMLFSFHSPSFAITTFVTSILAWPIGNFWAWIVPDWKIFGASLNPGPFNVKEHTIITIMANVSFGTGAAYATDILLAQNMFYKSNFGWGYNLLLIWSTQCIGFAFGGVLRRFVVDSPGAIWPSNLVTATFLTNMHINENHTANGWKISRLAFFVIVFVASFVWYWFPGYIFQALSYFSWITWIKPNNVIINQVFGSSSGLGMIPNNIALDWNQIAGYIGSPLIPPASVIATIFGSIVVIFWIVVPAIHYSNTWYSQYLPISSTGSFDRFQQTYNVSKIIDHKTLSFNEAEYKKYSPLFLSTTFAISYGLSFASILATITHTICFHGRDLIASLKAKEKPDVHNRLMKAYKPVPEWWYLIVFLVFFGMSIATVRAWPTEMPVWGLVFALIIAIIFLLPVAIIYAKTNIAVGLNVVTEFIVGYVLPGRPIAMMLFKTFGYITNNQAVTFVQDMKLGHYMKIDPRTLFWAQFAATIWGSLVQIAVLEWAYGAIDNLCAADQKNHYTCPNGKVFFNASIIWGVIGPQRQFSHGQIYYGLLFFFIIGAVTPVINWLILKKWPNSPVKYLHWPVFFSGTGYIPPATPYNYTSYCAVGLFFGWWIEKKWFHWWSKYNYSLSAGLDIGLAWCSLIIFLCLSLTNTDFPSWWGNDVINTTLDTQVVTNIRHILKEGEAFGPSSW

SEQ ID NO: 31909 - protein, 685 aa, Candida albicans SC5314
MIGMNRLIFSKAFTSSCKSMGKVPFTKSITRANTRYFKPTSILQQIRFNSKSSTTPNTEANSNGSTNSQSDTKKPRPKLTSEIFKLLRLAKPESKLIFFALICLVTTSATTMTLPLMIGKIIDTTKKDDDDDKGKDNDDKDDTQPSDKLIFGLPQPQFYSALGVLFIVSASTNFGRIYLLRSVGERLVARLRSRLFSKILAQDAYFFDLGPSKTGMKTGDLISRIASDTQIISKSLSMNISDGIRAIISGCVGLSMMCYVSWKLSLCMSLIFPPLITMSWFYGRKIKALSKLIQENIGDMTKVTEEKLNGVKVIQTFSQQQSVVHSYNQEIKNIFNSSMREAKLAGFFYSTNGFIGNVTMIGLLIMGTKLIGAGELTVGDLSSFMMYAVYTGTSVFGLGNFYTELMKGIGAAERVFELVEYQPRISNHLGKKVDELNGDIEFKGIDFTYPSRPESGIFKDLNLHIKQGENVCLVGPSGSGKSTVSQLLLRFYDPEKGTIQIGDDVITDLNLNHYRSKLGYVQQEPLLFSGTIKENILFGKEDATDEEINNALNLSYASNFVRHLPDGLDTKIGASNSTQLSGGQKQRVSLARTLIRDPKILILDEATSALDSVSEEIVMSNLIQLNKNRGVTLISIAHRLSTIKNSDRIIVFNQDGQIVEDGKFNELHNDPNSQFNKLLKSHSLE

SEQ ID NO: 31910 - protein, 921 aa, Candida albicans SC5314
MSTEKPIPALPVTSITSHVDVAAHEVNLQAITSNPLSIGEVGTTLTNGQKDFILKRLHYDSLVSFDKLPPQATFIFEKIEHISIEEALAILEKAVVEHENDVNILDNDEELWTKLINYKQGKIPSDTDFSEKAHPSNFTAKDKLSAFIHEKRVSEETSSLDNSASENLNEPYYKIVDWELQVKLEAVLIAYWSPYPQVRGVTDPYDDPTIPVETVRVYIVAIIWTAIGAVINQFFSERQPSIGLGMSVVQVFLYPTGLICEWILPKWKFKVWKYTIDLNPGPYTFKEQMLATIFCGVSSGTSYVSSNILMQKSELFYDNKWVDFGYQVLLTLSTNFLGFGLSGIMRQFAVYPEKAIWPSILPNVRLNKTLMSPEVKARINGWSISGYNFFFITAGISFLYFWIPDYLFQALSQFNWMTWIKPDNYNLAVVTGSFGGLGLNPIPSFDMNVIGTGGFIAPFYNTLESYIGMVLALFCILGVFYSNYKWTGFLPINSNRLFTNEGKPYHVTAVVNSNSLFDEEKYKEVGPPFYSAGNLVLYGAFFAIYPFHFVYEIAMNYKQMWEALQSLYKGIRNFKRSTYEGFDDPHSVMMRAYPEVPEWAYLIILVISLVLAILCVKLYPAETPVWGIFFALAINFVFLIPLTTVQSRTMFGFGLNVLVELIVGYAIPGNGLALAFIKALGYNIDGQAQNFINDLKQGHYAKLPPRAMYRCQLLSVFITSFIQLGILNYQITGIKDYCVPGNKQKFTCPGTTTFYNASVLWGVIGPKKVFNGLYPILAWCFLIGFLLAFPCIAFKKWAPRKYSKYFEPSIIIGGFLGYAPYNLSYNTGGLYVGYAFMHYVKRKYEAWWQKYDYLLATGIDAGIAFSSIIIFFAVMYHEKDISWWGNNVPFEGWDASMTNGYLNATLQAPDGYFGPRVGHFP

SEQ ID NO: 31911 - protein, 904 aa, Candida albicans SC5314
MESSVVDSKKPNEGMGLPGFSRSQVNLANSTPNLARVAKPLAPPPLNRGRSSFSKALFTFHGNSSATSLLSEDGTADSSPVILPSSLEDDFDQNFHDMVHGKSRLAPFGGFSRPGVESQFLSEKNIFDVAPWTIVPPDNGNGSLTKAVNVSIDSGIMDKAKWVGIVAMPSDDVSLRVKSEISQKLSADYDCEAVFPDDVTFEGHYKSFCKQILWPTLHYQIPDDPKSKAFEDHSWGHYVLMNQLIADKIVETYNDVNDEETTVWIHDYHLLLVPKMVRDKLPNAKIGFFLHVSFPSSEVFRCFAQRNQLLEGMLGANSIGFQTNEYVRHFLQTCNRLLLADTSESGVNYQGNFTVTSTIPVGIDAYSVRENVHTEQVTEWRSLIKERWKDQHLIVSRDKLDKLRGIKQKLLAYEMFLTDNPEYIESTVLIQICIGSAQDPDYESEIMKIVSRINSMPENISVTQPVVLLQRDIGFDQYLALLCEADVFVVSSMREGLNLTCHEFITATEDKKSPLMLSEFTGSSNLLSCKGEGAILINPWDIKKFSETIKTSLTMPTSEKELRWHNCNQIVLTHDSKHWVTSCLNSIVNSWKIDHKKSGNLVPFTKNAFKDWCSVNGKRLIILALEISSAVSNSRGNSAGSTSGKVNVIDPSGLVRLLSDLVESQDTFVYLLSYLQRSDLDIMFKRYPQIGLIAENGNFVKLIGAKNWISLADKDELNSWMPEIVKLVESKVERLPGSFCEALDATVRFHAGKSFSEDRERSLDTMGETIQHINTLFEHNGVHATLVRNSVIVQKDQISLKAIRLVLSCHNSNLDQKYVVTHINEFQQPMKDDIPSNDHEVAAVLYSGGLTSIDEANYEYVNSLKKDIGNTLTVTLISSSNEETKTAATYGVRGINELLCILNS

SEQ ID NO: 31912 - protein, 301 aa, Candida albicans SC5314
MVDSNFFVDFMMGGVSAAVSKTAAAPIERVKLLIQNQDEMIKQGRLEKRYTGIVDCFKRTAADEGVVSFWRGNTANVIRYFPTQALNFAFKDKFKAMFGFKKDENYWKWFAGNLASGGLAGATSLAFVYSLDYARTRLANDAKSSKGDGKREFNGLVDVYKKTLASDGIAGLYRGFGPSVIGIVVYRGLYFGLYDSLKPVVLVGPLEGSFLASFLLGWAVTTGASTASYPLDTVRRRMMMTSGQAVKYDGALDCFRKVVAAEGVGSLFKGCGANILRGVAGAGVISLYDQLQVILFGKKFK

SEQ ID NO: 31913 - protein, 404 aa, Candida albicans SC5314
MRKCKIFVGSSHPELGQLVCDRLGVEPAPCTLKKFSNGETSVQIGVSVRDEDVYIIQSGSPHINDHIMELLILISACRGGSANKITAVIPQFPYSKQSKMKKHRGAITARMLANLLVMAGADHVVSMDLHASQMQGFFSKPVDNLFGAPTLARWIRHHIPDWENAVVVSKNPGGTKRVTALADSLKINFAMIHTDRRRTQDEYAKKKELKQAQIIEEGEDNIVSELQTARVVQGHVVDDDYQANGTSEHLAKEGILDSDVLGGTYDATGSDDEDETTTSSEEKLITLVGDVKDKVAIILDDMIDKPNSFIAAAEHLRLNCGAKAVYVVGTHGVFNDKCLKDLTDSKCIDKIVVTNTYPISKEQIEKHKDKLVVIDVSPIFAECIRRDHFGESISVLFDSLSSIE

SEQ ID NO: 31914 - protein, 467 aa, Candida albicans SC5314
MDDNLYLTTYEAALAVVATAMKKARLRIDVLVINSFMGGMLFTTGGMLYDLIRAGFSGINETNPGVISLLQGICYPIGLFYVVILGVDLFNSNILFFSTALCRGAVSFLDLFISWFVSWWFNLVGNIFVCYIFCYYSDVVRTQLMVVGSVEVAVQKAESTFVETLLKATAGNFYVCLAIFLQLMAKPLHVKFLMMLLPVFTFVAMGFTHSVADMFLVTMGLINGAPISVGKAAWKVFLPGAIGNIIGGSFFGVVITWYLHIYVVERDRAALNLPQYELRDEQPELNQDSRVVRKKSPRMEDEVVHTNKFDDSEESEEIQAPEDFYPTPVYDETSIQSYRLTHRKTRDSISSLRSTRRSPKNVFPVYGMGAPLKRERTIAGEVSTPAEPMDEKLEEEAEYIGTRLRKAISNRSKVSDLEANKSPSNHGSRQPTPRSSFSRRSSNVGIIKSSEGPDPTDSNIDLADIRE

SEQ ID NO: 31915 - protein, 361 aa, Candida albicans SC5314
MKLLALLTLLPLVISTNLEEKWGGLWPFQGIATFAHLEHFQCLIESEKQFDIGIIGVPFDTAVSYRPGARFGPRAIRDASQRQNNLRGFNPKALFDPYQSWARIIDCGDIPVTPMDNSAAYKQMSEAFKDLLNRKSLNNTEIPPRYIALGGDHSVLLPHIRALHKIYGPVNIIHFDAHLDTWKPNKYPTSEKNDINHGSMLWKAYEEGLTTKHNIHVGVRTRLSGLEDLQDDDEQNFVRIEADDIWLKGPQWVVDKILATIPKDTATYISVDVDVLDPGFTSGTGTQEPGGFLPRELIYLLRSINGLTVVGADVVEVSPAYDIAEITATNGAQIAYEVLTSMVKRGNIDKSLVKSVVHVFD

SEQ ID NO: 31916 - protein, 138 aa, Candida albicans SC5314
MQCSALRKNGHVVIKNRPCKIVDMSTSKTGKHGHAKVHLVAIDIFTGKKLEDLSPSTHNMEVPNVSRQEFQLLDIDDGYLSLMTADGDTKDDVKVPEGELGDKLQSEFDEGKDLIVTIISAMGEEAAISYKEAPKGSA

SEQ ID NO: 31917 - protein, 361 aa, Candida albicans SC5314
MKLLALLTLLPLVISTNLEEKWGGLWPFQGIATFAHLEHFQCLIESEKQFDIGIIGVPFDTAVSYRPGARFGPRAIRDASQRQNNLRGFNPKALFDPYQSWARIIDCGDIPVTPMDNSAAYKQMSEAFKDLLNRKSSNNTEIPPRYIALGGDHSVLLPHIRALHKIYGPVNIIHFDAHLDTWKPNKYPTSEKNDINHGSMLWKAYEEGLTTKHNIHVGVRTRLSELDDLQDDDEQNFVRIEADDIWLKGPQWVVDKILATIPKDTATYISVDVDVLDPGFTSGTGTQEPGGFLPRELIYLLRSIDGLTVVGADVVEVSPAYDIAEITATNGAQIAYEVLTSMVKRGNIDKSLVKSVVHVFD

SEQ ID NO: 31918 - protein, 672 aa, Candida albicans SC5314
MSDISKQMNNLSVNDGANTVNNNNSFRGGRSQYVPPHLRNRQGGGNQSGSSSESSDVPFGGSQRGGFNSNGFNNNRGGFNNGGYNNNRGGFNNGGFNNRGNYNQSFGGRGGRGGFNNGGGRYQRPTPGVGKWQDGKHEPAPRNEKLEVELFGTADDSHFQSSGINFDNYDDIPVEASGDKVPEPITSFTAPPLDELLVENIQLSRFTKPTPVQKYSVPIVAAGRDLMACAQTGSGKTGGFLFPVLSESYMKGPAPVPESNGAFSSHKVYPTILVMAPTRELVSQIYEESKKFSYRSWVRACVVYGGADIGQQMRNMDRGCDLLVATPGRLKDLLDRGKVSLANIRYLVLDEADRMLDMGFEPQIRYIVEECDMPAVKDRQTLMFSATFPRDIQMLARDFLKDYVFLSVGRVGSTSENITQKILYVEDDEKKSVILDLLSANENGLTIVFTETKRMADNLADYLYDQGFPATAIHGDRSQYEREKALAAFKNGAAPILVATAVAARGLDIPNVSHVINYDLPSDIDDYVHRIGRTGRAGNVGIATAFFNRNNKNVVKGLIELLSEANQEVPDFLTKIAREGAFGKMTRGGGRGGSSRGPSRDFRRSGNSGWGNSGNSGWGNSGNASSSGWGGNSSSSYSNTNSNYGGGYNNNQRSNFSSGGSYGNQTGSNSWW

SEQ ID NO: 31919 - protein, 364 aa, Candida albicans SC5314
MTSLEDPNGQAQATYFQESVSTTGNSTPTVTQSNDPQHHHHHQQQQQQHHHHHVGSYYQDSPSSTYTYEVEGDYLENHPNVTSTSAEQGTGTMPTYVDNDNIHGGVGVGMGVETEEEDDDDTNGASIGNGSGSGGGSGGGEQPFYVNAKQYHRILKRRIARAKLEENLKIARTRKPYLHESRHKHAMRRPRGQGGRFLTAAEIAELEKAKQQQQQQQQQQQQQNEQSNQENNNENGNEIKKENQHVDDNNEIKNGDNNINKENIIENNKEEIDPNNVIIKKENNNNEVNHEMNNIENEQSSNEDFNQNNNNNINNNNTTISNNDNENGNTISSSKSNELQESIKNDNNNNNNNNGNDLQEEEER

SEQ ID NO: 31920 - protein, 544 aa, Candida albicans SC5314
MSQSPTNVPRSYNSVLDLKLASPTNSASGATGGWIVQKFGGTSVGKFPENIVDNIVKVYSQTNRVAVVCSARSSQTKSEGTTSRLLRSADLAENDKDYQPLLNAIEEDHVTNAERIQSKEIKQELIKDTKQEIEHVRELLHACQIIGEISPRSLDSIMAVGEKLSCLFMTALMKDHGLNAVYINLQDVIPLSYDFQKGFDDSFYQFLSQEIGKRVLQCDKEREEEEDVIPVLTGYFGVVPGGLLNGVGRGYTDLCAALAAVALQADELQIWKEVDGIFTADPRKVPNARLLDSVTPEEAAELTYYGSEVIHPFTMEQVIRAKIPIRIKNVENPTGKGTIIYPDNIGRRGEATPPHPPAAFEQLAMSSLLQRKRSATAITAKQDIVVINIHSNKKTLSHGFLAHVFTTLDKYKLVVDLISTSEVHVSMALSIQSDQESQLKHALVDLRKMGTVDVTKKMTIVSLVGKQMVNFIGIAGNMFKVLADEKINIEMISQGANEINISAVINEKDTIRALKSIHAKLLEGGSAIGDSSAVDTRLEALKLS

SEQ ID NO: 31921 - protein, 363 aa, Candida albicans SC5314
MTSLEDPNGQAQATYFQESVSTTGNSTPTVTQSNDPQHHHHHQQQQQQHHHHHVGSYYQDSPSSTYTYEVEGDYLENHPNVTSTSAEQGTGTMPTYVDNDNIHGGVGVGMGVETEEEDDDDTNGASIGNGSGSGGGSGGGEQPFYVNAKQYHRILKRRIARAKLEENLKIARTRKPYLHESRHKHAMRRPRGQGGRFLTAAEIAELEKAKQQQQQQQQQQQQQNEQSNQENNNENGNEIKKENQHVDDSNKIKNGDNNINKENIIENNKEEIDPNNVIIKKENNNNEVNHEMNNIENEQSSNEDFNQNNNNNINNNNTTISNNDNENGNTISSSKSNELQESIKNDDNNNNNNGNDLQEEEER

SEQ ID NO: 31922 - protein, 690 aa, Candida albicans SC5314
MPHDLLSHVATSFSSHRSSPSSNNSTKRRLALEDDPTVLPPALSSYSIQCLNERTKTSTLPSQITGKYELDFPDSSSKRDNTLRNKLAAHFTNESTRSREISNSFTNLSEDRSSINTAATTTPGSKTFEDLRSKRKRRFGKSLGPPKRGTDFVQESTPIGDELSPKIESKFNITPQHKSLSEIIPKAPSLERFSPLLKKNHSSIDAEDTITKRIEARRREQMEQEFVKKEKENELAELKIKKLEQIAALQSPYEEHKSKEFQEPKQSRMPLREIPVNSAVDVFRKPKAPKSAISPSPNVQSNSMIPPAQPVFRNTLQDFPKPPQQPQASSQNQQQVLPSAPIPPKAHYDRPQHSGNKRALIINDKSYEKLELIGKGGSSKVYRVRSLNNNCVYALKKVELGQFEDVSGFKGEIDLLTKLKSCERVVTLVDYATTESSLYLIMEKGDLDLAEVLQYRLKLDAPLDLNFVKYHTIEMFKCIKDVHDAGIVHSDLKPANFLFVRGMLKIIDFGIANAVPDHTINVYRENQIGTPNYMAPEAICESNYTSARIWKVGKPSDIWSIGCILYQFIYGKAPFAGYSGNQKLMAITNPHIKISFPSSGIGNTPVPVSAIELMKNCLHRDPNDRWTIEQCLTCDFLSPKIVSENFIREVVHQSINYGYNSRISGDGMTSDRYDALVDSVMKQIQNLNYS

SEQ ID NO: 31923 - protein, 580 aa, Candida albicans SC5314
MSFVLAAKPRFVYLTNKQLQTIGKRLLTQSAKSSFKSSQCLLSEPNTMIKTASPKKNQQQYRKSVALVSGVIIVGSYIVFNQSNYFNLDTLPSNLPPPQQSKKLLQDNQKKYFSTSTSSLHQKDSISHQQHKEGIFLLNEEQVSTKLRQFEESYTVNRGKGVTRYDICQLPSNSPIEDDRAEEIVQVPILQDNNIKTSTDWMFFGVFDGHGGWTTSSKLRDQLIGYVINELGTIYKPVQGEENLRYVPNSATIDQAMKNGFLKLDHELVNKNIEKLLTDGNKAKAAELLMPALSGSCALLSFYDTNSQMLKVAVTGDSRAILGSFKDNHWTVRQLSIDQTGANPSEVARIISEHPNEPKVIRNGRVLGSLEPTRAFGDCRYKLPAVIQERIYKQFFGRPLPNQLKSPPYVTAEPIITTTKINPNEHDFLVMASDGLYEMLTNEEIVGLVVKWMEKADMIKPRKSWFGFGSADSKLPEVKDVTNDKASKKPLNNKLGNSFLLEDNNVSTHLIRNALSNGGSREQTSMLISIPNPVSRRYRDDLTVTVVFFGKDTKGEDENGTLEVNWNATAGGLNSAKPKL

SEQ ID NO: 31924 - protein, 543 aa, Candida albicans SC5314
MKFTHGVRILDSALVTAAQLASRYLTYRALPDSAVDLVDESAAAVAVARDSKPEELDTLERQLHLVDVEINALERDKDADSASKERLNLAKKKKAELEEKIGPLNERYRQERASHEQLTAAKRKLDELEIKAQDAERRYDTATAADLRYFAIPDIQKQIEELEVKVVEEEASNLDSLLKNAVGPEQICETAARLTGIPVTKLSQAENNKLINMEAELSKEVVGQSEAVKAVSNAIRLRRSGLANPNQPPSFLFLGLSGSGKTELAKKLAGFLFADEKAIIRIDCSELGDKWSASKLLGAAPGYVGYEEGGILTEPLIRRPYSVVLLDEVEKAAPEVLTVLLQILDDGRVTSSQGKLVNCSNAIFIMTSNLGANYINAAKGSKIDANTKEHVMDAVRAHFRPEFINRISSIVVFNRLSRKAISKIVKIRLSEIENRFTANGKAIQLKLDDDAMEYLCKNGWSPDLGARPLNRLIQNEILNRLAVMLLKGQIQDKETARVVLGEKGLEILPNHEPEDVEMNDVDNWQDSEDEDDDEARFTSPGLD

SEQ ID NO: 31925 - protein, 899 aa, Candida albicans SC5314
MEDFTDNAIKIINNATELAKQQANSQLLPLHFLAAFIPSDDTEGSTQYLKTLVKRARYEWGDFERIVNRHLVKIPSQNPPPDEIRPSYQAGQVLTKANKIKQQQKDSYVAQDHILLALLEDQSIKDIFKEAGMSVDTIKTQAIELRGSQRIDSRQADSSSSYEFLNKYCEDFTEKAREGKIDPVIGREEEIRRVIRVLARRSKSNSVLIGDAGVGKTSIVEGVAQRIVDGDVPNVLAGSRLFALDLGALTAGAKYKGEFEERLKGVLNEIEKSKEFIILFIDEIHMLMGDGKSDAANLLKPMLARGALHCIGATTFAEYRKFISKDGAFERRFQKIDVPAATVQETVAILRGIQPKYEIHHGVRILDSALVTAAQLASRYLTYRALPDSAVDLVDESAAAVAVARDSKPEELDTLERQLHLVDVEINALERDKDADSASKERLNLAKKKKAELEEKIGPLNERYRQERASHEQLTAAKRKLDELEIKAQDAERRYDTATAADLRYFAIPDIQKQIEELEVKVAEEEASNLDSLLKNAVGPEQICETAARLTGIPVTKLSQAENNKLINMEAELSKEVVGQSEAVKAVSNAIRLRRSGLANPNQPPSFLFLGLSGSGKTELAKKLAGFLFADEKAIIRIDCSELGDKWSASKLLGAAPGYVGYEEGGILTEPLIRRPYSVVLLDEVEKAAPEVLTVLLQILDDGRVTSSQGKLVNCSNAIFIMTSNLGANYINAAKGSKIDANTKEHVMDAVRAHFRPEFINRISSIVVFNRLSRKAISKIVKIRLSEIENRFTANGKAIQLKLDDDAMEYLCKNGWSPDLGARPLNRLIQNEILNRLAVMLLKGQIQDKETARVVLGEKGLEILPNHEPEDVEMNDVDNWQDSEDEDDDEARFTSPGLD

SEQ ID NO: 31926 - protein, 345 aa, Candida albicans SC5314
MTTSNRPKVLRLGKIEFAQKKWDEVAQIADVIDCESQNREEFIKDLQTKYSDITNIARTYASVEQTGRFDAELAQHMPKTLVSLSHNGAGYDQIDVQPFTDKGIQVSNVTVPVEGPTAVTAVFLVLSCLRNYQEGHQILYDGGWDSKKCGGAKLGHSPEGKVVGILGMGGIGRAIRDRLKPFGFTKILYHNRKPLSSDLEGGAEYVSKEDLFKQADIICISVPLNAHTKHSINKEAISQMKDGVILINTARGAVIDEKELPELLKSGKIGAFGADVFEKEPEVSPELYRLPNVVSLPHMGTHTYEAIKDMEDWVAENVESCLKTGKVKTIVPEQYNLEIKQGPLV

SEQ ID NO: 31927 - protein, 446 aa, Candida albicans SC5314
MRDLIVLGGSSHPNLTKSICRSLTLEQGLVDSRKFSNGEISIEVKNSVREKDVFIIQSGCGHVNDNFLELLITIAACKTASAKRVTAVLPLFPYSRQPDIPYLANATGAPSISTKKEEYTFESAPATPNPLSKSSSEKSFLSSASSSIVSENKAATTGVNNISSGNRIKSPVPKKYTPKLIHTNASATNFLPQVDAYGKTESGYKQWISPNGTLIANLLTTAGADRVITMDLHDPQFQGFFNIPVDNLYSKPILKHYILNFIPNYKDCVIVSPDSGGAKRATAIADSLGCPFALIHKERRAKLPKNPPSTSMSNSHSHNHYNSQHKPTMVATTMLVGDVAGKVCVLVDDLVDTSYTITRAAKLLKDQGAEYVYALVTHGIFSGDAINRIQQSAIDKLVVTNSTPQSEHVEILGDRMEVLDVSRVFAESIRRINNGESVSMLFDHGW

SEQ ID NO: 31928 - protein, 626 aa, Kocuria varians
MLNKNEIYNMDCIEGMKLLKENSIDIIIADPPYNLSKGGNWSWKNEDNLKGFGGKWDKVMQNWDNMPISDYFTFTLKWLSEAKRILKPTGSLWVFGTYHNIGIINFAMQILEIEMINEVIWFKRNSFPNLSGRRLTASHETIIWAHSGTAKDREYFFNYEMSKNHDYDSDLIKQPLKQMRTVWDIPNNKKKEELLYGKHPTQKVEKVIDRMIRISAKEGDLLLSPFCGAGTECVVAKKLGLDYIAFELEEEYVNLSKTRLLNTQQGELKLIEAKETEKVKKIKKVKEVASSTYKKEESAIAPENRFDTLIATNEKSEQITLSLSEDVPLIKKKRGRPSSDTAKIVDVDKKKNSATSESIPSILKWTGSKRKQAAYIAREIPEGTERYIEPFFGGGAVSYLAANKVKNIWANDLYKPLIEFWEMVKYSPNELINLYLKEWTLLQEDFPNYFYTVRDRFNTAPNGVDLAFLTRTCVNGIVRFNKEGDFNNSIHLSRRGMKPSNFESIVDKWHLKLQNFHFTSLDYKEVLDQTTKGDLIYLDPPYAGSANRYIADLDVESFFLELDKLNSKGVKWMLSFDGKRGDKDLEYPVPEDLYKYKEFLSNGKSTLNQVLNGTNEEVLEMLYRNF

SEQ ID NO: 31929 - protein, 618 aa, Candida albicans SC5314
MSEQAQTQVSADQQQHQHNHHHHHHHHHHNENQSQQQVPIDPAANPANRIGRYQILKTLGEGSFGKVKLAQHLGTGQKVALKIINRKTLAKSDMQGRVEREISYLRLLRHPHIIKLYDVIKSKDEIIMVIEFAGKELFDYIVQRGKMPEDEARRFFQQIIAAVEYCHRHKIVHRDLKPENLLLDDQLNVKIADFGLSNIMTDGNFLKTSCGSPNYAAPEVISGKLYAGPEVDVWSAGVILYVMLCGRLPFDDEFIPALFKKISNGVYTLPNYLSAGAKHLLTRMLVVNPLNRITIHEIMEDEWFKQDMPDYLLPPDLSKNKNSKIDVDEDVIRALSVTMGYDRDEIVNVIEKANKQVAAGNSSSQQSKSSNEILDAYLLMKENHALVKDLKKSKSENIESFLSQSPPPSPFPNAGSTSSAPGVQQSLTYQTLATVPDLSTLPNSTIAILPTSLPSIHRAYMAETKQNGDPSQQHAPPPTKKSKTRWHFGIRSRSYPLDVMGEIYRALKNLGAEWAKPTEEELWTIRVRWKYDTSAQFECGSAPNLMKMQIQLFQLEPNNYLVDFKFDGWESAHGNAGTDSPQSHRQQDLDEVGSFSAYPFLHLATRLIMELAVNSQSG

SEQ ID NO: 31930 - protein, 617 aa, Candida albicans SC5314
MSEQAQTQVSADQQQHQHNHHHHHHHHHNENQSQQQVPIDPAANPANRIGRYQILKTLGEGSFGKVKLAQHLGTGQKVALKIINRKTLAKSDMQGRVEREISYLRLLRHPHIIKLYDVIKSKDEIIMVIEFAGKELFDYIVQRGKMPEDEARRFFQQIIAAVEYCHRHKIVHRDLKPENLLLDDQLNVKIADFGLSNIMTDGNFLKTSCGSPNYAAPEVISGKLYAGPEVDVWSAGVILYVMLCGRLPFDDEFIPALFKKISNGVYTLPNYLSAGAKHLLTRMLVVNPLNRITIHEIMEDEWFKQDMPDYLLPPDLSKNKNSKIDVDEDVIRALSVTMGYDRDEIVNVIEKANKQVAAGNSSSQQSKSSNEILDAYLLMKENHALVKDLKKSKSENIESFLSQSPPPSPFPNAGSTSSAPGVQQSLTYQTLATVPDLSTLPNSTIAILPTSLPSIHRAYMAETKQNGDPSQQHAPPPTKKSKTRWHFGIRSRSYPLDVMGEIYRALKNLGAEWAKPTEEELWTIRVRWKYDTSAQFECGSAPNLMKMQIQLFQLEPNNYLVDFKFDGWESAHGNAGTDSPQSHRQQDLDEVGSFSAYPFLHLATRLIMELAVNSQSG

SEQ ID NO: 31931 - protein, 567 aa, Candida albicans SC5314
MSEITLGRFFFERLHQLKVDTVFGLPGDFNLALLDKIYEVEGMRWAGNANELNAGYAADGYARVNPNGLSALVSTFGVGELSLTNAIAGSYSEHVGVINLVGVPSSSAQAKQLLLHHTLGNGDFTVFHRMFKNISQTSAFIADINSAPAEIDRCIRDAYVYQRPVYIGLPSNLVDMKVPKSLLDKKIDLSLHPNDPESQTEVIETVEKLISEASNPVILVDACAIRHNCKPEVAKLIEETQFPVFTTPMGKSSVDESNPRFGGVYVGSLSKPEVKESVESADLILSIGALLSDFNTGSFSYGYKTRNIVEFHSDYTKIRQATFPGVQMKEALQKLLTTVKKSINPNYTPVPVPETKLINTPAAPSTPLTQEYLWTKVSSWFREGDIIITETGTSAFGIVQSRFPKNSIGISQVLWGSIGYTVGATCGAAMAAQELDPKRRVILFVGDGSLQLTVQEISTMCKWECNNTYLFVLNNDGYTIERLIHGEKAQYNDIQPWNNLQLLPLFNAKDYETKRISTVGELNDLFADKAFAVPDKIRMVEVMLPTMDAPANLVAQAKLSEKTNAEQ

SEQ ID NO: 31932 - protein, 286 aa, Candida albicans SC5314
MDGPVEVTKQLFVRPLRNDVTREEVQDHFSRAAPVVEVRLMEGYAFVTFENEDDAKQALELLNDAEFNGEKLQIEFAKERREDTRGKYRLLITNLAEGTAWQDIKDFVREKTDSQPSYVKVFTNFDNGETTCSMQFQSREDLDRAIPLLDKAVFRDITIGAEEDTSPYIPPPPRGRGGFRGRGRGGFDRGFRGGRGGYDRYDRGGFRGGRGGFDRGFDRGGFRGGRGGYDRGGFRGGRGGFDRGGFRGGRGGFRGGRGGYDRGGYDRDNFNDRGGSYDRERSPTRF

SEQ ID NO: 31933 - protein, 762 aa, Candida albicans SC5314
MASHSNSNSNSLFQNDKNNNSNRDIAIPTPSNSSSFRNTNTNPTPSIRSPSPSINSYNNNNNNNSAIPTTTTSRSITGMSNASINDSGDSNPQSYDEQISQLNNLNNKKSFDLKTISKHLINQEDSLKTQGGDITRRLYHQMENITGNNNHNNNNNNTDTTGNDLDDNVSIGGNSTFRDGPPPRLRTRSASFSSYLEETRRGSMASDINIPGGFRREFLINKAIQKNQQPPNFLTQNFMEFLSIYGHFAGEDFSDEEEEGDEGDEEYDNGHDGDEVFDEESSLLGNERRGGGSGGGQPFRQLPKKPHSHPQKQPPKGTASVFKTFLLLFKALVGSGVLFLPRAFYNGGMLFSMITLSLFGLLTFFCYIGLIESKTILRLSSFGELGYKTYGKPLKYCILVSILLSQIGFVTTYILFTAENMIAFLSQYVSTKNNLLSQEVLPNWLNRGNLILIQCILLIPLVLIRNLAKLSMVSLISSVFIVIGLLIIFWYSGVNLINNGVGPNITNFNSNSWTMLIGVAVTSFEGIGLILPIQSSMSQPEKFPLVLSISMAIITSIFVGIGTIGYFSFGDKIKSIIILNLPQDQFAVQSILVLYSIAVFLSGPLQLFPAIKIGESLIFRHSKKKSKRQQHQHGSTDESNTNNTDDNDGKLYHQSGKYNPQVKWLKNGFRAISVIFICSLAYLNADNIDKFVSFNGCFACIPLVYIYPPLIHLKSIQSKQQQQQQQTGRSKSDQLFIWLDYLLIVVGIATVIYSSYQIIFLN

SEQ ID NO: 31934 - protein, 361 aa, Candida albicans SC5314
MSSIFKLSTRTIMTSTTTNSIKPKVLRLGITHYAQHKWDQLSKIAEIIDCESANREEFIHDLQTKYNDITNISRTFASIKQTGRFDNELAKHMPTTLKAISHCGAGYDQIDVTPFTEIGVQISNVTVPVEGPTADTAIYLVLACMRNFQIGHNILVNGEWLQSKNKKKKKISHAFSIGNSPEDKVVGILGMGGIGRAIRDRLKPFGFGKIVYHNRNRLSEELEAEAEYLSMDELLNQSDIIIVSVPLNAHTKHLVNKSLIEKMKDGVILINTARGAVIDEKVLPELIKSGKIGSFGADVFENEPEVSPELYELPQVVSLPHMGTYTVEAVRNMESWVVDNIESYIKTGKVKTIVPEQYNAF

SEQ ID NO: 31935 - protein, 593 aa, Candida albicans SC5314
MSLTSKELNYLIWRYLQESGYDLSAYALDQQSQCSEYENNPTTQELIQKIKPGCLVDLIQKGILYMAAEQEATDSTTNLSLYGALIQDDLNNLKDNNNISNGSNGSRFALKSEIETNGEQKDSEKQTNNDKDNQDIEMTDALNKEVQQQEIIEFETQLLSPQLKFAPSLTCDWHPTTEVFAYGKDDGTATINAIQDGKIIETRTLTHPNLLNIKNQINIVSWSPQGSLIITCGANSELRAWSPDGKLKNIASTIVDEAISLENTKLISIISSLSWSPTGKFLLSIDSSNQVCIWDGTTISLIKQIKNLEINDDSVVCSCWLSEDKFAVTTNTNGIKIYDILQPPSSHFGNQLDVQPIGLLNGHEHNISLMKLNPVTKLLATCSDFDYSIKVWSSSSSQECLDLNINPEKKYTLKLHAAPMIGLIWLPDSNSNERSLLLSVSMEGILNIWDAKTSENIKSSELFNNKDNFTNELKDDDNNNNNNNNDTTIKDVLVFNAVLSPDGKYLALGDDYCRVTIWDVDTTHYLNEPKDLIRCKAVYKPEISAEDKLKATIGICDMKWDHESKFNMCFLQWYGKCYNPHNIKNPKKKKKSL

SEQ ID NO: 31936 - protein, 580 aa, Candida albicans SC5314
MSTDVEPMTSLDVTTGLNSLYMLYCTAPLPLVVIGIAFFYSGLTQRRSALTMFAVPFLLAPMIIIDWFIWGYSLCYSASSNHFIGNLNYVVLRQFRNALTAEFTNTRGHVLAGAHVLFNMFFKLICVSLTFPGCIAERGRVLPMILFAFIWSVIIYNPVTYWFWNSNGWLSVDLGRLPVLDFAGGNCVHIVSGFTCLAYSYILGPRNPKLLYNYRNSNTGHIIFGTFLVFMGWIGYIAGCDFKFSFNSIYIILNTLIAACASGIVWTAIDFFFSSVPLEGESVGLKHGDSKLSNSSGDNHSPMLQAIVSRTGVSINQRLHESKSNFVEKRKFSMISFSSGIMTGLVVFTPGGGYVSSNAEFWKGIIFGVVGAISGNLATRLKYFFNIDDALDLFAVHGIPGIVGSMLTGIFANDLYDSKGGWVKGHWKQFGYQLLGLVVTSAYVFIMSMVFLYLIDLIPGFHLRIDKDFNRREREKTLKAKQLDQELESQTSPQQVVPHMSNSTEQMSFWEQVELQGTDGYEFNGEFMLDFMEFIRAIRPQDYEDDDLKDIIQAPNQYEGYIGQDFELHQEGVHNLTKRE

SEQ ID NO: 31937 - protein, 1349 aa, Candida albicans SC5314
MPHSRQPSISSSIMSQSNHNHPQKIGPWKLGKTLGRGATGRVLLATHQTTGQKAAVKVVSKSELQDEETEKNGDGLPYGIEREIIIMKLLTHPNVLRLYDVWETSKALYLVLEYVEGGELFDLLVERGPLPEVEAIKYFRQIILGTAYCHALGICHRDLKPENLLLDSQLNVKLADFGMAALESNGKLLETSCGSPHYAAPEIVSGLKYHGAASDVWSCGVILFALLTGRLPFDDENIRNLLLKVQAGNFEMPVDEVSREARDLIARMLEVDPMRRISTEKILRHPLLTKYPMSNEDLISEKSLPHPQTGYKSLGSVRNIDKQILSNLTILWNDRPEEEIVDCLLKDGSNPEKTFYALLMRYKHNQEDNTNNNSPKKSTSFNNKVVRSGSKYSLNGTPRRKRASHISVSRPTSFQYKSNPGAGATANRNSVARHSVASSANNSPRKSPYKSPYRSPYRSPYKSPSKRYSYNQSPTKSPYGRRSNSQRQFENEPLKAKPRNIYNEIVDAQSNFSLPPSLPPSLPSKDSRYMIDEPNQPQLQQPALSQVPENPIVDESPDLMQSAKISSGKRNSIIGKNNNNSNSNKRMSKRKSIRASMTTGLKRNSITMKLLSTYAKLSGDDDWEYMDKQTKRTSATFAALCDKIFNQEDYDEEDEQLVDPEEKEAKEYERLMELERKKHEAELKARRELEKKKRRQKRRSILSSKKLSIIVKNDADPNNSEQELVDEGIKQPKRQSKNLTALRALSEGNHASEELTLEDVENLKRRSASQPVPKRRQTPVLTRRPVSRLDPLWQAHENEQLDRAKDALEQEWRDSQKRSSTVSRKKVNRESMISVMDDIVEEDQGRVNRRSTRNTYYERERDYELPEPTVEDSNLTDDYMTEIRKSRLLNSQLNVRDPLNEKRKSEPKTLISNVQIPSVTRKSRNFTTSNKRLSVLSMYSTKESYRDLNSIINSPDENPEQHQNMNKPALRTSIADRLDKAGLAEPEYETETDGEDKVSVIDLDDHLADRRTSYYDGSGKRASRASTTKRYNVHSSSGQRPKSKVPDLPKNDYDDTFVSNSDEVHKRQYKSMVSDESSASDDVFDKIKLPDGKSTKSSIDELANGTSTSGHRKPKIRHSQPGPEMLIPHLNGGIESSQPMSKVRGNNSSGHDDSVPPPPPAHKVNKKPLDDKTNFPPPEVDPKRKGSFFRKLSWGSKKTIENNTNAATNTTTQQQLPSPAESKEEKPKSSFFRWFSSSNTPSAAEIRKFNTILPKHEMSTALFALLNSWSNFGLKDLRNDQVGYYITGAISKHNSFNLKSCKFRIKINQRDFNQKSEIVCVRVKGSKVTTDTLFSEIEKVLLKEGVLDK

SEQ ID NO: 31938 - protein, 102 aa, Candida albicans SC5314
MSDTENTGGSPPAAEAGPKEEKGTHINVKVSDGTQEVFFKVKRNTKFRRLMEAFAKRQGTSPDTMRFLVDGGRVHADQTPEDLDMDDGDTIEAHRAQIGGCL

SEQ ID NO: 31939 - protein, 929 aa, Candida albicans SC5314
MVLKDCKLNLKLIETISSYDTQQNNSNMTEKDLAGQPTIQSVGSHLQVQDHEVNLQAIISNPLSIGEVATTLTESQKWFVLKRLHFDALVSLEELPPQASFIFEKIEQMTTEEAVEILRKAIEEHATDVNIPEHDLDLWKELVENSHKFTKVQLQEKLGSNSSSSVEGEKTADVEKGHEIVDWDLQVRLESVLVAYWSPYPEVRAVTFPYDDPTIPAETFRVYLIGIIWTAIGAVINQFFTERRPSITLAMSVVQVFLYPSGLLCEWILPKWKFKIWKLSIDLNPGPYTYKEQMLATIFCGVTGGGTSYVAWNILMQKSPVFYDNKWVDFGYQVLLILSTNFLGVGLAGIMRKFAVYPTKAVWPSILPGLALNKTLMTPARKEIINGWKISSYNFFFIAFIGSFLYFWVPDYLFQALSTFNWMTWIKPDNQNLAVVTGSVGGLGLNPITTFDWNYFSSMLQPLQVPFFNPVNNIIGMSIAFFCILGVWYSNYKWTGYLPINDNGLYSNTGEPYSVRSVVDANSLFDQAKYNEMGPPFYTAANLVVYGAFFAIYPFHFVYEIGMNYDQMWDACKSFWRVIKDFKKSTYDGFDDPHSTMMRAYPEVPEWAYLIIVVISLVLAILCVKVYPAETPVWGIFFALGINFVFLIPLTTIYARTGFAFGLNVLVELIVGYAIPGNGLALAFIKALGYNIDGQAQNFVNDLKQGHYAKLPPRAVYRVQLLSIFIASFIQLGILNFQVNGGIKDYCDPKNTQRFTCPNGRTFYSASVLWGVIGPKKVFNGLYPILRWCFLIGFLIAFPCIAIKKWGPRKYVKYFEPSIVIGGFLNYAPYNLSYYIPGLYVSFTFMSYIKRKYEAWWQKYNYILSTGLNAGIAFSSIIIFFAVMYHAKDINWWGNTVMYEGMDGSMTGWLNATVDAPDGYFGPRIGHFP

SEQ ID NO: 31940 - protein, 905 aa, Candida albicans SC5314
MDEKNPTTELSVPNIEAVGSHLQVQDHEINLQAIISNPLSIGEVATTLTESQKWFVLKRLHFDALVSLDELPPQASFIFEKIEQMTTEEAVEILEKNIEEHETDVNIPENDLVLWKELVENSHKFTKVQLQEKLGSNSSSSVEGEKTADVEKGHEIVDWDLQVRLEAVLVAYWSPYPEVRAVTFPYDDPTIPAETFRVYLIAIIWTAIGAVINQFFVERQPAITLAMSVVQVFLYPSGLLCEWILPKWKFKIWKLSIDLNPGPYTYKEQMLATIFCGVTGGGTSYVSSNILMQKSEIFYDNKWVDFGYQVLLILSTNFLGIGLAGIMRKFAVYPTKAVWPSILPGLALNKTLLTPAKKEVINGWKISGYNFFFIAFVASFLYFWVPDYLFQALSTFNWMTWIKPDNQNLAVVTGSVGGLGLNPITTFDWNYFSSMLQPLQVPFFYPVNNIIGMAIAFFCIIGVWYSNYKWTGYLPINDNGLYSNTGEPYSVRSVVDANSLFDQAKYNEMGPPFYTAANLVVYGAFFAIYPFHFVYEIGMNYDQMWDACKSFWRVIKDFKKSTYDGFDDPHSTMMRAYPEVPEWAYLIIVVISLVLAILCVKVYPAETPVWGIFFALGINFVFLIPLTTIYARTGFAFGLNVLVELIVGYAIPGNGLALAFIKALGYNIDGQAQNFVNDLKQGHYAKLPPRAVYRVQLLSIFISSFIQLGILNFQINGGIKDYCEPGNTQKFTCPSSRTFYSASVLWGVIGPKRVFNGLYPILRWCFLIGFLIAFPCIAIKKWGPRKYVKYFEPSIVIGGFLNYAPYNLSYYIPGLYVSFTFMSYIKRKYEAWWQKYNYILSTGLNAGIAFSSIIIFFAVMYHEKDINWWGNTVMYSGVDYAMTGWLNATVDAPDGYFGPRVGHFP

SEQ ID NO: 31941 - protein, 994 aa, Candida albicans SC5314
MSTIPSQVEINFNKIHQRSNSSSSTSSYRIPSGNSCIPRTVEMPSLPPTSTHHQHQQMPSSSSHAHIAKKIHREVRFGAYILGSTLGEGEFGKVKLGWRKDGKHPSQVAIKLIKRSTITKDSDSEIKIHREINSLKLLNHPNIVNLVEVMKSGKYIGIVLEYASGGELFDYILQHKYLKENVAKKLFAQLVSGVDYMHAKGLIHRDLKLENLLLDKHRNVIISDFGFVNSYNRDKNDLMKTSCGSPCYAAPELVLSQTAYEGRKVDIWSLGVILYAMLAGYLPFDDDPENEDGSDIIKLYHYICKTPLTFPEYVSPLARDLLRKIIVSDPKKRISIDDIRNHPWLSSHANLLSIRQPEWDKVHSEKQQPIAVEPPQPNKRYSMINERTNSSSLMSPAPRVTHTQPLSSHARSYSSTSISLLYSSPSATPSMANAVTNGEGATTTTTNGSINESNDTLQLSGTPSPKKPSTVSPVRGHQKSASISNSYSSASIALKAVVHEENRLHNHQQSQQYIPRSSTISTIVESPTKANTATETETTDGHKILLPPPSKDAQKLPHAAKKPRPTSYHPSSMSSALIHNNQNPTDVLKMPSPINFPMTQFISTSPPKSNGSLNDSGNFTNCSPKATSRRNSVVTHVHVNGVLSKENLIHSSSSPDNKRNSVLSYLEDKIDTLELTESHSPSKNTFEEIVDAAIATPEINQVPVFDSQTSPNGIGLDIKHKEFDETSLVVEKKSKETVSDSKSEESTKETQQQENVVMYEPIVPVEEYIKKPEEVNSVEAKQPEEVKSEDKSLQGQKSQQQQQQPEKHSADIGKTKVDLKKSASQKKKVKEESIKKQKDVDSKPIERRHTIAARRHHNDENKENKDVKKRNRFSLLSFYSSYNSSNSNVSLATSKVPSNSENNTTVLKPTSMNTTRKVLEPSNETNIMRKETKQTNSNGSTTSKSTTSSSSSSAPAASSSSSSSTSKRASTATKETSAARKVMDFFKRRSVRVG

SEQ ID NO: 31942 - protein, 905 aa, Candida albicans SC5314
MDEKNPTTELSVPNIEAVGSHLQVQDHEINLQAIISNPLSIGEVATTLTESQKWFVLKRLHFDALVSLDELPPQASFIFEKIEQMTTEEAVEILEKNIEEHETDVNIPENDLVLWKELVENSHKFTKVQLQEKLGSNSSSSVEGEKTADVEKGHEIVDWDLQVRLEAVLVAYWSPYPEVRAVTFPYDDPTIPAETFRVYLIAIIWTAIGAVINQFFVERQPAITLAMSVVQVFLYPSGLLCEWILPKWKFKIWKLSIDLNPGPYTYKEQMLATIFCGVTGGGTSYVSSNILMQKSEIFYDNKWVDFGYQVLLILSTNFLGIGLAGIMRKFAVYPTKAVWPSILPGLALNKTLLTPAKKEVINGWKISGYNFFFIAFVASFLYFWVPDYLFQALSTFNWMTWIKPDNQNLAVVTGSVGGLGLNPITTFDWNYFSSMLQPLQVPFFYPVNNIIGMAIAFFCIIGVWYSNYKWTGYLPINDNGLYTNTGEPYSVRSVVDANSLFDQAKYAEMGPPFYTAANLVVYGAFFAIYPFHFVYELGMNYDQMWDAFKSFWRVIKDYKKSTYDGFDDPHSTMMRAYPEVPEWAYLIIVVISLVLAILCVKVYPAETPVWGIFFALGINFVFLIPLTTIYARTGFAFGLNVLVELIVGYAIPGNGLALAFIKALGYNIDGQAQNFVNDLKQGHYAKLPPRAVYRVQLLSIFISSFIQLGILNFQINGGIKDYCEPGNTQKFTCPSSRTFYSASVLWGVIGPKRVFNGLYPILRWCFLIGFLIAFPCIAIKKWGPRKYVKYFEPSIIIGGFLNYAPYNLSYYIPGLYVSFTFMSYIKRKYEAWWQKYTYVLSTGLNAGIAFSSIIIFFAVMYHEKDINWWGNTVMYSGVDYAMTGWLNATVDAPDGYFGPRVGHFP

SEQ ID NO: 31943 - protein, 480 aa, Candida albicans SC5314
MSGNFTGTGTGGDVFKVDLNEQFDRADMVWIGTASVLVWIMIPGVGLLYSGISRKKHALSLMWAALMAACVAAFQWFWWGYSLVFAHNGSVFLGTLQNFCLKDVLGAPSIVKTVPDILFCLYQGMFAAVTAILMAGAGCERARLGPMMVFLFIWLTVVYCPIAYWTWGGNGWLVSLGALDFAGGGPVHENSGFAALAYSLWLGKRHDPVAKGKVPKYKPHSVSSIVMGTIFLWFGWYGFNGGSTGNSSMRSWYACVNTNLAAATGGLTWMLVDWFRTGGKWSTVGLCMGAIAGLVGITPAAGYVPVYTSVIFGIVPAIICNFAVDLKDLLQIDDGMDVWALHGVGGFVGNFMTGLFAADYVAMIDGTEIDGGWMNHHWKQLGYQLAGSCAVAAWSFTVTSIILLAMDRIPFLRIRLHEDEEMLGTDLAQIGEYAYYADDDPETNPYVLEPIRSTTISQPLPHIDGVADGSSNNDSGEAKN

SEQ ID NO: 31944 - protein, 747 aa, Candida albicans SC5314
MSKEAEFVKTISKEGDPQVDVLERDAESNSENALEPDVEELPKVVREIVPLEDDPTIPVLTFRYFILSIIFIIPGAFIDTMNSFRTTSAAYSIFFVQIASHWCGKWLARILPKKQVGFGRLSFNLNPGPWSIKETALITITANSGATGSMGTNPLALAELFYGETVNPAVAIFFMWMIVFIGYSFAGIARNFLLYDPQFTWPQALMQTTLFQTQSKSDKDAKQASKQMKVFFFVLIGLCIWQFFPEYIFPMTSSLAFLCWVAPENYTANFIGSGLGGMGFLNLSLDWSNITSSIMLYPYWVQVVQFAAFVLGAWILIPAAKWGDLSSYPYGLMSNSLFLGNGTKYPTTELLTPNLRLNETRYEELGPVHLGAQRAWNMFFDYAAYVSGFMWVVAFGYKSLSGSLKRLVKSRKQKGSINLQYTDRLNKLQAAYEEVPLYWYAILFLCAFVTLLVIFATNSLFMPWWCLLVGVAFGAVIVTPLVWLYALSNFQLPIGTFNELLYGYMIQNKTSRHPAGAMVYGAVGGDLFYRAQYILNDQKIAHYMHISQRAVFFSQIFGELIGVPINYAALRWVISSKRDFLDGTKVDKLHQWTGQTIVSYNTNAVQYVILGPDRLFKNYPVLPYGFLLGAGAPLVLYLLHRLFPKSKLKFHLWNTTVFFSTMSTFYGNLSTGYFSRFIGGTITMFWAFRYKHSLWKKYNYLLAAALDTGLNLSILLIFLFFSAGKTVNFPEWWGNNGKSVERCFAMS

SEQ ID NO: 31945 - protein, 393 aa, Candida albicans SC5314
MQVKNKAKLKDKNVAITLVPEDSEDLWYLYNLLKRGDTVQLVTHRNVKKGNQAQITKGKSKMEKIVVRLKLLVEDIDYIASDQTMRINGKSLVQQEYIPLNSFHTAEVELNKELTILKDNWDEYDMTLLNELCSIENKADIGAVVFQEGVAHICYVADSMTVLNAKVEKSIPRKNNEYGTRDLEKAMNSFFNMIISSMTRHFDFEKLKVVILASPGFLAKTLYDRLIQECLNLQNSGKESKVYSSILKNKSKFLIAHASTGYLQGLEEVLDDPQTKKRLADTKFLEESEALQRFQRALNDDDGRAWYGLEEITKALNMDAVRYLMVSDALFRSDDIEERRHYIDLTEQAKTLGAKVYIFSSLHESGEQLNQLTGIAALLKYPIPDLDDSDEED

SEQ ID NO: 31946 - protein, 639 aa, Candida albicans SC5314
MSNPQSIKKTERRRSIALLTKSPLSQSPYISPSPRGSAPSSYVANSQFMRGDTESVAMESTSENSSENQHSPENDPEVDNDIDLASGIDDPELIRKVSKHLPSDFDSLKQEGADITRDLYRIKEDAQRPLLKKSRSCDSIGGNSIKSTASSFNVPGGFRREFLLNQQQHRDERLESLRTTTPNFLTKNFIEFLSIYGHFAGEELEDDENIANHYKYLLPHEQAPLLQDDNFNPRGTATDRKAYFLLLKAFVGTGVLFLPKAFYNGGLSFSIIVLSLFALLSWWCYLILVFTKVATKVSGFAEIGLKLYGPWFQRLILSSIVISQIGFAAAYIVFTSENLRAFTANVSSYDVTDINIVWFILLQVVIIVPLSLIRDITKLSLSAVFANVFILTGLVTIVYFMLYQWLGVNHGYFGKNIEYFFNESEFSLFIGTAIFAFEGIGLIIPIQESMIHPNNFPRVLGQVILTIAVIMIMVGSLGYLTFGDKIKTVVLLNLPQDSPMVIITQLLYSLAILLSTPLQLFPAIRLLESKMIFGSGKSSPSVKWLKNLFRTLFVVFIAYIAYIGGQNLDKFVSFVGCFACIPLVYMYPPILHLKSCCKIHSGLSEKEQNNRFWLSLANYVLLVIGAISFVYTTYEILFT

SEQ ID NO: 31947 - protein, 967 aa, Candida albicans SC5314
MNGIGSSKVINNTAQLAAQFNDFYLEITSPKISQIGNYKIIKEIGEGAFGKAYLATHILLNINVVLKCGLIDDPNIVREIYYHKQLKHKNIVSLYEVIKTENHLWIALEYCQGGELYYYIYEKKRLELDECRNIFFQIVLGVKYVHSLNLSHRDLKLENILLADQKRTIVKLTDFGFIREFNPQSRKFLSTICGTTVYMAPELLTGQKYSGFVIDIWSMGVILYTMLNGMLPFDDDDEMKIQHKVINTEPMFYDHVPIDVNQLISKMLSKDPNQRPSLNEILNSSYLIDVYNKYLEKGTKRNSSGSGDAESIISINQHYNTVDRPFEAKIEKDLLRKLQRISFDTEELKATMYNNEINSLTAFYELLLTQEYSKKKQKYMREKKRKLYEAKKSLKKSRKRVKSVLSLSDQASGSQPLERIMSSLSIASNKNSSRHTSTIARKSLDKNDTTQIPPSPKSSQTSRLNIEIPSPRATNTSIALPPRSRRGSREISTTTAASSITADLNTPLRRTVSFVPDGRRLSQVISSEPKETIKKTNKSGKILHKLQFWKKNKGDEYQDDTISHYSTKSNHSKSTNDVMIESDGENPLELIVKGGNNSPIKFDNTMNSHQKMNTVPPEVLEQQRLDRFHKNDATRRQRENSNSDGQSGKLERPQQLQLQHHRQLSQSQSLNTGLSTSGIDSPHTPPSAENSRFARTRPSSMISQISQLSKLSQMSTMLSESELDILDETDTMDDDDDYDDEVYESSINTSQDNKLTGPNATPSSSNQGVKTSSKKRPTYRRGVASDTSITSTPSASGGGAGGGSGIISTIPKKKNSLSKLRSNSSEDISEDSYRFNDENMPMGRSGSPDLGKKRSFRALQQPIPLVNGTTSTSIAEKLNDATKMPYVRAPSPPIGFKYNAKANKKMMTTAINGNNNNNNNNQQQPPGYQDTKQVEDWIHNGTTGNTTTFTKSTIYQPVINEEEEENV

SEQ ID NO: 31948 - protein, 573 aa, Candida albicans SC5314
MCGIFAAYRQPEVEDFKSKALQYSKLIRHRGPDWSGNVVQNSTILCHERLAIVGLDSGAQPIVSPDGNFTLAVNGEIYNHIQLREQFPDYKFKSLSDCEPIIPLFTKYDIDAPKHLDGMFAWVLYDKKNDRIVAARDPIGITTLYMGKSSKSPKTRYFASELKCLIEECDEIFAFPPGHVYDSNTDEITRYFQPSWWDASKVPEQHVDFKKVRETLELAVRKRLMAEVPYGVLLSGGLDSSLIASIASRETKKAAQASFNPEGIDANKELSGVDDKGSLHSTGVFNQLHSFAIGLPGAPDLLAAEKVAHFIGTIHHSHTFTLEEGLDALDDVIYHLETYDVTTIRASTPMYLLSRKIKAQGVKMVLSGEGSDEIFGGYLYFANAPSAKEFHEECVKRVKNLHYADCLRANKSTMAWGLEARVPFLDKQFLEVCMNINPEDKLIQPGKIEKYILRKAFDTSDEPDVKPYLPEEILWRQKEQFSDGVGYSWIDGLKDTAEKMVSDEEFAHPKPEWGDDIPTTKEAYWYRCKFDKMFNGSKAAASTVMRWIPKAEWGCHADPSGRYAATHDHKVAQ

SEQ ID NO: 31949 - protein, 794 aa, Candida albicans SC5314
MVQLALFTNNNHNNNSNNNTTNTLNDDTQYDSTTMNTEDTPIIPDKTDKLNGSDSRSSSRNRTRSISFTRFLFNSNNNNNNNKDHTEQSRCPSNETSDNSVGSPEQQNSGFNKLKKMFKTNSSLTQEDGKNSGRTRSASTPLTPPKVKKETSVPVITTTKAPNKEETTTTKIHSPPESPVVQSNPYFQYQGVPAHTNTSQNPQIETAPGRSDMSVALRHNDSVFSLNENGVLKPPKIHYSELSSSSEDNSEPSSPALPKTPMRDLVEKDELHLKPIEDERDLAIPASPFQRALRRVASAPLVHRLLNEKSPEDANNNNNNNTGNNLGGPFSTSTQTSPKKDEPFDINKHIGEVKITGRPRTYTQDRTYSNAATRIVDVQVGPNSFEKVRLLGKGDVGKVFLVREKSSNKLYAMKILNKKEMIERNKIKRALAEQEILATSNHPFIVTLYHSFQSKDHLYLCMEYCMGGEFFRALQTRDTKTICEADAKFYAAEVTAALEYLHLMGFIYRDLKPENILLHQSGHIMLSDFDLSKQSERAKNPEISFHKSGMHLSSAGSSNHHNGPAIDTKACIDGFRTNSFVGTEEYIAPEVIRGKGHTSAVDWWTLGIFLYEMLFGTTPFKGQDRKKTFANVLKKDVKFSDTQQSISSNCRNLIKKLLIKDEEKRLGSKTGASEIKNHAFFKDTQWALLRHQKPPMIPVLTKSTSTSNSNKKYEKPMEDTEEIDDVTSISKSINEQIDDPFSQFNSVTLRYGGEFEDLNQSPMYNPDSSAYTSVAYTMTSNNENSFRQKSFLKR

SEQ ID NO: 31950 - protein, 361 aa, Candida albicans SC5314
MSSIFKLSTRTIMTSTTTNSIKPKVLRLGITHYAQHKWDQLSKIAEIIDCESTNREEFIHDLQTKYNDITNISRTFASIKQTGRFDNELAKHMPTTLKAISHCGAGYDQIDVTPFTEIGVQISNVTVPVEGPTADTAIYLVLACMRNFQIGHNILVNGEWPQSKNKKKKKISHALSIGNSPEDKVVGILGMGGIGRAIRDRLKPFGFGKIVYHNRNRLSEELEAGAEYLSMDELLNQSDIIIVSVPLNAHTKHLVNKSLIEKMKDGVILINTARGAVIDEKVLPELIKSGKIGSFGADVFENEPEVSPELYELPQVVSLPHMGTYTVEAVRNMESWVVDNIESYIKTGKVKTIVPEQYNAF

SEQ ID NO: 31951 - protein, 573 aa, Candida albicans SC5314
MCGIFAAYRQPEVEDFKSKALQYSKLIRHRGPDWSGNVVQNSTILCHERLAIVGLDSGAQPIVSPDGNFTLAVNGEIYNHIQLREQFPDYKFKSLSDCEPIIPLFTKYDIDAPKHLDGMFAWVLYDKKNDRIVAARDPIGITTLYMGKSSKSPKTRYFASELKCLIEECDEIFAFPPGHVYDSNTDEITRYFKPSWWDASKVPEQHVDFKKVRETLELAVRKRLMAEVPYGVLLSGGLDSSLIASIASRETKKAAQASFNPEGIDANKELSGVDDKGSLHSTGVFNQLHSFAIGLPGAPDLLAAEKVAHFIGTIHHSHTFTLEEGLDALDDVIYHLETYDVTTIRASTPMYLLSRKIKAQGVKMVLSGEGSDEIFGGYLYFANAPSAKEFHEECVKRVKNLHYADCLRANKSTMAWGLEARVPFLDKQFLEVCMNINPEDKLIQPGKIEKYILRKAFDTSDEPDVKPYLPEEILWRQKEQFSDGVGYSWIDGLKDTAEKMVSDEEFAHPKPEWGDDIPTTKEAYWYRCKFDKMFNGSKAAASTVMRWIPKAEWGCHADPSGRYAATHDHKVAQ

SEQ ID NO: 31952 - protein, 795 aa, Candida albicans SC5314
MVQLALFTNNNHNNNSNSNTPNTLNDDTQYDSTTMNTEDTPIIPDKTDKLNGSDSRSSSRNRTRSISFTRFLFNSNNNNNNNKDHTEQSRCPSNETSDNSVGSPEQQNSGFNKLKKMFKTNSSLTQEDGKNSGRTRSASTPLTPPKVKKETSVPVITTTKAPNKEETTTTKIHSPPESPVVQSNPYFQYQGVPAHTNTSQNPQIETAPGRSDMSVALRHNDSVFSLNENGVLEPPEIHYSELSSSSEDNSDPSSPALPKTPMRDLVEKDELHLKPIEDERDLAIPASPFQRALRRVASAPLVHRLLNEKSPEDANNNNNNNNTGNNLGGPFSTSTQTSPKKDEPFDINKHIGEVKITGRPRTYTQDRTYSNAATRIVDVQVGPNSFEKVRLLGKGDVGKVFLVREKSSNKLYAMKILNKKEMIERNKIKRALAEQEILATSNHPFIVTLYHSFQSKDHLYLCMEYCMGGEFFRALQTRDTKTICEADAKFYAAEVTAALEYLHLMGFIYRDLKPENILLHQSGHIMLSDFDLSKQSERAKNPEISFHKSGMHLSSAGSSNHHNGPAIDTKACIDGFRTNSFVGTEEYIAPEVIRGKGHTSAVDWWTLGIFLYEMLFGTTPFKGQDRKKTFANVLKKDVKFSDTQQSISSNCRNLIKKLLIKDEEKRLGSKTGASEIKNHAFFKDTQWALLRHQKPPMIPVLTKSTSTSNSNKKYEKPMEDTEEIDDVTSISKSINEQIDDPFSQFNSVTLRYGGEFEDLNQSPMYNPDSSAYTSVAYTMTSNNENSFRQKSFLKR

SEQ ID NO: 31953 - protein, 530 aa, Candida albicans SC5314
MMLPRNSPHRTESTLAYNNNNSNNNNNNNGSSLFQRKPLAPINSEFKISKPQHIKPNTHSHTFTTPTPKTRNTATTTTTNNNNRNNHQYRNPNLNTSLVFTPTKNSSSSSSSSHSSSLLSSSPFVEEPENQPESNHTRATSHYRTTSTSQYKSSANKDASHSLITSSKRKTSTKQTSESTNPKRRTTTTATQNTNNNKILNPSLSSSTIRFSTVSSSTSSSTTSSSSSSHTSPKPQQQLTLDDFEFGKILGKGKLGRVYCVKHKQSGLIFALKVMSKSEIMNLKLEKSLRREIEIQSNLYHINITRLYSWFHDSINIYLLLEYSIEGELYTHLKKLKRFDNIMASNYIFQITQALIFLHQRGIIHRDLKPENIMISLDNQLKLSDFGWSVQINQNQNQNQIHNQTQTQKTPHQKKQKQKRLTICGTLDYLPPEMIESKSHDFSVDIWALGILCYELLVGKPPFEAINRNITYEKIAKVDIKYPSNLDVDAIDLISKLVVKDPNKRLSLKEVLNHNWIIKNKPKWPKNIYK

SEQ ID NO: 31954 - protein, 757 aa, Candida albicans SC5314
MKRTPRSDTVSPDRSRLTSPSPSIRHISHTRVNTERSYLLHKDSTPQVADAESIIYQDEYTPANTHNVESLSWSEILPYYIPCLSWIGQYSVEFFVGDLIGGLSLVFFQLPLSLSYATSLAHVPVTSGLYSLGISPLIYLIFGSVPQMIVGPEAPISLIVGQAIEPLLHHAKKAHLDPVEYVVAITFVSGSTLLGFGLARFGFLDNVLSASLLKGFIAGVGIVMIITSSIIVLGLEKLMKQISDDPNEMDIHSPFDKVRFLIQYIGQRNQQSLNIGLVGFFIIFTIRLFKKHAAKQNGRLYKYAVFIPEIMLVVAGSTILCQHYRWDLGGLPVIGKVRNEGDFKFYNPLSLSNLHLIKKLCASGFMCAMLGFFESTTASKSLGSMYDLPISSNRELVALGSINIFGSVFGALPAFGGYGRSKVNAISAKTTMSGGIMGICTLLTIHFLLKYLYFVPQCMLSVVAAVIGISLIEEAPYELYFHWKTRGIDEIITFCVTVVTTLFFSMEGGIAVGIGYSLVRVVKNSTFSRIQILGRYPNTNKFVNADIPAYQTSQEKVAGSYLNLFDDAQHMQLNTQVLEEVEGCLIIKVPEPLTFTNCSDLTTRLKRVEMYGSTRAHPASKRSRDIGMTKYVIFDLKGMSSLDSTAAKILKTLLEGYRKRGIRTCFVRMSSDKHLRKMLADSGICKLLIDDLTDLKYFAIQEIAEQNSQPLTTPEMEAMVECYSLIESSSHPYFNHISDALKVIDCFETNYVDTIDA

SEQ ID NO: 31955 - protein, 478 aa, Candida albicans SC5314
MVQGKVLVVSNRIPVTIKRLDNGSYDYSMSSGGLVTALQGLKKTTEFQWYGWPGLEIPEDEQTKVNDELKSKFNCTAIFLSDTIADLHYNGFSNSILWPLFHYHPGEMNFDENAWAAYIEANKKFALEIVKQVNDDDMIWVHDYHLMLLPEMLRQEIGNKKKNIKIGFFLHTPFPSSEIYRILPVRKEILEGVLSCDLIGFHTYDYARHFISSVSRIVPNVSTLPNGIKYQGRSISIGAFPIGIDVDNFIDGLKKDSVVERIKQLKSKFKDVKVIVGVDRLDYIKGVPQKLHAFEVFLNENPEWIGKVVLVQVAVPSRGDVEEYQSLRSTVSELVGRINGEFGTVEFVPIHYLHKSIPFDELISLYNISDVCLVSSTRDGMNLVSYEYIACQQDRKGVLILSEFAGAAQSLNGALIVNPWNTEDLSEAIKESLTLPEEKREFNFKKLFTYISKYTSGFWGESFVKELYKCNPQKSLRD

SEQ ID NO: 31956 - protein, 548 aa, Candida albicans SC5314
MIPRLYRSFSISTTLRNELLDTAKMLQSSSSNTLNQPKNFKIHTTKPTSPESYERTVYPTNYNKPQDETLENSDIPMIKITELSRDLTTGLTTATTSIADYFFGNTHHSHHVFYSNLTVLKAKRAAKVENKKFIDLKLIKLTSGNGGNGCVSFFKDNFKPMGPPDGGDGGNGGSIYLNVVDKNITSLHGLQKRYVAKGGQPGKGSQLDGKSGDDIIIDIPLGTIVRWIPDPQDFKKFVSQREGDALNDVFMEFDIDDRDFIQLNRGGYRPGEGWIFKEHDEEYFRDKDFFQDLNEKVTGYDEELLFEESYNDRFPIVGLDCNQVTQKPLLLLRGGKGGLGNMHFLTKEIKGPRFCKMGRPGITANFLLELKLIADLGLVGLPNAGKSSLLRAISKARPRVGHWEFTTLQPTVGTIFTRIDKDPFTVADIPGIIKGASQNKGMGLDFLRHIERSGGLVFVVSLESANPVDDLKILLEEVGPRRMKDKNVLVVATKADLSSEGANFKVLRDYIEHNHSEWKIVPVCAPKGENVERCIKLMSEIAQTKKKP

SEQ ID NO: 31957 - protein, 373 aa, Candida albicans SC5314
MTTSLTEQTAILAKYLELSQNGKILAEYVWIDAEGSTRSKCRTLSKKPTSVDDLPEWNYDGSSTGQAPGHDSDVYLRPVAFYPDPFRKGDNIIVLNECWNNDGTPNKFNHRHECAKLMKAHASEEVWFGLEQEYTLFDQYDYPYGWPKGGFPAPQGPFYCGVGTGKVVARDVIEAHYRACLYAGINISGINAEVMPSQWEFQVGPCEGIEMGDQLWIARYLLQRVAEEFAVKISFHPKPLKGDWNGAGCHTNVSTKSMRVPGGMKVIESALSKLAKRHKEHMLLYGADNDQRLTGRHETGHMDTFSSGVANRGASIRIPRQVAKEGYGYFEDRRPASNIDPYLVTGIMVETICGSIPDADMAKEFLRESSDDN

SEQ ID NO: 31958 - protein, 373 aa, Candida albicans SC5314
MTTSLTEQTAILAKYLELSQNGKILAEYVWIDAEGNTRSKCRTLSKKPTSVDDLPEWNYDGSSTGQAPGHDSDVYLRPVAFYPDPFRKGDNIIVLNECWNNDGTPNKFNHRHECAKLMKAHASEEVWFGLEQEYTLFDQYDYPYGWPKGGFPAPQGPFYCGVGTGKVVARDVIEAHYRACLYAGINISGINAEVMPSQWEFQVGPCEGIEMGDQLWIARYLLQRVAEEFAVKISFHPKPLKGDWNGAGCHTNVSTKSMRVPGGMKVIESALSKLAKRHKEHMLLYGADNDQRLTGRHETGHMDTFSSGVANRGASIRIPRQVAKEGYGYFEDRRPASNIDPYLVTGIMVETICGSIPDADMAKEFLRESSDDN

SEQ ID NO: 31959 - protein, 175 aa, Candida albicans SC5314
MFRRSLLSTSRFINKSSSSLSPGLLLNNFRGNFQQSRFISTELKDALDKAVTTSPVVLFMKGTPEFPQCGFSRATIQILGQQGVDPEKFAAYNVLEDSELREGIKEYSSWPTIPQLYVNGEFIGGCDIITSMAQNGELAELLEESNALIPEENEPTTSEENQETVQSANIKPNRN

SEQ ID NO: 31960 - protein, 392 aa, Candida albicans SC5314
MTKSTEATLINNLRHYIAQNYHHSSLSIWHKLPISRRSAVFILLFMGNLGELRVLLTKRSSKLRNFPGHVALPGGKADSGLESEWQVSRREMHEEIGLSDNDEDLKNLGISIEHLTQLPSYLSRTFSCVKPCVGFMHNLNGTDNDIASKLNIVLNPGESSSVFSCPLKDFLHPTIDIPALEALERTSYKVKWGGIPWDLRSYTFLQNNINEVEWLKNIKDLSASEEESELDLKLGDELDSRDKASVTPPNVTPTRSLSPAAAATTITNKKRDRHKKKDLSTWGRLGSRRDEDTNEKIYDVWGLTANILHDLAEIVYVGKGKGEDKDKINQQDNIGQEEMIYSLYEHGNLMKQKERNPEEVKLIHATHYDKDIGFDKILPESEFNRLNSIYKL

SEQ ID NO: 31961 - protein, 629 aa, Candida albicans SC5314
MTPIQQTPSVHNTIDDSSNGFPNQISLGEYLFYRISQANPKLKSIFGIPGDFNLNLLEHVYSPIIAEREIKFINTCNELNCAYAADGYSRVIGGMSAMITTFGVGELSAINGIAGAFAEHCPVLHIVGTTSMKDRLRAPNEMINIHHLVPNHDPLKPPNHDVYKSMVENISVVQESLDYDTKKNLIKIDNVLKKIIQEARPGYLFIPCDVPDLPVPGKMLFSDPFTAATRYTNSILSKQVLNDVTNAILEKMYDAKNPSIFSDCLTTRFGFQNDLNRFIDQIPETVKLFTANLARNLDESRNNFVGVYNGNGSSDDKTKQEFESSDFILTLGFFPNEMNTGGHTSNFSMIKDVVIVHPDYIKVNHQIYHIKQNDGERLFTLGEFLCTLTEKFDPSKLSVAAAEPKKIYQYQPSQQYSPSNLDYIPQGKLIDHFNSTLKPNDLFILETSSFVFGLPDMKFPTNVQLLTSPYYGSIGYAVPATFGATLAVNDLKSDRRIIVVQGDGSAQMTVQELSSFVRYKEILPNMPHIYLINNDGYTIERKIKGPNRSYNDINGKWKWRNLLNVFGGVEGEMYDSCVLKNSSELDQFFNGDKTKPISSHKLQFYEIIAGKFDVPQRVDNMMCISKNKN

SEQ ID NO: 31962 - protein, 398 aa, Candida albicans SC5314
MTVEYETKQLTPAQVKIILDTVPILEEAGETLTQKFYQRMIGNYDEVKPFFNTTDQKLLRQPKILAFALLNYAKNIEDLTPLTDFVKQIVVKHIGLQVLPEHYPIVGTCLIQTMVELLPPEIANKDFLEAWTIAYGNLAKLLIDLEAAEYAKQPWRWFKDFKVTRIVQECKDVKSVYFTPVDKDLLPLPKPERGQYLCFRWKLPGEEFEISREYSVSEFPKENEYRISVRHVPGGKISGYIHNNLKVGDILKVAPPAGNFVYDPATDKELIFVAGGIGITPLLSMIERALEEGKNVKLLYSNRSAETRAFGNLFKEYKSKFGDKFQAIEYFSEDNNTDDKIVIDKAFNRKLTTDDLDFIAPEHDVYLVGPREFMKDIKEHLGKKNVPVKLEYFGPYDP

SEQ ID NO: 31963 - protein, 400 aa, Candida albicans SC5314
MTVASASIINNYFESKPLTPEHIQIIIDSVPILEHLDVQLTEKFYKRLLKQNPEFKPFFNETHQKLLRQPRIMIHFLIQYAKNIQDLTPMIDFIKKIASKHVGLQVKPEHYPKLGQVLINVIINLFPKQLVHDEFIEAWTLAYQNLANLLIKLESEQYVEKPWYGFKQFKVTRLQRECSDVKSLYITPVDGSPIPKPKRGQYLCMRWLLPGEKHEITREYSISEYPKNNEYRITVRYIPGGKVSNYIHNNINVGDIVYSGPPCGDCVYESSSKNLVFLAGGNGVTALLPMIEAGLTEGRQVKLLYSNRSTDSRSFGKLFQSYKLQYGDRFQVVEFLSRGRTIDPIDKFYRRSLTLEDLDFIVPEDDVYLIGPRTYMKMIEDYLKDRNITVKLDYFGPREI

SEQ ID NO: 31964 - protein, 398 aa, Candida albicans SC5314
MTVEYETKQLTPAQIKIILDTVPILEEAGETLTQKFYQRMIGNYDEVKPFFNTTDQKLLRQPKILAFALLNYAKNIEDLTPLTDFVKQIVVKHIGLQVLPEHYPIVGTCLIQTMVELLPPEIANKDFLEAWTIAYGNLAKLLIDLEAAEYAKQPWRWFKDFKVTRIVQECKDVKSVYFTPVDKDLLPLPKPERGQYLCFRWKLPGEEFEISREYSVSEFPKENEYRISVRHVPGGKISGYIHNNLKVGDILKVAPPAGNFVYDPATDKELIFVAGGIGITPLLSMIERALEEGKNVKLLYSNRSAETRAFGNLFKEYKSKFGDKFQAIEYFSEDNNTDDKIVIDKAFNRKLTTDDLDFIAPEHDVYLVGPREFMKDIKEHLGKKNVPVKLEYFGPYDP

SEQ ID NO: 31965 - protein, 546 aa, Candida albicans SC5314
MSQSPTNVPRSYNSVLDLKLASPTNSASGATGGWIVQKFGGTSVGKFPENIVDNIVKVYSQTNRVAVVCSARSSQTKSEGTTSRLLRSADLAENDKDYQPLLNAIEEDHVTNAERIQSEEIKQELIKDTKQEIEHVRELLHACQIIGEISPRSLDSIMAVGEKLSCLFMTALMKDHGLNAVYINLQDVIPLSYDFQKGFDDSFYQFLSQEIGKRVLQCDKEGEREGEEDVIPVLTGYFGVVPGGLLNGVGRGYTDLCAALAAVALQADELQIWKEVDGIFTADPRKVPNARLLDSVTPEEAAELTYYGSEVIHPFTMEQVIRAKIPIRIKNVENPTGKGTIIYPDNIGRRGEATPPHPPAAFEQLAMSSLLQRKRSATAITAKQDIVVINIHSNKKTLSHGFLAHVFTTLDKYKLVVDLISTSEVHVSMALSIQSDQESQLKHALVDLRKMGTVDVTKKMTIVSLVGKQMVNFIGIAGNMFKVLADEKINIEMISQGANEINISAVINEKDTIRALKSIHAKLLEGGSAIGDSSAVDTRLEALKLS

SEQ ID NO: 31966 - protein, 904 aa, Candida albicans SC5314
MEDKNAATQLNLPNVQSIGSHLSIQDHEIALQQVIDNPLSIGEVATTLTESQKWFVLKRLHFDALVSLEELPPQASFIFEKIEQMTTEEAVEILEKNIEEHETDVNIPENDLVLWKELVENSHKFTKVQLQEKLGSNSSSSVEGEKTADVEKGHEIVDWDLQVRLEAVLVAYWSPYPEVRAVTFPYDDPTIPVETFRVYLIGIIWTAIGAVINQFFTERQPAITLAMAVVQVFLYPSGLLCEWFLPKWKFKIWKYTIDLNPGPYTYKEQMLATIFCGVTGGSTSYVSSNILMQKSEIFYDNKWVDFGYQVLLILSTNFLGVGFAGIMRKFAVYPTKAVWPSILPGLALNKTLLTPAKKEVINGWKISGYNFFFITFVASFLYFWIPDYLFQALSTFNWMTWIKPDNQNLAVITGSVGGLGLNPITTFDWNYFSSMLQPLQVPFFYPLNNIIGMFFAFFCIIGVWYSNYKWTGYLPINDNGLFTNTGERYSVASVVNKDSLFDNAKYQEIGPPFYSAANLVVYGAFFAIYPFHFVYEIGMNYDQMWDACTSFWRVIKDFRKSTYDGFDDPHSTMMRAYPEVPEWAYLIIVVISLVLAILCVKLYPAQTPVWGIFFALGINFVFLIPLTTIYARTGFAFGLNVLVELIVGYAIPGNGLALAFIKALGYNIDAQAQNFVNDLKQGHYAKLPPRAVYRVQLLSIFVSSFIQLGILNFQINGIKDYCKPGNTQKFTCPGGRTFFSASVLWGVIGPKKVFNGLYPVLAWCFLIGFLLAFPCIAIKKYAPRKYVKYFEPSIVIGGFLKYAPYNLSYYIPGVYVSYAFMSYIKRKYEAWWQKYTYVLSTGLNAGIAFSSIIIFFAVMYHEKDINWWGNTVMYSGVDYAMTGWLDATVDAPDGYFGPRRGNFP

SEQ ID NO: 31967 - protein, 402 aa, Candida albicans SC5314
MVPPVYIVSTARTPIGSFQGTLSSLTYSDLGAHAVKAALNKVPQIKPEDVDEIVFGGVLQANVGQAPARQVALKAGLTDKIVASTVNKVCASGLKAIIIGAQNIICGTSDIVVVGGAESMTNTPYYLPTARNGARFGDSTLIDGIQKDGLLDVYEQKLMGVAAEKCAADHGFTREQQDEFAIKSYQKAGNALKQGKFNQEIAPVTIKGVRGKPDVVVEKDEEIEKFNEAKLKSARAVFQKENGTVTGPNASKINDGAAALILVSEAKLKELGLKPLAKINGWGEAARNPIDFTIAPALAVPKAVKHAGLTLDQVDFFELNEAFSVVGLANAEICQIPLEKLNAYGGAVALGHPLGCSGARIVVTLLSVLIQEGGKIGCAGVCNGGGGASSIVIEKVDSDFKL

SEQ ID NO: 31968 - protein, 315 aa, Arabidopsis thaliana
MDVTDDEEIHQDRHSYASVSKHHHTNNNTTNVNAAASGLLPTTTSVHELLECPVCTNSMYPPIHQCHNGHTLCSTCKARVHNRCPTCRQELGDIRCLALEKVAESLELPCKHMSLGCPEIFPYYSKLKHETVCNFRPYSCPYAGSECSVTGDIPFLVAHLRDDHKVDMHSGCTFNHRYVKSNPREVENATWMLTVFHCFGQYFCLHFEAFQLGMAPVYMAFLRFMGDETEARNYNYSLEVGGYGRKLIWEGTPRSVRDSHRKVRDSHDGLIIQRNMALFFSGGDRKELKLRVTGRIWKEQQQSGEGGGACIPNLS

SEQ ID NO: 31969 - protein, 134 aa, Prochlorococcus marinus subsp. pastoris str. PCC 9511
ERVYLIRRGAVRLSRVYESGEEITVALLRENSLFGVLSLLTGHRSDRFYHAIAFTRVQMIRAPANSVLRAIEADASVGLLLLQGLSSRILQTETMIETLTHRDMSSRLVSFLMVLCRDFGVASEKGITIDLRLS

SEQ ID NO: 31970 - protein, 399 aa, Oryza sativa Japonica Group
MAAKAAALSSSPFVSSRRLSSPAASLRARTPRCVMGSEQVRVVVEEEGKTKKRMGVAEPRSAPPAVWTPRAPAQEARLAALRTDGRDSRLKIFSGTANRPLAQEIASYLGVDLGKVLIKRFADGEIYVQLQESVRGCDVFLVQPTCSPVNENLMELFVMIDACRRASARSITVVIPYFGYARADRKAQGREAITAKLSANLLTEAGSDRVIVCDIHSTQALGYFDIPVDHIHGQPVILDYLASKTISKDLVVVSPDVGGVVRARAFAKKLSDAPLAIVDKRRQGHNMSEVMHLIGDVKGKVAIMVDDMIDTAGTITSAAALLKQEGAEAVYACSTHAVFSPPAIERLSGGIFEEVIVTNSILLPEHKCFPQLTVLSMANLVAETIWHVHRDGSVSSIFQ

SEQ ID NO: 31971 - protein, 233 aa, Tolypothrix sp. PCC 7601
MVDDEASIRRILETRLSMIGYDVVTAGDGEEALETFRKADPDLVVLDVMMPKLDGYGVCQELRKESDVPIIMLTALGDVADRITGLELGADDYVVKPFSPKELEARIRSVLRRVDKTSASGIPSSGVIHVANIKIDTNKRQVYKGDERIRLTGMEFSLLELLVSRSGEAFSRSEILQEVWGYTPERHVDTRVVDVHISRLRAKLEDDPSNPELILTARGTGYLFQRIIEPGEE

SEQ ID NO: 31972 - protein, 493 aa, Rhizopus stolonifer
QVRRIRNLYIHSILRQDMSWFDKAEEGSLTTRLATDTQLIQDGISDKFGLLVMCIGQFLAGFIIAFVKGWRLAVVILATIPLLAGTGAAMGYFITKYTLKSQDAYAEAGSVAEQVFSGIRTVYSFSLQNRFAELYSNRLENAMKTGIRRGQVLGFGFGGFMFVLFCTYALSFWYGSKLTREMIMTGSDVLVVFFAMIIGAMALLQLPPNLSAVSSGCGAAYKIYSTIDRVPEIDPDSQEGLKPQSYNANLEFRDVMFKYPTRPDITILKKLNLTIRPGMTVAFVGPSGSGKSTSVQLIQRFYDPNAGSVFLDGHNLRDYNVAWLRSQIGVVSQEPVLFNMSIKQNLLMGISKQVSNDEIVDACKKANCHSFVSQLPDGYDTMVGEHGGMLSGGQKQRIAIARAILKNPPILLLDEATSALDTQSERLVQAALDAASADRTTIVIAHRLSTIRNADLICVVKNGRVIEQGTHWELLKLSGVYSDLVYQQSLNAH

SEQ ID NO: 31973 - protein, 243 aa, Salmonella enterica subsp. enterica serovar Typhimurium
GIDKLSDPLMFAAAMVSAGEADVCIAGNLSSTANVLRAGLRVIGLQPGCKTLSSIFLMLPQYAGPALGFADCSVVPQPTAAQLADIALASADTWRAITGEEPRVAMLSFSSNGSARHPNVANVQQATELVRERAPQLLVDGELQFDAAFVPEVAAQKAPDSPLQGRANVMIFPSLEAGNIGYKITQRLGGYRAVGPLIQGLAAPLHDLSRGCSVQEIIELALVAAVPRQADVSRERSLHTLVE

SEQ ID NO: 31974 - protein, 362 aa, Capsicum annuum
MATAVTAAVSLPSSKSTSFPTRTSIISPEKINFNKVPLYYRNVSGGSKLVTIRAQVTTEAPAKVEKISKKQDEGVVVNKFRPKEPYIGRCLLNTKITGDDAPGETWHMVFSTEGEIPYREGQSIGVIADGVDANGKPHKLRLYSIASSALGDFGDSKTVSLCVKRLVYTNDKGEEVKGVCSNFLCDLKPGADVKITGPVGKEMLMPKDPNATVIMLGTGTGIAPFRSFLWKMFFEKHDDYKFNGLAWLFLGVPTSSSLLYKEEFEKMKEKAPENFRLDFAVSREQTNEKGEKMYIQTRMAQYAEELWTLLKKDNTFVYMCGLKGMEQGIDDIMSSLAAKEGIDWADYKKQLKKAEQWNVEVY

SEQ ID NO: 31975 - protein, 363 aa, Triticum aestivum
NAVVCISQGTCWWYLILRMAKRKDCSKIFSGWCDNVIDLLNATEEEAILRRDIYDRPPTINWGKGRVTLLGDSVHAMQPNLGQGGCMAIEDGYQLAVELEKAWEESVKSRTPVDVISSLRSYEKERKLRVAIIHGLARMAAIMATTYRPYLGVGLGPLSFLTKLRIPHPGRVGGRFFIKVGMPLMLSWILGGNSSKLEGRPLSCRLSDKANNQLGRWFEDDALEQAMGGEWYLFPMSSGGDSALQPIRLIRDEQRTLSIGSKPDPSNSDSSLSFPLPQVSEIHATITCKNKGFYLTDLGSEHGTWFNDNEGRRYRLPPNFPVRFHPSDAIEFGSDKKAMFRVKVLSTLPYDSARGGGEVLQAA

SEQ ID NO: 31976 - protein, 665 aa, Cucumis sativus
MASSWRARGSLIVLAIVFFGGLFAISIAKEEATKLGTVIGIDLGTTYSCVGVYKNGHVEIIANDQGNRITPSWVAFTDSERLIGEAAKNQAAVNPERTVFDVKRLIGRKFDDKEVQKDMKLVPYKIVNKDGKPYIQVKIKDGETKVFSPEEISAMILTKMKETAEDFLGKKIKDAVVTVPAYFNDAQRQATKDAGIIAGLNVARIINEPTAAAIAYGLDKKGGEKNILVFDLGGGTFDVSILTIDNGVFEVLATNGDTHLGGEDFDQRIMEYFIKLIKKKHGKDISKDNRALGKLRRESERAKRALSSQHQVRVEIESLFDGTDFSEPLTRARFEELNNDLFRKTMGPVKKAMDDAGLEKNQIDEIVLVGGSTRIPKVQQLLKDYFEGKEPNKGVNPDEAVAYGAAVQGSILSGEGGEETKDILLLDVAPLTLGIETVGGVMTKLIPRNTVIPTKKSQVFTTYQDQQTTVSIQVFEGERSLTKDCRNLGKFDLTGIPPAPRGTPQIEVTFEVDANGILNVKAEDKGTGKSEKITITNDKGRLSQEEIDRMVREAEEFAEEDKKVKERIDARNSLETYTYNMKNQINDKDKLADKLESDEKEKIETAVKDALEWLDDNQSAEKEDYEEKLKEVEAVCNPIITAVYQRSGGAPGGESAEDDESHDEL

SEQ ID NO: 31977 - protein, 45 aa, Streptococcus thermophilus
TKGFGFITSEDGQDLFAHFSSIQSDGFKSLDEDQKVEFDVEVGQR

SEQ ID NO: 31978 - protein, 203 aa, Picea abies
MECFEEKGKGVQKTRMVRGKTQMKRIENDTSRQVTFSKRRNGLLKKAYELSVLCDAEVALIVFSPRGKLYEFANPSMQKMLERYDKCSEGSNTTNTTKERDIQYLKREIANREERIKILESRQRKMVGEELASCALSDLNLLESQVERGLRHIRARKTQILVAEIEELKRKERISSEENAFHRKSLSILCMRMVPFWQLLQVH

SEQ ID NO: 31979 - protein, 428 aa, Brassica napus
MAQILAASPTCQMRLTKPSSIASSKLWNSVVLKQKKQSSSKVRSFKVMAIQSDNSTINRVESLLNLDTKPFTDRIIAEYIWYGGSGIDLRSKSRTLEKPVEDPSELPKWNYDGSSTGQAPGEDSEVILYPQAIFRDPFRGGNNILVICDTYTPAGEPIPTNKRARAAEIFSNKKVNEEIPWFGIEQEYTLLQPNVNWPLGWPVGAYPGPQGPYYCGVGAEKSWGRDISDAHYKACLYAGINISGTNGEVMPGQWEFQVGPSVRIEAGDHVWCARYLLERITEQAGVVLTLDPKPIEGDWNGAGCHTNYSTKSMREDGGFEVIKKAILNLSLRHMEHIIAYGEGNERRLTGKHETASIDQFSWGVANRGCSIRVGRDTEKKGKGYLEDRRPASNMDPYIVTSLLAETTLLWEPTLEAEALAAQKLSLKV

SEQ ID NO: 31980 - protein, 249 aa, Rosa rugosa
MEFPKQITPADDPESSSQKKLGRGKIEIKRIENTTNRQVTFCKRRNGLLKKAYELSVLCDAEVALIVFSTRGRLYEYANNSVRATIERYKKACDSSNTGSVTETNVQFYQQEASKLRRQIREIQNSNRHILGEALSTLNVKELKNLEGRLEKGISRIRSKKNEMLFAEIEYMQKREIELQNHNNFLRAKIAENDRAQQQQANMMPGTLSAYDQSMPPPQSYDRSFLPVILESNHHYNRQGQNQTPLQLV

SEQ ID NO: 31981 - protein, 248 aa, Rosa rugosa
MAYENKPNTVLDSDAQRRLGRGKIEIKRIENTTNRQVTFCKRRNGLLKKAYELSVLCDAEVALIVFSNRGRLYEYSNNSVRETIERYKKACADSSNNGSVSEATTQYYQQEAAKLRAQITTLQNSNRGYMAEGLSNMSIKELKGVETKLEKAISRIRSKKNELLFAEIEYMQKRELDLHNNNQLLRAKIAENERHQQSINAIAGGHGSYDIMQPTQPFHEARNYFQVNALQPNIHQYSRHDQISLQLV

SEQ ID NO: 31982 - protein, 249 aa, Rosa rugosa
MAYENKPNTVLDSDAQRRLGRGKIEIKRIENTTNRQVTFCKRRNGLLKKAYELSVLCDAEVALIVFSNRGRLYEYSNNSSVRETIERYKKACADSSNNGSVSEATTQYYQQEAAKLRAQITTLQNSNRGYMAEGLSNMSIKELKGVETKLEKAISRIRSKKNELLFAEIEYMQKRELDLHNNNQLLRAKIAENERHQQSINAIAGGHGSYDIMQPTQPFHEARNYFQVNALQPNIHQYSRHDQISLQLV

SEQ ID NO: 31983 - protein, 250 aa, Rosa rugosa
MAYENKPNTVLDSDAQRRLGRGKIEIKRIENTTNRQVTFCKRRNGLLKKAYELSVLCDAEVALIVFSNRGRLYEYSNNSVRETIERYKKACADSSNNGSVSEATTQYYQQEAAKLRAQITTLQNSNRGYMAEGLSNMSIKELKGVETKLEKAISRIRSKKNELLFAEIEYMQKRELDLHNNNQLLRAKGQIAENERHQQSINAIAGGHGSYDIMQPTQPFHEARNYFQVNALQPNIHQYSRHDQISLQLV

SEQ ID NO: 31984 - protein, 643 aa, Desulfovibrio gigas
MCGIAGFVLLQDAPPVTDHQARDVLAAMAGRIAHRGPDGRGHHVGLPAAFAHCRLAIIDLSTGAQPMAAEDGAAVVTFNGEIYNYQEVRRELQALGRTFQTRSDTEVLLQAYLEWGVACLDRLEGMFAFALWDVRRRTLFAARDRFGKKPFFYTIQQGVFAFASELSALEAVPWAAFSIRASTLARFLAYEYVPTPESIYAEARKLPPAQYLELHEDGTLLVERYWETPMPRPEGSKGFGRADEPALCEELRRLLTQAVRRRLIADVPVGVFLSGGVDSSSVAAMAGQLAPGIKTFSIGFTEASYDESAYAGRVAAQLGTDHQLELLSADACADLLPEVVSRFDEPMADPSIVPTYLLSQITRRQVTVALGGDGPDELLAGYEYYPGFKATQYWERLPAWLRRAAVAASGLLPGSAGYVNPRHVAQTFLAAAEAPAWLRTQRMLTALTPEAQRALWKSPGDMLEPTRLFASTKRLWEALPDWPPMARVFHLFAQQITYGYILVKVDRCTMLHGLEARAPFLDRDLAEFCFRLPVSMKLRGATRKYLLKEAMAGLLPQDILHRPKRGFLIPTAAWLRGRLRPLVDDLLHERRLREQGLFHPAAVRRLVEEHASGKKDHRKGLWTMLVLQLWLAGKPAVRIDPER

SEQ ID NO: 31985 - protein, 207 aa, Alcaligenes faecalis
KLVSYATTKRVPPGEAIFEQGDDAVLFYLLLHGRLKVNQITPDGQQIIVRMVHPGDLFGFARALQRSDYPGTAIAVAESIVLAWPTELWDYFVEQNPGLAMNAIQTIGKRLEEAHTRIREMSTEEVERRVAHTVLRLARQAGRKEDDGIRIDFPITKQDIAEMTGTTLHTVSRILTGWEAQGFVRGGRQKLTVLNMSGVRRLADGER

SEQ ID NO: 31986 - protein, 232 aa, Thermotoga sp. RQ2
  misc_feature (142)..(142): Xaa can be any naturally occurring amino acid
  unsure (1)..(232): unsure at all Xaa locations
GSSKDNLFLPKNPDVVLVDTEIVAKAPARFLVAGMGDALATWFEAESCKQKYAPNMTGRLGSMTAYALARLCYETLLEYGVLAKRSVEEKSVTPALEKIVEANTLLSGLGFESGGLAAAHAIHNGLTVLENTHKYLHGEKVXIGVLASLFLTDKPRKMIEEVYSFCEEVGLPTTLAEIGLDGVSDEDLMKVAEKACDKNETIHNEPQPLTSKDVFFALKAADRYGRMRKNLT

SEQ ID NO: 31987 - protein, 462 aa, Rhizobium leguminosarum bv. viciae
MANIENSAGKPDAGLVRKGLTEALFAAVLSFGMFVLYVGLKTDQNISNELIIVQRWGLLAIFVAVAAIGRSPRWFSRPHLDSRKLAKSRQGELDISTEKSFFHRHFLKIALIALLLYPMVVVAFKGPQGSLTYVDNFGIQILIYVMLAWGLNIVVGLAGLLDLGYVAFYAVGAYSYALLSSYFGLSFWVLLPLSGIFAALWGVILGFPVLRLRGDYLAIVTLAFGEIIRLVLINWTEVTKGTFGISSIPKATLFGIPFDATAGGFAKLFHLPISSAYYKIFLFYLILALCMLTAYVTNSVRRMPIGRAWEALREDEIACRSLGINTVTTKLTAFATGAMFAGFAGSFFAARQGFVSPESFVFLESAVILAIVVLGGMGSLTGIAIAAIVMVGGTELLRSMDFLKLIFGPDFTPELYRMLIFGLAMVVVMLFKPRGFVGSREPTAFLRERKAISGSFIKEGHG

SEQ ID NO: 31988 - protein, 327 aa, Escherichia coli
MSERHLPDDQSSTIEPYLITSVRQTLAEQGAALQNLSKQLDSGQYQRVLNLIMNCKGHVILSGMGKSGHVGRKMSATLASTGTPSFFIHPAEAFHGDLGMITPYDLLILISASGETDEILKLVPSLKNFGNRIIAITNNGNSTLAKNADAVLELHMANETCPNNLAPTTSTTLTMAIGDALAIAMIRQRKFMPNDFARYHPGGSLGRRLLTRVADVMQHDVPAVQLDASFKTVIQRITSGCQGMVMVEDAEGGLAGIITDGDLRRFMEKEDSLTSATAAQMMTREPLTLPEDTMIIEAEEKMQKHRVSTLLVTNKANKVTGLVRIFD

SEQ ID NO: 31989 - protein, 649 aa, Volvox carteri f. nagariensis
MGREAPAIGIDLGTTYSCVGVWQNDRVEIIANDQGNRTTPSYVAFTDSERLIGDAAKNQVAMNPRNTVFDAKRLIGRKFSDPIVQADIKLWPFGVRAGAGDVPEIVVTYKGEEKVFKAEEISSMVLIKMKETAQAYLGADREVKKAVITVPAYFNDSQRQATKDAGMIAGLEVLRIINEPTAAAIAYGLDKKDSGLGERNVLIFDLGGGTFDVSLLTIEEGIFEVKATAGDTHLGGEDFDERLVNHFANEFQRKYKKDMKTSPRALRRLRTACERAKRTLSSAAQTTIELDSLFEGIDFATSITRARFEELCMDLFRKCMDPVEKCLRDAKMDKSTVHDVVLVGGSTRIPKVQQLLQDFFNGKELNKSINPDEAVAYGAAVQAAILTGEGGEKVQDLLLLDVTPLSLGLETAGGVMTVLISRNTTIPTKKEQVFSTYSDNQPGVLIQVYEGERARTKDNNLLGKFELTGIPPAPRGVPQINVIFDIDANGILNVSAEDKTTGNKNKITITNDKGRLSKEEIERMVQEAEKYKADDEQLKKKVEAKNSLENYAYNMRNTIREDKVASQLSASDKETMEKALTGAMDWLERNQMAEVEEFEHQLKELENVCNPIITRLYQGGAGGMPGGPAPGAGASSGGSGAGPKIEEVD

SEQ ID NO: 31990 - protein, 589 aa, Citrus sinensis
MDTANAMGSTGQPGSAPAPVRGGASVGTLGRHLARRLVEIGAKDVFSVPGDFNLTLLDHLIAEPELNLVGCCNELNAGYAADGYARSRGVGACVVTFTVGGLSVLNAIAGAYSENLPVICIVGGPNSNDYGTNRILHHTIGLPDFTQELRCFQAITCSQAVVNNLGDAHELIDTAISTALKESKPVYISISCNLPGIPHPTFARDPVPFFLAPKVSNQLGLEAAVEATADFLNKAVKPVLVGGPNIRVAKAQKAFIELADATGYPIAIMPSGKGLVPEHHPHFIGTYWGAVSSSFCGEIVESADAYVFVGPIFNDYSSVGYSLLIKKEKAIIVQPHRVTVGNGPSLGWVFMADFLSALAKKLRKNTTALENYRRIYVPPGIPVKRAQNEPLRVNVLFKHIQDMLSGDTAVIAETGDSWFNCQKLRLPENCGYEFQMQYGSIGWSVGATLGYAQAAKDKRVIACIGDGSFQVTAQEISTMIRCGQRSIIFLINNGGYTIEVEIHDGPYNVIKNWDYTGLVNAIHNGEGKCWTAKVRSEDELTEAMKAATGEQKDSLCFIEVFVHKDDTSKELLEWGSRVSAANSRPPNPQ

SEQ ID NO: 31991 - protein, 499 aa, Sesamum indicum
MDLLLTTFLLLCFTAWLWLLRVLKPNLGPWKSTKFPPGPNPLPIIGNILELGEKPHQSLAKLSKIYGPLMGLKLGTVTTVVVSSPEIARIVLQKYDQVFCSRQHVDASRALDHHKHSVVWLPVDNAWRKLRKLCKENMFSVQRLDRSQGLRREKLRSLRDYVKECAVNGEAVNIGRAAFTTSLNLMSATLFSMEFATLGSADSSEEFRDIVLGIMTLIGKPNLADYLPLLRLVDPHGILRENTLYFKRCFAIFDEIIRQRQQSSDSSTPKNDMLEALLQINQKNESELSFYDIKHLLLDLFVAGTDTTSSTVEWAMAELLRNPEKMWKTRDELRNVVGQKEEIQESDISQLPYLRAVVKETFRLHPAAPLLVPHKAEEEVEISGYIVPKNAQVLVNVWAMGRDSSVWPNPDVFMPERFLETETDVHGRHFELLPFGGGRRICVGLPLAYRMVHLMLATLVSSFDWKLEEGLKPEAVDMDERFGLTLQKAVPLVAVPTEL

SEQ ID NO: 31992 - protein, 324 aa, Pseudomonas fluorescens Pf-5
MSQSSDLIQSAQRTIRLELQAVEGLLPHIDADFVRACEMILASKGRVVVVGMGKSGHVGNKIAATLASTGTTAFFVHPAEASHGDMGMITRDDVILALSNSGSTNEIVTLLPLIKRLGIQLISLTGNPESPLAKAADVNLNVHVEHEACPLNLAPTSSTTAALVMGDALAVALLEARGFTAEDFAFSHPGGALGRRLLLKVENVMHEGSDLPQVQRGTLLKDALMEMTRKGLGMTVILEADGRLAGIFTDGDLRRTLDRAIDIHHATIDSVMTPHGKTARADMLAAEALKIMEDHKISALVVVDKEDRPIGALNMHDLLRAGVM

SEQ ID NO: 31993 - protein, 699 aa, Pseudomonas fluorescens Pf-5
MQTFFIAPTDFGVGLTSISLGLVRTLERAGLKVGFFKPIAQPHPGDTGPERSTELVARTHGLKPPQPLGLAHVERMLGDGQLDELLEEIITLYQQAAIGKDVLIVEGMVPTRSASYAARVNLHLAKSLDAEVILVSAPENEVLTELSGRVELQAQLFGGPRDPKVLGVILNKVRTDESMEAFSARLKEHSPLLRSGDFRLLGCIPFQPELNAPRTRDVADLMGAQVLNAGDYESRRMTKIIICARTMRNTVELLKPGVLVVTPGDRDDIILAVSLAAINGVPLAGLLLTSDTLPDPRIMELCRGALNAGLPVLSVSTGSYDTANQLNGLNKEIPIDDRERAEIITDFVASHLDANWLHQRCGTPREMRLSPAVFRYQLIQRAQEANKRIVLPEGSEPLTVQAAAICQARGIARCVLLAKPEDVHAVARAQGIELPEGLEILDPDLIRQRYVEPMVALRKSKSLNAPMAEQQLEDPVVIGTVMLALDEVDGLVSGVIHSTANTIRPALQLIKTAPGCSLVSSVFFMLFPEEVLVYGDCVMNPHPSASELAEIALQSADSAAAFGITPRVAMISYSSGDSASGEEVEKVREATLLAHEAQRSLLIDGPLQYDAAANENVARQLAPNSQVAGKATVFVFPDLNTGNTTHKAVQRSADCVSLGPMLQGLRKPVNDLPRGAQVDDIVYTIALTAIQAANRPMDV

SEQ ID NO: 31994 - protein, 324 aa, Pseudomonas fluorescens Pf-5
MKKTVLAFSRITPEMTERLQQDFEVIVPNPKHGDIAAQFNEALPQAHGLIGVGRKLGRAQLENAARLEVVSSISVGYDNYDLAYFNERGLMLTNTPDVLTESTADLAFALLMSSARRVAELDAWTKAGQWQASVGPALFGCDVHGKTLGIVGMGNIGAAIARRGRLGFGMPILYSGNSRKAALEQELGAQFRSLEQLLAEADFVCLVVPLSEKTKHLISHRELALMKPSAILVNISRGPVVDEPALIEALQKGQIRGAGLDVYEKEPLAESPLFQLKNAVTLPHIGSATHETRDAMAARAMSNLRSALLGERPQDLVNPQVWKG

SEQ ID NO: 31995 - protein, 342 aa, Pseudomonas fluorescens Pf-5
MKMLKSTLAAVTAATVLGMSGFAQAGATLDAVQKKGFVQCGVSDGLPGFSVPDATGKILGIDADVCRAVAAAVFGDATKVKFSQLNAKERFTALQSGEIDVLSRNTTWTSSRDAGMGLVFAGVTYYDGIGFLVNKKLGVKSAKELDGATICIQAGTTTELNVSDYFRGNGLKYTPITFDTSDESAKSLESGRCDVLTSDKSQLYAQRSKLATPTDYVVLPETISKEPLGPVVRKGDEEWFSIVKWTLFAMLNAEEAGVTSKNVEAEAKSTKNPDVARLLGADGEYGKDLKLPKDWVVQIVKQVGNYGEVFEKNLGKSTPLAIDRGLNALWNNGGIQYAPPVR

SEQ ID NO: 31996 - protein, 300 aa, Pseudomonas fluorescens Pf-5
MTDSTATRCGYVAIVGRPNVGKSTLLNHILGQKLAITSRKPQTTRHNMLGIKTEGAIQAIYVDTPGMHKSNEKALNRYMNKTASAALKDVDVVIFVVDRTKWTDEDQLVLERVQYVQGPVILAINKTDRIEDKAELMPHLTWLQEQLPNAEIVPVSAQQGHNLEALEGLIAKHLPENDHFFPEDQITDRSSRFLAAELVREKIMRQLGAELPYQITVEIEEFKQQGKTLHIHALIIVERDGQKKIIIGDKGERIKRIGMEARKDMELLFDSKVMLNLWVKVKGGWSDDERALRSLGYGDL

SEQ ID NO: 31997 - protein, 199 aa, Pseudomonas fluorescens Pf-5
MLDELLHRVSHYTPRTLETDRRFPEAAVLVPITRSEEPELVLTLRASGLSTHGGEVAFPGGRRDPEDPDLIFTALREAKEEIGLPPGLVEVIGPLSPLISLHGIKVTPYVGVIPDYVEYQANDAEIAAVFSVPLEFFRQDPREHTHRIDYQGRSWYVPSYRFGEYKIWGLTAIMIVELVNLLYDAGISLHRPPKNYIDT

SEQ ID NO: 31998 - protein, 82 aa, Pseudomonas fluorescens Pf-5
MRQSNNKKMRYGFMTTRETGNVKWFNDAKGYGFIQREGGADVFVHYRAIRGEGHRSLTEGQQVEYAVVEGQKGLQAEDVVGL

SEQ ID NO: 31999 - protein, 298 aa, Pseudomonas fluorescens Pf-5
MMSALPSLGFAGIGLMGLPMCRRLLAAGYPLTVWNRNPEKCAPLVAAGARQVATPAQLCADADLMLMCLANTEVVREVVFGPQGIAQGARAGQLLLDLSSLEPTATREMAAELAASRGVAWVDAPVSGGTPGAEAGSLAIMVGGEATDVERVRPVLLTLGQRVTHMGAVGAGQVTKACNQMIVACNALVIAEVVALAERSGVDARLIAEALAGGFADSKPLQILAPQMAESRFEPVKWHVRTLLKDLDGAVKFSREQGSATPISGLAAQLMRLHGGQGYLEKDPATLVRLYRDPAPAD

SEQ ID NO: 32000 - protein, 400 aa, Pseudomonas fluorescens Pf-5
MRDVFICDAIRTPIGRFGGGLSTVRADDLAALPIKALMERNPSVDWSSVDEVFLGCANQAGEDNRNVARMALLLAGLPDSVPGVTLNRLCASGMDAIGTAFRAIASGEMELAIAGGVESMSRAPFVMGKADTAFSRNMKLEDTTIGWRFINPLMKAQYGVDAMPQTADNVADDYKVSRADQDAFALRSQQRAAAAQAAGFFAEEIVAVRIAHKKGETVVEQDEHPRADTTLEALAKLKPVNGPDKTVTAGNASGVNDGAAALILASAEAVKKHGLTPRARVLGMASAGVAPRVMGIGPVPAVRKLIERLGVAVSDFDVIELNEAFASQGLAVLRELGLADDAPQVNPNGGAIALGHPLGMSGARLVLTALHQLEKSGGKKGLATMCVGVGQGLALAIERV

SEQ ID NO: 32001 - protein, 523 aa, Pseudomonas fluorescens Pf-5
MSGKGKFKKQLSLVDLTFIGLGAIFGSGWLFAASHVSAIAGPAGIFSWLLGGFAVLLLGIVYCELGAALPRAGGVVRYPVFSHGPLLGYLMGFITLIAFSSLVAIEVVAARQYAAAWFPALTHEGSSNPTIIGWLVQFALLCLFFWLNYYSVKTFAKSNNFISLFKFIVPLLVIGVLFSFFKPDNFHVQGFAPFGLSGIEMAVSAGGIIFAYLGLTPIISVASEVRNPQRTIPIALILSVLLSTLIYGLLQLAFLGSIPTEMLANGWSGISKEFSLPYRDIALTLGVGWLAYLVVADAVISPSGCGNIYMNATPRVVYGWARTGTFFKIFTRIDEESGIPRPALWLTFGLSVFWTLPFPSWEALINVVSAALVLSYAVAPISVAALRKSAPELARPFRVRGFALLGPVSFVIAALIVYWSGWGTVSWLLGLQILMFVIYLLCKRLVPTDHLSLGEQVRSSLWLIAFYALTIVISYLGSFGGIGALAHPFDTLTVTLMALCIYYWGANTGVPGAKLVLDGDEVE

SEQ ID NO: 32002 - protein, 303 aa, Pseudomonas fluorescens Pf-5
MPRFGGIATMMRLPHLQSAAGLDAAFVGVPLDIGTSLRAGTRFGPREIRAESVMIRPYNMATGAAPFDSLSVADIGDVAINTFNLLDAVRIIEEAYDGILEHNVIPLTLGGDHTITLPILRAIHKKHGKVGLVHIDAHADVNDHMFGEKIAHGTTFRRAVEEGLLDCDRVVQIGLRAQGYTAEDFNWSRKQGFRVVQAEECWHKSLEPLMAEVREKVGNGPVYLSFDIDGIDPAWAPGTGTPEIGGLTTIQAIEIVRGCQGLDLVGCDLVEVSPPYDTTGNTSLLGANLLYEMLCVLPGVAHR

SEQ ID NO: 32003 - protein, 468 aa, Pseudomonas fluorescens Pf-5
MAIKVLLVEDDRALREALADTLLLAGHDYKAVGSAEEALEAVAAEPFSLVVSDVNMPGMDGHQLLGLLRARQPQLPVLLMTAHGAVERAVEAMRQGAADYLVKPFEPRALLDLVARHALGGLGVGEDEGPVAFEPASAQLLELAARVARSDSTVLISGESGTGKEVLARYIHQHSHRVNQPFIAINCAAIPDNMLEATLFGHEKGSFTGAIAAQPGKFEQADGGTILLDEISEMPLGLQAKLLRVLQEREVERVGARKPITLDIRVVATTNRDLAGEVAAGRFREDLYYRLSVFPLAWKPLRERTADILPLAERLLAKHVNKMKHAAARLSAKAQECLLAYPWPGNVRELDNALQRALILQQGGLIQPEDFCLAGPVACAPLPALAPVVQMAARGTAAEVEVPAQESGGLGDDLRRREFQMIIDTLRSERGRRKEAAERLGISPRTLRYKLAQMRDAGMDVEAYLFAT

SEQ ID NO: 32004 - protein, 297 aa, Pseudomonas fluorescens Pf-5
MAKIGFIGTGIMGHPMAANLQKAGHSLLLSEHHGKAPADLIAAGAIALASPRDVAQEAEFVIIMVPDTPQVEDVLLRADGVAAGIGKGKIVIDMSSISPTATKAFAAKINETGAQYLDAPVSGGEVGAKAATLSIMVGGDSQAFERALPLFQSMGKNITLVGGNGDGQTAKVANQIIVALNIQAVAEALLFASKNGADPAKVREALMGGFASSKILEVHGERMIKGTFDPGFRINLHQKDLNLALSGARELGINLPNTANTQQVFSTCTAIGGANWDHSALIKGLEHMANFSIREKK

SEQ ID NO: 32005 - protein, 622 aa, Pseudomonas fluorescens Pf-5
MSAVIINLTHCDLPKFLRIHLVAVAATNGSPVRQWMNSMLSSRHRRALHLASRFVAPYRWQALGALLALIVTAGITLSMGQGIRLLVDQGFMTQSPHLLNQSIGLFLLLVLALAVGTFVRFYLVSWIGERCVADIRRQVFNHLIYLHPGFYENNRSSEIQSRLTADTTLLQSVIGSSLSLFLRNALMVLGGIVLLFVTNPKLTSIVVIALPLVLAPILIFGRRVRSLSRLSQDRIADVGSYVSETLGQIKTVQAYNHQPQDERRFAVTVEQAFDTARKRIVQRAWLITLVIVLVLGAVGVMLWVGGMDVIAGRISGGELAAFVFYSLIVGSAFGTLSEVIGELQRAAGAAERIAELLRADNIIQPPADGLVSLPARVRGDLELDGLRFSYPSRPDRFAIDGLSLSIRAGETLALVGPSGAGKSTLYDLLLRFYDPQQGRILLDGVALTQLDPLDLRRCFALVSQSPALFYGSIEENIRYGNPEATLAQVQEAAKIAYAHEFIEQMPEGYQTHLGDAGLGLSGGQRQRLAIARALLVDAPILLLDEATSALDAQSEHLIQQALPSLMKNRTTLVIAHRLATVKNADRIAVMDQGRLVAVGTHQQLIASNPLYARLAALQFSDG

SEQ ID NO: 32006 - protein, 391 aa, Pseudomonas fluorescens Pf-5
MSLNPRDVVIVDFGRTPMGRSKGGMHRNTRAEDMSAHLISKLLERNAKVDPAEVEDVIWGCVNQTLEQGWNIARMASLMTQIPHTSAGQTVSRLCGSSMSALHTAAQAIMTGNGDVFVVGGVEHMGHVSMMHGVDPNPHMSLYAAKASGMMGLTAEMLGKMHGITREQQDAFGVRSHQLAHKATVEGKFKDEIIPMQGYDENGFLKLFDYDETIRPETTLESLAALKPAFNPKGGTVTAGTSSQITDGASCMIVMSAQRAQDLGIQPMAVIRSMAVAGVDPAIMGYGPVPATQKALKRAGLGINDIDFFELNEAFAAQALPVLKDLKVLDKMNEKVNLHGGAIALGHPFGCSGARISGTLLNVMKQNGGTFGVSTMCIGLGQGISTVFERV

SEQ ID NO: 32007 - protein, 91 aa, Pseudomonas fluorescens Pf-5
MCPVGLSSTALLKIYVSWRYTMSNRQTGTVKWFNDEKGFGFITPQGGGDDLFVHFKAIESDGFKSLKEGQTVSFVAEKGQKGMQAAQVRPE

SEQ ID NO: 32008 - protein, 448 aa, Pseudomonas fluorescens Pf-5
MRLSSECKTTSLDQLSRLPEAHGYRLGSLCFPIVFAGTKMTSSEATAVRFSLSQRALGLSAPGTSSMRSKANALKESGIKVINFAAGELSFDACEDMRAGAIEAIANARNRYTPPIGLPALREKLAQRVSQRTGVEFAANEVAVTAGAKQALYNACMVLLNPGDEVIVPTPYWETFPTQIRLAGATPVCVQTRADHYRLTVDAVCGALTERTRMIVINTPNNPTGTVYEREQLLAIAQLAQERQLWVMFDECYRGLVREGHEHHNILALCPALKGQTVLIDSFSKSQAVTGWRVGYACAPAPVIAAMHNLQGHTTSNPSSLSQYAALNTLNADSSHFADLVNPFLQRQLHAARTYLDRLEGVSYAPPEGAFYLYIDVSSRLGGYYQGEAVRDVDHLADLLLTEAHIAVVPGSGCGDPHCIRISYAVEYEELIEGLGRFAQFISAIVID

SEQ ID NO: 32009 - protein, 473 aa, Pseudomonas fluorescens Pf-5
MRFAIGLFLCAALGGALTTHAAETVNDITQLNPIVVDQVVRPTRLEQIVQLVAGHPGPIAIGGGRYSMGGQTATEQALQIDMRGFNRVLDFSKERKEITVQPGITWRAVQDYIDPHDLSVSIMQSYANFTVGGALSVNAHGRYIGYGPLVSSVKSIKLVLADGQVVDASPQHNSDLFYGAIGGYGGLGVIVQATLQLSDNVRLLRSVDEMPLGDYRPYFQARIQNNPKVILHNAVLYPDQYQTLRAVSYSQTDLPVTVKERLTPLDQNYWKEQKALKVVSQWPGGKTLRQEVIDPLVLKKPQVSWRNHEASLDVRELEPDSRAKRTYVLQEYFVPPDQLESFVQEMGATLRAHKVNVINLSIRHAKADPGTLLAWAKTEVFALVLYYQQSTAPEEREKVGVWTRALVDSAIERGGSYYLPYQIHATAQQFRAAYPRAGEFLALKARVDPQNKFRNKLWDAYGLGATGDGAAQP

SEQ ID NO: 32010 - protein, 392 aa, Pseudomonas fluorescens Pf-5
MQDVVIVAATRTAVGSFQGSLANIPAVDLGAAVIRQLLAQTGIDPAQVDEVLMGQVLTAGAGQNPARQAAIKAGLPHVVPAMTLNKVCGSGLKALHLGAQAIRCGDAEVIIAGGQENMSLSNYVLPGARTGLRMGHSQMVDSMISDGLWDAFNDYHMGITAENLVEKYGISREAQDAFAAASQHKAAAAIEAGRFVDEITPIQIPQRKGEPLTFATDEQPRPSTTAEALAKLKPAFKKDGSVTAGNASALNDGAAAVMLMSASKARALGLPVLAKIAAYANAGVDPAIMGIGPVSATRRCLDKAGWTLDQLDLIEANEAFAAQSLSVAKELEWDASKVNVNGGAIAIGHPIGASGCRVLVTLLHEMIKRDAKKGLATLCIGGGQGVALAIER

SEQ ID NO: 32011 - protein, 316 aa, Pseudomonas fluorescens Pf-5
MRATVLVLVENVNAYLPHLEDLGFRLILAPTPQTRAQAIRDHAGQIDAVLTRGPLGLSAAEIAALPRLQIICVIGAGYEQVDLQAASNRRIAVTNGAGVNASSVADHALALLLALVRGIPQSDAAVRQGHWPKVLRPSLAGMRLGVLGLGAVGQAIARRCALGFDMPVSYHSRQPRPDQPYRFCPTLVELARDSDVLVIATPGGADTRHLVDQPVLEALGPEGFLVNIARASVVDTNALLQALQQRRIAGAALDVFDDEPQVPDALKVLDNVVLTPHVAGLSPQASRDTVAMVGQNLLAHFEGRPLLTPLALPAPN

SEQ ID NO: 32012 - protein, 535 aa, Pseudomonas fluorescens Pf-5
MHDQTLTGGQALVRLLAGYGVDTVFGIPGVHTLELYRGLPGSGIRHVLTRHEQGAGFMADGYARVSGKPGVCFVISGPGVTNVATPIGQAYADSIPLLVISSVNHSASLGKGCGSLHETQDQRAITAPITAFSALALSPEDLPELIARAFAVFDSERPRPVHISVPLDVLAAKVARDWTGEVRRRPARGPAAAVDIQQAADTLRNAKRPMIIAGGGALHAAEQLRALSTRLGAVFFSSVAGKGLLPDEAPLNAGATLCIEPGWQLISQADVVLAVGTEMADTDYWRERLPLNGELLRLDIDPRKFNDFYPCSVALHGDARATLDALLLALEQQVTPATAAIHAVADLRQAVQNGQGPLQQIHRSILQRIAAELPEHGFIASDMTQLAYSGNYLYPTRATRSWLHPTGYGTLGYGLPAGIGAKLGAPERPGLVLVGDGGFLYTVQELATAVEELDSPLVVLLWNNDALGQIRDDMLDLNIEPIGVLPRNPDFAALARAFGCSVSQPASLDELQQELRSGFARNGLTLIELKHACAR

SEQ ID NO: 32013 - protein, 402 aa, Pseudomonas fluorescens Pf-5
MRFSRLTQRIAGDGAAAWDIHYRALAKRERGEEVWLLSVGDPDFDTPQPIVQAAIDSLQAGHTHYADVRGKRALREAIARRHQQRSGQVVDAEQVVVLAGAQCALYSVAQCLLDPGDEVIVAEPMYVTYEAVFGACNAQVVPLPVRAEDGFRVQPEAVAARITGKTRALVLNSPHNPTGASIPRSTWEALAALCIEHDLWLICDEVYSELLYEGEHVSPASLPGMAERTATLNSLSKSHAMTGWRLGWVVAPTALAAHLENLALCMLYGSPEFIQDAAVVALEQPLPQLREMAEAYRQRRDLVCDCLADCPGARPLKPDGGMFVMVDIRATGLSAQAFSERLLDEQGVSVLAGEAFGPSAAGHIRLGLVLQADDLREACRRIALCARQCLAERDAPVTVQPV

SEQ ID NO: 32014 - protein, 328 aa, Pseudomonas fluorescens Pf-5
MKKHLVLYKKLSPTLMARLQEQAQVTLIETLDAAGLNALRQALPSADGLLGASLRLDAELLDLAPRLRAVASVSVGVDNYDIDYLTQRRILLSNTPDVLTETTADTGFALILATARRVVELANLVRAGQWQRNIGPAHFGTDVHGKTLGIIGMGRIGEALAQRGHFGFGMPLIYHSTRPKPAVEQRFNAQYRSLEQLLEEADFICLTLPLTERTQGLIGAREFALMRPESIFINISRGKVVDEAALIEALQQRRIRGAGLDVFEREPLDHDSPLLQLPNVVATPHIGSATHETREAMARCAVDNLLAALAGQRPPNLVNPAAWTSPRP

SEQ ID NO: 32015 - protein, 557 aa, Pseudomonas fluorescens Pf-5
MYQYDDYDRALVLERVAQFRDQVERFMGGQLSEEEFLPLRLQNGLYMQKHAYMLRVAIPYGTLSARQMRTLASIARDFDRGYGHFTTRQNLQFNWIELAQVPDILQRLAEVEMHAIQTSGNCVRNITTEAFAGVAGDEYLDPRPLAEILRQWSTINPEFLFLPRKFKIAICSAKQDRAAIMMHDIGLYLYRARNGEMLLRVIVGGGLGRTPILGLQIRDGLPWQHLLSYVEAVLRVYNRYGRRDNKYKARIKILVKALGIEAFAREVEEEWQHLRDGPAQLTEDEFQRVASAFVPPIYERLADTDLEYGSHLAESPAFARWVARNVHPHKVPGYTCVVLSTKPGPASPPGDVTGQQMEAVADWSEDYGFGEIRIAHEQNIVLPDVPKSRLFELWQRACEHGLGTANAGLLTDIIACPGGDFCALANARSIPITLAIQQRFDDLDYLHDLGDISLNISGCMNACGHHHIGNIGILGVDKNGSEWFQVTLGGAKGRDSALGKVIGPSFSAEEIPEVIERIIATFVRYRESDEPFVETLQRIGLEPFKERVYPKALEALA

SEQ ID NO: 32016 - protein, 286 aa, Pseudomonas fluorescens Pf-5
MAKQPGSIAVLGIGIMGAAVARNLRRKGFAVRAWNRTLQRAQALIADDIQVFAEPAEAVRGAQVIITLGKDGAAVLQTMQQARDGFEPGALWLQMATVGIEANDELQGFARDGGLVFYDAPVLGTRQPAEQGQLVVLGAGPEAHRPALQPLLEAIAKRVLWVAEQPGAGSRLKLALNSWVLALTHGAAESLALAKGLGLDPALVVELVSGGPLDSGYFQAKTRAMLSGDYSPSFTLANALKDAELMVAAAARAGVRLDLAEAGIQRFQRALEQGHGDKDMAASYLG

SEQ ID NO: 32017 - protein, 612 aa, Pseudomonas fluorescens Pf-5
MAKHLGESKQKLLQLMALSCPIRLNNAPRRLAKQARSQRIKRNISKGPGMSLSRCLSGLSNLLHYRREWLRADLRAGLSVAAIQIPIAIAYAQIVGLPPQYGLYACVLPMIVYALIGSSRQLMVGPDAATCAMLGGAVAPLAMGDLQRTVELSMIVTVLVGLMLIAAGIARAGFIASFFSRPILIGYLNGIGLSLIAGQMGKVVGFKIEGDGFILGLADFLQRLGEIHGLTLAVGLASLGLLIWLPRRYPRVPAALLTVALFTLLAGLLGFDRLGVAILGHVPAGMPELSWPKTTLEESKSLLRDALGIATVSFCSAMLTARSFAARHGYAINANHEFIALGLSNLAAGASQGFAISGADSRTAVNDMAGGKSQLVGIIAALAIALILLFFTAPMAWIPQPALGAVLLMAGWGLLDVKSLKQIYRLSRFEFWLCLLTTVSVLGLGVLPGIMFAVTLAILRLLYSIYQPTDAVLGWMPGIEGQVDIRQYPQARTVPGLVVYRFDDAILFFNADYFKMRLLDTVQRESQPEVVLFDAEAVTDIDVSGIAVLREIRETLAAQGIYFAIARARGTFLAMLERSGMTREMDSQLLFGSVRSGIRTYRIWRNSMRGKQ

SEQ ID NO: 32018 - protein, 396 aa, Pseudomonas fluorescens Pf-5
MSIAQDPIVIVSAVRTPMGGFQGDLKGLSAPQLGSEAIRAAVQRAGIAPQAVEEVLFGCVLSAGLGQAPARQAALGAGLDKGTRCTTLNKMCGSGMEATILAHDMLLAGSAEVVIAGGMESMSNAPYLLDRARSGYRMGHGKVLDHMFLDGLEDAYDKGRLMGTFAEDCAEANGFTRQAQDDFAVASLTRAQQAIKDGLFKDEIVPLQVMVGKESKLISDDEQPPKAKLDKIPTLKPAFRDGGTVTAANSSSISDGAAALVLMRRSEADKRGLKPLAVIHGHAAFADTPGLFPVAPVGAIERLMKKTGWSLNEVDLFEINEAFAVVSLVTMSKLEIPHAKVNVHGGACALGHPIGASGARILVTLLSALRQKGLKRGVAAICIGGGEATAMAVECL

SEQ ID NO: 32019 - protein, 358 aa, Pseudomonas fluorescens Pf-5
MSQFHRLTIKDLRNETRDAVSIAFEVPPHLQQQFHFTQGQHLVLRTELEGEEVRRSYSICTGVNDGELRIAVKRVAGGRFSAFANERLQPGHSLDVMPPAGRFHVELDPARRGHYLAVAAGSGITPILSIIRTTLQTEPHSRVTLLYGNRSSNSALFREQLEDLKNRYLQRLNLMFVFSRERQDIDLYNGRIDQDKCQQLFSRWLDVQQLEAAFICGPQAMTETVRDSLKAAGMPAERIHFELFHAGSDGHKRQARETASALDARHSRVTVISDGRALAFDLPRNSQSILDAGNAQGAELPYSCKAGVCSTCKCKVIEGEVEMDSNHALEDYEVAAGYVLSCQSFPLSDKVVLDFDQL

SEQ ID NO: 32020 - protein, 399 aa, Pseudomonas fluorescens Pf-5
MCLDDFTHTRRDFLKLSALLTAGGALPLLNSLQARAAQEPDAPVRIGYLPITDATPLLVAHNNGLFEAEGIKAERPVLLRSWAQVIEAFISGQVNVIHLLSPMTVWARYGSRVPAKVVAWNHVGGSGLTVAPGITEVKQLAGQSVAIPFWYSIHNVVVQQLFRDNGLVPVSKAAGSALGANEVNLVVLPPSDMPPALASKRIAGYIVAEPFNALAEELKVGRVQRFTGDVWRNHACCVVFMHEHDLDNRPEWSQKVVNAIVKAQLWTRDHRAEAAQLLSKDGANRYTPHAPQVLNRVLAPAAADREAYLASGAIQHSHWDEQRIDFQPYPFPSYTEELVKRLKDTLIEGDKGFLAGLDPAHTAKDLVDDRFVRNAIASVGGLKAFGLADSFERSEEFGL

SEQ ID NO: 32021 - protein, 454 aa, Pseudomonas fluorescens Pf-5
MSSPSAPDGALKPTLSVFDVVAITVSGVTPASSVFVIAPFAIHQAGSGVFLAFVMAGLLALMFAFCYAELGRAHNSAGGEYVYAKRVFGGMAGYATFLTVLVMLLFIPPVLATGAATYLNNALGTNFDSQTVALVIVVCSYLLGILNIKLNAWITGTCLLLEVAALLVIVWLGFGNASQPVSILLQPQIVDHGALQLAPWALVIGAVGIGLFSYNGYGPAVLLAEDMKCKGRGVHKAVLWSLVLVVIIELVPLTALLIGAPSLSAMLASPDPIGYLLTSHGNETLARVVSGGIFLSVFNAIVAIVIQIGRVVFSSGRDALWTPTINRLFTRIHPRWDSPWLATLFLAIPSAVLSFSSNLADLTSFSVLLIMLVYLIVALSALMSRVLLRDREHPYRMPLWPLPALLAVLGAGYLLVNLFLEASLRDIMVIIGLLALSVILYGTNGRYSPAFQKL

SEQ ID NO: 32022 - protein, 751 aa, Pseudomonas fluorescens Pf-5
MYKDLQFPILIVHRDIKADTVAGDRVRGIARELEKDGFSIFSAVDYAEGRLVASTHHGLACMLIAAEGAGENKHLLQNMVELIRLARVRAPLLPIFALGEQVTLENAPADAMSELNQLRGILYLFEDTVPFLARQVARAARGYLDGLLPPFFKALVQHTADSNYSWHTPGHGGGVAYRKSPVGQAFHQFFGENTLRSDLSVSVPELGSLLDHTGPLAEAEARAARNFGADHTFFVINGTSTANKIVWHSMVGRDDLVLVDRNCHKSVLHSIIMTGAIPLYLCPERNELGIIGPIPLSEFSAESIQAKIDASPLTRGRPPRVKLAVVTNSTYDGLCYNAELIKQSLGNSVEVLHFDEAWYAYAAFHEFFAGRYGMGTSRSDDSPLVFSTHSTHKLLAAFSQASMIHVQDGGARQLDRDRFNEAFMMHISTSPQYSIIASLDVASAMMEGPAGRSLLQEMFDEALSFRRALANLRQNIAADDWWFSVWQPERVEGIDQVRTEDWLLEPEGEWHGFAGVTDDYVLLDPIKVTLVMPGLTAGGALSEHGIPAAVVSKFLWERGLVVEKTGLYSFLVLFSMGITKGKWSTLLTELLEFKRNYDANVSLASCLPSVAGQDPQRYQGMGLQDLCDQLHACYRSNATAKHLKRMYTVLPEVAMKPADAYDHLVRGEVEAVSIDQLQGRIAAVMLVPYPPGIPLIMPGERFTDSTRSIIDYLAFARAFDSSFPGFVADVHGLQHDDLGDGRQYTVDCIKA

SEQ ID NO: 32023 - protein, 392 aa, Pseudomonas fluorescens Pf-5
MRYSALTQRIAGEGSAAWDIHYRALALREQGGDVLLLTIGDPDFDTPRPVVQAAIDSLLAGDTHYSDVRGNLALRSCIARCHHQRTGQIVDAEHVVVLPGAQCAVFSVAQCLLDPGDEVLVAEPMYVTYEGVFGACGATVVPVPVRAEQGFRLDPQEVAARISPRTRAMLINSPNNPSGASLSLDDWQVLARLCMEHDLWLVSDEVYGDLLYEGQHLSPGGLPRMGGRTATINSLSKSHAMSGWRVGWVIAPPVLVGHLSNLALCMLYGLPDFIQNAAVVALTRELPELPQMREEYRQRRDLVCTLLGQCPGLRPVLPDGGMFVMVDVRRTGLGAQAFAERLLEGYGVSVLAGEAFGPSVVGHIRIALVLDRERLAEACRRIAQCTAQLLAL

SEQ ID NO: 32024 - protein, 316 aa, Pseudomonas fluorescens Pf-5
MIDVLVAARHDEALDICSFELAAADASPLPAFSAGAHIDVHLANGLVRQYSLCNHPAERHRYLIGVLKDPASRGGSSSLHQQLEVGTRLRISEPRNLFALEHAARRSLLFAGGIGITPLLSMAEQLAHSGADFQLHYCARSAQRAAFVQRLQASPFAERVSLHFDEQPDTALDIAQALAGPRDDVHLYVCGPVGFMQHVLDNARAQGWKEQCLHREYFSAAPIDHSADASFAVKLASSGQVFQVPADRSVVQVLQDQGIEVPISCEQGICGTCLTRVLEGVPEHRDLFLTEDEQARNDQFTPCCSRARSPLLVLDL

SEQ ID NO: 32025 - protein, 528 aa, Pseudomonas fluorescens Pf-5
MKTVHSASYDILRQQGLTTVFGNPGSNELPFLKGFPEDFRYILGLHEGAVVGMADGFALASGQPAFVNLHAAAGTGNGMGALTNAWYSHSPLVITAGQQVRSMIGVEAMLANVDAPQLPKPLVKWSAEPACAEDVPRALSQAIHMANQAPKGPVYLSIPYDDWARPAPAGVEHLARRQVATAGLPSAAQLRSLVQRLAAARNPVLVLGPDVDGSRSNHLAVQLAEKLRMPAWVAPSASRCPFPTRHPSFRGVLPAAIAGISRCLADHDLILVVGAPVFRYHQFAPGDYLPAGTELLHITCDPGEAARAPMGDALVGDIVETLQALVWALPDCDRPQPQALPPAAPVEELGGLLRPETVFDVIDELAPKDAIYVKESTSTVGAFWQRVEMREPGSYYFPAAGGLGFGLPAAVGVQLARPERRVIGVIGDGSANYGITALWTAAQYQIPVVFIILKNGTYGALRWFAGVLQVSDAPGLDVPGLDFCAIGRGYGVHSVQANTREAFAQALSEALAGDRPVLIEVPTLTIEP

SEQ ID NO: 32026 - protein, 473 aa, Pseudomonas fluorescens Pf-5
MSPTSKGGLRRVLGLGSLVSVAVGLVVSQGVMVLMLQGAGMAGLGFFIPLLLAYLLALTYALSFSELALMVPRAGSLSSYTEVAIGHFPAILATFSGYMVVAMFALSAELLLLDLIIGKVYPGALPPMLVAYGVLGVFTLLNLLGIDVFAKLQTVLAVVMVVILLTLGLGAVSSAQADLQLPLDQGWNPLQVGALALAAMAIWGFVGAEFVCPLVEETRNPERNIPRSMIIGLSVIFLVITLYCLGALLCVPRAQLASDPLPHFLFATTVFGEAGKLFLVGAVITATCSTVNSSLAALPRMLYGMAQNGQAFPQFKRLSPRGRTPWVAVLFVAALTGLPILLLGQDPDSISLLLLAAALAWLLAYIVVHIDVIALRRRYPDAPRPFRSPFYPWPQVLGIVGMLFAIYHVSPSPEMTARIFGSAGVVLGVISLIAVVWIKLVMRKPLFVPEPLLPGEPTLATQPSLEPAYRAGE

SEQ ID NO: 32027 - protein, 552 aa, Pseudomonas fluorescens Pf-5
MYVYDEYDQRIIEDRVKQFRDQTRRYLAGELSEEEFRPLRLQNGLYIQRFAPMLRVAVPYGQLTSRQARMMAKIARDYDKGYAHISTRQNVQFNWPALEDIPDILAELATVQMHAIQTSGNCLRNVTTDQFAGVAADELIDPRPWCEIVRQWTTFHPEFAYLPRKFKIAINGSTSDRAAIEVHDIGLEPVYNAAGELGFRVLVGGGLGRTPVVGAFINEFLPWQDLLSYLDAILRVYNRYGRRDNKYKARIKILVKALTPEVFAEKVEAEMAHLRGGQTTLTDAEVHRVAKHFVDPDYKTLSNQDAELAALDQQHPGFARWRTRNTLAHKKPGYVAVTLSLKPTGVAPGDVTDKQFDAIADLADRYSFGQLRTSHEQNIILADVEQSQLFTLWGELRENGFATPNIGLLTDIICCPGGDFCSLANAKSIPIAESIQRRFDDLDYLFDIGELDLNISGCMNACGHHHVGHIGILGVDKKGEEFYQVSLGGSASRDASLGKILGPSFAQDDMPDVISKLIDVYVEQRTEDERFIDTYQRIGIDLFKERVYAANH

SEQ ID NO: 32028 - protein, 253 aa, Pseudomonas fluorescens Pf-5
MSKPAQYLLETQNLELAYGAFHAVNGVNLKVEAGTIHTIIGPNGAGKTSLFHCLTGERQATAGAIRFNGKNIIKKPAHGRVGLGMARSFQLTSLFQNLSVRENLRLAAQGRDGLGALNFWRHVDSRREHLEVADQVLERLQLTARAQTLAGELSHGQQRVLEVGMSICSKPQLLMLDEPTSGMGIDDIPIMTQLISDLGRDHTVLLIEHNMSIVMSISQRITVMSHGQILVEGTPDVVRADERVRVAYLGEAA

SEQ ID NO: 32029 - protein, 464 aa, Pseudomonas fluorescens Pf-5
MVMHLSRRRLLQGAGALGAFSALCSNPLLAELARAPRLIPWRNWSGAQSCLPQARLAPKDLDELRRVVRQAPGKIRPVGAGHSFSALVPTDGTLLSLAYFNGLLDHDPKTLQAEFAAGTPMSLMGPALKEVGQALWNMADIDYQTLAGAIATSTHGTGVGFGSYSSRVCGLQLVTASGEVLDCDPRRNAEVFHVARVSLGALGVATRVRLQNREAYRLREKQWIGKTEELLEDMDNLTRDNQHWEMLVVTHSDYALAVALNETTEPPTPPTDPAEEGGNEFVNLIENLDKYVSDFPETRRHLLNSLRWLARFDERVGDSYQIYANVRSVRFNEMEYSVPAHLGPACLREILALIRDKDLRTWFPIEYRYVKADDIPLSMFEGRDSCSISVHQHYSMDHHNFFAAVEPIFWKYQGRPHWGKHHSLNARTLQGLYPQWAAFARVRQALDPQGKFINAHLASVLGVA

SEQ ID NO: 32030 - protein, 478 aa, Pseudomonas fluorescens Pf-5
MSLQEQQTDLRGGFKQEMQTRHIVMLALGGVIGTGLFLTSGYTVNQAGPLGAVIAYIIGALMVYLVMMCLGELAVQMPETGSFSTYATRFLGPGTGYTVAWLYWLTWTVAIGSEFTAAGILMARWFPETPVWIWSALFAMVVFLSNVVSVRLFAETEFWLSLVKVITVLAFLVVGGGAILGLLHIDQAHSIGLSNFTREGLFPTGFMPIAMTLLAVAFAFSGTELIGIAAGETRDPQRNVPRAIRTTVLRLAIFFVGTIFVLATLLPREQAGLVESPFVTVFTYIGIPYSADIMNFVIISALLSAANSGLYAASRMLWTLSDQGHLPKQFSALTRMGTPLNAIIVSMAGGAASLLSSVFAPDTIYLALVSISGLAVVVVWMSIAASQIAFRRHFVANGGDVRDLKFRVRGYPWVPLGALLCCALACVGIGFDPEQRVALYFGLPFIAWCYLVYYITRSSRQRRLSLAALARPSDALQG

SEQ ID NO: 32031 - protein, 337 aa, Pseudomonas fluorescens Pf-5
MSHQIALNFEDGVTRFVNANPGETVADAAYRQGINIPLDCRDGACGTCKCLAEAGRYELGEDYIEDALSADEAEQGFVLTCQMRALGDCVVRVPASSQVCRAGQATFQASISAVRQLSDSTIALSIKGEALNQLAFLPGQYVNLGVPGSEQTRAYSFSSLPRDGEVSFLIRNVPGGLMSSFLTSLAKAGDSMTLAGPLGSFYLRDIRRPLLLLAGGTGLAPFTAMLEKIAEQGSEHPLHLIYGVTNDFDLVELERLEDFAARIPQFSFSACVANPESQYPRKGYVTQHIEPAHLNQGDVDVYLCGPPPMVEAVSQFIREQGIAPTNFYYEKFAASAA

SEQ ID NO: 32032 - protein, 566 aa, Pseudomonas fluorescens Pf-5
MSKPTVDPTSNSKTGPAVPVNFLRPIIQADLDSGKHTQIVTRFPPEPNGYLHIGHAKSICVNFGLAQEFGGVTHLRFDDTNPAKEDQEYIDAIESDVKWLGFEWSGEVRYASQYFDQLHDWAVELIKAGKAYVCDLTPDQAKEYRGSLTEPGKNSPFRDRSVEENLDWFARMRAGEFPDGARVLRAKIDMASPNMNLRDPIMYRIRHAHHHQTGDKWCIYPNYDFTHGQSDAIEGITHSICTLEFESHRPLYEWFLEHLPVPAHPRQYEFSRLNLNYTITSKRKLKQLVDEKHVNGWDDPRMSTLSGFRRRGYTPASIRNFCEMVGTNRSDGVVDYGMLEFSIRQDLDANAPRAMCVLRPLKVVITNYPEGQVENLELPRHPQKEELGVRQLPFAREIYIDRDDFMEEPPKGYKRLEPNGEVRLRGSYVIRADEAIKDAEGNIVELRCSYDPDTLGKNPEGRKVKGVVHWVPAAASVECEVRLYDRLFRSPNPEKAEDSASFLDNINPDSLQVLTGCRAEPSLGNAQPEDRFQFEREGYFCADIKDSKPGAPVFNRTVTLRDSWGQ

SEQ ID NO: 32033 - protein, 389 aa, Pseudomonas fluorescens Pf-5
MNKRPLYFDYAATTPVDERVIQVMLECLGFNAHFGNPASSSHAFGREARGYVERARQQVAQLVGAQPEQIVWTSGATESNNLALKGVMQARGVSGGHVITSQIEHKAVLDTARQLQEAGVAVTYLVPDADGLISAQAVSEALRDDTFLVSLMLVNNELGTLNDIPAIGEVVRERGALLHVDAAQGAGKVAIDLARWPVDLMSFSAHKLYGPKGIGALYVGPRAQQHVQAQIHGGGHEGGLRSGTLATHQIAAMGAAFALAGELFEEETAAIVRLRGRLLEQLAGIAGLRLNGSVTQRIPHTLSLTFTEGGFDGAALGAALAFSATSACNSASNAPSHVLLALGHDAGQAARTIRLSLGRFTCEQDVDRAAQLIQAATASAPAFWATTQP

SEQ ID NO: 32034 - protein, 422 aa, Pseudomonas fluorescens Pf-5
MQGAGRPARERLADFGSAYSMENLQSAVDTLVHGSNTLFILIGAVMVLAMHAGFAFLEVGTVRQKNQVNALSKILSDFAVSTLAYFFIGYWISYGVSFLQPAAVISADHGYGLVKFFFLLTFAAAIPAIISGGIAERARFVPQLCATVLIVAFVYPFFEGLVWNGNFGVQAWLQQRFGAGFHDFAGSVVVHAMGGWLALAAVLLLGPRNGRYRDGKLVAFAPSSIPFLALGSWILIVGWFGFNVMSAQTLQGVSGLVAVNSLMAMVGGTVAALIVGRNDPGFLHNGPLAGLVAICAGSDLMHPVGALITGAIAGALFVWCFIAAQSQWKIDDVLGVWPLHGLCGVWGGIACGIFGQSALGGLGGVSLVSQLIGTGLGVAVALLGGLAVYGVIKAVCGLRLTQEQEYYGADLSLHKIGAVSQD

SEQ ID NO: 32035 - protein, 403 aa, Pseudomonas fluorescens Pf-5
MQVSKSNKLANVCYDIRGPVLKHAKRLEEEGHRILKLNIGNPAPFGFEAPDEILQDVIRNLPTAQGYSDSKGLFSARKAVMQYYQQKQVEGIGIEDIYLGNGVSELIVMAMQALLNNGDEVLVPAPDYPLWTAAVSLAGGNPVHYLCDEQANWWPDLADIKAKITPNTKALVIINPNNPTGAVYPREVLLGMLELARQHNLVVFSDEIYDKILYDDAVHICTASLAPDLLCLTFNGLSKSYRVAGFRSGWVAISGPKQHAQSYIEGIDMLANMRLCANVPSQHAIQTALGGYQSINDLVLPPGRLLEQRNRTWELLNDIPGVSCVKPMGALYAFPRIDPKICPIHNDEKFVLDLLLSEKLLVVQGTAFNWPWPDHFRVVTLPRVDDLEQAIGRIGSFLKSYRQ

SEQ ID NO: 32036 - protein, 557 aa, Pseudomonas fluorescens Pf-5
MTQEIGGFAALELHPNIVAAVVATGYEEPSAIQQQSIPIILAGHDMIGQAQTGTGKTAAFALPILHRIDPSKREPQALILAPTRELALQVATAFETYAKQMPGVTVVAVYGGAPMGPQLKAIRNGAQIVVATPGRLCDHLRRDEKVLATVNHLVLDEADEMLKLGFMDDLEVIFKAMPETRQTVLFSATLPQSIRAIAERHLKDPKHVKIQSKTQTVTAIEQAHLLVHADQKTSAVLSLLEVEDFDALIMFVRTKQATLDLASALEAKGYKAAALNGDIAQNQRERVIDSLKDGRLDIVVATDVAARGLDVPRITHVFNVDMPYDPESYVHRIGRTGRAGREGRALLLVTPRERRMLQVIERVTGQKVAEVRLPDAQAVLDARIKKLTNSLSPLVADAEATHGDLLDRLTADIGCSPRALAAALLRKATNGQALNLAAIEKERPLVPNSAPRGDRPERSGDRPDRGDRERRAPMPLGEGRARCRTALGARDGIAAKNLLGAILNEGGLAREAIGRIQVRDSFSLVELPEDGLDRLLTKLKDTRVAGKQLKLRRYRED

SEQ ID NO: 32037 - protein, 398 aa, Pseudomonas fluorescens Pf-5
MRCVMREVVIVDSVRTGLAKSFRGKFNQTRPDDMAAHCVNALLARNGIDPASVEDCIVGAGSNEGAQGFNIGRNVAVLSALGTGTAGMTLNRFCSSGLQAIAIAANQIASGCSDIIVAGGVESISLTMKSVNTENLVNPLLKEQVPGIYFPMGQTAEVVARRYGVSREAQDRYSLQSQQRTAQAQAAGLFSDEIVPMTVKYKVEDKNTGEVQILDGVVDRDDCNRPDTTLENLAALKPVFADDGSVTAGNSSQLSDGASMTLVMSLERALALGLKPKAFFRGFTVAGCEPDEMGIGPVFSVPKLLKAKGLSVADIDLWELNEAFASQCLYARDRLEIDNARYNVNGGSISIGHPFGMTGSRQVGHLVRELQRRNLRYGIVTMCVGGGMGATGLFEAVR

SEQ ID NO: 32038 - protein, 590 aa, Pseudomonas fluorescens Pf-5
MCGLAGELRFDHQPADLAAVERITHHLAPRGPDAWGFHSQGPIALGHRRLKIMDLSDGSAQPMVDNQLGLSLAFNGAIYNFPELRAELEAKGYAFYSGGDTEVLLKGYHAWGADLLPKLNGMFAFAIWERDAQRLFIARDRLGVKPLYLSRTGQRLRFASALPALLKGGDINPLLDPVALNHYLNFHAVVPAPRTLLAGIEKLPPATWMRIEADGRTEQQTWWTLPYGPRADETNLTLEDWRDRVLDSTREAVAIRQRAAVDVGVLLSGGVDSSLLVGLLREVGVDNLSTFSIGFEDAGGERGDEFQYSDLIARHYGTRHHQLRIDEREIIEQLPAAFRAMSEPMVSHDCIAFYLLSREVAKHCKVVQSGQGADELFAGYHWYPQVDGASDPYAAYRAAFFDRSYDDYAATVQPQWLTANDAAGDFVREHFAQPGADAAVDKALRLDSTVMLVDDPVKRVDNMTMAWGLEARTPFLDYRLVELSARVPARFKLPDGGKQVLKEAARLVIPSEVIDRKKGYFPVPGLKHLQGATLDWVRELLLDPSQDRGLFKPAMLDRLLTDPQGQLTPLRGSKLWQLAALNLWLSEQGI

SEQ ID NO: 32039 - protein, 329 aa, Pseudomonas fluorescens Pf-5
MRTILFSSQNYDRESFLGAQLPAGIELQFQAARLSLDTAALAERHEVVCAFINDDLSAPVLEQLAAGGTRLIALRSAGYNHVDLSAAQRLGLDVVRVPAYSPHAVAEHAVALILALNRRLHRAYNRTREGDFTLHGLTGFDLVGKTVGIVGTGQIGATFARIMAGFGCQLLAYDPFPNPAVEALGARYLDLPELLAQSQIISLHCPLTEDSRYLINQQSLAHMQPGAMLINTGRGGLVDTPALIEALKSGQLGYLGLDVYEEEAQLFFEDRSDLPLQDDVLARLLTFPNVIVTAHQAFLTREALAAIAETTLHNIASWAAGQPQNRVHG

SEQ ID NO: 32040 - protein, 413 aa, Pseudomonas fluorescens Pf-5
MALIVQKFGGTSVGSVERIEQVADKVKKFREAGDDLVIVLSAMSGETNRLIDLAKQISGEAKPVPRELDVIVSTGEQVTIALLAMALIKRGVPAVSYTGNQVRILTDSAHNKARILQIDDQKIRGDLKAGRVVVVAGFQGVDEHGNITTLGRGGSDTTGVALAAALKADECQIYTDVDGVYTTDPRVVPKAQRLDKITFEEMLEMASLGSKVLQIRAVEFAGKYNVPLRVLHSFQEGPGTLITIDEEESMEQPIISGIAFNRDEAKLTIRGVPDNPGVAFKILGPISAANIEVDMIVQNVSHDNTTDFTFTVHRNDYLAAQTVLENTAREIGAREVVGDTDIAKVSIVGVGMRSHAGVASRMFEALAKESINIQMISTSEIKVSVVIEEKYLELAVRALHTAFELDAPARQGE

SEQ ID NO: 32041 - protein, 475 aa, Pseudomonas fluorescens Pf-5
MSQPAQKLQLGALIALVVGSMIGGGIFSLPQNMAARADAGAVLIGWAITAVGMLTLAFVFQTLANRKPELDSGVYAYAKAGFGDYMGFSSAWGYWISAWLGNVGYFVLLFSTLGYFFPVFGQGNTPVAIGCASVLLWAVHFLVLRGIKEAAFINQLTTVAKIVPLVMFIVIAAVAFKADIFTRDIWGRSNPNFGGVMDQVRNMMLVTVFVFIGIEGASVYSARAQKRADVGRATVIGFLGVLALLVLVNVLSLGIMSQPELAQLQNPSLAAVLEHIVGPWGALLISIGLAVSLLGALLSWALLCAEILYATARDRTMPAFLKKENANHVPVNALWLTNVMIQIFLLITLFSAGTYTSLIYLASSMILVPYLWSAAYAVLLSGRGETYEQASRERKKDLFIATVALSYAIWLLYAGGLKYLLLSALLYAPGVILFAKAKHEQGEPLFTPLEKLIFAAVVIGASLAAYGLYSGLLAL

SEQ ID NO: 32042 - protein, 70 aa, Pseudomonas fluorescens Pf-5
MSQRQSGTVKWFNDEKGFGFITPESGPDLFVHFRAIQGNGFKSLKEGQKVTFIAVQGQKGMQADEVQAEA

SEQ ID NO: 32043 - protein, 201 aa, Pseudomonas fluorescens Pf-5
MLKIVHLLTGIAALLLSLIPSLRSDAVPYLQQPDALYLALFGLLNLILAPVIPYWNKGSRHHLQNLVSALLVLVVVLQTLTLLAPMPVIGGQPAVLVSLLTALIAVVLHLAISFYKSSPSASATPSYDMSNRDTGTVKWFNTSKGFGFISRDSGDDIFVHFRAIRGEGHRVLVEGQRVEFSVMNRDKGLQAEDVIAALPRR

SEQ ID NO: 32044 - protein, 444 aa, Pseudomonas fluorescens Pf-5
MLNSVIVVDDEASIRTAVEQWLSLSGFEVQLFSRAEDCLAQLPKNFPGVILSDVRMPGISGLELLAQVQRLDPDLPIILLTGHGDVPMAVEAMRDGAYDFLEKPFSPDTLLSSLRRALDKRRLVLENRRLHQQADSRAKLDATLLGVSRALQTLRRQVLELAALPVNVLIRGETGSGKELIARCLHDFGPRAGKPFVALNCAAIPEQLFEAELFGHESGAFTGAQGKRIGKLEYADGGTLFLDEIESMPLAQQVKLLRVLQEQKLERLGSNQSIKVDLRIIAATKPDLLDEARAGRFREDLAYRLTVAELRLPPLRERREDIPLLYEHFAQNAGERLGRSVAPLSGAQLSRLLSHDWPGNVRELANAAERQVLGLGEPEPDAIEPGQSLAAQQEAFEAQCLRAALSRHKGDIKAVLNELQLPRRTLNEKMQRHGLTREQFLKEE

SEQ ID NO: 32045 - protein, 405 aa, Pseudomonas fluorescens Pf-5
MADVNKVVLAYSGGLDTSVILKWLQDTYNCEVVTFTADLGQGEEVEPARAKAQAMGVKEIYIDDLREEFVRDFVFPMFRANTVYEGEYLLGTSIARPLIAKRLIEIANETGADAISHGATGKGNDQVRFELGAYALKPGVKVIAPWREWDLLSREKLMDYAEKHGIPIERHGKKKSPYSMDANLLHISYEGGVLEDTWTEHEEDMWRWTVSPEKAPDTPQYLELTYRNGDIVALDGVEMTPATVLATLNRIGGEHGIGRLDIVENRYVGMKSRGCYETPGGTIMLRAHRAIESITLDREVAHLKDELMPKYASLIYTGYWWSPERLMLQQMIDASQAHVNGVVRLKLYKGNVIVTGRKSDESLFDANIATFEEDGGAYNQADAAGFIKLNALRMRIAANKGRTLV

SEQ ID NO: 32046 - protein, 112 aa, Pseudomonas fluorescens Pf-5
MDIIETIKEQIANNTILLYMKGSPNAPQCGFSAKAAQAVMGCGEKFAYVDILQNPEIRANLPKYANWPTFPQLWVAGELVGGSDIMAEMFANGELQSLIKAAAEKAAAKTEA

SEQ ID NO: 32047 - protein, 441 aa, Pseudomonas fluorescens Pf-5
MARLQRTLSLGAVVLFGIAYMTPIIVLGTFGILAQTTAGMVPAAYLAALVAMFFTAMSYGRMAAAFPVAGSAYSYVRKAISPKLGFIAGWAVLLDYLFLPMAIWLIGAAYLHSAFPGVPQWVWVLAFIGVTSAINIVGLKLANGINGLLMLVQFLVLIAFVGLCIHYLGGEAGRPLFTLAPFFNGQMHLPLIMSGAAIACYSFLGFDAVSTLTEETRDPRRTIPRAIMLITLVGGLIFVAVSYFVQVAHPSFEFADVDSAAYEIARNIGGDLFVSIFLIGLIVGQFASGLSAQASGSRLLFAMGRDGVLPKRFFGSLHGRFGTPVNSILLCAVVALLALKLDVTTSTSFINFGAFLAFSLVNLSVIFHYWVGGRQRGLRELILFLIFPLIGLAADLWLMSSLDHLAIYLGASWLVIGLVYLGFLTRGFSRQPPEMDFQEAA

SEQ ID NO: 32048 - protein, 473 aa, Pseudomonas fluorescens Pf-5
MPVGNQLPHGETAQGGPLKRELGERHIRLMALGACIGVGLFLGSAKAIEMAGPAIMLSYIIGGLAILVIMRALGEMAVHNPVAGSFSRYAQDYLGPLAGFLTGWNYWFLWLVTCVAEITAVAVYMGIWFPDVPRWIWALAALVSMGSINLIAVKAFGEFEFWFALIKIVTIIAMVVGGIGIIAFGFGNDGVALGISNLWSHGGFMPNGVTGVLMSLQMVMFAYLGVEMIGLTAGEARNPQKTIPNAIGSVFWRILLFYVGALFVILSIYPWNEIGTQGSPFVMTFERLGIKTAAGIINFVVITAALSSCNGGIFSTGRMLYSLAQNGQAPAGFAKTSNNGVPRRALLLSIFALLLGVLLNYLVPEKVFVWVTSIATFGAIWTWVMILLAQLKFRKGLSPAERAGLKYRMWLYPISSYLALAFLVLVVGLMAYFPDTRVALYVGPAFLVLLTVLFYLFKLQPTNVQQGSARSAS

SEQ ID NO: 32049 - protein, 406 aa, Pseudomonas fluorescens Pf-5
MPGVWAILGDLRAAVVRTAQQGILMIISKLPNVGTTIFTQMSQLAVETGALNLSQGFPDFDGPQALRDALGWHAANGHNQYAPMTGLPALRQQVAAKIARSYGVQVDADAEVTITPGATQAIFCAIQAVIQRGDEVIVFDPSYDSYEPSVELAGGRCVHVPLAGQGFALDWQKLGEALSPRTRMIILNSPHNPSGALISRAELDQLAALIRDRDIYLVSDEVYEHLVFDGVPHVSVLAHEELYQRAFVVSSFGKTYHVTGWKTGYVVAPPALSAELRKVHQYVSFCGVTPLQYALADFMAEHPEHVEELPAFYQAKRDLFCDLLSASRFSFNRVSGTYFQLVDYSQIRPDLNDVDMAIWMTREHGVAAIPVSVFYQQPPQGQRLVRLCFAKREETLRQAAEKLCVI

SEQ ID NO: 32050 - protein, 404 aa, Pseudomonas fluorescens Pf-5
MKLPIYLDYSATTPVDPRVAQKMSECLLVDGNFGNPASRSHVFGWKAEESVENARRQVADLVNADPREIVWTSGATESDNLAIKGVAHFYHTKGKHLITSKIEHKAVLDTMRQLEREGFEVTYIEPGEDGLITPAMVEAALRDDTILVSIMHVNNEIGTINDIAAIGELTRSKGVLFHVDGAQSTGKVDIDLQALKVDLMSFSAHKTYGPKGIGALYVSRKPRVRLEATMHGGGHERGMRSGTLATHQIVGMGEAFHVAKEDMAAENLRIKALSDRFYKQVEHLEELYINGSMTARVPHNLNLSFNYVEGESLIMALKDLAVSSGSACTSASLEPSYVLRALGRNDELAHSSIRFTFGRFTTEEEIDYAAQKVCEAVTKLRALSPLWDMYKDGVDISKIEWAAH

SEQ ID NO: 32051 - protein, 393 aa, Pseudomonas fluorescens Pf-5
MRYSPFVQRISGESVSAWDIHYAAIEARGRGEDVIVLSVGDPDFATDERISAAASAALEQGDTHYTHVLGRPALREAIAAKQRRLLGIEVSADNVALVAGAQNGLFATSLCLFSSGDEVLVPEPMYLTYEACIHASGAQIACVQQPAANGFRLTAAALEAALTDKTRGIALATPCNPTGNVYSREELEAVAEVARKHDLWVISDEVYGQLTYDREHLSIASLPGMAERTVILNSLSKTHAMTGWRVGWVIAPPALVGHLDNLLLCMLYGLPGFIQEAALKALELDEEVIGSAREVYRRRRDLVVAGLKQVQLLDCREPEAGMFMLVDVRRTGLSSMDFAWQLFRATGVSVLDAQAFGASAEGFVRISFTVADEVLKDACQRIAGFVETLGAQR

SEQ ID NO: 32052 - protein, 393 aa, Pseudomonas fluorescens Pf-5
MLSVQDRAIIKATVPLLESGGEALITHFYRMMLSEYPQVRPLFNQAHQASGDQPRALANGVLMYARHIDQLDQLGDLVAKIINKHVALQILPEHYPIVGGCLLRAISEVLGSEIATQEVIDAWAAAYNQLADILIGAEAAIYDEKAQAPGGWRGAREFRLVQKVEESAEITSFYFEPLDQGPILAAEPGQYIGLQLFIGGEEIRRNYSLSALSNQGQYRISVKRETGGVASNYLHDQCPVGTSVMLFPPAGEFTLAASDKPLVLISGGVGITPTLPMLEAALATERPVHFIHCARNGQVHAFRNWVDELAQRYPQLKRFYCYAEDDGVSPAADKLGMLTREQLAEWLPEQRDLDAYFLGPKGFMAAIKRHLQALGIPEQQSRYEFFGPAAALE

SEQ ID NO: 32053 - protein, 362 aa, Pseudomonas fluorescens Pf-5
MDEGNGQELGEVHAGSCVCLIISSVRLGRLRLRTLVQKVQFMTNNRRAVFLDHSSLDLGDLDLGALHDSFSPLQVHALTAPEQVAERLQGAQVAISNKVALTAETLTACPDLQLILVAATGTNNVDLAAARKQGITVSNCQGYGTPSVAQHTLMLLLNLATRVADYQQAVAAGRWQQASQFCLLDYPIIELAGKTLGLLGNGELGSAVARLAEAFGMRVLLGQIPGRPTRPDRLPLEELLPQVDALTLHCPLNEHTRHFIGARELALLKPGALVVNTARGGLIDEQALADALRNGHLGGAATDVLSVEPPVAGNPLLAGDIPRLIVTPHNAWGSREARQRIVGQLTENAHAFFSGAPLRVVS

SEQ ID NO: 32054 - protein, 574 aa, Pseudomonas fluorescens Pf-5
MELLSGGEMLVRFLRDEGVKYIYGYPGGALLHVYDALFKEPEVTHILVRHEQAATHMADGYARATGKAGVVLVTSGPGATNAITGIATAYMDSIPMVIISGQVPSTMVGTDAFQETDMIGISRPIVKHSFMIKHASEIPEVMKKAFYLAQSGRPGPVVVDIPKDMTNPAEKFEYVFPKKAKLRSYSPAVRGHSGQIRKAAEMLLAAKRPVLYAGGGVILGGGSAPLTELAKMLNLPVTNTLMGLGAYPGTDRQFVGMLGMHGSYTANLTMHHADVILAVGARFDDRVINGAPKFCPNAKIIHVDIDPASISKTIKADVPIVGPVESVLTEMVAALKEIGDTPNKETVASWWKQIDEWRGDRGLFPYDKGDGSIIKPQTVIETLCEVTKGDAYVTSDVGQHQMFAAQYYRFNKPNRWINSGGLGTMGFGFPAAMGVKLSFPDNDVACVTGEGSIQMNIQELSTCLQYDLPVKIINLNNGVLGMVRQWQDMSYGSRHSHSYMESLPDFVKLVEAYGHVGMRITDLKDLKPKMEEAFAMKDRLVFLDIQVDTSEHVYPMQIKDGSMRDMWLSKTERT

SEQ ID NO: 32055 - protein, 390 aa, Pseudomonas fluorescens Pf-5
MAQPYSARSRAIEPFHVMALLARANELQAAGHDVIHLEIGEPDFTTAEPIIKAGQAALSAGKTRYTAARGIPELRGAISGFYQQRYGLDIDPERIMITPGGSGALLLTSSLLVDPGKHWLLADPGYPCNRHFLRLVEGAAQLVPVGPDVRYQLTPDLVERYWDQDSVGALVASPANPTGTVLSRDELAGLSTAIKARNGHLVVDEIYHGLTYGTDAASVLEVDDSAFVLNSFSKYFGMTGWRLGWLVAPPAAVGELEKLAQNLYISAPSMAQYAALACFEPQTLEILEERRAEFGRRRDFLLPALRELGFGIAVEPEGAFYLYADISAFGGDAFAFCRHFLETEHLAFTPGLDFGRHQAGHHVRFAYTQSLERLQEAVERIARGLQSWHA

SEQ ID NO: 32056 - protein, 425 aa, Pseudomonas fluorescens Pf-5
MCNHDFANFQCLCRPANTRTTPQVPATEHKDPIMQDVVIVAATRTAVGSFQGSLANIPAVDLGAAVIRQLLAQTGIDPAQVDEVLMGQVLTAGAGQNPARQAAIKAGLPHVVPAMTLNKVCGSGLKALHLGAQAIRCGDAEVIIAGGQENMSLSNYVLPGARTGLRMGHSQMVDSMISDGLWDAFNDYHMGITAENLVEKYGISREAQDAFAAASQQKAAAAIEAGRFVDEITPIQIPQRKGEPLTFATDEQPRPGTTAEALAKLKPAFKKDGSVTAGNASALNDGAAAVMLMSASKARALGLPVLAKIAAYANAGVDPAIMGIGPVSATRRCLDKAGWTLDQLDLIEANEAFAAQSLSVAKELEWDASKVNVNGGAIAIGHPIGASGCRVLVTLLHEMIKRDAKKGLATLCIGGGQGVALAIER

SEQ ID NO: 32057 - protein, 854 aa, Pseudomonas fluorescens Pf-5
MRIDRLTSKLQLALSDSQSLAVGLDHPAIEPAHLMQALLEQQGGSIKPLLMQVGFDVNSLRKELSKELDQLPKIQNPTGDVNMSQDLARLLNQADRLAQQKGDQFISSELVLLAAMDENSKLGKLLLGQGVSKKALENAINNLRGGEAVNDANVEESRQALDKYTVDLTKRAEDGKLDPVIGRDDEIRRTIQVLQRRTKNNPVLIGEPGVGKTAIAEGLAQRIINGEVPDGLKGKRLLSLDMGALIAGAKYRGEFEERLKSLLNELSKQEGQIILFIDELHTMVGAGKGEGSMDAGNMLKPALARGELHCVGATTLNEYRQYIEKDAALERRFQKVLVDEPSEEDTIAILRGLKERYEVHHKVAITDGAIIAAAKLSHRYITDRQLPDKAIDLIDEAASRIRMEIDSKPEVLDRLERRLIQLKVESQALKKEDDEAAIKRLEKLQEEIVRLEREYADLEEVWTSEKAEVQGSAQIQQKIEQSRQELEAARRKGDLNRMAELQYGVIPDLERSLQMVDQHGHSENQLLRSKVTEEEIAEVVSKWTGIPVSKMLEGERDKLLKMESLLHERVIGQNEAVVAVANAVRRSRAGLSDPNRPSGSFMFLGPTGVGKTELCKALAEFLFDTEEAMVRIDMSEFMEKHSVARLIGAPPGYVGYEEGGYLTEAVRRKPYSVILLDEVEKAHPDVFNILLQVLEDGRLTDSHGRTVDFRNTVIVMTSNLGSAQIQELVGDREAQRAAVMDAVSTHFRPEFINRVDEVVIFEPLARDQIAGITQIQLGRLRSRLAERELSLELSDEALDKLIAVGYDPVYGARPLKRAIQRWIENPLAQLILSGGFLPGATVTASVQDDEIVFA

SEQ ID NO: 32058 - protein, 407 aa, Pseudomonas fluorescens Pf-5
MKFVDEVSIRVKAGDGGNGCMSFRREKFIENGGPNGGDGGDGGSIYMVADENLNTLVDYRYTRHFDAERGSNGGSTDCTGKKGEDLELRVPVGTTIIDAGTQEVIGDLTKAGQRLMVVQGGWHGLGNTRFKSSTNRAPRQTTPGKPGEQRDLKLELKVLADVGLLGLPNAGKSTFIRSVSAAKPKVADYPFTTLVPNLGVVSVDRWKSFVIADIPGLIEGASDGAGLGIRFLKHLARTRILLHLVDMAPLDESSPADAAEVIVNELMKFSPSLAERERWLVLNKSDQILEEEREERVKEIVDRLEWTGPVYVISAISKDGTERLSRDIMRYLEDRADRLAADPAYADELAELDQRIEDEARAQLQALDDQRALRRSGVKSVHDIGDDDWDEEDVDDEDGPEIIYVRD

SEQ ID NO: 32059 - protein, 103 aa, Pseudomonas fluorescens Pf-5
MYAVIVTGGKQYKVAEGEYLKIEKLEVATGESVTFDRVLLVANGDDVNIGAPVVAGATVKAEVISQGRHDKVRIIKFRRRKHHMKRMGHRQWFTEIKITGIQA

SEQ ID NO: 32060 - protein, 444 aa, Pseudomonas fluorescens Pf-5
MTFATLGLIEPLLRALETLGYQTPTPVQAQAIPAVLGGRDLMAAAQTGTGKTAGFALPLLQLLTLEGPKVDSNSVRALILVPTRELAEQVHESVRQYAEHLPLRTYAVYGGVSINPQMMKLRKGVDLLVATPGRLLDLFRQNAVKFSQLQTLVLDEADRMLDLGFSEELKSIYAALPKKRQTLLFSATFSDAIRQLAGQMLNDPLSIEVSPRNVAANTVKQWVVPVDKKRKPELFSHLLRKNRWKQVLVFAKTRNGVDALVEKLQGQGVNADGIHGDKPQATRQRALDRFKASEIQILVATDVAARGLDIEDLPLVVNFDLPIVAEDYIHRIGRTGRAGSTGEAISLVCADEVNLLSAIEMLTRQTLKRHEEQDFEPEHRVPETDASGQVVKKPKKPKKPKTSGGGGKRNLGKWVDSGEVAEAPAVKPVRKVPAFNTGPRKRKP

SEQ ID NO: 32061 - protein, 214 aa, Pseudomonas fluorescens Pf-5
MVAIAPTPKIKNLDKLLMHCQRRRYQAKSNIICAGDVSDSLYFIIKGSVTILIEDDDGREMIIAYLNAGDFFGELGLFEEAGHEQQRSAWVRAKVECEVAEISYAKFRELSQNDPDILYVLSGQIAQRLRNTTRKVGDLAFFDVTGRVARCLLELCKQPDAMTHPDGMQIKITRQEIGRIVGCSREMVGRVLKDLEERNLVHVKGKTMVVFGTR

SEQ ID NO: 32062 - protein, 560 aa, Pseudomonas fluorescens Pf-5
MNKNNRHPADGKKPITIFGPDFPFAFDDWIEHPAGLGSIPQARHGTEVAIVGAGIAGLVAAYELMKLGLKPVVYEASKMGGRLRSQAFEGAEGIIAELGGMRFPVSSTAFYHYVDKLGLETKPFPNPLTPASGSTVIDLEGQTHYAQKLADLPALFQEVADAWADALEDGSRFSEIQQAIRDRDVPRLKELWNTLVPLWDDRTFYDFVATSKAFAKLSFHHREVFGQVGFGTGGWDSDFPNSMLEIFRVVMTNCDDHQHLVVGGVEQVPLGIWRHVPERCAHWPAGTSLSSLHHGAPRTGVKRIARAADGRFSVTDNWGDTREYAAVLTTCQSWLLTTQIECEESLFSQKMWMALDRTRYMQSSKTFVMVDRPFWKDKDPETGRDLMSMTLTDRLTRGTYLFDNGDDKPGVICLSYSWMSDALKMLPQPVEKRVKLALDALKKIYPKVDIASRIIGDPITVSWEADPHFLGAFKGALPGHYRYNQRMYAHFMQDDMPAEQRGIFIAGDDVSWTPAWVEGAVQTSLNAVWGIMKHFGGATHAENPGPGDVFHEIGPIALAD

SEQ ID NO: 32063 - protein, 366 aa, Pseudomonas fluorescens Pf-5
MSNTFLNPVTTQTWANGRHIVRCVKVIQETWDVRTFCFMADQPIMFFFKPGQFVTLELEIEGQPVMRSYTISSSPSVPYSFSVTIKRVPGGKVSNWLHDTLHEGQELAVHGPVGLFNAIDFPAPKILYLSGGVGITPVMSMARWFYDTNANVDMVFIHSARSPKDIIYHRELEHMASRIDNFSLHLICEKHGLGEPWAGYRGYLNHKMLELMAPDFLEREVFCCGPTPYMSAVKRLLEAAGFDMARYHEESFGATPAEARADAVEHAEQAAEAPEPDLADLHQVEFTASGKSIRVAPGETVHAAAAKLGLMIPKACGMGICGTCKVLKLGGEVEMEHNGGITEEDEAEGYILSCCSVPKGDVRVEF

SEQ ID NO: 32064 - protein, 669 aa, Pseudomonas fluorescens Pf-5
MSSASLIKTPPEKVRVNGWVFYTSTALILLLTAILIIAPQEAGRLLGIAQAWLSRSFGWYYMVVIAAYLVFVVGLAFSSYGKLKLGTKQDTPDFSYGAWAGMLFSSGIGISLLYFGASEPLDHYFNPPEGVPGSNLAARQALQLTFLHWGLHGWAIYALVGLAVAYFAYRHNQPLALRSALYPLVGERWVKGAAGHAVDGFGMFVTLLGLVTNLGIGSMQVSSGLENLFGMEHSNTNLLIVIIVMSTVATIAAVSGVENGIRRLSNLNIVLFSGLLIFVLLFGPTLHLLNGFVQNIGDYLNGVVLKTFDLYVYEGDSAKSDRWLGLWTLFYWAWWISWAPFVGMFIARISRGRTVRELVAGVLLIPLGFTLAWLSIFGNSALDLVVNQGAVELGKTALEQPSMAIYQLLEHYPASKIVIGVSIFVGFVLFLTPADSGAVMMANLSCKGGNVDEDAPHWLRIFWSVVITLVTIGLLFAGNFEAMQTMVVLAGLPFSVVLICFMFGLHKAMRQDVQIEQEQAQLAERGRRGFSERLSQLDLQPTQSVVQRYMDKHVSPALQEAAAQLRNLSLEVQTNLGKSKNLLGLRVEMDEGNPFVYEVSLDGYLATPSESTQPEGADSEVRSRFYRAEVYLHNGSQEYDLMGFTQEQITRDVLDQFESHRQLLGRVYS

SEQ ID NO: 32065 - protein, 622 aa, Pseudomonas fluorescens Pf-5
MSFASLGLSEALVGAIEAAGYTQPTPVQQRAIPAVLQGRDLMVAAQTGTGKTGGFALPILERLFPNGHPDKSQRHGPRQPRVLVLTPTRELAAQVHDSFKLYARDLKFVSACIFGGVGMNPQVQAMARGVDVLVACPGRLLDLAGQGSVDLSHVEILVLDEADRMLDMGFVHDVKKVLARLPAKRQNLLFSATFSKDITDLAGKLLHNPERIEVTPPNTTVERIEQRVFRLPASHKRALLAHLITAGAWEQVLVFTRTKHGANRLAEYLDKHGLSAVAIHGNKSQNARTKALADFKAGEVRILVATDIAARGLDIDQLPHVVNFELPNVDEDYVHRIGRTGRAGRSGEAISLVAPDEEKLLKSIERMTKQKIADGDLMGFDASAVEAEKPEVRERPDVRNPRNPRGPRGDGPNGGGGGGGRKDKGKDKGGKEKPARGERPAREQKPREGTPAREQRQPTPRADRAPDEFLDDDVDNFGNRADYVSPYQNKNNQGRGRRPGAPAQGAGAGNPPRGGAGGGQGRSGNPRNSNGSTTGTAPAKRSGGPRNGAPRDSQGRRDEPRNRRPNRDDQPRQEPAVQNPRGNQPKIMHKESKADRFPTPEQLDQLPSRPRGEKPALLTRNR

SEQ ID NO: 32066 - protein, 891 aa, Pseudomonas fluorescens Pf-5
MGEISRAALFGKLNSVAYKAIEAATVFCKLRGNPYVELAHWFHQLLQLTDSDLHRIIRQFNLEPARLAKDLTEALDRLPRGSTSITDLSSHVEEAVERGWVYGSLMFGESQVRTGYLVIGILKTPSLRHALLGLSREFDKIKVETLCERFDEYIGDSPENALSASDGFSAGAVPGEASGAMAPSALGKQEALKRFTVDLTEQARSGKLDPIVGRDEEIRQLVDILMRRRQNNPILTGEAGVGKTAVVEGFALRIVAGDVPPALKDVELRSLDVGLLQAGASMKGEFEQRLRQVIEDVQASPKPIILFIDEAHTLVGAGGAAGTGDAANLLKPALARGTLRTVAATTWAEYKKHIEKDPALTRRFQVVQVAEPSEDKALLMMRGVASTMEQHHQVQILDEALEASVKLSHRYIPARQLPDKSVSLLDTACARVAISLHAVPAEVDDSRRRIEALETELQIIAREQAIGVAIGNRQVNSENLLTAERERLAELESRWAQEKTLVDELLATRAQLRENVGLVDSDVGDDSHGLREKLVDLQQRLSTLQGETPLILPTVDYQAVASVVADWTGIPVGRMARNELETVLNLDQHLKKRIIGQDHALQMIAKRIQTSRAGLDNPNKPIGVFMLAGTSGVGKTETALALAEAMYGGEQNVITINMSEFQEAHTVSTLKGAPPGYVGYGEGGVLTEAVRRKPYSVVLLDEVEKAHPDVHEIFFQVFDKGVMEDGEGRMIDFKNTLILLTTNAGTELIANVCKNPQAVPEPEEIAKALRQPLLEIFPPALLGRLVTIPYYPLSDEMLKAITRLQLGRIKKRVESTHKVDFDFDDEVIDLIVSRCTETESGGRMIDAILTNSLLPDMSREFLNRMLEGRALAGVRISQRDNELHYDFSEPA

SEQ ID NO: 32067 - protein, 470 aa, Pseudomonas fluorescens Pf-5
MPSANALSSSPPASAHNASLDGGFTHSAQGTSLRRILGLPALVFFGLVYMVPLTVFTTYGVVTQLTGGRTAAAYVITLLAMIFTALSYSVMVKKYPIAGSAYSYASLSFGPGIGFLAGWSLLLDYLFLPMINYLVIGLFLNLAFPAVPAWVFVVATISLVTLLNIRGIGSVSSMSNLIVCAQMVFVVVFMALVVRQLAGAESLDLSAPWVGDGSQDGLLPLMAGAAVLCLSFLGFDAVSTLAEETRDPRRDIPRAIVITTLGAGLLFILLAMTSQLAFPGSSFKDADSAASEVMLHAGGRFLEMFFTATYVAGAAGSALASQASVSRILFSMGRDGILPRRVFGTLSERYKTPVVAIVLVSLVSLLAVVIDLTTLASMISFGALVAFSVVNLAVIKSHLGQGQPRSTARLLQYGLLPLIGFALIAWLWTSLSALTLGIGLAWFALGLLYLGIHTRGFRQPAPTVQFSEQA

SEQ ID NO: 32068 - protein, 679 aa, Pseudomonas fluorescens Pf-5
MSSSSPWHAGERQLQARAGVAERMEAFGTKVIRQAMPDQHRQFYGQLPFILVGAVDAQGNPWTSILEGPPGFAQAPEATRLRLGSLPAADDPVQLQEGAALGLLGIELHTRRRNRFNGRVSAVDRHGFSVTVQQAFGNCPQYIQQRELQQVALSDPASRPAQYRDGLDPEARALIGGADTFFVASYVDLDGQRSVDVSHRGGQAGFVRVEGNCLTIPDFAGNLHFNTLGNLLLNPRAGLLFIDFHSGELLQLSGRTEIIHDGPLVKAFQGAERLWRFTVERLVRRPAALSLRWQLQGFSPNSLLTGSWPQAEARLRATALGQQWRPLRVTRIEDESSSIRSFYLEPADAAGAPSFVPGQHLPVQVVLDGQPLIRTYSLSSAPSDDFLRISVKREGQVSRHLHQALKVGDLLQARAPQGRFTADALSSQPLVLLAAGVGITPLLSMLREVLYQGLRTRHTRPTWLIQGSRTLAEQPFAKELQTLLAQAGDSVRLLRLLSQPEAGARPGAGFDHCGRIDVQLLLAQPDLDLDRADFVLCGPGAFTQGLYDSLRDLDIDDRQIHAETFGPSTLRRRPDPEAVPFAQPPAATRAVAVRFQQAGRELSWEPASGSLLQLAESAGLHPPFSCRGGSCGTCQTRLISGQVNYPQVPAQLPEPGQVLICCAVPAAVDNLVPALVLDL

SEQ ID NO: 32069 - protein, 470 aa, Pseudomonas fluorescens Pf-5
MADAGTVLQRGLSTRHIRFIALGSAIGTGLFYGSAAAIQRAGPSVLLAYLIGGAAIYLTMRALGEMAVRTPVSGSFGHYASSYLGRFAGFLTGWSYAFSMLMVCLADVTAFGVYMGLWFPDTPRWIWVLSIVLGIGALNLCSVKVFGELEFWLSLLKVGAIVAMIVGGFTLLFFGIQLGEEQSRGGLANLWEYGGFFPNGVEGMIASFTIVMFAFGGIEVIGITAGEAKDPQRMIPKAINSVPLRILIFYVLTLLILLTLAPWSSIGSHGSPFVQIFSSLGISSAATVLNIVVISAVVSAINSDIFSAGRMMYGMAAIGQAPAVFARTSRFGVPWMTVLVMSVALLLGVLLNYWIPQELFLIFASLVTFSVVWVWLMILLSQMAMRRGMSAREIHELKFPLPLGTAGQACAVVFMLFIFGVLGAFADTRLALYVGLGWLALLSLAYWIWIKPDTTGSAAAESGIGTQEKG

SEQ ID NO: 32070 - protein, 177 aa, Pseudomonas fluorescens Pf-5
MKLLILDRDGVINHDSDAYIKSVQEWIPLPGAIEAIAQLSKAGWTVAIATNQSGIARGYYDLATLDAMHARLRELVAEQGGEVGLIVYCPHGPDEGCACRKPKPGMLRTIAEHYQAELTGLWFVGDSLGDLEAAKAVDSQPVLVKTGKGEKTLGKTLPVGTLIFDDLAAVAAELIHN

SEQ ID NO: 32071 - protein, 522 aa, Pseudomonas fluorescens Pf-5
MAWPDRQSLLPLLSWLPRQTRASVGRDLLVGLSGAILALPQSIAYALIAGLPPEYGLYAAIVPVLIACLWGSSWHLICGPTAAISIVLYASVSPLAVPASEDYITLILLLTLLAGVFQWLLGMLRFGALVNFVSHSVVLGFTLGAAVVIALGQLPNLLGLELPNQATALNSLSQLLQHLGEVDRPSLLLGLGTLALGVAFKLLAPRWPGLLLSLVFSALVVWLLPGVFGHVQLVSAFVGRLPPFSPLPLDLELILRLLPSAVAVGMLGLVTSLSIARSLSARSEQLLDANQEVRAQGLSNMVGAFFSGYLSSGSFTRSGLSYEAGACSPLAGVFSALWVALFAVAGAGLIAHIPIPAMAGSILLICWGLVDHRGIRALFRVSRAEFVVMSLTCVATLLLELQTAIYAGVLASLFFYLKRTSQPRVQQSSEGDEDILRVGGSIFFGASHYLQVRMQRCHAPRLVIDARQINFIDYSGVEMLHQEARRLRRQERSLILRRARQAVKEELIKLEGPERCPIHFED

SEQ ID NO: 32072 - protein, 373 aa, Pseudomonas fluorescens Pf-5
MHIGVPLETQTGETRVAATPETIKKLIGQGHKVTVQSGAGINASVVDSAYEAAGATIGNANDAFGAELILKVVAPSDSELALIKSGTVLVGMLNPFSNETIAKLAERGITAFALEAAPRTSRAQSLDVLSSQANIAGYKAVLLAAHYYPRFMPMLMTAAGTVKAARVLILGAGVAGLQAIATAKRLGAVIEASDVRPAVKEQIESLGAKFVDVPYETDEERECAVGVGGYARPMPASWMQRQAQAVHERAKQADIVITTALIPGRKAPTLLSADTVAQMKPGSVVIDLAAAQGGNCPLTVADQVVVEHGVTIVGPTNLAGAVAADASALYARNLLDFLKLVFTKEGQFEVNLEDDIVAACLMCRDGQVIRKNA

SEQ ID NO: 32073 - protein, 294 aa, Pseudomonas fluorescens Pf-5
MKTAKSSLLLLPLFGLALLAGCDKSNDAPKPAATAASAAPAAGYLDKIKARDKLIVGVFTDKPPFGFVDETGRYVGFDTDIGRQFAKDLLGDENKVEFVAVEPASRIPFLQSDKVDLILANMTVTPERKEAVEFTNPNLKVAVQALVPEGSAVKSLDDLASRTTIVTTGTTADIWLTQNHPDWKLLKFEKNTESLQALANGRGDAYAQDNLILFSWSKQNPGYRVLPQTLGEQAPIAPAVKKGNIELRDWVNAELAKLGEEKYLLKLYDQYVRKELSDDTKPESVIVEGGKWQG

SEQ ID NO: 32074 - protein, 666 aa, Pseudomonas fluorescens Pf-5
MSAPSTSANALIRMNPPVFYFAASFILIFGVVVISMPEQAGAWLLAAQNWAANTVGWYYMLAMTLYLVFVVVTALSGYGKIKLGADHDEPEFSYLSWAGMLFAAGISITLFFFCVSEPLTHMLQPPQGEAGTAEAARQGMQLLFLHWGLHGWGVFAFVGMALAYFAYRHNLPLALRSALYPLIGKRINGPIGYAVDGFGIIATVFGLGADMGFGVLHLNSGLDYLFGIAHTQWIQVGLITLMMGAAIIVAVSGVDKGVRVMSDINMLLAVALLLFVLFAGPTQHLLNTLIQNLGDYLGALPTKSFDVYAYNKPSDWLGGWTVFYWAWWIAWSPFVGLFIARISRGRTIREFVFGVLLIPLGFTLAWMSIFGNSAIDQVLNHGMSALGMSAIDNPSMTLYLLLETYPWSKTVIAVTVFISFVFFVTSADSGTVVLSTLSAKGGNADEDGPKWLRVFWGAMTALVTSALLFAGSIDSLKSAVVLTSLPFSLILLLMMWGLHKAFYLESQRRIAQLHSLAPVAPSRRGKGGWRQRLSQAVHFPSRDEVYRFLDQTVRPAIEEVTAVFVEKGLNVVTQPDPANDSVSLEIGHGDQHPFIYQVQMRGYFTPSFARGGMGPKELRNRRYYRAEVHLAEGSQDYDLMGYTKEQIINDILDQYERHMQFLHLVR

SEQ ID NO: 32075 - protein, 318 aa, Pseudomonas fluorescens Pf-5
MSKPFPQPVDAALVPRFAGIPSFMRLPLFNDPAQVQIALVGVPWDGGTTNRAGARHGPREVRNQSSLMRKVHHVSRIAPYDLVRVGDLGDAPVNPIDLLDSLKQIEGFFSQLHQAGAVPLAVGGDHLVTLPIFRALARHRPIGMVHFDAHSDTNDRYFGDNLYTHGTPFRRAIEEGLLDPKRTVQIGIRGSIYSADDEAFARDCGIRVIHMEEFADIGVEATLAEARRVVGDGPTYISFDVDVLDPAFAPGTGTPEIGGMTTLQAQQMIRGLRGLNLVGADVVEVSPPFDVGGATALVGATLMFELLCILAESIAQGS

SEQ ID NO: 32076 - protein, 405 aa, Pseudomonas fluorescens Pf-5
MFAMPTFELDALTTLALALILLGVGAQLKKRSRWLTQLCVPAPVIGGFGFALIVWLLRDQQLLAIKLDTAIQTPLMVAFFTTVGLGGSLGLLRRGGKILFVYLGACWSLALLQNLVGVGAAKALGIDPLLGIMAGAVSLEGGFGAAAAFGPIAENLGAVGATTAALASATFGMVAGGLLGSPLARWLIERNRLQIQADQVSTLQHLESAAQGSVAPLDAPTLLRLLTCILLIMVLGFWIGSALNEHLGIVLPSYVGAMFVAIILRNLNDRARIIDIPDSAVSTLGDVCLGVFLTMAMMSLKFWELEQLGLPLLVILVVQVLVMVLLCVFLLFRLFGGNYDAAVLCAGFMGHGLGATPNAVANMGAICDHYKVFSYKAFIIVPLCGAVLIDIVAIPLITWFINAFA

SEQ ID NO: 32077 - protein, 480 aa, Pseudomonas fluorescens Pf-5
MSDNNKRDDDMQSQDSGLRRGLTARHIRFMALGSAIGTGLFYGSASAIQMAGPAVLLAYLIGGAAVFMVMRALGEMAVHNPVSGSFGHYASQYLGPLPGFILGWTYAFEMLIVCLADVTAFGIYMGFWFPEVARWIWVLGIVLFIGGLNLCNVKVFGEMEFWLSLLKVGAIVAMILGGLGIMLFGISSAAQDQATGAANLWAHGGFMPNGISGVIASFAVVMFAFGGIEIIGVTAGEAQDPKRVIPKAINAVPLRILLFYVLTLFVLMSIFPWPQIGTQGSPFVQIFDSLGISSAATILNIVVISAAVSAINSDIFGAGRMMYGLARQGQAPKGFAQVSKHGVPWMTVVVMAVTLLIGVVLNYLIPENIFLLIASLATFATVWVWLMILLTHVAMRRSMTAEQVAQLQFKVPFWPWAPAAAIAFMLFIFGVLGYFPKTQGALIVGVVWIALLVVAYMLWVKPMAGQAQAIMSDAPLPTDH

SEQ ID NO: 32078 - protein, 1484 aa, Pseudomonas fluorescens Pf-5
MSMKAGLYQPDEFKDNCGFGLIAHMQGEPSHTLLKTAIEALTCMTHRGGINADGKTGDGCGLLMQKPDLFLRAVATEHFGIELPKQYAVGMVFFNQDPVKAEAARENMNREILAAGLQLVGWRKVPIDTSVLGRLALERLPQIEQVFIGGQGLSDQDFAIKLFSSRRRSSVANAADTDHYICSFSHKTIIYKGLMMPADLAAFYPDLGDERLQTAICVFHQRFSTNTLPKWPLAQPFRFLAHNGEINTITGNRNWAVARRTKFANDLIPDLEELGPLVNRVGSDSSSMDNMLELMVTGGIDLFRGVRMIIPPAWQNVETMDADLRAFYEYNSMHMEPWDGPAGVVMTDGRYAVCLLDRNGLRPARWVTTQNGFITLASEIGVWNYQPEDVIAKGRVGPGQIFAVDTETGQILDTDAIDNRLKSRHPYKQWLRKNALRIQATMEDNDHGSAFYDVDQLKQYMKMYQVTFEERDQVLRPLGEQGYEAVGSMGDDTPMAVLSQRVRTPYDYFRQQFAQVTNPPIDPLREAIVMSLEICLGAERNIFQESPEHASRVILSSPVISPAKWRSLMNLDRPGFERQVIDLNYDESVGLEAAIRNVADQAEEAARAGRTQIVLSDRHIAPGKLPIHASLATGAVHHRLTEKGLRCDSNILVETATARDPHHFAVLIGFGASAVYPFLAYEVLGDLIRTGEVLGDLYEVFKNYRKGITKGLLKILSKMGISTIASYRGAQLFEAIGLSEEVCNLSFRGVPSRIKGARFVDIEAEQKALATEAWSPRKPIQQGGLLKFVHGGEYHAYNPDVVNTLQAAVQQGDYAKFKEYTALVDNRPVSMIRDLFQVKTLDTPMDISEVEPLESILKRFDSAGISLGALSPEAHEALAEAMNRLGARSNSGEGGEDPARYGTIKSSKIKQVATGRFGVTPEYLVNAEVLQIKVAQGAKPGEGGQLPGGKVNGLIAKLRYAVPGVTLISPPPHHDIYSIEDLSQLIFDLKQVNPQALVSVKLVAEAGVGTIAAGVAKAYADLITISGYDGGTGASPLTSIKYAGAPWELGLAETHQTLRGNDLRGKVRVQTDGGLKTGLDVIKAAILGAESFGFGTAPMIALGCKYLRICHLNNCATGVATQNEKLRKDHYIGTVDMVVNFFTYVAEETREWLAKLGVRSLEQLIGRTDLLEVLEGQTAKQHHLDLTPLLGSDHIPADKPQFCQVDRNPPFDKGLLAEKMVEMARSAINDKSGADFALDICNCDRSIGARISGEIARLHGNQGMAQAPITFRFKGTAGQSFGVWNAGGLNLYLEGDANDYVGKGMTGGKLVIVPPKGSVYKTQDSAIIGNTCLYGATGGKLFAAGTAGERFAVRNSGAHTVVEGTGDHCCEYMTGGFVCVLGKTGYNFGSGMTGGFAYVLDQDNTFVDRVNHELVEIQRISGEAMEAYRSHLQRVLNEYVEETDSEWGRNLAENLDDYLRRFWLVKPKAASLKSLLSSTRANPQ

SEQ ID NO: 32079 - protein, 601 aa, Pseudomonas fluorescens Pf-5
MTDSSPDASPSSLKIYFRLLGYVRPYIGLFLISIVGFLIFASTQPMLGYILKYFVDGLSNPQAVLFPGVPYLRDMQLLQAVPLLIVLIAAWQGLGSYLGNYFLAKVSLGLVHDLRVQLFNNLLTLPNRYFDKHNSGHLISRITFNVTMVTGAATDAIKVVIREGMTVIFLFGSLLWMNWRLTLVMIAILPLIAVMVRTASKKFRKQSKKIQVAMGDVTHVASETIQGYRVVRSFGGETYEQQRFLAASQGNTDKQLRMTRTGAIYTPLLQLVIYSAMAVLMFLVLYLRGDASAGEMVAYITMAGLLPKPIRQLSEVSSTIQKGVAGAESIFEQLDVEPEVDRGTVERASINGHLEVRNLSFTYPGTERQVLDDISFSIEPGKMVALVGRSGSGKSTLANLIPRFYHHDKGQILLDGTEVEDFRLLNLRRHIAQVTQHVTLFSDTVANNIAYGDLAGAPREDIEKAAADAYAMDFIAQLPEGLDTQVGENGVLLSGGQRQRLAIARALLKNAPLLILDEATSALDTESERHIQAALDKVMKGRTTLVIAHRLSTIEKADLILVMDQGRIVERGSHAQLLAQNGYYSRLHAMGLEEPAPSGIA

SEQ ID NO: 32080 - protein, 431 aa, Pseudomonas fluorescens Pf-5
MSAANKPIDIKKSVIDAVLAGLISLIVFGPIVGVVLDGYSFNLQPTRVAWLVAIVMAGRLALSLFLQTPKGLKILQGFESTGSGVHVLAPDYKSRLRWIIPALIVIAIVFPFFANKYLLTVVILGLIYVLLGLGLNIVVGLAGLLDLGYVAFYAIGAYGLALGYQYLGLGFWTVLPLAAIAAALAGCILGFPVLRMHGDYLAIVTLGFGEIIRLVLNNWLSFTGGPNGMPVPSPTFLGLEFGRKAKDGGVPFHEFFGLEYNPNLKFLFIYIVLFLVVLLVLYIKHRLTRMPVGRAWEALREDEIACRAMGLNHVLVKLSAFTIGASTAGLAGVFFASYQGFVNPSSFTFFESALILAIVVLGGMGSTVGVVIAAFVLTVAPELLRSFSEYRVLLFGILMVLMMIWRPRGLIRISRTGVTPRKGALTEGNAP

SEQ ID NO: 32081 - protein, 442 aa, Pseudomonas fluorescens Pf-5
MNERSMSTAIRPSACPGLLRIVPALDGGICRIKLAGGVISAEQAVAVAEAAQAYAGGVIEATNRANLQIRGIGPEHQALIAALLAAGLGPTTAAGDDVRNLMLSPCAGIDRQCLMDTRPLAAQILDTLQGHPRFHQLSAKFAVQLDGGEALAMLEHHHDLWLSALERDGQGLLAFGLAGCPVDEPLAAVAQDQGHELLVAVLELFLDLARPEQTRMRHLLMDMSREDFLAQLEPRLSRPLLNIGGWRRQTSDAGLHIGTYPQAAPGQVYVGAGTPLGRLDPAMLKGAAQLAREYGDASLRLTPWQSLLLPSIAAADAPAATAALEQLGLLCSPQQALAHLIACTGSSGCGKALADTKSDALQLAGLLQRHGRQLDVHLSACPRSCAAAHVAPATLLAVAPGRYDLYLRDATQPGFGTLHARNLSIEAAEALLDARPRSNLDA

SEQ ID NO: 32082 - protein, 466 aa, Pseudomonas fluorescens Pf-5
MDQTLKQGELKRGLKNRHIQLIALGGAIGTGLFLGSAGVLKSAGPSMILGYAIAGFIAFLIMRQLGEMIVEEPVAGSFSHFAHKYWGGYFGFLAGWNYWVLYVLVGMAELTAVGKYVQFWWPEIPTWVSAAVFFVLVNLINMMNVKFFGEAEFWFAIIKVVAIVGMIVLGCYMLFSGSGGSQASVSNLWSHGGFFPNGGTGLLMAMAFIMFSFGGLELVGITAAEAAEPRKVIPKAINQVVYRVLIFYVGALAVLLSLYPWDELLVSLNAGGDAYSSSPFVKIFSLIGSDAAAQILNFVVLTAALSVYNSGVYCNSRMLYGLAEQGDAPKALMKLNKQGVPILALGISALITLLCVLVNYLAPHEALELLFALVVAALMINWALISLTHLRFRKAMAEQGVVPSFKAFWSPLSNYLCLAFMVMIVGVMWMIPGIRASVYAIPVWVLVIWGFYLLSRAKKASQPALR

SEQ ID NO: 32083 - protein, 340 aa, Pseudomonas fluorescens Pf-5
MTHKVAFSFADGKTLFFPVKANEILLDAALRNGIKIPLDCREGVCGTCQGRCESGQYSQDYVDEEALSPQDLEQRKMLTCQTRVQSDAAFYFDFDSSLCHSADPVQLQGSVIDVRQVSESTAILHLDLGGHQAPLDFLPGQYARLSIPGTGTSRAYSFANRPAADNQLQFLIRLLPDGVMSNYIRERCLVGDTLQLEAPLGAFYLRQISRPLILVAGGTGLSALLAMLEQIVEQGCQQPVHLYYGVRHSRDLCELERIQAHGERLADFRFTPVISDANPDWPGKRGYISEHFDSSELRDQDTDMYVCGPPPMVDSIRIWLQEQQLNRVQLYYERFTESNI

SEQ ID NO: 32084 - protein, 494 aa, Pseudomonas fluorescens Pf-5
MRRPGQRHKDGPSQRFIRAHNNKEALKVTTSNKGFEAISNREHGLRRQLTAGQMSMIAIGGAIGTGLFMGSAYAIGYAGPSVLLSYAIGALITLILMGCLAEMTVAHSTSGSFGAYAEFYVSPLAGFLVRYAYWAAIVLAVGAEVTAIAMYMKYWFANVPEWVWIISFSSVLIVLNGISVKTFGNFEYWFSTIKIAAIVGFIILAVYVVFGSGNPDYGLHNYSAHGGFFPNGFEGMWIAVIVSIFSYLSVEMIAVAAGEAKDPQRAVKQAFRATIVRLVVFYLLTLALMLAIVPWAQAGKAQSPFVTVMQTIGIPGATGVMNFVILIAALSAMNSQLYITTRMMFSLSRAGYAPKSMGALSKNGIPLNALLLSSSGIALATLVNVLYPESSFTLMMAISMFGAIFTWFMIFLTHYCFRRYHQRHGEQQLSFRMRLFPYSTLLGLVLMGAVMITTFFTEAFKMTLVFGVPFLLLLTLVYYLCFRKPRVVAGLSEV

SEQ ID NO: 32085 - protein, 519 aa, Pseudomonas fluorescens Pf-5
MEIPGEIKAGIDTRSLHSRAAGTLDWSIFWISGGFFLLFLVIALIDLNTLSSLIGHAFTWSTHYFGLYWQVLMLATFGASLYIGFTRLGRVRLGGVGHTPSISTFNWVSMIMCALLAGGGAFWAAAEPMMHFIAPPPYFGAVAKSDAAGVAALSQSFLHWGFMAWAVLGSLLTVVYMYLHHEKNLPLMPRTLLYPLLGERALKGPIAVFADASAIIAVVAGTIGPVGFLGLQIAFVLHSVWGVPNTIMVQAMVILSVTVIYTLSCVVGLDGLRLVSKVHVWLMLGLAAFLFIFGPTLFLSETLAQSLAVHVTSFFQTALYRDDNAWLNSWTLFYWGWFIGYAPMMGIYVAKVSRGRSIREVITLMSVAAPLITMLWFTLVGGTGIGIELQSPGRVISHGVQPEALLLGVAQSMPLPNLISALFLFLSFFSVVTSAGSMSYTVAMAISSNHAESPAWLRVFWGAGMGLVGATLITLGEGGISALQSFIVITAVPVSLLILPAVWDAIRIARQMAREQGVF

SEQ ID NO: 32086 - protein, 638 aa, Pseudomonas fluorescens Pf-5
MGKIIGIDLGTTNSCVSILENGNVKVIENAEGARTTPSIIAYANDGEILVGQSAKRQAVTNPHNTLYAVKRLIGRRFDEEVVQKDIQMVPYKIVKADNNDAWVEVNGQKMAPPQISAEILKKMKKTAEDYLGEAVTEAVITVPAYFNDSQRQATKDAGRIAGLDVKRIINEPTAAALAYGMDKAKGDHTVIVYDLGGGTFDVSVIEIAEVDGEHQFEVLATNGDTFLGGEDFDIRLIDYLVDEFKKESGMNLKGDPLAMQRLKEAAEKAKIELSSSQQTDVNLPYITADATGPKHLNVKISRAKLESLVEDLVQRTIEPCRIALKDAGIDVGSINDVILVGGQTRMPLVQKTVTDFFGKEARKDVNPDEAVAMGAAIQGAVLAGDVKDVLLLDVSPLTLGIETMGGVMTALIEKNTTIPTKKSQVFSTADDNQGAVTIHVLQGERKQAAQNKSLGKFDLADIPPAPRGVPQIEVTFDIDANGILHVGAKDKATGKTQSIVIKANSGLSDEEIQQMIRDAEANSEEDRKFEELATARNQGDALVHSTRKMVADAGDKVTAEEKTAIEAAVVALEAAVKGDDKAAIDAKVEELSKVSAPVAQKMYAEQAQPAEGAAPHAESAEKADDVVDAEFEEVKDHK

SEQ ID NO: 32087 - protein, 313 aa, Pseudomonas fluorescens Pf-5
MSKMMVFTGNANPDLARRVVRQLHIPLGDISVGKFSDGEITAEINENVRGKDVFIIQPTCAPTNDNLMELVVMADAFRRSSATRITAVIPYFGYARQDRRPRSARVAISAKVVADMLTVVGIDRVLTVDLHADQIQGFFDIPVDNIYGSPVLVDDIEDQRFENLMIVSPDIGGVVRARAVAKSLGVDLGIIDKRREKANHSEVMHIIGDVEGRTCILVDDMVDTAGTLCHAAKALKEHGAAKVFAYCTHPVLSGRAIENIENSVLDELVVTNTIPLSAAAQACARIRQLDIAPVVAEAVRRISNEESISAMFR

SEQ ID NO: 32088 - protein, 69 aa, Pseudomonas fluorescens
MSNRQTGTVKWFNDEKGFGFITPQGGGDDLFVHFPFQGTGFKSLQEGQKVSFVVVNGQKGLQADEVQVV

SEQ ID NO: 32089 - protein, 251 aa, Prunus persica
MGRGRVELKRIENKINRQVTFAKRRNGLLKKAYELSVLCDAEVALIIFSSRGKLYEFCSSMSMLKTLEKYQRCSYGSLEANRPVNETQNSYQEYLKLKARVEVLQQSQRNLLGEDLAPLNTKELEQLEHQLEASLNQIRSTKTQFMLDQLCDLQNKEQMLVEANKALRRKLEETSGQAPPLLAWEAAGHGNNNVQHTGLPHHPHSQGFFHPLGNNSTSQIGYTPLGSDHHEQMNVGNHGQHVNGFIPGWML

SEQ ID NO: 32090 - protein, 981 aa, Ustilago maydis 521
MASTSKMMLNPSNSAQMQQSALTTVDAGILLRSTAELERLTQPIIVPARSPKARFQNWGKSFVSTPARVFAPTTVTHCAVIVELARRQGAQLRAIGRAHSPSDLPFTTGWAMRMEGLKGVVDINHSAYTITALAGTYISDIHEALDSTQPRLAMCNVGSISEQTIAGLISTATHGTGILFPVVSSYVSQLTILCPLPEGTQHLTCSHEQNAELFNATLCGLGSTGLITSVTLRVQNAFNLKQYSEELTFDSLFGTKTGFPAVSKSSYVNPDASLGSLLSKNKRLPACSDNYRPSYRSADAAEVHPIRLGANRDVDQLARADPEDDQETRQAQLALEQVVGSAQHVRLMWFPQVKRITLLRANRSTEPVSAPRSLTARVKASLVGHRLTEFLLYTSRFNRQWPHPAVRWIHALTHPAIPESNSSRMTTPPRNQIAAATESPATEPVTIASSTSDTAGSRDEQQQLLIRDIGQSLAHNGNVGGYAESEPSLLWLQSSVPVGSLNTFPPDSAAPRPLTVGNPVWSEVGRSDRIFNMDCLFPQYTDEWAIPLNRAAAAIRAMRDWLDEEQAASDGDRIHFPVEIRFADADAIWLSHAQGRKTCYIGIVQYRPYNRPVRYRQLFAKFEALMRHYSGRPHWAKAHSCSPTELSQLYPHWHDFLATRQRYDPQEVFVNPYVARHLLGRIGDGNDTQRHVQGHKSLKTVKGLCSFGLAFWKRRCNSVSVTSTLHDKPTLQRQATALQTGLRRAALSNPERQRHPVVRVIAGWTVTVESGQLSPPETKYGQELRLEVTSLILTTILHTSPSHAFCSPLTSTIAPTSAKRIASDYCSLPKISKSCISSLQIYPRQPFHSNGLNRGARIGIGVAIAVGVVLLVILFSLVARRRRRRFLETQPTSTIPMHQQNQPSHYQQGYGGGGGYGQPYGQPYGQPYGQQPYTGQAYGLPSGGTPANNGGDASLYAPPPGPPPPAYVPRDDRKPAESNNV

SEQ ID NO: 32091 - protein, 310 aa, Ustilago maydis 521
MSQMITLEQATWAWIEAGPRKHHMAVGKRFVKGIMAGFLLSTGGMLVQIMSANPWFATNAPGLLKIMQGAVFPVGLCMIVLLQADLVTGEMAVFIMATVKRKVPYWGFLYGWTITFIGNLIGALLYAAFLVHFSEIYTPAMGKGAAAGADAKVSAINFRELWLRAIGCNVLVCVSVFQASLAKDVVSKVVASWFPIFVFVAAGFEHVVANMFLINAALMTRQTNFSVGEYIWKSIIASFLGNIIGAALLALPLVYLHGGDEFDPSGGARAGAMSSGVSVNDVTLPGSGHATAMEQDKWAKDIESQVNQAS

SEQ ID NO: 32092 - protein, 634 aa, Ustilago maydis 521
MCGILGCIHHPDAPAYRGKMLNMSRCIRHRGPDWSGCVVTQEEGSKGSILCHERLAIVGISTGAQPLVSTDGKLILAVNGEIYNHRQLRKNLKDQNAEFKTESDCEVILHLYREHGSDFVKMLDGMFSFILLDTTTTPHRVIAARDPIGITTLYQGASYKYPGAIYFSSELKAIHEECDRIRSFPPGHFYDSSLPEGKETVRYYTPSWLDGDAEGATIPTNPTDLKQIREALEKAVRKRLMSEVPYGVLLSGGLDSSLIASIAARETDKMADLQRKQWEERQARRSRGLTTPAGDANGAKLPVGLDEDADNEVENLAAWPRLHSFSIGLPGSPDLIAARKAAQFLGTVHHEYTFTVQEGLDAIADVIFHLETYDVTTVRASTPMYLLSRKIKAMGVKMVLSGEGSDEIFGGYLYFHAAPDKTSFHQECVRRVKNLHTADCLRANKSTMAWGLEARVPFLDKAFLDVAMNTDAADKMFSKGSLQQVDADGRPRMEKYILRKAFDVIPDDIEAGGDGSGSMLSASAPRKPYLPEDILWRQKEQFSDGVGYSWIDGIKDHAEKTVSDEKFQERAKRYPNDTPDTKEAYMIREIFESWFPSEAAASTAVRWIPRADWGCAADPSGRAVNIHESAYSTE

SEQ ID NO: 32093 - protein, 714 aa, Ustilago maydis 521
MHNLSSRFSESTIASAYSSFSKVSSASSASSIDDLQLPTFDAVPKPPPRTTSITLASTKTYSSVRRERKKPAPLRLVSARSSRRCLSSDDDEDYFSCKEVQRETYQPRCFCGSPVRSCTSASTSSTEIYCSTYCARQDALYALEGRSPSFCPSSSPHSDVEGENDDFPVTPTNAFVLSPPRTPAAKARSWERSADASLSRKLVGIGASHYRRMEALGLYDTDVTPTRPSRSSPLLDPIDLTVALSPSSKCSRLSSSLEATAANEDDELTFDPRKTLFFQQSNNLIYRILHRSFERQSGCWLRKLRRDRKSRVCEGQMSLDSYGAVIPSSATRDPLNDDEFPSHLYHPSLARHHVSLLAIAWISRLRTSTHDLSRRARYKMAGTKFAYVRNFELPDSVIPSTYLVVRIDGKGFHKFSAAHTFAKPNDALALELMNEAARYVMYSLKGHIALAFGESDEYSFLLRRSTTLYNRRNSKITTHIVSLFTSAYVFSWSKFFPRNPLLHPPSFDGRMVVYPNEKVVRDYFSWRQADTHINNLYNTVFWALVLQAGLTEQEATKRLEGTVSADKHEILHSQFGINYDRLEAMFRKGTTLVWTCADSSQEIPSHSTAATGSQMEAEKAVTSDTVEETQVLTNLKDEKLRIKNESRRVAAKQAKKQEKKDKKSMLSHHRHRSNRDLSWLTAVEQTTLELLPRMETAPLLCNPGLIQQDFKVLD

SEQ ID NO: 32094 - protein, 439 aa, Ustilago maydis 521
MESQLANLHLDGGSTADLKQGSRPSHAQASHGNRHVHPTNSSLRPLAPSSSIASNMGINMGVNMQHFNRLAASSTGLTNPNSIAQGMSRAAQQPLNGSRPSTQQQPTQAHIKSRPPSVAGGLNAAAGPSYRPAAPAAQSTKQPASAGSAVASVDLGRYDGGLERDEARGRRGTMQFDPLTLSSADAGKQHPPTRVWSLKDFEMGRPLGKGKFGRVYMVRTRAAPNKGYIIALKCMYKNELVENKVEKQLRREIEIQMNLRHPHILRLHGYFHDEGRVFLMIEFAGRGELYKLMNKLHDRRFEEKVAATYIAQMADALSYLHSKHVIHRDIKPENLLLGIKGDLKIGDFGWSVHAPGNRRQTLCGTLDYLPPEMVNGEQHDKAVDLWALGVLCYEFLEGVPPFEELENAPAGTYKRINNIDFKIPRHFSPEAADLTTGYP

SEQ ID NO: 32095 - protein, 869 aa, Ustilago maydis 521
MAPLCTSAEVNLLVYHYLKESGFHHASFSLRHESRLDDEPLSKEAIIEPGQLVRFLQKGLIYASVEAHIQDDGTEKPCSSTIRLVGPPHVCDGKPRSTPPSTSPTRLSPEPDVFAAQQPRPERKEAATQTPPAPAAARPVNGVHTTKLIASSSLQPDDADRSSKVASSSKKKLDDAVENDDASSATFKPKDAKRKASNSVTSDADREDKRVRRSEAGAKSDDAVTLEAHTDEDAHTSSRKDRRNGGSESRSASPGVEKKQAAKDKDTGSSKKKKGGKSSAGENGEASKKRADKGKDPKAPAPQPKGDNFIEDAQITTLAGHTGEVFISAWNPSVPNMLASGGGDATVRIWEVPENAGESPDAPTICKHLPATQSKDISTLDWNPDGTLLASGSYDGIVRLWTPQGDLHLVMSMHQGPVISVRWNRKGNMLLTGSADGTIIVWDLNSGKPRHTFPLHSDSVLDVEWLSTADGSLKPKSSSDAPPPMPHGLSPSVSDTYFASCSADNSINLCKLGEPKPVKSFKGHTDEVNAIRFDPSQTLLASVSDDTTAKIWALDIGSSGASGASAGATGSAGDHLRKRASQRRGGSAHLEGMDVDEDGTQRTAEENTGDRDRDREKDRATPGSIGSGAATANATNKERNSPAPGSNGQTGLASNLGAASTLLTTTAKGPNKGLRLTLAGHKKELYALAWCPTGPGSANPDQPRMLATSSFDWTARLWNADNGDCLRVIDAHEDNVYTLRFSPCARYLATGGIDKKVIISRVDNGALVQQYQGGGPIFDIAWKDIYDMVETKQEYGEKGEEDGTKLQPLAKRHQLAISQADRKLSVLNIGDLDAVESTVTFKAPPAVEVKTEASTSSDKPPKKQARGGV

SEQ ID NO: 32096 - protein, 639 aa, Ustilago maydis 521
MPPTTHLRGPPDDPSAEWIIQKYGGTSVGKFLHTIAQQIVPSYLAGNKVAIVCSARSGQTKALGTTNLLLQAAGEALDEALTPAASLSNSVTSIANGAQTPVHRPGSAFSRKSSSRGTPLGRVESLSSTTLDNKLQQLTLNTTTTAAANTEQSTAAKSDAGSDSDTDIAIGFNATVDRILSDHLASARKAVINDRLLLEQLERDITEDCDRLRDFLLAAKIIEEISPKSKDIIIGVGERLSCRIAVGALRDAGVDAELVTLESIVDPSFSAHAVQDSQGEFTLDQTFYDSLSQALGQRLNACSGVPVVTGYFGNVPGSLLSQIGRGYTDLCAALCAVGVNAKELQIWKEVDGVFTADPRKVPTARLIPAITPEEAAELTYYGSEVIHPFTMEQAIKKAIPIRIKNVENPTGMGTVIFPDVPEGHDGSEDKLVDGHVDQPRPPMTPSASKSNFSAWGSSANAQATRPVMGERKLPTAVTIKDNVLVLNVHSNRKTVSHGFFAKIFGTLDKYGVVVDLISTSEVHVSMAMAAALRPRTLEKVKADLQKVGTVSVLTDMAILSLVGKHMRNMVGVAGRMFTVLADGNVNIEMISQGASEINISCVLHEKLAVKALNLIHYSVLEVSPKPSNSEAGAFGRSFF

SEQ ID NO: 32097 - protein, 317 aa, Ustilago maydis 521
MGTVADPAKTKKTVSGFATDFLMGGVSAAVSKTAAAPIERVKLLIQNQDEMIKQGRLAAPYKGIGDCFVRTYQQEGLVSLWRGNTANVIRYFPTQALNFAFKDFFKSLFAVPKTAPYWKSLSANLASGGAAGASSLLFVYSLDYARTRLANDAKSAAKGGGDRQFNGLVDVYRKTIASDGIAGLYRGFVPSVVGIVVYRGLYFGMYDSLKPVLLTGNLSNNFLASFLLGWGVTTGAGLASYPLDTIRRRMMMTSGGKVHYKNMFDAGRSIIAAEGVSSLFKGAGANILRGIAGAGVLSGYDKLQELMFGKVYKGGSG

SEQ ID NO: 32098 - protein, 330 aa, Ustilago maydis 521
MSKPQVLICGTIVHAHDELKNDLGSIAEILHLDTPTRAEFFQACSAGGKYANIIAIYRHNDSVDKVGLFDAELINALPASLKSICHNGAGYDQIDVHAAKAKGITVSHTPAAVDDATADTAMFLVLSSLRQYYRAEINARSGKWKSGLKPAHDPEGKTLGIIGMGGIGSALAKRAAAFDMKIIYYNRNPNPNADASYTYVESQQQLLAQSDVVSLNLPLNKQTEKSFGKAQFDQMKDGAILVNTARGGVVDEEALIEALSSGKLSSAGLDVYPAEPKIDERLVKMDNCILLPHMGTETVETQKKMEVQVFGSIKTAIQTGKPSYIVKEHK

SEQ ID NO: 32099 - protein, 672 aa, Ustilago maydis 521
MFSRGLRAAAPATRLLNQPLRSAAPGVARLAPLGARFNSGKVSGPVIGIDLGTTNSCVSVMEGQQARVIENSEGGRTTPSVVAFTKDGERLVGLPAKRQAVVNPEATLFATKRLIGRKFQDKEVQKDLNNVPFKIVPHSNGDAWLEVRGEKYSPSQIGAFVVGKMKETASGYLGKTVKHAVITVPAYFNDSQRQATKDAGAIAGLDVLRVINEPTAAALAYGLDRDDSSVIAVFDLGGGTFDISILEMQKGVFEVKSTNGDTHLGGEDFDIVLVEHLVNEFKKESGLDLSKDRMAIQRIREAAEKAKIELSSTQQTDISLPYITADASGPKHINSKITRSQLESLVGKLVDRTIEPCKKALADAGCKPSDIQEVIMVGGMSRMPKVLETVKNIFKRDPSKGVNPDEAVAIGASIQGGVLSGQVTDVLLLDVTPLSLGIQTLGGVFTRLINRNTTIPTKKSQVFSTAADGQTAVDIQVYQGERELVRDNKLLGNFQLTGIPPAPKGVPQIEVTFDIDADGIMHVSALDKATNKDQSMTISAGSGLSDNEIEKMVADAEQYAEADKARKAVIEEANRAHSVCSETTKAMQEFSEQLPAEEKEKLNVLIKETEELASKGLNGDADVEAQTIREKIDATQQASLQLFKLVYEKKGAQSGNTENAESKPEGEGEKKN

SEQ ID NO: 32100 - protein, 492 aa, Ustilago maydis 521
MSETHGQAFHRAGFSPPAHAGSFSAMMAAQAGAQRLSNGTSIHSSTSPPASFSPTGARVRAASQSVPLSAPRLLTPFDTGDIRILLLENVSQGAVKMLKEQGYQVDFHTKAWSEEELIQNIGQYHAIGIRSKTKLTAKVFRAAHKLLVVGCFCIGTNQVDLEAAAKAGVAVFNSPFANSRSVAELVIGEMISLSRQLGDRVNEMRSGTWNKVSKGCYEVRGKILGIVGYGHIGSQLSVLAEAMGMHVIYYDVVPLMPLGSARQVSTLNELLSTADFVSLHVPELPETKNMIRKEQIEAMKKGAYLINNARGSVVDIPALVEGLRSGHLAGAAVDVFPKEPAASGPGTFSNELNSWASELCQMPNVMLTPHIGGSTEEAQRMIGIEVSDALIRYINYGGSVGAVNFPEVDLRAITEADSRVIRICYVHQNQPGSLRAVNEILGSFNVDKQHSDSYKATAYLLADISGVSENDIREIYDRISKTDANILTRLLS

SEQ ID NO: 32101 - protein, 364 aa, Ustilago maydis 521
MTVKETLYNILFGPDRSASSSSGSQPSTTISAAAVSLGVAPEALGRLTSHSIHALQNLSTYRPKLGSEPCPSSVPAYRRAAVLLCLFAGRNGELYVILSKRSSRLRSHGGDTAIPGGRFEPTDRDLEYTARREAFEETGLPIDPSKAVKLCELPPFLSANELVVTPFVVLLTDHTVQPHLNPREVDSLFSLPLVSFLYHNPPRNLRRSLHLPLTPDPEALRHMPANEVSPISDWHTCRDILWLGGYRIRRHTFWDERNPIRGLTSDILILAAKIAYGEKPQFSLKSPAQPSQADLITLAFNSPLAVKKFRVKPRMQFLKTPDAFSFNRAERTNDDLEQPQDEKDFELAPPIVSASEGAIIKPKL

SEQ ID NO: 32102 - protein, 413 aa, Ustilago maydis 521
MADLRGCCDPCGPCAAACLAALFMLSASDLDHHTMQVILSPVRLVSRACTSSRLPVLASRSHLHSASKPKVLLLDQIKLATTELGQLSKVANVVESTAKTRQELIEKFQSGGEYAQVVGIYRHFGGARSIKVTGRFDAELVSQLPSTLRYIVHNGAGYDQLDVQALSDKGIQASNVPTAVDDATSDVALYLLLGALRRFPRAKAQMNAGKFNSAFSFLDARDPRGKTLGIVGAGGIGRAFAHKASHALGVKVIYHNRNQLSSDVESQAAKGGMKYAKTLEELLQQSDIVSLHCPLTPATKGLIGKQQLEMMKKDAILINTARGPVVKEDELAEALEQGVIAGAGLDVFEAEPKIHERLFALKDTNVELLPHVGTLTLETQTEMEAVCLRNLMQGLATGRLGFTVPEQRHVAFN

SEQ ID NO: 32103 - protein, 430 aa, Ustilago maydis 521
MKITSRHIEKDGSGRITIVPEEDEDMYHLYNLIEQGDRVRAAAVRRVQSESSTGSIESHRVRLNLTIEVTKTTFDATGSSAPPDPSAATASTPSTTAEEEVSRSAAVGGSGGDGATLQVAGRVVEENVYVKMGAYHTLDLEVNRALTITKESWDAVHLERLGESTDVSQRAEVGAVVLGDGTAAVCLLTGHMTVVRQRIDVPIPRKRKGLPATAADKATARFYVQVYNAVVKLLQLPALRLIILASPGFTRDSVYDFLFEEATRRGDKILIGSEARRKFLKIHCSSPHVHSLMEVLRSPEVNAQLKDTKFAREGQLLERFMKQLASDELRAWYGEQHVLLAASRGAIGVLLISDGLFRAADPARRKKFVELVEDVRAQGGEVAIFSSMHESGRQLNALTGIAAILTYPLDIEVVEEEEAEEARSKQGEAA

SEQ ID NO: 32104 - protein, 468 aa, Ustilago maydis 521
MQSYSHLYEPMSHPSGSSSPHPTSPGGFNVPYTGSPSASHLGATASASSNMAQNPLSFGTFYFQQPTSSQSNHGPLASHPPQHLDSYSSTSHTPHQHFSPSADHHSSSSASVAALSNSGRLSWANSPADSYHGVTSNATTHSSGADSHASLVNNKYPWDINPASMRSDTGHIGSPYSASDLLHPATASALGFDDDSGSGGNVRPRARKRTRAEEEPRSRLSSSSRSRTRPRIPSALSNANSPASDFHHSISSYHADPEDTDITAWINAGDAEDLGTSHVADTEHSRLWSSFGPGFPTEASHASPYHGSATAPALPASLSNSRAQSVVGSEDFAYHASPAIHSGSTNLGLSVSLHDHDAVDVKPGSAQLVQDDSAPAEDEPLYVNAKQYQRILKRRATRARIEEQRKKDFLAYMQTRDKARKEGNGLDEDGKKPYLHESRHRHAVRRPRGPGGRFLTKAEMAQSAASAS

SEQ ID NO: 32105 - protein, 474 aa, Ustilago maydis 521
MANSDFLNKAIEIVQKAIDEDVKQNYQEAYKLYQNSLDYFMMAMKYEKNDKLKDLIRKKFTEYLDRAEKLKEHLAKSSEDRNRAAVGANGAEKGVGGSTGGKKEGDDDDVDPETKKLRAGLSSAVLSETPNVRWDDVAGLHTAKEALKEAVILPIKFPQMFTGKRTPWRGILMYGPPGTGKSFLAKAVATEAKSTFFSVSSSDLVSKWMGESERLVKQLFQMAREAKPSIIFIDEVDSLCGTRGEGESEASRRIKTEFLVQMNGVGNDETGVLVLGATNIPWALDLAIKRRFEKRIYIPLPDLEARKRMFELNVGETPCALDGKDYRKLASLTEGYSGSDISVLVRDALMQPVRKVTGATHFKKVMAPAKRKTQQEKAKNGSADKVAHSDAAQQDGDEAAVEDEVQEMKEYLTPCSPGDADAIEMTWDDIEGEQLLEPKLVMSDFLRAIQAVRPTVTKADIEKHIEFTNEAGLE

SEQ ID NO: 32106 - protein, 380 aa, Ustilago maydis 521
MSATQGINVAIIGVGLVGTSVIQQLTTVSSLASKLHIVALQNSKKTLLSTPTSPISLTGSADWKTLLANSATSALALPDLVLELQKITRDSGRHTAVVDNTSDETVAAFYPHFLAAGLSVVTPNKKAFSGPIELYQDILKYKTNDLVGSNGALVYQESTVGAGLPIISTLSDLVNTGDEITKIEGVFSGTLSYIFNEFSTPKGGDKKFSDIVKFAKENGYTEPHPNDDLSGSDVARKLAILSRLVPELKDALPQGYLSVPTHSLTPPPLADVASGEEYVKRLPEFDVDYDKLNKEAFDAGSVLRYVGVIDVQKKEIKASLETYPATHPFASSLSGSDNIIAFHTKRYSARPLLVQGSGAGADVTAMGVVADLIKIAERRS

SEQ ID NO: 32107 - protein, 585 aa, Ustilago maydis 521
MTTSATEKALEDRAKSLHKKEKKASAKAAAAAGASASTSLEGSPSPASPAKKDKKDKKDKKDKKRSADDADADDDEKAAKKRRKEEKKAKKAAAKSGAATSLESTPAASPAPAASSSASAASFTPTNPAAARAFVESHNITIEAPEESNERPPLPMVDFRELDGKVDAAVKKTLDSQGFSTPTPIQACCWPVLLQNKDVVGIAETGSGKTFAFGLPALQHLVTKHKVLDSGKKKAKGAQVNVLVIAPTRELAIQTEENMAKLGKSMGIGMICLYGGVSKQEQVRLLNQSPPVRIVVGTPGRVLDMARDGSLDLSGVTYLVLDEADRMLDKGFEPDIRAIIGMCKSREEGRHTSMFSATWPPAVRGLAESFMNGPVRVTVGSDELSANRRVEQTVEVLADGYAKERRLNDFLRSVNAQRSKDKILIFALYKKEAQRIEQTLRRGGFKVSGIHGDLGQNERIASLERFKSAETPLLVATDVAARGLDIPNVEHVVNYTFPLTIEDYVHRIGRTGRGGKTGKSLTFFTEMDKAHAGELIRVLKDADQKVPDALTKFPTTIKKKTHSSYGDHFKELVPGKAKKITFDDD

SEQ ID NO: 32108 - protein, 691 aa, Ustilago maydis 521
MSSDPVGAAIALAGIPDEPSSLHSKALRPSINLSHRGSLESKPSSDSILLPEEHEDEEDFVVFEDRNTLPAPKLADGDFDELEATSSRNDVEKRSTLGSIARASVESLSFGYRDHLLPLTLSGDGDESLGGDYGEREGSVSATARGSRSTLGSTSSSRRRRHNRGYSRDRLAERRVTLIDGIALTIGVQIGSGIFSSPGVVTLNTGSIGASIVVWLLSGLLAWTGASSFAELGASIPLNGGSQAYLNYSFGPLSAFLYTWSALTALKPGAGAIIATIFGEYVARIIFHATGKVADHPHETGLDGIPAWSIKLLAVAIVALITAAHAFSNKLGTRTQIATTVVKLLALTAVPILAIVQAARGKTSPSSQQAFSSLSAMFAGSSTSPSSYALALYSGLWAFDGWDQSCFVAGEMKRVEKDLPRVIHMSLATVILIFLSAVVSYFVVLPAELVKRTNTVALDFGSAIFGTVGGIVFAVLVAFSCFGALNGQIYTTARLILAASREGYLPERLGDLNRQTGTPIAALLLQLVLISAFVLFGSGFASLVNFYGVCSWTFYLASVLGLLVLRIKEPNLNRPYRTWLGTPILFAAVALFLLLMPIGSAPLEGLAALLFIGAGVPVYYLTQSRSGWVSNVPLLSRLKAWFARARGAGGVHDARGHHVVLPTTDAAAGETEQEDEEQIEMLPKKGTDHKA

SEQ ID NO: 32109 - protein, 589 aa, Ustilago maydis 521
MRSSWLSTASAVFVCAAALANAAKLPAPLEQIHYDQAGNLVWNEDNDVSNVIPSLGRPDFSALKLEGVVAAATPVKQSVHDVFSESMKQAEDVLTWAENEIERIEHKIEDAVVGTKHTVKDWIHTGKVFVDGLEFERLTHPSFPEYSLRLNTQSEAFCDKDVVQHSGYLDISDSKHLWFIFFESRSSPKDDPVVLWLNGGPGCSSSTGLLFELGPCRVTDQGRAVKNNPHSWNNKANLLFLDQPVDVGYSYSDNDQVNNSPAAAEDVYAFLQLFFAKFPEYSKLPFTASGESYAGTYLPNIASTIYKKNKNLALARYSNPELAPKHINLDTVMIGNGLSSPQYQFPSVPEYACGADNKYALFEPGSSTCKTLEQQAATCKSLINSCQKYNSRLTCTPAALYCWSRLYGPAQETGKNLYDVRKTCDREKDGPLCYKDMEYIETLLNTPSIKKNLGVPESVNFQSCNMNINQAFLLQGDSMHDSAALLPELIEDDIRVLIYAGEADFMCNYMGNLEWMQSLETSYLDDFNNGTAKEWTVNGKKAGLVRKGGKGAGNVAFAQVYAAGHMVPYDQPEVASDMINRWLANKPLA

SEQ ID NO: 32110 - protein, 366 aa, Ustilago maydis 521
MLPTTRCMLHHTIRRCVPHDRSKTIGFIGLGAMGKEMANNLLSKTLASNPDPAVTFVVHDAFEQSITRFLTANTSLYPNRNILAASSPAGIAKLSGTIVTMLPSSPQVESVYTHENGILDGLESFQAAAVDDAQAKTLCIDCTTLDPDVAVQTATAIKNANANGAFDMIDAPVSGGVVGANAATLSFMVGSDSSTTFASAEPYLSLMGSRAVHCGKNGNGLIAKIANNLLLGISMLGVTEAMLLGTAHGLPPAVLAGIINTSTGKCWSSEVNNPCPGALEGTKYSPPADRDYQGGFAARLMAKDLKLAMNTAKLQGVPTPLGQLTSSIYEALGGNDEFKDKDFAVAFKALSAALGREEFKGGREKV

SEQ ID NO: 32111 - protein, 755 aa, Ustilago maydis 521
MWRSATTVVGMRPCARSVELRSVLRSTCLTSHQACSTPTNPPRHSAFMDGSASRFLSSFSSSRTFGTSSVKHDKSKSDVPTLASTQAINNRPDGGTTPADKHTTPQPPAASGAPGTSGASGSLASRLSGRVRALLQAQLAKSARDSKDGASAPPTNFPDLRRLFSLAMPERKNIVIALALLLVSSCITLTVPFAIGRLIDFFTSGQNALFGLGFGSVAALMLVIFAIGAGAKAGSNILLELSGVRVIQGIRHQAYRSALRQDVELADKGAGDVVSRLSVDTNIVGESLTSDIGDGLRAGATVVFAGTAMFMISSKLTLLMMAVVPPAAIGAVFYGRYLRDLTLKTQNAVGDMTRLAEERLSPPAFRTLTAFNTQRQELRRFDEKIGSIVDLQVKEAYASGLFYGGTGFVGNCAILTLLTYGGHLVSRAEISVGDLTSLLMYTAYLGGGMVSLTSFFASLMKGLGAGARVFDLIDRQSNVVLGKGEVLQVRAGSAGLPVRFEDVHFSYPSRPEQPILRGVTLDIEPGQSYALVGGSGAGKSSVHSLLLRFYDPVKGKILVAGRDLGTYRPESVRKHLAFVPQEPILFDGTLEDNIKYGTDSATREQVEHAARMAGCESFISEMPRGLDTLIGSRQLSGGQRQRIAIARALVRKPSILLLDEATSALDSASELMVNEAIQHIIRQAEITVWIVAHRLSTIKSANNIHVLENGRIVEHGSFQQLDRPGSRFRALMAAQLQAAPDHTVDTHPSTRQVRD

SEQ ID NO: 32112 - protein, 985 aa, Ustilago maydis 521
MSRPKTANTRPATSTGQLDQSFRPTTSGGPRADSAYDNEEDTSSGYSSADESCKGVQPHQGEDDDDDVFAFAPPGLATHIVQVVPTPSELSAQLPAASAEDSRLAPPGRNEPARESVYYFDQTSGAVYSARGSLVQVQAPNPPAAAVLSPEASRKQDLNENQKPQQTLQRSTSIKWHPSTRCENEAWSGRSDFSAKDSQRAVSPSLSYHDATSLNGHSTFTPSSDSVDLLRALPRPSFSRAVELELEEEDDSPYAEVRASVSNVDDPSMPSITFRSVVLGVILSAFTSAVNTFLSQRNPPIQIVAIIIQILSHPLGSVMANILPIRSFTFRLPNWSSNRNTARSTKSYTWSFNPGPWNIKEHTVVLIAATTGLNPSYSLSILLTQDLARFWNDRRSFLYGFLSVCAPQLVGLALSGFVRAVLVEPASMIWPQNLAVSTVLNTLHAEEDSAATHGSKQMSRFRFFSLASLISFVVFFVPGYLFTALSIFNWVCWIWPNSVPINTVFGIASGLGASFLTFDWTQINFLGSPLVMPWWAQANLFGGFVVGIWIAVPIIYFTNSLHTAYLPIISASSFDRFAQPYNVSIVSPDHMTLRKDAYANYSQVYISAGLVVAYFGGFALITAAAVHTALYHGRFIWNRLRTKRTLPDDVHARLMRRYAAVPSWWYAVALVSGIGMLVFLTTAYSTQLPIWALCLAILIPAVYLLPFGFIFAMSGLPAGVNLVSELLASWLLPGKPLPVMMLKTISQQTTTFSLLFAQDQKLAHYMKIAPRKIFFVQVLSILVNSVMQILAKDYLRDHIQGLCDPNQPQRFTCPTVNIFYTASILWGAIGVERSFGPRSPYYSLFYGLIVGAIVPLITWYTSRKIKWAPLTALSAPVIFVGMSLSPPASGINFTSAIVVGYFFQYWMRKHRVHWWSRYNFVLAGALDFGTVLSSVVIYFLLQMPKNGALELQWWGNQVYMETADAQQMPLLVAPENGFAPPPGAS

SEQ ID NO: 32113 - protein, 162 aa, Ustilago maydis 521
MSASDDEQHNATFETADAGSSLTFPMQCSALRKNGHVVIKGRPCKIVDMSTSKTGKHGHAKVHLVAVDIFTTKKYEDISPSTHNMDVPNVRREEYQLVNIDDGFLNLMTNDGDTKDDVRVPDGELGDQIQAAFDDGKDLMVTVVSAMGEEHCLSFKDAPQGK

SEQ ID NO: 32114 - protein, 367 aa, Ustilago maydis 521
MASQSHLGSVGAGDNVNIPYSTPSTPHPQHQVGWIGLGNMGVKMAANLASHMRNMSPPLPPLLVYNRTTSKAQALEKELDGLVKAVDSVEAIGTRCDLIFTSLSDDDAAEQIYEALLQAEEKRVGKHMQERISSGFSTLLVDTSTLHPATTGKLERKISALPKRHFVAAPAFGPPPVAASAKLVFAVAGPYNSKKFASQFLVPAMGRKIMDFGSNPERAASFKLIGNSIIISTIEMLSETMTLADKTGVGSDRVYEWLEEFYPAPSALGYGKKIMDSNFQGENGFTLNGGIKDASHIIKLGESVNCPLPIIDLARQHMVSARAIGGANLDWSSLSAGFRVTAGVEPFEKKEMLKKWAKTQDNAGASS

SEQ ID NO: 32115 - protein, 403 aa, Ustilago maydis 521
MSAAQQRHGKKNILAEHDDDVVIVSALRTPITKAKKGGLSQCAPEEMLGWTLKGVLAESKIDPKLIEDVAVGTVLAPGGGSTQARMGSLWAGIPNTAGCNSLNRQCSSGLAAVNQIANQIALGQIDIGIGSGVESMTLNYGAGVMPSKMSDAVMENEEAADCLMPMGITSENVAKKYNIDRTKQDTFAAESFARAAAAQKAGKFKSEIVTVKYTDDDGNERTVDADDGIREGVTVESLAKLKPAFAKDGFTHAGNASQVSDGAASVLLARRSAAKKHGLPILGKFVTCAVVGVPPNIMGVGPAYAIPRLFELTGLTKDDIDIYEINEAFASQALFSIEHIGIDKKKVNPVGGAIAMGHPLGATGARQIATGLAEAKRQGGKKLIVTSMCVGTGMGCAALIVSA

SEQ ID NO: 32116 - protein, 447 aa, Ustilago maydis 521
MLQVRNDYFGSDSPLSGPSSGEASPSTSAMLSPGSSSVATSQLSLLALSSERNSPSTSACTSVSDLSSEADKLSLSDPKTGRTTEIAHFTQANVRASAVEEPESTTEDSEAAAVEAENRRVEEELDSALAFGTQIVQREARALAMAARRLSKHSVQQDGFRQAVRLVMRATTGERGGKVVLTGVGKSGIIAKKLSATFLSLGTPSMFLHPTEALHGDLGLLTPHRDVVIALSHSGSSPEILTLVPHLNARRCPIIALVGKRDSALVKASDAWIDCATGKDDLDTEDEEDAEQAVASDRSGNVEVGSNSADGQLARRSASEPAARAAAHQSQFMPEARRGTVPQCDSCDCGKQMSRLKARRNKAPQPNTDEAWDDVPAPSSSTTVALAMGDALAFSVTRAKGLGRDMFAFNHPGGKLGADFRLQGQSAPLQSYDPKGTESAVATPIAA

SEQ ID NO: 32117 - protein, 162 aa, Ustilago maydis 521
MSAVFRQSLGLLRSAPARGSLLCNPTRACFTPTYTSLTRLLSTEARAKIDSAVKSNPLVIFMKGTPDMPMCGFSRAVIQVMQVQGVKPELLKTFNCLEDQELREGIKEYSDWPTIPQVYVDGEFVGGCDIVINMHQSGELEDLLEKNGLLLPLNEEAAKAQA

SEQ ID NO: 32118 - protein, 900 aa, Ustilago maydis 521
MTREHLTANLKPGPATFHDFAVLVFGCVGGGNAHSQLRSLSAGARCSSDFSHESAYFVPECIHDTLECRIASLALGPALHLSPLLLPPSSHPIGATDYAILRHKAELEVLIITLVRHRNPPSSTLKRTLARFDLVTQQAKIMSTPNNPNPNPNGNGKARAIPSPSLASADTLASTPIRSPSRAFGEGWGHASPSLPNIPPRVGSPSAEPLNLYSSSQQQRQDSSNFPRSFSIEPPSRDSPSLAPPAVDSGLSTPSNLDNLDSLPFSDERKARIIERHLARPDGNRDSISATSIPSSEHTDDFDDSQDAHGSSTPNPAASGDGANESPSEIAFEDVDESYIGPHQMQGGAITDDVYRWAHKNRRVSARRTRSESLHMPRTATIDPELDVQGIKEPGGFRRFFVINQAQEQGRAPPRALRSFIDFLSLYGHFAGEFLEEEDDDDDDDEYEDDADERAIPGTSRGAGTGDMETSGLLRRRKGLQRSDTQARMRKANKERRRGEASVLDAVMMLLKSFVGTGVLFLGKAFHNGGLLFSTVTLCAVAIISLVSFLLLVKTNLNCPGSFGDMGGILYGPRMRLAILASIVLSQLGFVAAYTVFVAQNMQAFVLAVTHCKTLVPIWALILGQMAVFLPLSLIRRIAKLSTTALIADVFILFGIVYLFWYEIGKVAKDGLADVVMFNSKEFPLFIGTAVFTFEGIGLVIPITESMKEPEKFPRALTGVMAGVMVLFASAGALSYMAFGSEIQTVVITNLPQTSRFVQAMQFLYSIAILLSTPLQLFPALAVLEKGIFTKSGKYNWKVKTEKNLFRFLVVVVCCLAAWAGANDLDKFVSLIGSVACVPLCFIYPPLLHLKANATRSATKVLNYAMLVFGVVCVAFAGSQTIKAMLESSQPARPPRCSPR

SEQ ID NO: 32119 - protein, 731 aa, Ustilago maydis 521
MYSHRSIVPSAGSQGPPSGPPPPGPGGAGPSQAAAAAAAAAAAAAAQQAPHPGGPVAGGPGGPAPTGPPGAAPGPPGAAPPAGAPHTGSARLADLLDFVRHEFDLLGNDTAQFKAQRDEMEHRVTSQVSEVNMMQTHFYELEKRHTQIIQQYEEEVKRLRSILDSRGLSSEHGAASATGPMSGPPHLPASATSGPLPIASAGGPPPPGGPGGAGSAAMFGPNGNGALGGPGSEYGRGPNGFDREREPPRGPTPGGKDSKRMRVEGPASHYSGPPSPGPERERDWIKKEERGDRGPPPRADEKWDRDQRVGGGAHLGPGPVQSPHGAPPLPPSNLYNRDMHRDARDRDSRPSEVASADSPGAAAAAAGNVTLASLSDMDPDEIPKELKKEGPDWLAIFNPKVKRTLDVNLVHTFLHESVVCCVRFSADGKYLATGCNKSAQIFDTKTGAKTCVLTDQSANSKGDLYIRSVCFSPDGKCLATGAEDRQIRIWDIGKKKVKHLFSGHKQEIYSLDYSKDGRIIASGSGDKTVRIWDVENGQLLHTLYTSPGLEHGPSEAGVTSVSISSDNRLVAAGALDTLVRVWDAQTGKQLERLKSHKDSIYSVSFAPDGKSLVSGSLDKTLKLWDLTGTAKAVQENRAEEKGGHANCATTFVGHKDYVLSVSCSPDGQWVASGSKDRGVQFWDPKTAQAQFVLQGHKNSVIAINLSPAGGLLATGSGDFNARIWSYDRISN

SEQ ID NO: 32120 - protein, 395 aa, Ustilago maydis 521
MASQAFIVAAKRTPFGAFGGKLAGFSASQLGGLASKAALSELPSSTKVDATIFGNVHASDSTAAYLARHVGHHAGLPVTVPALTVNRLCGSGFQSIINAVHEIRVGDSAVVLTGGTESMSQAPYTLSGVRFGNTRYGQDLKLVDSLAAALTDQVPTPTPMGITAENLAAKYGITRQQCDEYALQSQQRYQKALADGAFKDEIVPVEIKSKKATESFQVDEHPRAKTTVESLGKLPSVFKKEGTVSAGNASGICDGAAANVIASEEALNKFGLKPLARIVSYGVTACEPSIMGIGPVEASKLALSRAGLKVSDMDLIEVNEAFAAQFLSVQKELELPNDKTNVFGGAIALGHPLGASGARIMANLTHNLIRLDKKYALGAACIGGGQGIAIIIERV

SEQ ID NO: 32121 - protein, 458 aa, Ustilago maydis 521
MPGVNSIKLLTGNSHPELAQQVADRLGIPLTPCVCKKFADQSIDVRIGSSVRDEDVYVLQTGNSPYTDPNDSLMELLILLSACKTASARRITAVIPSFPYSRHDKKDKSRAPITAKLVANMLTVAGADHVITMDLHASQIQGFFDIPVDNLTSEPSVARWIRSKVENWREAIIVSPDAGGAKRATALADSLGVDFALINRNRRREQHKRIRAAQKTALGLSSRSSFDDLRSGVSTPMSSSYLLDGTGLNSKATVGQATDKLNALSVSAESQSFTSTQQSIGSKHVYSEVANGIKCDETGEWIMTDEQGHLVRSGRSKRDIPGESGTSAEDDSEDENSSRMEILVGDVKGKVAILVDDMVDTGRTLALAAKTLEAAGAAKVYAIITHGLLSGQSIDLLRKLSLERLVVTNTIANTEKAKASEGKLEIMDVSAVIGETIRRSHHGESISQLFRQDAEIMF

SEQ ID NO: 32122 - protein, 488 aa, Ustilago maydis 521
MDNLIHLGFSKTLQGGKEANSGQRFGRMLCLNAGSSSLKFKLFDVSTYRPDSIALIGGSIKLDSSSDTARVDMFCSSNDKHHSDTKEWSEIASGEVLAYLFSTMADLLGEGLGIMTVVHRIVHGAHLDQCVSITRDDQHHLHTLQFLAEFAPLHNAVSVQLIKVCLNSTELNRKHTNVCCFDTNFHRSMDEVKSGYMVDPNLAGERLPGGMKLRKWGFHGLSYASVLSTVSRSINKDAHNLNLIMLHLGSGSSICSVVRGRSFDTSMGLTPLEGLPGGTRSGSVDPVLALHLSSATLPGGKDGTVEIADGIRVSRAEVVLNKHSGFKAVAGSSDFAEIVQRRNEFLQGRTMGKHKEEERSKDRSAVLAFDMFVDRIVGFIGAYVLKMCSAGGVDAVVLAGGIGEKSHELWAELASKVELSSVSVSGESVVRAKEDESKCWQLKREELRLEQTNRTTAMGQCVPWLVCRTDEEGEMAKEVIDAWVRGKQ

SEQ ID NO: 32123 - protein, 399 aa, Ustilago maydis 521
MAVPFIKNPACVVNVACLALARQVRSTGLAIVAPLLTASPFVLLCLTSACLKTGLVNPYFELDQRGKVQAEYIWIDGDGEIRGKTTTLDGPVKSLKDLKEWNFDGSSTNQAPGGNSDVYLRPVAYYPDPFRRGDNVIVLAECYNNDGTPNKSNYRYQCNKIMTQIADEKPWFGLEQEYSLFDMDDRPYGWPKGGFPGPQGPYYCGAGAGKVFARDLVEAHYRACLYSGVNISGINAEVMPAQWEFQVGPCEGIEMGDHLTLARYLLIRVAEEWGVKVSFHPKAVPGDWNGAGCHTNYSTASMRKEGGMKAIEAAIEKLSKRHNEHIAVYGADNDKRLTGKHETGHIGDFSSGVANRGASIRIPRHVAAQGYGYLEDRRPASNCDPYLVTGIVAETTLLL

SEQ ID NO: 32124 - protein, 408 aa, Ustilago maydis 521
MPAFYQTAVRRLSQTARIMSQINDVFIVSAARTPIGSFNGVLKKATAPELGVVAVKAAIQRAGLKPDQIEEVYMGNVLQGNVGQAPARQVALKAGCPDTTEATTINKVCASGMKAISLAAQNIALGQRSIMVAGGMESMSNAPYYLPRGNTYGHVQATDAIVKDGLHDVYNQVAMGNCAENTAKKLSITREQQDAFAIESYRRSAEAWKANAFANEIAPVTISDKKGDVVISEDEEYKNVKLEKIPSLRPVFDKNGTITAANASTLNDGASAVVLASEAEVAKLGIKPLAKIVAFADAACAPIDFPIAPAYAIPKALERAGLTKDDIALFEINEAFSAVALANNQMLGLDASKVNVLGGGVSLGHPIGSSGARIVVTLAHALKPGQYGCAGVCNGGGGASAIIIKREN

SEQ ID NO: 32125 - protein, 645 aa, Ustilago maydis 521
MTKAIGIDLGTTYSCVAVWQNDRVEVIANDQGNRTTPSYVAFTDSERLIGDAAKNQVAMNPHNTVFDAKRLIGRKFDDAEVQSDMKHWPFEVTSVGGKPQIRIEYKGEKKTFTPEEISSMVLLKMRETAEAYLGGTVKDAVVTVPAYFNDSQRQATKDAGIISGLNVMRIINEPTAAAIAYGLDKKTEGEKNVLIFDLGGGTFDVSLLTIEEGIFEVKATAGDTHLGGEDFDNRLVNHFVQEFKRKNKKDLTTNARALRRLRTACERAKRTLSSAAQTTIEIDSLFEGIDFYTSITRARFEELCGDLFSHTIEPVEKVLRDSKIDKGSVHEIVLVGGSTRIPKVQKLLTDFFNGRELNKSINPDEAVAYGAAVQAAILSGDTSEKTQDLLLLDVAPLSMGIETAGGVFTPLIKRNTTVPTKKSEIFSTYADNQPGVLIQVFEGERARTKDNNLLGKFELSGIPPAPRGVPQIEVTFDVDANAILNVSAAEKGTGKSEKITIRNDKGRLSSEQIEEMLKQAEQFAEEDKQALERTQAKNGLESYIYNVRNTTNEPQLKDKLEAADKEALEKIVKEGIEWLDSNTTASTDELKDKQKEIEEQVNPIMTKIYSAAGGAPGGMPGGAPGAAPGGAAPGGDDGPTVEELD

SEQ ID NO: 32126 - protein, 1239 aa, Ustilago maydis 521
MSSSQRPVVQPIPPFKGAPLQATDVQNRRPTAAEAYVALANRKAGANVVSTRATGCENHRPSQHQPTSHHASQRQQPAPAADRRVQQSQPSERPKPASRLEREKKRHHNDPKNIGHWRLDKLIGQGASGRVRLAIHDQTGQKAAVKIIPRTLINASRMSLRDADVKANKMILGIEREIVIMKLIEHPNLLGLWDVYETSKDLFLIMEYVAGGELFDHLVAQGKLSPRDARGYFRQIIFGMDYCHRFNICHRDLKPENLLLDETKKIVKVADFGMAALQPTEKMLETSCGSPHYASPEIVSGKRYKGTASDIWSCGIILFALLCGRLPFDDPNIQQLLGKVRAGKFIMPEWLEPASKDLIWRMLEVDPEKRIKMADIMRHPWFTNNGTESSVNPVSTSLDSLQMEELTLDTIDIDILGNLKTLWFELSEQDIIKELLAPGPSWQKTFYTLLVAHRENHSADDEDDMNDDILDEQIVTASAVPAHALLSTTSAAKTLEKPRPRRTSDAAGATSAPASPRLESVEMDRRHSTPEKGSVYHTTSRRPDNVTPPKVASPHVRPANPSPRLRPSPLDSPASTLDSAFVSASKLKVASPTKPRALGSSHGADKSGYVLPQISLQTASPQRNERPAVDLQRRNTSPTKPNTVGVTAPLSARIALANMYDAPTLSHTATASCGSTSSTASSTVSVSAARNRANRGSGSEMMPPLALPGRASSRPVSPTKSTFGAQATLPPQTAPQPAPPRPSTSRAYTTQPTPCIQVPQVGDATMQRFFQEIADELASIRATGEKPDALQSKLDQLKNSMAWQQQQQQQQLQSQPMAVTASAPSARTRNSEMNQFEDAEDDVSEGESMRSVSQASSHQQTYTPSTPMTPLSPVELIAPLALTDKSGAGARSSVASSSASASARNSVRSARSGTEASSSGTTSRPTSVFSNISTGSTGLGRKRSLLGLRRADKHAQQQHATATEANTIRSIAYESTPTPTALASVFAAPASGRFVPNGGATTASSVRMQRLNPGLGLDIGASSAAGIISPPSTPQSPNTATLSPAPAASASAIASASAPGKKDSWFAGLFNWKPATFTLMSSENFSETLTECIRRLQSYGVRVAMDDSSDVHHTTLKCSINEYRESNGVVTAAKPLRFRVDVHILAVGSPATNSAYMGGGLGLSLHGGAVGTNVNATSIMTHGLPSPALSTYSRASTPGGVTFATSVLVVQEKGALSTFKLIHARLRREWMLDLGSAII

SEQ ID NO: 32127 - protein, 270 aa, Ustilago maydis 521
MASNAPASQRRLHSAPALAACCAELRPRSETQASGGCGHPIRVIMSTRALHLRSHPGQASLPGGKVDASDANVVQTALRESVEEIALPADQAVHLHTGYPFLSKMGLLVHPVVFFLRNGAQILPNLVASPSEVADIWSTALEAFLSSTAPPESGAFGSSQRRQTQTRTRSVSNVHGYPLLIKGLTADVLISVAQKAYGRNARYKVEAEGQRSWEQMVELVVNRYMGPVRAEQRWGDGESGDAQGSSEAFGTQIGVDEDDYKEQLQEDVSV

SEQ ID NO: 32128 - protein, 585 aa, Ustilago maydis 521
MSNESNQIKIGAYLLERLVQLGSQSVQGVPGDFNMGFLDLIEEHPKLKWIGNSNELNAAYAADGYARVKRTIAAVVTTFGVGELSALNGIAGSFSERLPVIHVVGVPSTGAQGSHSLLHHTLGDGRFSAFENMSKEISADSAILKSKQGAGESIDRILITAMKSARPVYLALPTDLVHATIPAEALKTPLDYSIDDNDAKAEEYVLQVAQKHIADAKSAVILVDACAARHGCIQETHELIEKSGLPVFATPMGKTIVDEDHAQYGGIYVGSLTSEKVKNVVEQADVLITVGSLKSDFNSGNFSYRTPKSSTIELHSDYTTIGYSHYPGIGMKKLLPKLSALLETNGDARREETKKIVPKFENALPHDSSSTITQEWLWPRMGQFFQEQDQVIVETGTSSFGMLEAKLPAKTRWVSQVLWGSIGWSVGATLGVALAARENALGRTHLFVGDGSLQLTVQEIGTMIKHGLCPYLFILNNDGYEIERQIHGPQRSYNDIPPYDHSLLLDFFGNEKFHSDAKSHENDPHQSKKQYYRVQTKQQLDELLKDQSFANPDRIRLIEVVMQRGDAPEALKRQAEATGQANKYE

SEQ ID NO: 32129 - protein, 860 aa, Ustilago maydis 521
MDPIDLKPKTADSDTSSDKLKQDLTEKDDIQVSNVGYVLKSNRADVEYAGETPLLEEDKVVHNAADIVTQVISLEDDASLNPWTFRMWFLGLGLAIFGATLQEIFYFKPQVIYVSLVFLTVIAYAIGEFMAAVIPKHGFIGRWLNPHPFNLKEHAAITLMASAGTQSALATEALAAQQLFYGGYPSKAAGIFLVLSSQLLGMTVAGLLRNVLVRPVKLLWPGNLPMTSLLESFHGSKGVDAKLIVKKRMKVFWLVAGTLFVWELFPEYIFPVLEGVSVFCLSRQNDLVFTNLFGGASGNEGLGFLSICFDWNYIAGLGSPMWVPLETMFNNLVGYIGCIVLFIGLYYGNIFRAQDFPFLSQELFDGTSNGTNAFIYNQTSIMTPEFLIDQEALKAQGTPWITATYLGYLITSNIGLTACFTHMMLWNYDDIKAGWSWAYPSELKKLFANPHWYKFWRASTEEEEAEWAQKMMADERCDPHYKVMMKNGYKEAPMWWWGASLLVSWAVGLICLYVMKSTLPWWGFILSTLFTFVFMLFFGAQAGITGFGFNLQPICQMLAGYLFPGRPLANLYFTCYTYNTMSMGLMLAKDLKLGQYVHLAPMCTFTVQIVGCLVGAMMNWVMMSEIVENQATILKSVLGTNIWSGQNIQQFNTLAIAWSIAKDMFSIGAKYQWVTIAYLIGFFVPLPMYLGNKIWPHRAWSYFNFSIIAWYMGWLFVGINASITSYFIIGFFAQFYLRKYRPGWFNKYNYIVSAALDGGTQTMVFILTFAVFGGSGKARPFPTWAGNPDAKLHNLDYCAISPIAVDFDLQSRITNLRDTVKFTIPHSSSTCEVLGRSTIQLALNQATDGRGRAKRNQSRM

SEQ ID NO: 32130 - protein, 357 aa, Ustilago maydis 521
MAVPKILVCRTMPSSVLKRAEAAGQVQLITRPDAEGEQAPSREWVLSNLRNHSVCGAVICLSEKVDAEFLDAAGASLKVISTMSVGYDHIDLALCKERGVRVGNTPRVLDDAVAEVCLLLALMVTRQVPLAIRTVRQGEWPQNPWTPTCFTGPQIRGKTIGFLGFGNISQSLCKLLVAFKPARIVYTTSKPRPFDEHDAYFASLMQDRFPVQTIQVENVEDKFEMANQADLVFVMVDLNPSTKHIVSKQFLDAMKPSAYMINASRGGTVDTAALVDALRNDKIAGAGLDVIEGEPVVHADHPLLAPDCRDKVALLPHIGSGTTETRRAMADMTMNNLLGALGLRQESGQESSMEAEL

SEQ ID NO: 32131 - protein, 850 aa, Ustilago maydis 521
MKFYIDELPVLFPYPKIYPEQYAYMTDLKRTLDANGHCVLEMPSGTGKTVSLLSLIVSYQQFHPAKRKLIYCSRTVPEIEKALAELKRLMEYRARYNVQQDQASGVLKKESQSSDRPGEHNIEMNGKGNTGSQMEDILALGLSSRKNLCIHPDVSRERKGKVVDARCRDMTSSWACEKGRQDPGSVELCNFHEELGKMEPGQLIPQGVWTLEEVKEYAREKAICPYFAIRRMMPFVDIIIYSFHYLLDPKVAEQVSKEMSKDAIVVFDEAHNIDNVCIESLSIDLTRPMLDSAYRSINQLSERVDEIKKTDASKLQDEYARLVEGLQQQGEQREAESFMANPVLPDDLLQEAVPGNIRRAEHFVAFLKRFVEYLKTRMRVLHVVAETPASFLQHLKDITYIERKPLRFCAERLRMLVGTLELTRLDEFSALQKVAAFATLVATYDKGFLLILEPFETENATVPNPIFHFTCLDASLAIAPVFERFSSVIITSGTISPLDMYPKMLKFDAIVQESYAMTLTRQCFLPLVITRGSDQVAISSRFEVRNDPAVVRNYGSILIEYAKCVPDGIVAFFPSYLYMESIVAAWHDMGILDEVWKYKLIFIETPDAPETSIALENYRRACDNGRGAILLSVARGKVSEGIDFDHNYGRAVIMFGVPYQYTESRILKARLEFLRDNFRIRENDFLTFDAMRHAAQCVGRVLRGKTDYGLMVFADKRFARADKRNKLPKWIAQYIKETHSNLSTDMAIVESKLFIRSMAQPYPEGKNGVSLWELADIESRQAKERETFAKLMRGQLTVDASGQVVGKDDTDSDTHVVERDRQDEDDDFDREFGEGDELVQMDVDSVIQQA

SEQ ID NO: 32132 - protein, 266 aa, Ustilago maydis 521
MSAEAGPSNLVEVTSPEHFTEIMQKDLTRISLLNFHAPWAEPCKQMNEVVREIAIKYPQVLCLEIEAESLPDVSESFDIEAVPSFVLLRGHTLLSRISGANASALSAAVATHAASARSNGTGSVSKTSAAPRAASDVYDASSSKRNGASTYADEEDEENVVPETEEEIFARCKKLMEQSKVMLFMKGDPDTPRCGFSQKTVNLLRQEKVDFGHYDILKDENVRQGLKKLNEWPTFPQIIVNGELIGGLDILKESIESGEFQEMLHA

SEQ ID NO: 32133 - protein, 484 aa, Ustilago maydis 521
MGQTLSEPVVKKTTSSGGNDSVLYAISEMQGWRISMEDSHTTILDIKNEDGDIVGNFFGVFDGHGGATVAQYCGRNLHNTLLSEDKFKQGDYTEALQQTFLDVDEELKKDPNYTSDPSGCTAVTAFIKTTAKDPKRVEKIFVANAGDSRCVLSQAGNCIEMSNDHKPTLDSERERIEYAGGYVSWGRVNGNLALSRAIGDFEFKRTFDLPVERQIVTAFPEVLDREVLEAEDEFLVLACDGIWDCLSSVKVVDIVRRSIANGKELADICEDLMDRCLAPDSDTGGIGCDNMTVCIVALLNGRSKDEWYSWIKDNIEVPKFGRTTPKEVPPVFSNTQTSTRGQETGMEGAVSIQSLLSGGLARGENGEQGAAGALQLPGGLAGALSGAGIVFRPGGRSDEGEVVYEAHVVDEEDSGDEQPDQSSSESAPKASTTEKATDGDAAEPRLVESPHTDAKPASSNQESDKMEVDDDTNTSAKSQDASNA

SEQ ID NO: 32134 - protein, 807 aa, Ustilago maydis 521
MVNEIDIARTSSHSSSGAKSSSKDHAATPGIEELHNVEKNLKNDFLDHRINDPNMETEKIDAVERVIEQGDYKAEAQIEEELEEDSPYPEVRAAVSNIDDPTMPVMTFRAWTLGLLFTIVIPGVNQLLSYRYPTTTITSFVAQLLAYPMGVFMAKVLPTKVFKTPFGSFTLNPGPFNVKEHTIITVMSNVTYQRAYASNVSAVQRITYGFDWGFGYIILLTLSSQLIGFSMAGFFRRWLVWPAAMIWPGNLGNTALFSALHRQVDTGSNHMSRYKFFMIAVSCAFAWYFVPGYLFALMSVGNWFCLIAPNNVPLNQILGTQQGLGLIPLTFDWNQYSYNGNPIYTPWWAQANVLGGFLFCYCFIAPILYYKNVWNFAYLPFSTSGVYDRFGKKFKTSKVTTPDHLHFNPAGYNAYSEQYFSVTYAVSFALSFASITAIVVHVALFHGKQIYKQFTTSINAERDVHARLMQRYPEVPKLWYAILFLICFGMGVGCTAGYATDFPVWAFIISLIIGAFFMLPVGIVYAISNVEVGLNVISEFIIGYMHPGSATGMMMFKVFCYMAVYQGLSFTGDMKLGHYMKVPPRDMFIAQVTAIVVSSFVVLGVQSWVFSNIKNVCTPEAADNFTCNYLIVFGTASQIWGLIGPGAVFSPGKQYGKLLWMFLAGAIFPVIVWALTKKFPRSFIRKVNSPVIFTGTGLMPPATGINFTAWAMCGFVFNYILKKYRTGWWTRYNYVLGAALDTGTAISAVIIFFCLIFPSGKQSDFASDGWWGNTAPYNTADGELASYLTAPETGFAPAPADFRPYMA

SEQ ID NO: 32135 - protein, 905 aa, Ustilago maydis 521
MAPKRALLSLQPLLAVRYGTRKLFLSGTVRPLTYSPLRKSDNYKFDESLAPPPSIKSSSSSVGSSSSGPRLSVTSTRIDQHEPCDSTLARTIFVRTKDGKHLVSVVHTLSLLSQLASKFGPIQHFHFPREPSSQRLLGYGSVTFFDKQSLQKALSNDGIHTVILPPIVPSRAPRSYLSDKEHARLVGMQPLVSCQAPSEHASASQTHLSSRSLQNPAAMRPGWNDVAPLCNMQAATGSRYFVDQSEATDETPQDAIIAHNSDFYLSTSHVPVEIKMERRTSSLTTRPGAIATARLSGNAHRASLHVKVRDALRQFGGFSNIVQEQRLLDESLDYSYDERDARPRPAARSHARRQHTKANPQWRANRSAPSSSSRNLFTSAALPSAEQTKAKRKAEWQRNRHSSFVDQLYLRLTAGKGGDGCVSFHREKFVQFGPPSGGNGGSGGSIYIRAVDGPTTLARISRRFRGADGPHGQGSFLHGKKMEDKFIEVPVGTVVTATRRLRIPEEEEAEEYYHDLLKRAAKAKWDPTGVVAKDDVVLAAEEEERRRLACTKQPPLELEYDIDEATAEEATHKQTATVAKANKLEEDEIDGEDLLDPEAARQLQTLRDRVWRHYPRAEETNYRRNEFRAAEMRLALDRRRRRRYLAQSQAASNAASGLVTVSVASSADQPSAASVTPYEDETPSSVPWRVDLNEPTPADSPGILLASGGRGGLGNPTFLSSANRSPKFATRGEWGESLEVMLELKRPSDIGLVGLPNAGKSTILRAISASKAQVGHWRFTTLSPNLGVVRLGSDGNVIGVDDSEVQEGYGDDRAIYSKCASTGEACVDAEEEFRLVLSDIPGLIDGAADNRGLGHTFLRHIERCSLLAYVLDLTEPEPWRDLKVLHNELASYRNDLPTKARLLFQ

SEQ ID NO: 32136 - protein, 548 aa, Ustilago maydis 521
MSKSDLPQWGRVLVAGGIDWPTLGRKATKSGPPLTVNPDHPDLPAPHILRSVSNVRMKRVFSSHSSCHAVLLSVDGNAYIIGRNEQGQCGLPIRPIPASSKPSGPAVWDAYLLDHATDFSPALPTGANGQIVYAACGRSHTLLLTASGSVYSAGLNTSGQCGHPESQTVPIFTRIETAPFIKERDAIVAASCGLTFSMLLTQSGKVYTMGSSEKGQLGNGRTGEHFTSSNRLAFNTFSEPFLVKQLADKKIVHIACGQQHTIALDDQGFVYVWGFGGYGRLGLGSQQDQLVPTLVPQFARENVVMRAKAIYAGPTNSAVVDGQSMFWLAGKWKTSGDGSAGQGFMTFKYLPDMMGVKVTNVGLGGVTLLCTAIEEPSLSGDHGATMNICWGQNANCGELGLGEGKPRSATKPLRCETLDGIAIIDIAAAQNTTFYLARNMGERYGELPRWPEVVPSQEVCMVCGKEEGEGGDDNALLECEKCENPWHLHCLQPKLTEIPEGEWHCPNCQPPAPQTDTNGNSSNNSNNSNKRGNEDDDEQASQTKKRRA

SEQ ID NO: 32137 - protein, 821 aa, Ustilago maydis 521
MHGNTSHASSPGGVESDQSSRYTSARSRPRSRPRTHHQRGLGQDSDEDTTSIQMDEYELDHRPGGSSKRHVDNVKSADNEDEEDLEQGEDALMLGPASASASGLDEHGEAYELGRSKPKHRAGRRHVSTGSISDKYDPDDPMHLVSKAVPEHDDPTLPALTWRALLIGSFFCVIGAAIAQLFFYKSNSPSFSSYFVILISLPMGRWLANRLPERTIKVSRWSVQLNPGPFSIKEHMLVAIIASSGATSAYASDIINIQELFYHQHMNWLSSLTLLITTQVLGFGFAGMVTNLLVKPTSMIWPSTLVTTSLFHTLHDKQAPNNRARLRLFAFAFVAIYVYQFLPALLAPTLSSVAMLCLVDNKIPAFRFLSSGYHGLGFLNLTFDWNAAGMSGPFYQPWWAALNFYAGFAGMMYIAMPILYWGFNFWNAQSFPEILSAGLYNKEYKKFAVDTLLNKDNTLNAQAWETQKPMLLTPYFALSYGLGFATLTSTVTHVLLWHWKDIKKAASNDVHDDVHNRLMRAYQPVPRRWYATTFALTTAAAVMLVVLTPALQLPVWALLLAIVMGLLFIAPLGILRAVSDTGVGLNIISEFVIGYIMPGNPIGNILFKTMAYMSLNQALDLVNDLKLGHYIKIPPKHMFVAQLWGTMIGCVVNLTVVNIVLDPASGYRAFLDGTVEDPSGQWDGRKVHIFFSASVIWGLVGPAEFFSGDYRKLYSGFLFGALLPLIPYFLHRRYKLKWLPKVAFPIILHSAALPPAVPTNVIMTGFFFSWLSQKHLREKHPVWFEKFNYVLSAALDAGSSVNALTIFVLTISLLNQSASGC

SEQ ID NO: 32138 - protein, 610 aa, Ustilago maydis 521
MVRIMKSLGFLSCLAALLSSNVTAAARIDSANRQIKMAVGARTNGSWDSAPAPAPAPARPGSYLETQDGYAASTSTATGSSAQAQIDGVLTTSSGIGGPARIELPLDAISSAAFGSADVEQIIASANGEFTVLSHRDFPSVSVRIKQLYSPRPASQLREHEVDPDAFCDPTVTSWSGYIDTAYGGKSLWFYFFESRSNPAKDPVILWTNGGPGCSSSLGLFMELGPCRVPERGGKLTPGPPINGTKWHAQSWTNRANVFFIDQPVGVGYSYSKTDQKVYTTEEAAKDVYAFLRVFFSAFDRFKKNEFYMAGESYGGRYIPIFASEVADRNHDVERKALKAGKQVDHDQLINLKGVLIGNGLTDVSKQISGYYDMTCTRRGGVEPILSIETCKRMHTYVPVCREQLGKHCVESYNPDLCDLWLAKCSDEIEAPYFYTGQNPYNIKDDCKSGLEPNLCYDVTDDIRKYLDRDDVRELVGAASKDQIGKFASCNNDVASGFSRMLDMAHDNGFNVAGLLERGIKALVYVGTLDWICNFNGNFEWVKTLDWSGSQSFSEAKNYEWVVDGEKAGRTQSGGGLTWVTVYEAGHMVPYDQPDAALAMLNRWIDGQDL

SEQ ID NO: 32139 - protein, 426 aa, Ustilago maydis 521
MPGQTGKVLLAYSGGLDTSTILAWLIDEGYDVIAFMADVGQEEDFEAARSKALKCGAKDFILADLRREFIEELIFPAVQANAIYEDVYLLGTSLARPVIARGMIEAAEKTGCQFVSHGCTGKGNDQVRFELAFYGLKPDIKVIAPWRIPEFFNRFAGRSALLEYAESKGIPVTQTKAKPWSTDENLFHISYEAGILEDPNTTPPADMWKLTKSPESAPDTPERIVIEFKQGLPSKVKVLSTGKEHTDPVDVFLTLNALARANGIGRIDIVENRFIGVKSRGCYESPGATILRAAHLDLEGLTLDREVRRIRDQVITQKFSEQLYYGFFFSPECEFVRSCIPQSQKTVNGQVKVALYKGNVIIEGRSSEELLYDEKFTSMDEQGGFDSAATSGFITVQAIRLRRYGLGLSEKGQGGSDRETAYAIRK

SEQ ID NO: 32140 - protein, 102 aa, Ustilago maydis 521
MAAKQAAEKLISEHLVAVFSKSYCPYCSQAKSVIEKLGLDKSKVGILELDQMGSEGSDIQAYLLDKTSQRTVPNIFINQKHLGGCSDLLDAQKSGKLQQLLQ

SEQ ID NO: 32141 - protein, 1362 aa, Ustilago maydis 521
MNPSYTERRASAHPTMSSSAHHASSTPSAASIDPTTSHAISSGIPITSPAALSYFAAHPRRQQVHFGNYLLLQTLGEGEFGKVKLGVHKEWGEEVAVKLIKRDKVANDAAPLHLDDSAQKDPAKMSKVEREIQVLKDVRHPNIVRLYEVIESDRYIGIVLEYASGGELFDHILAHKYLKEEHACRLFAQLISGVSYLHHKKIVHRDLKLENLLLDRNRNVIITDFGFANNFEHKRNDLMATSCGSPCYAAPELVVQDGLYAGSAVDVWSCGVILYAMLAGYLPFDDDPANPDGDNINLLYKYILATPLSFPEYITAQPRDLLSKMLVPDPTRRATLEQVMQHSWLRHYRELFKFSVDDLERAAMEQQTKKRQMYRQQMMYQQQLQEQQRRQQMERSQSVRHNVSHLPVGTAYTANTAVSAVSAANVAHRQTLPISATVPDRLYEPIGSASRGADHSVTPQRAPTASSHQPPVAPTASADAAIAPLPRASTHNNVAAAADAAAAVAAAPSPVDPVTALGNARGEPRTRLDDAVPTIAAAYETEPRQLAAQKVQRHTIQLEYGGDERPRKESAPGSRQASQTQRNASASSTSSKLAEIERTKTAADKPAANANAIVPPSVLQSTSVQVPATSVVVPESEKANISKAGAPDMMRSVSASAASRVSVPPPIMEQTQPSVSAHRSTQPTSSSRVRAPSSASRNNADSGSTGHATRIPTSASQRVVSTSSAASEPVGFPSSATERTIPSADADAAAGRISASRRASNGAEITEPSHRSPSATRHATADNAPVTSASASARHRKGMSTDKFFLSRLLGSNSANQPNGAGVAGDKVSANGSDAAGDKTKRDSMNRPAPERAPSSSSTGKNGRRKAMSLVVGHASGEASSAAADRNRALKAGMPHSATRATFGTQVSGKADDSVSSAQKQRKGSASLASQTTSTSRAAQSSTRPQPLQPSLQQQQQQQDKAFNDGSTIASSSTAGPSSNAAKKVMDWFRKKSLSRGTFNEQPPLGLFERSPTSSYMHGSASQTPSVIVTSAPNGTSRHAEAPSGGSSVPSSRSTSGTHSENSEATEMTQLTNLSDASHQEGDGLKSSASTVQQQATPKASLSAVSNVSDASAAGSLVSTRSQQQQRPQPRVATATSASTTPARFNEARLRYHLGAVDQSALTSRSPIEVLKEVQRVLYEMGIDVRTEKDEDFKLECVRRKRAKTLMSATHGFGMSIRSSVFPPTQADVERSSRMSHRDSLTPSASSPGGGSLRSFLKRSSLQPGATSPKMGSSTLPSSATVTSNLGGAVHDENQPPPLYGDASVDGGQEIRFSVEVTRIKNLTGLYSLDIRRMKGNLWAYKFVYQALLDRCQLGSSTAAVG

SEQ ID NO: 32142 - protein, 857 aa, Ustilago maydis 521
MPPKVDVNDPENARLLKLFESLNLTGNRAIETLTNPKHVAAIESVIAHNHLTNKQIDPKASALIISASTAKDASNQPARDYIVSRILDASLTSSDQVNAAYKYLSSLNSEPDKAAFDKECGVGVVVTPQQSRKAVDDYIASHRSELDPVDGWPKLGSILSGVKASPDMRWANAVDLKDAVDAALLATYGPKKPPPPKEKKKPSASTSAHPKKEAAPAGPVDPDAMFKEGFLASLHKPGENPQIKPELKQQHLAATKGMVMTRFPPEPNGFLHIGHSKAIAVNFGFARFHRGLCYLRYDDTNPEAEEEKYFTSILETVRWLGFEPFKVTYSSDYFQQLYQLAVELIKRGKAYVDHSTPEEIKEQRGGPERGPRKPSRFRDRPVQESLQDFEDMKNGKYAPGKVTLRMKQDIENGNPQMWDLIAYRVLEASHHRTGKDWCIYPTYDFTHCLVDSFENISHSLCTTEFILSRESYEWLCDALEVYKPRQSEYGRLALQGTVMSKRKILKLVKERYIEDWDDPRMFTLIALRRRGVPPGAILSFVSALGVTTAKSTIQISRFDQAVRQYLELSTPRLMMVLNPLKVTIENLPDDHFQEIEKPLHPKAPEMGTNKIPFTRTVYIDSSDFRTEDSKDYFRLAPGKTVGLLQVPFPITCQSFKTNDQGVPIEVIATYGDTSSAKPKTYIQWVAEHAPSQSPVKVDETRIFHQLFTSDDPAAEENFLDHVNPDSLEIVRGAMVEVGFWDVAKRSVEHARKEAAQRTERAEADAAKARSETETSATEGAGAGAPQRTADQLVGKELVRFQGMRTAYFALDRLSGDLGLFGDKQKGGKIVLNRIVSLKEDAKKDDKAVASPVAKKAK

SEQ ID NO: 32143 - protein, 539 aa, Ustilago maydis 521
MPPRIADDEYIDDGAGAYDAEDFLDDDDSGDEYRAAPSLPKLGTLRGAGAGGASRSSAAASNGRAGTLAAGSSASSSGTARAKAAANAKSKQKDQGYSWEATYKRSWDAVAEDDSGSLESTVRSMIEGSKRRRVLKDVAPVQRGIIRHLVLLIDLSASMLEKDMRPNRFDVTLQYAREFVGEYFDQNPIGQLSIIGTRSGIAERLAMMGGNTVDHTASLSNKRRLEPRGEPSLQNALEMARSSLVHLPASNSREILAIFGSLTTCDPGNIHDTIATLVKDNIRVSIVHLAAEVKVFKDVCTRTGGTFSVALNEGHFHDSLFELVPPPAVEGKPRRTRQHMVGIADGSTAMDAEDDDEDGVQAGVDLLQMAFPLRLPAHAAPTLCACHSRSRGSGYLCPRCGVKVCNVPTDCPVCGITIVMSTHLARSYHHLFPVPNWKAVPWSSVTPDSDGACFSCNVPFPSLQERKEKSAAANKALEEAGLSPSSRYRCGRCAIDFCLECDAFVHEQLHEPSDSFVCANKKLTIRTVTQEVASRCTYG

SEQ ID NO: 32144 - protein, 1763 aa, Ustilago maydis 521
MASWQQVSEAKRAQREALIPDAYKVAASWLPAISTDSVVDFPRTAGILTEREIEITETDDVSALLAKLASSEYTAVEVLEAFIKRTCIAHQLVNPVTEIHFEDARKLAAELDTELKATGKVRGPLHGLPISVKDQFQIKGSDSTIGYISYANKPSTSDSVLVQILKKAGAVPFVKTNLPQTIMYSETSNSLWGTTLNPHNRTLHPGGSSGGEGALVAIKGSPLGVGTDVGGSVRIPAALCGVFGLRPCSHRFPYEGVVNTLLGQITIPSVIGPLSRSLSGVIEFSKAVLAQQPWLLDPQTPSMPWNEERFQQARTQKKLNIGVMWHDGHIKPMPPYERAIKELLSSLGDHDAIDFEPYKTQEAMKILVEAFCADGGKDISESIAPLNEPLGPCLSGIGQTEYSAFEVWQANRRKLAFQKEYLDHWNATSKQTKDGRPIDLLIVPGMAYTAIAPGNDIYVAYTGIFNLVDYPAVVLPITKVDPAIDGKLTRGGEFLSDDDERWSQKWDAEKLVNAPVSVQVVGRRYEEEAVLGYAEQLWATFTAASTKVLDLTSTNAGHSHRLTARGSQGPPRTGHGCFSHNRWKPMREGAQTQTDAAGRSNGHRGEQAFAILRINDRARAAEVIGTLMVTKGESDEAKRARISRKLARESDSRLRVQESDGEREREREYASLGEIPLCIFQSHLWSLSHTAPSLHPHVSVLGFCVGSIVRAFARYHPSAPLSLIAAEVCLPHSFPTSEPLLNLIQPQRYPVSTLHQRRAVAAVVSSDLKQIAHSRSEETCIQLSISKHTAHSFHKPSQQQAILTATIGFKMTAVSRYADLPPSTPALRRSLRHGASVPNQTPSDRANATISDSPLPPAPVSHFLGEDESESEAPAPLTSTTSYAHSNINTAHPRARSYRISAEAQRETHSDPYDDSPGTGRRAVPMASTQRDELQHLRASSVFREVQTQESLSRSSPFASSAPFQHDEVHSKSSPPLRSAKAALHAAASPLYDGAELRLSTALSNRRRSNEKPNEEEEKKVRYAPIEERASAKRDTPDDAVSRAAASTAAASSNVQISTGYRTPAMAGRALRSNATSAAPTTAQRSAARSLRTLTRSSNRHPPARRVVRRYSDDEDDDLEEEGGAHANDKEAQSNSPERDHERLSRHNQDGSSNSGSGSGSGYGSGPGAVPGAAEAIERPDKRFLPYGYDAEKEKIRAEMMERASLVRSPGPVASRSRDDASPEAQDQDYDMQPPPPPRRNEAHPFARRAALEQANGSIHPTRGQAEAIHNFLASNIAAPVDPMAHRRMVAPSANDLRASQRAAANHEGVLKSSTPMASTSAAATQVTHENENEPAEEEACRLYSEIRHEAIWAETTRQMQKPLSQQERFMKEIAGSTRCVKLPGFKFRRKQLTKGGFSTVHVLRGPACEKVRNPETQTIDEMAVPEEQQAFFALKQVDLKQIESEQDKLDLIAEANLLRTLSDLQGSEMYLLRYFGHHVTVDKNGVPDKLRILIELGEGDFGTLLAQQAPLPREAIAHYFREMLEAVHFIHEANLVHADLKPANFLMVDNRIKLIDFGISKKIPKGTVHISRDNIIGTPNYMAPEAIKIARAKGRRVYKAGKPSDVWSLGCILYQMIWGRPPFDRVPANRKLEAIVDANHEIIWNRFRDPRYPDRMEVDDELLDCVQSALRYGSEERATIPQLLRHPFLRKYAGEGEMMEEEEGEVVDLNEEVTISRKTLRSLVARIRSLALQQELTEENVVERADLLFLNLQQAQQQHEQQ

SEQ ID NO: 32145 - protein, 364 aa, Ustilago maydis 521
MASSNPQTVPCAYKTGRTLGQGTYAVVKEAVHIKTGQYYACKVISKKLMEGREHMVRNEIQALKRVSQGHRSIVTLVDYFETMNNLYLVTDLCVGGELFDRICERGNYYEKDAAHIVRTIVDAVVYLHDQGIVHRDLKPENLLFRDKTEESDLLIADFGLSRVVDDEKITVLSTTCGTPGYMAPEIFKKTGHGKPVDMWAIGVITYFLLCGYTPFDRDTTMEEMQAIINADYRFEPTQYWEDVSEDAKDFINKLLTIDPAKRLSAKEALQHRWLQEAAPTEGGAQPVASAEQKDLLPDIKSAFNAKRTFRKAVNGIRLINRLRTNEQQPNKEEIEKLRQTIREAEDESSNLDQVLLAQETRAAN

SEQ ID NO: 32146 - protein, 1647 aa, Ustilago maydis 521
MSQPGARRAYHHGSQRGGSTINQKAALASAYQELGKELSSSKLKIVGNYTLQRPIGEGTFGKVRLGLHRLTNTRVAIKQIPKAHSASLTREIHHHRRLHHPNVMQLYEVIATEQYIWMVSELCAGGELYDYLVENQVLAEPEARRIFGQLCLAVAYVHSKGIVHRDLKLENILLDERCNVKLGDFGFTREFERNRLMDTFCGTTGYASPEMLAGKKYTGEQVDIWSLGVILYALLCGALPFDDDDEAVMKQKILQGDFEIPDCLSEEAHDLVVSILQHDPAKRPSIQSILAHPWFTKMMVNSPMSTLEEDQIATDYFASKPSASTSQSKQHDRFPPTLHKALAELDTATELDTADATSAAPPTNPADAFDFEDHDSSNSCHRHHLSASSEQSYHSARSDSESSGRRSTNTDLTDPTTADSLSGTDEVEGLDQAIVQLNASSRPSALANATAAASHPDKNAIGLHRNERLGSNGSDASLSGVPRPSTKTNTASLPTHHELPPVPDGTGQDDHLSIYQSVPLTKRGSQSSSRGHHRTPSRTKRRSLSSGGLSDHHPPMLGRKPVDYVSQLADLQPATFSTSIEQNLLHQLSALGLDVGQMVHSVVTDACDASGATWWMLLRKSKDRHSEQPDITSPIVQVIPAPGDHPAPINASAFSKAGQTVTPSSPAQFSPPPVPVKDPARRSEDKFRTQERPTTLEASSSENAGLAEQSIRRLQTVVSHEELDVSAAPALHTSTSELMMATKPATDRQSSVPASGPMPLAGLPASTVSLPNDRSLTSTPDSVSSRPKSQHRHTTAVASPAKLQHVALTTLEGSPTSEGSKARGNSQNDRPRSNSLSVRQFAQSVLGTKDRGSATSSPVRPPPEQVVVAGEALPLERAKSPTLFGRRNTVSNVKDSMVGRLSGPSTPKKTPVDMLDKPRKSTGKKSCETDLDRVKALERSADSASSSPSRSTTGQAVGVVSNAKVDSSVPSASQDSFSTMSVTPQGSEKSGHRGKAGSFFMSTVRTWLGGNEKPTRKSKTGKQASASHRGLGIDDGPMAAKSPTNSLSTSGSVSTLTYGTPSRSASVRRRSAHYQQTSATRRGGPRSPHLGTSSRRSSNGSSYQAHLELPPNSFQQSMNRPANMRRMSAGSITPTATLHGDYLNDVGGVSGASRHSRPSSSHSLAHSGAASRPGLHGKAGSTGSTSSAYRPGQASSVYSTGSGRRHPRPSQDGGTTVRRHRTYASSSGSPSRRNSFRHDSRPSSIKSRASSPGRAMSGLGELWAADAEADGDGGGTGARRSTRSTPRHSLEMRKTGEAFDSAAPHHQHHQHVVAQSIFVAHKSRSPYRPPSANPNLHGSLVRGSSQLSGRSNVSANSEDAGYVAPNSTLGLPATGTGAWRHSWGRPPPCWAGPVDPPPTSSYSKRSGAAGVEDDGRPKLRDVFANRDDDDWTDEEEEQTYSGGLGQMGTLSSAMSSSVGRVGSGIGASSSPYATRNLAALGSSGYSTQRAVNLDTANAPEIGLREAPFSSRYAGVRNMFQTATAGTPAFGSRSHHSVSLSLGNEFAPRLLSTTIHSPTVSAASLGGGLGCIGESADAHSVTVSSKPKPESSGTQTQAQQQQSSASASASASASQQQQSGGGSSGSGSRITASFHKPVQIIEEEEEDE

SEQ ID NO: 32147 - protein, 750 aa, Ustilago maydis 521
MPSLVSSPGTSTMQTDNVHEPSSAFATPPTQSTSSFASGSNTPSHQIRLNGQSSGIGESPAPHSSRPYHSSSHASQSNGAGTGKDKKWKQMFKFGSIGRKASGNASNDRSWHTDSAESSMHKNGDYFEHVQYTGSQPGSTSFQPISGSTVVNDPASFSNDSYSSEDRNASGSIGDAMTTSASSKLQPPADISDTDSSHPRFTSRLMRRVSSAPDTNKLFKNGQNATQKPNEAASSTKNGYLSPDGAGGQHAQFVSEGGAPFTPSKELANAAFFSNSPVRMDSNATSFSYKDFEKGRSVSAKGSSTPKSGRIVFPGTGRSKSSNGKDKKSQLPPPSSSANLAALAGTASVNRGPGSFRRTYSSNSIKVKEVEVGPNSFSKVKMLGKGDVGKVYLVREKKTDKLYAMKVLSKKEMIKRNKIKRVMAEQEILAASNHPFIVTLYHSFQSEDYLYLCMEYCMGGEFFRALQTRPGKCLPEEDAKFYAAEVIAALEYLHLMGFIYRDLKPENILLHQSGHVMLSDFDLSARATQRGGAPAMIRQATPNSAPLVDTRSCIADLRTNSFVGTEEYIAPEVIKGCGHTSAVDWWTLGILIYEMIFATTPFKGSTRNETFSNVLRNEVQFPDSIPISSFGKSLIRKLLIKDELKRMGSQSGASEVKQHKWFSNISWGLLRNSTPPIVPAYSNGVDAVNFRNVRESRSLNLDDQGNDTRAKPAVIKAVAGQKNVGDEEGDAVVSNPFSGFSSVTLKHDDY

SEQ ID NO: 32148 - protein, 515 aa, Ustilago maydis 521
MASSLRSSTPSRLALRALTRHDATQACAISTNIKVASTSSTSSSSASRVESRGYASPSAPASMATPIEVAQPDIRAGVGSKQGSGKSLLNDILLAAPKHSTANRPIYLDAQSTTPVDPRVVDKMMPYMTNQYGNPHSRTHAYGWESEKGVEEGREHIASLIGADPKEIIFTSGATESNNMAIKGVAHFYKSKKNHIITTQTEHKCVLDSCRRLQEEGFEVTYLPVQSNGLIDLKQLEEALRPTTALVSIMTVNNEIGVIQPIKEIGQLLKTKGAELSKQGGRGASKPFFHTDAAQAAGKIRLDVNELGIDLMSLSSHKLYGPMGIGACYIRRRPRVRLEPIINGGGQERGLRSGTLAPPLIAGFGEAARLAKQELAYDHAHISKLSQRLRNHLEANMTHVLFNGDQNGYPGCLNLTFQYVEGESLLMALKDICLSSGSACTSASLEPSYVLRALGLNDENAHSSLRFGIGRFTTEEEVDYVADKIIKVVNKLRDMSPLWEMVQEGVDLSEVQWSG

SEQ ID NO: 32149 - protein, 93 aa, Ustilago maydis 521
MAESDNAQPKPEGGEQLNIKVKDADGNEVFFKVKRTTKLSKLKKAYAERMGKPENSVRFIFDGQRIGDNDTAETLGMEDQDEIDAMIEQLGGC

SEQ ID NO: 32150 - protein, 897 aa, Ustilago maydis 521
MASQLHQEAKPSLRQRGTNALKWTIGYNDTEMKRLGVPVVSSRDWLANIFNHPGSKAADYFDSLFPFRKWIASYNTQWLIGDVIAGITVALVVVPQSMSYAKLAGLKPEFGLYSSFVGVMVYAIFATSKDVTIGPVAVMSLQTFNVIQHVMNKTNAWSAEVIATALAFLCGVICLGIGLLRIGFIIEFIPTPAVAGFMTGSAFQIAAGQVPKLLGLSKVNTNGNPAYQIVIDTLKALPHTNINAAFGLPALFFLYFVKWLCGWLPTRYPRTARTMFFVSVLRNAFVIIVFTVASRIWLGHYKNPKQYPISVLLTVPRGFKHIGQPVLNTTLLSDLAPQLPVSVVVLLLEHIAIAKSFGRLNNYKINPNQELIAIGVTNLVGPCFGAYAATGSFSRTAIKSKSGVRTPLAGWFTGILVLIAIYALSGTFYWIPNAVLSAVIIHAVTDLLVPFSVSYKFWLISPFELIIFLGAVFATVFSNTENGVYVSVAASLALLLIRIARPRGRWLGLVRVHHGTTSPHSSAVTLSHRDVFVPLDDKDGLRDPSIHVEPPPPGVLIYRFEEAFTYPNASHLADLLIDRVKEQTRPGKPTSNSRLGDRPWNDPGAPNPALVKAFRAATCRGRKNDLNDADVAAHVVDRRPILRAMIFDFSSVSNVDTTSVQTLVDVRTAVERYADAKVEFHFANILSPWIRRGLLAGGFGLGFPSKRITEIAPVVSQPQNITLSADELRAREQAEAERRAKAIERMSHKSANEGSAYPFQGRPNKQLTELEAGLAGDGAVASRSRVDLHDDDDETDQIRKVTIGEALYDVHTLDQRNGEASSSNDNTPSRDSVEKNLEEGNYPAGRRPSEPASIGIPFIWGNDLTPFFHLDLSAALAAATEGLGEDSQLSSSIDNKL

SEQ ID NO: 32151 - protein, 797 aa, Ustilago maydis 521
MSTAAPSPSDVRAEPRASIDELTQLPILDEIDAKTDALRSEKASSSPSLDDSEKVEISNSKYVNQESAEEHVRSQKDSEPVIRNGRDVSDVLISDRDDGDACFTFRSITLGLVGAAFQSVLTQIYRFKPTEVSINGTFLAIIIYILGTAWARFLPTRKLLVTKLGEDRLPAWLLTTVHFINPGSFGLKEHAIASITASSASNGAHSSDVFGTQKLFYPDIPVTTTTAVLSVLSIGLFGYGLAGIFRPIIVYPAEMVYWGTLPLVDLFQAFHWDKSFSTKRVKMFWYSFAGMGLYEILPAYIFPTLNSFSIPCLASRHATGSLAQTLTNVFGGAQSNEGMGLLSLSLDWQYITSSQLSLPLIQQANSWIGYAICYIAMAAIYYGNVWSAKSFPFMSTSIFADNGKRYNQSAVFVGGILDKSKLEEVGYPNVTGTYAWGMLMRNAAIGALVTHVVLFWGKDVIKSLGQARDKTQPDRHYQAMRKYKEAPHWWYLLLLAISFVFGLVVVLTQQTTLTWYSYVVSLALGTIVAPFSGVLYALLGNGISTNNLTKMIGGVVSPGRPLANLYFYAWSHSTIAQVINLSNDLKMGQYLKIPPRAMFVTQVIGTVFGAFLNYAIASTIISSKFELLHTNTGSYVWSGAYYQSLNISAVTWSMAKFMYGPGTPYFIIPMAVLIGIGAVVVHWVFTRFVPRIGQVKTSSLVLPTVFLYSAWMTSGQNCVILSTILVGLISQAWIRTRYPRWFKEYNYIVGAGWDGGSLLVIFVLSFAVFGAAGKERPFPTWAGNPDGFPDYCPNPSS

SEQ ID NO: 32152 - protein, 1470 aa, Ustilago maydis 521
MGALSAATTLSTPPQAAPASVTVPAPAPAPAPAPAQQLHDQIIHLEPQPDSAAKSAHQVILSDPQPAHALDDDNDDNDDNLEAQQQSVAHDPEPSPSAHPHQAQPQSHHLQIAIEPTPRRQHTSTCHRTSEKIDIGSTDSTRSSSDARQSDQSTTKPRRTKRKSKHPDDDATVDRVGFRELYRYATVWDHIFNLIGLIAAAAAGAVQPLMTIVFGSLTTAFLEYSNALLFNGDILTARDHLDHEIVHGVLFLVYIGIAMLVATYVYMAAWVYTGEVITRRTREKYLEAILRQDIAYFDLVGAGEITTRIQTDIQLIQEGISDKIPMSVMFISAFVTGFIVAYVKSWQLALALSSMIPCIIIAGALMNAVTAKLQQAELDRVSKAASIAEEALATLRTAKAFGIEHDLVQLYDQSNRQATRFGIKRSLYQGIGMGVFFFVIYSGYALAFYFGAKLLASGHIASGTVMNVIFSILIGAFSMAMMAPNMQALSYAFAAGAKVFETIDRVPPIDSSDPSGLRPEACQGHLEFHQIDFSYPTRPDVPVLEAFSLQVPAGKVTALVGASGSGKSTIVSLVERFYDPDAGAVLLDCVDVRDLNLKWLRTQIGLVSQEPTLFSTTIRANIAHGLINTPFQHASEQEQQKLIIDAANMANAHGFISQLPNGYDTMVGERGFLLSGGQKQRIAIARAIVKNPSILLLDEATSALDTQSEAVVQDALEQASQNRTTITIAHRLSTIKNADKIVVMGKGVILETGQHNELLELNGAYAQLVDAQNIRAKVGNKIVEEGVIDDDDDDDDQQAAQPAKFVASNAKVPLAVTDDAKAAVRQEAKAEMPAGLEKSVTHQSVASAILHQRQREQATRDEEPEKIPSIFYLLYRLAKINRDHVFTLYVPGVIASICSGAAYPCFSLLFGHALQNFSLCSAIGGGACPEPARSTMLHDANLWALYFFVIAILCTLAISIQTYTLMKASCVLMERMRRMSLFAYLRADVSYHDQDAHSSGALSNSLADNSQKINGLVGVTLGTIIQSISTLVTGAIIALANGWKLSLVVIACIPLTLSAGFVRLHLVVLKDARLKTAYEGSAAKACEAAGAMRVVASLTREQDCLEIYRRELDAPSRISRNTAFYGNFLYAVSQALQFWIIGLGFWYGSKLLISGEYTSGQYFTILTAVVFGSIQASNAFSFVPDISNAKTAAWDSIKLLDMVPEIDVTSDQGEVLDKVEGHVRLDKVHFRYPTRPTVKVLRGVDIEVKPGTFVALVGASGCGKSTTVQLMQRFYDPLSGRVLIDGKDIRTLNLAEIRKHMALVSQEPTLYDGSIEFNIRLGAFQDASSVSMDDLRAAAASANILAFIESLPDKWDTQVGAKGTQLSGGQKQRIAIARALIRNPRILLLDEATSALDSDSEKLVQEALDKAAAGRTTIAIAHRLSTISRADLIYVLKDGKVHEHGSHIDLLNRNGVYADLVRMQHLHAHD

SEQ ID NO: 32153 - protein, 425 aa, Ustilago maydis 521
MPFHNPLAKQPDSYVKKKEYDFKKTLGEGTFGIVRQATWKAADPPINVAVKVISKRILRGHDEIVKDEMNVLKGLDQPHVVKFLDWFESKDKYYLVFEEATGGELFERILSRGRFTELDACRTIRAVLSAIQYLHHHNIVHRDIKPENILYRTKAEDANVVLVDFGIAAHMKDDNEVLTSVCGSFGYAAPEILAKKGHGKAVDMWSLGVITYTMLCGYTPFRSDDAAALAAETQRGKVEFHDRYWKNVSNEAKDFVKACLTVDPKKRLTADQGMSHPWLTEHSEETQGVHDISAGLRENYRKRWKSAIAAVRASTKFRTFAQLASESRSGSQASLQTSDSSTAFADDPGKISPPTKRELYSESEDEQDGEDNQWFDTEDGSAARGNDATLADAASSQSENEPGWVEKLENKLDDLHLHSSSKSSE

SEQ ID NO: 32154 - protein, 432 aa, Ustilago maydis 521
MASTAGGIKVFSGTSHPELAELIAKRLGQPLGKATVTRNESGESIVRIAESVREHDVYIINTSCVSPTPTGAAASPNTSLMELLIMIHACKTASAKRITAVIPHFFYARQDKKDKSRAPITAKLIANMLENAGCDHVITMDLHASQIQGFFDVPVDNLYAEPAALQYIREMVDVNKAVIVSPDAGGAKRATSLADRLELDFALFHKERKRANEVSRMVLVGNVEGKVAILVDDMADTCGTLELAASQLIEYGAERVLAIVTHGILSGPALDRISNSRLEKLIVTNTLPQSHNRSRCTKIEEIDISHVLAETIRRSHYGESVSVLFNQIPYDTAQPYRHEHDDEITAAAAVARTDATVAASTRTSRPQSRAISPSHSKLFPPSPYTLPDPPVAANYFAHHPTTPSPTSTAHPALDTPKASDPKYAPSPLSRNV

SEQ ID NO: 32155 - protein, 722 aa, Ustilago maydis 521
MASQLDLFVLGLGGLLAVLYLFRDSLFGGAKDTGSKLANGAPLAATDQGGADFVSKLKSQNKRIAIFYGSQTGTAEEYATKLAKEAKARFGTSSLVLDPEEYEFDKLDQMPQDTVAVFVMATYGEGEPTDNAVGLMEFIENESPEFSNGSERLENLNYVIFGLGNRTYEHFNAVARKLDARLQSLGAKRIGERGEGDDDKSMEEDYLAWKDSMFEALATSLNFEEGGGGDVPDFKVTELANHPDDKVYHGELSARALLGTKGIHDAKNPYNAVVKEARELFVQGTADRTCVHIEFDIDGSGISYQHGDHIAVWAHNPEPEVDRVLAVFGLLDKRTTVIDVESLDPTLAKVPFPVPTTYEAVFRHYIDITSHASRQTLNSFAKFAPSPDIQAKLEKVCANKDIFQAEIGSRLLKTTEAMQWIAGDDLQADVSSIKPWNVPFDRVISDLPRVGPRFYSISSSPKMHPKSVHITAVVLRYQANKSAPWVHGLATNLISSIKMAKNGEQPTGPSDPRYGTPKYLLDGPRGAYTKDGAFRAPIHIRRSNFRLPTSPKIPVIMVGPGTGVAPFRSFVQDRVCSAEKALEKSNGKSAQEALKDWGNLWLFYGCRKADEDFLYRDEWPQYAQKLGGKFIMETSLSREKFKPDGSKLYVQDLIWERRKQIAEDILERKAYIYICGEAKGMAHDVEAIFGKILEEAKGSAEEAKKEIKLLKERSRLLLDVWS

SEQ ID NO: 32156 - protein, 918 aa, Ustilago maydis 521
MSFEFTDRAQSSVSAALQLAKDHSHPQVSPVHIALALLTDDTSNSQGVQSTNESSQSLFKSICSKAGVDIKIFEDKLRTAVRKIPSQSPPPDDISLSNPALKVLKEAESQKSTQRDAYIAQDHILLGLIQDNTIKQLLKEAGLDNEQLIKTAITQARGGRHIDSKNAEAGYDALAKYCTDLTQLAAEGSLDPVIGRDQEIRRAVRVLSRRTKNNAVLIGSPGVGKTAIVEGLAQRVVDRDVPPNLLGKILSLDVGGLMAGAKYRGEYEERVKSVLADIEKMTADGTPCILFIDEMHLLMAGQGSSGGGMDAANLLKPMLARGKLRVIGCTTANEYRQYIEKDAALERRFQSILVNEPTVEDCIAILRGIRDKYEVHHGVRILDSAIVSAAQLAKRYLTDRRLPDSAIDLVDEACADVRVSRETVPEEVDKLERKRLQLEIAVHALSREKDAQSKQSLEETKKQIQAIDDELAPIKAAFEAQKAKGEEINTVRRKMEEVRAKIAEAERRYDLATASDLKFYALPDLEAKLNQLQAAERKREEEGLNSDNNAVTADSIAAIVSRWTGIPVSRMLESEKNKLLRLERTLAKEVIGQDEAVKSVAQAIRLSRSGLADANRPIASFLFAGSSGSGKTLLSRTLAKCMFDSADAMVRIDCSEFSEKHSISRLIGAPPGYVGHEEGGVLTEAVRRKPFSIVLLDEIEKAAREFIQLFLGVLDEGRLQDSQGRQVSFRNTIIIMTSNLGSAYINESEVEEMTDATRQLVMNSIKAAMPTEFVNRIDSIVVFSKLSRRNVKSIVDVRLREIEQRIQANGGKSKLVLDDAAKDFLVSIGFSPTMGARPLNRAIQQELLSPLSILILSGRINIKDDAEIRVQFDPHRNGLVVLPNHEGNANGVEDEPMSDDDDDLDDYGHAKIEEDPLD

SEQ ID NO: 32157 - protein, 92 aa, Solanum tuberosum
LLIVGRVVGDVLDPFTRSVDLRVVYNNKDVNNACVLKPSQVVMQPRVHIGGDDLRNFYTLIMVDPDAPSPSDPNLREYLHWLVTDIPATTGT

SEQ ID NO: 32158 - protein, 298 aa, Malus x domestica
MAAPTTPNEENEFRRGPWTLEEDNLLIHYIVNHGEGHWNSVAKLAGLKRTGKSCRLRWLNYLKPDIKRGNLTPQEQLMILELHSKWGNRWSKIAQHLPGRTGNEIKNYWRTRVQKQARQLNIESNSEQFLDAVRGFWVPTLLQKMEQSSSSCSSTLSTSQNSASPCLSPNHAAPSVPLSTSPPSNATNVLDNYHISGNSNLATVPSNILSADSFVSHVPQMAEPSTSFPPAYYRLGYSSLSPDGSHYVDSSSYDVEGLSLDPVSPMGNLGNSQFDCQMGGNDWMLDNVTDSLWNMDGP

SEQ ID NO: 32159 - protein, 367 aa, Malus x domestica
MGRAPCCDKNGLKKGPWTTEEDAMLVNYIQKHGPGNWRNLPKNAGLQRCGKSCRLRWTNYLRPDIKRGRFSFEEEETIIQLHSILGNKWSAIAARLPGRTDNEIKNYWNTHIRKRLLRMGIDPVTHAPRIDLLDLSSILSSYVCNNPAAALLNLSNLLNSTHQRQPLVNPEMLRLATSLLSIKQANPEMCSQNYNLHQNQISNSQEQNNQVLPPLQSNDQFQNLIQGGDFSADMAKHLMQQINVEGFSPNMTNLSCPLSQENIVPPNLSADHHQTAVSQANYVPCSTTSGNPGPDFPENSYFQSFNYNKNHDFSFDSVMSTPYSSPTPLNSSGTYINSSTEDEKESYCSSWLKFEIPESTLDISDIM

SEQ ID NO: 32160 - protein, 96 aa, Thermus thermophilus
  misc_feature (1)..(1): Xaa can be any naturally occurring amino acid
  unsure (1)..(96): unsure at all Xaa locations
XVTVDQDLLDAAGILPFEQVDIYDITNGARLTTYALPGERGSGVIGINGAAAHLVKPGDLVILVAYGVFDEEEARNLKPTVVLVDERNRILEVRKG

SEQ ID NO: 32161 - protein, 289 aa, Thermus thermophilus
  misc_feature (1)..(1): Xaa can be any naturally occurring amino acid
  misc_feature (12)..(12): Xaa can be any naturally occurring amino acid
  misc_feature (16)..(16): Xaa can be any naturally occurring amino acid
  misc_feature (131)..(131): Xaa can be any naturally occurring amino acid
  misc_feature (240)..(240): Xaa can be any naturally occurring amino acid
  misc_feature (262)..(262): Xaa can be any naturally occurring amino acid
  unsure (1)..(289): unsure at all Xaa locations
XEKVAFIGLGAXGYPXAGHLARRFPTLVWNRTFEKALRHQEEFGSEAVPLERVAEARVIFTCLPTTREVYEVAEALYPYLREGTYWVDATSGEPEASRRLAERLREKGVTYLDAPVSGGTSGAEAGTLTVXLGGPEEAVERVRPFLAYAKKVVHVGPVGAGHAVKAINNALLAVNLWAAGEGLLALVKQGVSAEKALEVINASSGRSNATENLIPQRVLTRAFPKTFALGLLVKDLGIAXGVLDGEKAPSPLLRLAREVYEXAKRELGPDADHVEALRLLERWGGVEIR

SEQ ID NO: 32162 - protein, 97 aa, Tuber borchii
MSADPTNEPKPEEPASEHLNIKVTDGNNEVFFKIKRTTQLKKLMDAFCDRQGKSPNSVRFLFDGTRVQGGDSPESLDMQDGDTLEVHQEQIGGGSSF

SEQ ID NO: 32163 - protein, 183 aa, Chlamydomonas reinhardtii
MAMPPAAPSSWSTGFCDCCAPPGGFGICLYAWCCGCCMYGTTVEMMPPVVCCGGSCVGACCAYLGMTFIGCPCILQMMSRGWLRAKYGIPGDGCTDCCLTCWCSPCAMCQEYRECKIRGLGPGGVELNKQQPAVAPQQQMVAVPAPYPYPPGQQYPPQQGYPPQQGYPPQQAYPPQQAYLPQQ

SEQ ID NO: 32164 - protein, 151 aa, Chlamydomonas reinhardtii
MAMPPPAQNSWSTGMCDWCAPPGGCGICLLACLCPCCMYGKYGELMPPTVCCGGSCGGSCCAMYGLSILGVPCVLQMQARGHLRMKYNIPGSACNDCCLTCWCSPCTMCQEYRECHIRGLGPGGVEKGSAVAMGGPPPPQAMDPAAPANKQ

SEQ ID NO: 32165 - protein, 713 aa, Saccharomyces cerevisiae
MVTNNGDGEHLGIRRNGNLRHPSNNMKIPRRAQSTVLNSNPFYSRKYSMSTLTPRDICRSVDSRVFVDMSSPNFQTLEDPHRDEIINSVRLNYLNSSKRSSVSHGNEAIPRVNPTKNSSASTIAAANVDSDDDETNLSSAGGDITHDIYKLVKAEDPKRLRRPRSMENVTSKIEHHTKLSSASGLNVPGGFRREFIVNKKRQEHQLNDSASSDFTSHESDSINQSSPSSNQDIDKVPFLTRNFLEFLYVFGHFAGESFEDDFIPDSSNMMIRGEDERSALLSRPDHMKVLPSAKGTTSTKKVFLILLKSFIGTGVLFLPNAFHNGGLFFSVSMLAFFGIYSYWCYYILVQAKSSCGVSSFGDIGLKLYGPWMRIIILFSLVITQVGFSGAYMIFTAKNLQAFLDNVFHVGVLPLSYLMVFQTIIFIPLSFIRNISKLSLPSLLANFFIMAGLVIVIIFTTKRLFFDLMGTPAMGVVYGLNADRWTLFIGTAIFAFEGIGLIIPVQDSMRNPEKFPLVLALVILTATILFISIATLGYLAYGSNVQTVILLNLPQSNIFVNLIQLFYSIAIMLSTPLQLFPAIKIIENKFFPKFTKIYVKHDDLTTRVELRPNSGKLNWKIKWLKNFIRSIIVIIVVSIAYFGSDNLDKFVSVIGSLACIPLVYIYPSMLHLRGNSLPETKGEFWRFKPMLDTILIFFGIASMLYTSYQSIFGV

SEQ ID NO: 32166 - protein, 126 aa, Psychrobacter arcticus 273-4
MLLNMLKCKLHRARVTHAELHYEGSCGIDGDLLDLAGLRENESIDIYNVTNGKRFRTYAIRAEAGSGIISLNGAAAHMADLGDIVIICAYAHFDEVEASTYQPRLVYCNEDNTVKDTANIIPVQVA

SEQ ID NO: 32167 - protein, 315 aa, Psychrobacter arcticus 273-4
MPYLAIFTGNAHPELAKTVADHLHIPLGKADITRFSDGEIAVEIKEHVRGKDVFIMQPTCAPTNDNLMEIMMMADALRRSSAGRITAVMPYFGYARQDRRPRSARVPISAKVVADMLNIVSIDRVMTVDLHSDQIQGFFDIPVDNIYGTPVLLNDLQKQNYDNIMVVSPDVGGVVRARAMAKQLGDTDMAIIDKRRARANESQVMHIIGDVRDRDCVIVDDMVDTAGTLCKAAEALKANGARRVVAYITHPVLSGNALKNISESELDEIVVTDTIPLSDAAKACSKIRQVSIAPMLAESLRRINNEESISAMFDA

SEQ ID NO: 32168 - protein, 718 aa, Psychrobacter arcticus 273-4
MQTILLVPISRGIGVTSAALGLIRAFDYNGIKAGFMKPFLQDDALDKQNSLDSSSALAMHAFGLKPPKSISRQHVERMIGDDNLDDLMEEVVVNYHTLGDDYDVVICEGLVPTTETSYASQINRAIAHALDARIIFVSTADTSKPAYLADKLDVHAREFGGMASDRMLGCILMRMHDLPNTQSTLENQIVAPGEAIVSLDSGFIQEVQRLSPHFNSEQFRLIGVVPFSDSLSVPRTWDIAAELDATWLNVGEAKSRRINRISLTARSVARVDEVFKRGTLIVVPGDRDDLLLAAGLACINGVPLAGLVLTGGVLPSSTVAELWQSALKTGIPVMSVETDSYETVQNLVHMSAEIPSDDTERAEEVARYVAAHLDLSWIKAYFSQNHEPRLSPSAFRHQVVKKAQIAKKRIVLPEGSEPRTVEAACICQSRGIANCVLLAKRSDVEQVAKNRDLVLPEGLEIIDPDSLDMSKYIAAVVERRKGKTSAEVAAEYLQDTVYLGTTMLQMDEVDGLVSGAIHTTANTVRPAFQLIKTAPEYSLVSSIFFMLLPEQVVVYGDCAINPNPNAEELAEIAIQSAQSAAAFGIDPKVAMISYSTGSSGMGADVEKVTRATQIVRERAPNLKVDGPLQYDAASVMSVGKQKAPDSPVAGQANVFIFPDLNTGNTTYKAVQRSANVVSVGPMLQGLNKPVNDLSRGALVDDIIYTIALTAIQAHSDVI

SEQ ID NO: 32169 - protein, 410 aa, Psychrobacter arcticus 273-4
MSAGVTTTFDDKHSESSTLTNPTLVLNCGSSSIKYALISDDETTRITGLAENLGLDTARIKHTTLNGEKLEIAIAGGRHELALKRILELLEQYHFIAVGHRVVHGGREYSEAVRVDAHVLEEVKRLKVLAPLHNPANALGIEAVQAIYPEIPQVVVFDTAFHQTMPPVAYRYPIPKALYEEEKIRRYGFHGTSHAYVSERASHITSATGPHGWITAHLGNGCSASAVYDGKSLDTSMGLTPLEGLMMGTRSGDVDPSLHIHLKRKLGMSLEETDKMLNSESGLLGISGLSNDLRTIEQAANEGHADAQLAIEMFCYRAGKYLASLSCALPEFTGIVFTGGIGENSVTTRARILEVMRHFGIKVDAGKNAGLVGGNEGSFHTDDSSIELWVVPTDEECRIAQETRAALGLQ

SEQ ID NO: 32170 - protein, 393 aa, Psychrobacter arcticus 273-4
MSHDAIVILNGARTPIGGFQGILKDMSATELGAAAIKAAVQRSGVNVDSIDEVIMGCILTAGLGQGPARQAMRKAGLSDATGAVTINKLCGSGLKAVMQAHDGIKAGSFKVAVAGGMESMTNAPYIMPGSRGGYRMGHKEVKDHMFLDGLEDAETGKLMGMFAQEVADEKGYTREQMDDFAIESLSRALTAIKDNHFKNEIEPVTFKTRKGEQTVDTDEQPALANAERIPTLRPAFAKDGTITAANASSISDGAAAVVLMKESQAKEEGLDYQARIIATASNSRHPSEFTIAPVGAIEKVLASAGWSVADVDLWEINEAFAMVTMVAMDELNIEHAKVNIEGGACALGHPVGCSGARILVTLINSLKRTGGKKGVATLCIGGGEAVAVAIELA

SEQ ID NO: 32171 - protein, 309 aa, Psychrobacter arcticus 273-4
MIVAMTSLMTKKALWLAPLSAAMLMLAGCNNSAAPVETTETDAATDVPLNIKIATESSYKPFSYTDADGKLIGYEIELVDALCAQMKAKCEVISQDWDGLIPGLNAQKFDAAIAGMSITPERKEVVEFSDPYFHSGIILIGKKGDDVSVDALKGQPIASQRSTVASQYLQDKHADADIKLYDTQDNAYLDLTSGRVRAMMSDKVTGIDWLKTEAGKDYEVKGQEISTSDDAMGIAFRKGDPLVAKFNKALAELKDNGTYDQITGSYFGTSSTTAAQKAVAANDIKEVVVVDKGNVEADAVIAKEEQAQR

SEQ ID NO: 32172 - protein, 330 aa, Psychrobacter arcticus 273-4
MENDTVDNDSAIEAFFSPDNSKLAVEGFKTGYVAIVGRPNVGKSTLMNHLLGQKLSITSRKPQTTRHRIHGILSNDEMQAVFVDTPGIHRNEVRAINERMNKAAVSALVDVDLVLFVVDSDQWRDDDLLVLQKLGDTNLNVVLVINKADTLKDKGSVLPLMETFNDSFDFADIVPVSALKNQNLDRLQEVIASHLPVAAPIYDTEQITDRSERFLASEIIREKIMRSAGDEVPYDLTVQIDGFKDEAAHTDPKTGRPRKACTFIDATIYVERSGQKAIVIGDKGQRIKQVGMDARKDMEQLFDKKIMLTLWVKVKRGWSDDERALTSLGY

SEQ ID NO: 32173 - protein, 70 aa, Psychrobacter arcticus 273-4
MSDKVEGTVKWFNEAKGFGFIAQDNGGQDVFAHYSAIQGGGFKTLAEGQKVSFILGDGKKGPQAEQIEAI

SEQ ID NO: 32174 - protein, 385 aa, Psychrobacter arcticus 273-4
MKIGVISADSASECRVALTPDAVKKLRKLGFEVVIQSGAGQASYYADELYQAAGADIANSSIDVVTQSQIITTVNDLPATATDRLTSGQIVIGMLDPYRNSQLDTYAAKGATAFAMELLPRTLSRAQNMDVLSSQANLAGYKAVLLAANEYSRPFPMFMTSAGTVKPAKVVILGVGVAGLQAIATAKRLGAVVEASDLRPTAREQVESLGGKWLDVPMSAEEAETAKSTGGYAWTPSEQYIKDQAAIVDKALSNADIVITTAQIPGRQAPRLVHQATIAKMKAGSVLIDMAAGTGGNVEGSVPDETITTPNGVRIVGAANIPSQLAAQSSDLYANNLVNFITTLIAPAATDDATANTLALNLDMEDEIQGALAVTHEHQVRLAKR

SEQ ID NO: 32175 - protein, 623 aa, Psychrobacter arcticus 273-4
MCGLLGLIDYTKTTSEDIFSEMLSCLVKRGPDSEGIDLFYDDSCSVLLGHRRLAIQDLSNHGHQPMKYDNLVTIYNGEVYNFKEIQQQLLEKGYFFESDSDTEVILKAFHCWGIKSVDKFRGMFAFAIYDINKREITIFRDRVGVKPLYYSQTEDSFIFSSELKPFISFPNFDKSIDFEAVSSYLQFGYIHAPKSIFSSAKKLLPGHYLKFDIASKKLSIDCYWDVTDYFEDKTNVTDITAITDELESIIIESFNLRMISDVPVGTFLSGGVDSSLVTAILQKYSDIPINTFTIGFEDKNYDESIYAKAIADHLGTNHTEYICKKEDALEIIKELPKIFDEPFADSSAIPTTLVSKLAKEKVSVILSGDGGDELFCGYSSYTLMEKRFASISKIPFKNSIKKLSDFIPFPLVLLNGINENLYTKFMKFRNLLEHDDIANAFKVSNSVFCKDEIDKIISQEYFFNEDSISHVSTLEKMMISDFKGYLPDDLLVKVDRSTMSVSLEGREPLLDHKIIEFAARMPISLKKNKSILKDILKRYVPEELFLRKKQGFGIPINSWLRNDLKYLLDQYLNEDIIKEYGVFDPKYVTDLLRLFHAGKNDDRKIWTLLMFQMWFSEHLATSK

SEQ ID NO: 32176 - protein, 651 aa, Psychrobacter arcticus 273-4
MCGVNGFFNAHTTIPVQNVIAQMNAAIDHRGPDAGDAWLDENIGLVLGHQRLAIQDLSPAGAQPMHSACGRYVLAFNGEIYNHLQLREQLMIEGHAPAWRGHSDTETMLACFVAWGIEKTLQAMVGMFAIVLWDRQQKVLTLARDRMGEKPLYWGWQGQSLYFSSELKGLKAHPSFKTDINRDAITLLLRHNCIPAPYSIYQGIEKLRPGHWVQLPLSDIQQAKTAQSKAYWRFNDIVEAGLADPFTGSPEQAVDALESALMQSIGGQMQSDVPLGAFLSGGIDSSTVVALMQAQSSRPVKTFTIGFDDAGYNEATHAKAIAKHIGTEHTEMYMRPEDALAVIPKLSSIYCEPFSDSSQIPTFLVNQLAHQHVTVALSGDGGDELFGGYNRYLMAQQVWSKSRKLPRPMRQLAAVSLTALSPKSWDTLVNTLSPVIPKRLNLRTPGDKAHKLAGVLNIDSEQAFYQNLTSHWQDPAQLVIGAQEPATLISDSSCWPTTDSFQHAMMAMDAQTYMTDDILVKVDRAAMANSLETRVPMLDHRIAELAWRMPLDYKIRNGEGKWLLKQVLYRHVPRELIERPKMGFGIPLHDWLRGSLRDWAEALLDRNLLQQQGYFNPAPIRKIWNEHLSGVFNHQHQLWDILMFQAWLETQ

SEQ ID NO: 32177 - protein, 579 aa, Psychrobacter arcticus 273-4
MSEQSSNHAQKDEQKNDFIRNIIRDDVTAQKYQQIITRFPPEPNGYLHLGHVKSICLNFGVAEEFGGVCNLRFDDTNPTAEKQDFIDNIENDVKWLGFEWAGEAHHASGYFDQLYAWAVQLIEQGDAYVDLQSPEQIKENRGSFNDAGTASPHRDASVEENLQLFDDMKEGKYAEGKAVLRAKIDMASPNMNLRDPVVYRIMHQTHHQTGDKWCIYPMYDFAHPLSDALEGITHSLCTLEFEDHRPFYDWVIEKVGFEQAPHQYEFSRLNVDHTLTSKRKLKQLVDENIVSSWDDPRMPTIAGMRRRGYTPEGLRDFCERVGVTKVDSVVDFRLLEFSIRQSLETTTARGMAVLKPLKVTITNFAEAVSSWESQKADSVQARFDDASQTLWLTQPNHPNVDMGEREIPFTETIYIDQGDYEIEPPAGYKRLSPEKNEIRLRNTYVLAVTEHITDDSGNVIELKATIDPATLGNNPEGRKVKGVIHWVSASQGIPATVRMYEQLFSVEDPSSVADVHQALNPNSLTELNAVVEPSLVNADAGTRFQFEREGYFISDSEDHSSDKPVFNQIVSLRDSYKPA

SEQ ID NO: 32178 - protein, 546 aa, Psychrobacter arcticus 273-4
MMADDKTKSTQAERLVQLRRDKGMTAEQLAQAMTAAGAKVSRGAISNWERGTNGIVSSKLPTLARILGCSEGYLLRGELESDSKSDVDLKNIASDNTNVYVESDEQAHSASQITHTTTIPSTPRKISPNNLMSGPFMNTIKKSDKLQNVCYDIRGPLLQTANKMEAEGKRILKLNIGNPAPFGLEAPHEILRDVAMNLPEATGYSDSQGIFSARKAVLQYYQSKGLLSAVDVRDVYLGNGVSELIVMTLQALMNDGDEVLIPMPDYPLWTAATNLAGGTAVHYRCNEEDNWHPDIEDIKSKITSKTKGIVVINPNNPTGALYSDEVLLQIIEVAKEHDLIIMADEIYDRILYDDMEHTPMSTLTDEVLVLSYNGLSKSHRIAGFRAGWMMISGRKEHAADFIEGLDMLASMRLCSNVQGQYAIQTAMGGYQSMKDLTSKKGRLYKQRELAVTRLNAIKGISCTMPQGAFYCFPKMDPEIYPIKDDMQFMMDLLLEENVLMVQGTGFNWDKHDHFRLVFLPNLHDLEDAMDRLDRFFAKKRKQFGTD

SEQ ID NO: 32179 - protein, 681 aa, Psychrobacter arcticus 273-4
MYSSPSEDTTQTMSLNKTVFIGSAVISILLIIWTIVFPTYSGALLGAGMAWVSESFGWYYMLVVAAYSIFALFVGFSKYGDIKLGQDHEKAQFPFLAWAAMLFSAGIGIDLLFFGASEPLMHYLTPHAGLAPASEEAMRQAVAQTFLHWGLHGWGIYALIGMALAYFAYRKNMPLALRSPLTPIFGERLIKGWLGDGIDTFGVVCTLMGIATSLGIGVLQANAGLTHVFGIESSKMVQTIIIVCVVVAAAISAMTGVERGVRRLSEFNMLAAILFLVAILVMGNTVYLLNTFTQSVGQYFQTIVAKTFDVYAYDGAAGAEWKSGWTVFFWAWWVAWAPFVGLFIARISRGRTLREFVFGVMFIPLGFIFAWFSIFGNSAIELVANGATELGEVAVNDAAMGLFALFEYYPYSDVLSLVGVIIGLVFFITSADSGALVLANLSSRGLINGVDAPVWLRLFWAAATGLITLGLLFAGGFSSLQSVSVIAGLPFSVILVLYMIAMWKSLKEEGNKRKASTIGTANVLDNGKSWKARLQRIVSFPKHAQVEHFLQTIVLPAMTDVESELRAGGLKTALVVRNPEHIGQDIDQGKDQESVQIEGLKLQVGHGDQDDFIYEVNLVKAERPNFTLNTSSKLAEYYYRAEVFLSDGSQEYDLVGYSKEQVLVDILNQYERHMQYLHLER

SEQ ID NO: 32180 - protein, 480 aa, Psychrobacter arcticus 273-4
MSELKKSLGTLDVIALAFGAMVGWGWVVLAGGWILSAGTWGAMLAFFIGGLAVILIGVTYAELAASMPITGGEHTYTHRALGVNVSFICSWSILFGYFSVVAFEAVALPTVVEYFIPNYNQGYLWTIAGWDVYATWVGVGMLGSVIVTWLNIRGMEVSAWFQKTAVLGILFVGTLLFIGAVLYNPDTSTAIQSPAFIGGVGGMMAVIVMVPFMFVGFDVIPQAAEEIDLTRPNIGKFLIISIVVAVMWYVGIAWSVGTTLPLVQAESSTLATADAMTNAWQGKWAGILLVIGGVLGILSSWNAFLIGGSRLLYAMSKARMLPAFLGKLHPKYKTPSNAILLIGGLATLAPLFGRKMLVWIVDAGGFGIVIAYTCVAISFLVLRYREPDMVRPFKIPAGKLVGMVTIVLSVGLLMLYMPGMPSALTAVEWWIFFGWTMLGIVLYGYARVKYPGISESIMAEELRELKIVNQLWLKDNSTKK

SEQ ID NO: 32181 - protein, 865 aa, Psychrobacter arcticus 273-4
MRFEKFTQKLQSAIQEAQSLALGRDHTGIDPVHLLAVLLQDESNLSICQQAGASIPALKNGVAKALDNQATISEPTGDVNLNPNSVKILNLADRQAQKEGDDFIATEWVMLALAEQGDTKKIFESAGVTANKLKAVIEQLRGDDTVNNQNAEDQRDALNKYTINLTEQAELGKLDPVIGRDEEIRRTIQVLSRRTKNNPVLIGEPGVGKTAIVEGLAQKIINGDVPEGLRRKEVLSLDLGALIAGAKFRGEFEERLKAVLSDLSKQEGNVILFIDELHTLVGAGKADGAMDAGNMLKPALARGELHCVGATTLDEYRKYIEKDAALERRFQKVLVDEPTVEDTIAILRGLKERYELHHGVDIQDSAIIAAARMSHRYITDRKLPDKAIDLIDEAASRLRMEMDSKPESLGKLDSRLIQLKMQREVLKNEEDAGAQAERKVLDAQIEELEKEYADLNEIWQAEKALVKGSQQLKDELDKARIAYDKASREGDYETMSKLQYETIPQLERRIHESDLAEQKEQTGENSGVKLLRNKVTDNEIAEVVAAATGIPVSKMLQGERDKMLAMEENLHERVIGQDEAVEAVANAVRRSRAGLSDPNRPSGSFLFLGPTGVGKTELTKSLANFLFDSEDAIVRIDMSEYMEKHSVSRLVGAPPGYVGYEEGGALTEAVRRKPYSVILFDEVEKAHPDVFNILLQVLDDGRLTDSQGRVVDFKNTVIIMTSNLGSHKIQEMVGESYEDIKAEVMDSVGQHFRPEFVNRIDEIVVFHPLGMSQMAGIAAIQLNRLRQRLYERELDIELSADAMNKLVAVGYDPVYGARPLKRAIQQEIENPLSLKLLAGDFVAGDIIKVDVGADDKLTFDKLRMS

SEQ ID NO: 32182 - protein, 550 aa, Psychrobacter arcticus 273-4
MNHVKVGRLGPFPRVSKPVFITSALLIVGFIIFGTFFTETAGALFSFLQNFITDKFGWMFIILMNVALVFCIYLAASRYGDIRLGQQTEKPQYSLFSWIGMLFSAGIGIGLVYWGTAEPLYHFMAPPLGEAETVEAAKQAMSISFLHWGLHAWAIYTIVALALAYFHFRRGLPLSIRSTLYPLLGEKIYGRWGHAVDILAVFGTMFGVVTSLGLGVMQINSGLENLFGIPNSLTVQFIIIAFVTALACGSLMLGLDKGIKRLSDINMGFTGVLLAFMVILGPTLFIFDSFIENIGNYIVAMVPLSTWGEAYGNTDWQSGWTIFYWAWWVSWAPFVGVFIARISRGRTIREFVLGVLLIPMLILFFWFTTFGGVAIHMELLAALDPAIASPGLVEAVQADTGSAIFKLVEYYPFAKPITFLVVIMIVLWFVTSSDSASFVIDMLTAGGDINPPKIQRLFWALMEGLIAAILLAAGGLGALQAAAIVAGLPFALVIFVMMYALLRGLSRDRLILYRAQQHFITEESADHNSANEFADEHLLTDPSAIEKPEG

SEQ ID NO: 32183 - protein, 556 aa, Psychrobacter arcticus 273-4
MSQQYTIADYLFDRIAEAGASEVFGVPGDFNLTFLDNIIASDKLRWVGNTNELNAGYAADGYARERGFAAMVTTFGVGELSAINATAGSFAEYAPVLHIVGAPSTALQDSKRRIHHSLGDGVFNHFIKMVEPVTVARAQITPENAASEIDRVIRLILKKHRPGYLMLSPDVARQPIYPPTTKLVDSQEDITSQAALADFKQALIAFLPNKTTTLMADLMVHRLGLQNQLKALIADTDIPYTTLSWGKTLLDENSDRWAGTYAGVASRPVVKDAVENCECLIKIGVQYTDTTTAGFSQDIDENVVVDLHYERASIAGKNFAPIALKDALKTLHEVMTSDINIVPKQFYKEVKPHEQHGKDNEAIRQDDLWHIIADHLDHNNLVFAEQGTAYFGISDVRLPEGVTCYGQPMWGSIGYTLPASLGAAIASPSKRSVLLIGDGSALLTIQEIAVMIQERINPVIVLINNDGYTVERAIHGENQRYNDIPKCDWQAMPKAFGATEENSLMLKVATAGELKASLEKAAATTDKLVMLEVIAAKHDIPPLLADISAALKPKAD

SEQ ID NO: 32184 - protein, 330 aa, Psychrobacter arcticus 273-4
MNSPERNLTHEQFISTAIDAINTEKAALALLTEQIDDRFAQACDIILACQGRVVVTGMGKSGLIGRKIAATFASTGTPAFFMHPGEAGHGDLGMLVKGDVLLAISNSGESDEIKMLLPVVKRLNIPLISISRDKRGMLPHAADIILTLGKSQEACPLNLAPTSSTTATLALGDALAVALVHARNFTSEDFALSHPAGALGRQLLTRVEDLMHTKSEDLPLINQQAPLQEALFIMSAGRLGMTVVTDDKSKVVGIFTDGDLRRGLEKGIDLQTPMRELMVSNPRRINKSMRASDALSVMNENAISQLLIVDDEQRLEAIITVHDLLQAGVK

SEQ ID NO: 32185 - protein, 71 aa, Psychrobacter arcticus 273-4
MSAREQGIVKWFNDSKGFGFIQRDSGEDIFVHFRAIQGDGYRSLKDGEKVEFSVVEGDKGLQAEEVRRVEE

SEQ ID NO: 32186 - protein, 561 aa, Psychrobacter arcticus 273-4
MYQYNYADQTLVEERVAQFRDQTERFLAGELPEEQFLPLRLQNGLYIQRYAPMLRIAIPYGLLASYQLRKLAEITRKYDKGYGHFTTRTNIQLNWPKLEEVPDIMAELASVQMHSIQTSGNCIRNTTTDPYAGIHQEEIADPRPYCEIIRQWSTFHPEFAFLPRKFKIAVIGTANDRAATQVHDVGLHVKTNDAGELGFEVIVGGGLGRTPVIGKVIKEFLPRQHLLSYLDAILRVYNLHGRRDNKYKARIKILVESMGGPAFAKLVDAEWEAHIKDGPLTLTDASFDTASRFFSEPDYVTFDALQVQSELQQQLSADKEFANWYQQNTVAHKVAGYRAVVISLKAGLVDGTYIPSGDVSESQMDALADLADTYSFSELRGTYQQNLVFADVQTNQLYELWQQLSELHLARANINTLTDMIVCPGWDYCSLANATTHNIAEQIEKQFDDLDYLYDLGEIRLNMSGCMNACAHHHTGDIGILGVDKKGEHWYQISLGGNSSDNAKIGKILGKAVPADDVATTLQKILDVYLEQRVSNEHDIEGFGDLVDRVGITPFKEKVYG

SEQ ID NO: 32187 - protein, 567 aa, Psychrobacter arcticus 273-4
MTDILSAIAAENGIIESTDTPNTTANTDTNNEAATTDATDENKVTFTDLNIAKPILSALERSGYTHPTPIQAEAIPFALQGRDLLLSAQTGSGKTAAFVIPVLDRLSRATSFDKLTKALILTPTRELAQQVHDSVRTYSKDMRGLFCVPLVGGAPYNGQITALKKGVQVIVATPGRLLDHINAGRVDLSSLEILVLDEADRMLDMGFADDISDILRAAPIDRQTIMCSATWDGPVGKIAASFTKNPERVSIKVESAHIEEKVYYCDDFDHKNRLLDKIVCHKDMEQIIIFAATKRSTEKLAKQLQEAGHKASFLHGDLPQSKRNRIVQDLRNGKCKILVATDVAARGLDVPALSHVINYDLPRQTEDYVHRIGRCGRAGRTGVAISLCSMDDRPQLNAINRYLDRKMEASVIEGMEPKKTYVPSENKGNGRGRGRGRSNGGGNGNGQGRGRSAGGYAGSGASKPSGQGRGRPSGDSSNATGQRASNDSGYQGKPRDSSGKPNERSGGKPYQGKRTGAPSRGDSTGVPRGERAATGRGRPSGSQGRPAARSDSRGQGRPTGGNRGNNS

SEQ ID NO: 32188 - protein, 116 aa, Psychrobacter arcticus 273-4
MSEQTPNTAANDIEQLIRNQIKDNKVILYMKGSPQFPQCGFSAKAIEVLTQIGRPFAFVNILENPEIRATLPQIANWPTFPQLWIDGELMGGSDIILQMYQSGELKPLVEANSPAA

SEQ ID NO: 32189 - protein, 682 aa, Psychrobacter arcticus 273-4
MKNKSSRSTILLPVFVPAAVIMLLLVIGTAINPESAGELFSTVLSFTTETFGWFYMLAVAIFLMFIIVLAFSSYGSIKLGPDHAEAEYNFLEWFAMLFSAGYGIALLFYGVAEPVIHFASPPLSTPQTIEAAKEAMQIAYFHWGFHIWAIYGVVGLSLAYFSFRHGLPLSMRSTLYPLIGDKIYGPIGHTVDVFAIVGTMFGIATSLGIAVSQINAGVNYLFPNTVPVSMTVQVIIIALVTLAALISVLAGMDKGVKRLSILNMVLATGLMLFVFIVGPTIFILNAFMENTGSYLGNIVERTFSLQAYQSSDWIGSWTLFIFAWTIAWAPFVGLFIAKISRGRTIREFVLGVMLVPTFFTFFWFAVFGDTALHMIMVDGYDALITEVQNNQAIALFKLLENLPFSQIVSSLTVLLIITFFVTSSDSGSLVIDSLAAGGRSDTPWWQRTFWVVTEGAVAAVLLVAGGLTALQTAAIVSALPFAVIILISIFGMWRALRIEGHRNQSLGNDNRIPPHLLKPSAWRERIDYMTDKPTRDKVLSYIQETIMPSMVEVSEKFAETGWTTEVNYDAINNRAVLELQRGSDVEFWYEVRLSEHDTPDYYTEDNADKLPQQHDHRAEVYLRRGGQTYDLYGYESESVINDIIDQFEKYLHFVNVSPDILPWRMQEHDEDITLEQGSVFDK

SEQ ID NO: 32190 - protein, 595 aa, Psychrobacter arcticus 273-4
MSQAYQPDSTKTSAKKSSAVTLNPPKRKTLMRLLAYLKPYWWAILLTITGFAINAGTEIWIAKLLQYITDAINQNDQSKQGLFPFIIVMLFFVRGVGSFLGNYYTALVSRNLVYELRVEVFNKLLRLPSSFYLANPAGTISSKLIFDVEQVTAASTDSLKTLLRDGLTVIALMGFLLYSNWRLTLILFVVLPPILWIIRVASKRYLKLSKGIQATMGGVSHITNEVINGYQVVKNYGGQAYESKRFDEVSKKNLRQGMKIVVTNSINTPAVQLLMAVAMAVVVWLALRPAVIDDISAGQFISYIAAAGLLSKPVRSLTDVNQQLQRGIAAGESIFALLDEPEEEDTGVLSPALVGEIKLDNISLVYPDSTVALHDFNLDIRAGETVALVGRSGAGKSSLVNLLTRTLSTSSGQITLDGMPIEDIKLESLRAQIAMVNQQVVLFNTTVFNNIAYGSLAHKTPAEVEQAAKDAFAHDFIMQMPNGYQSEIGAEGLQLSGGQRQRLSIARALLKDAPILILDEATSALDNESEYYIQKALDNIMRNRTTLVIAHRLTTIESADRIAVLDGGRIVELGTHAELMQLHGHYAQMYARDFE

SEQ ID NO: 32191 - protein, 779 aa, Psychrobacter arcticus 273-4
MAIIMNDDITLNTDTPTPSTEKEQFEQAALHYHEFPRPGKISVTPIKQLANQRDLALAYSPGVAVPCLEIQRDPSLAAKYTARSNLVGVITNGTAVLGLGNIGPLASKPVMEGKGVLFKKFAGIDVFDIEIAQNDPDKFIEAVASLEPTFGGINLEDIKAPECFKIERELRKRMNIPVFHDDQHGTSIIVAAAMLNALIITNKKIEDIKIICSGAGAAAISCLDIICALGVNKNNIYVSDSRGIISTTRENLDETKQRYARETTATTIEELMDDVDMFLGLSMPGTLTEDMVRRMAKDPIIFALANPTPEIMPEIAHAVRPDVIMATGRSDYPNQVNNALCFPYIFRGALDVGATTVNEEMKVACVRAIAAMAHVEATPISNIKNVESTPSFGRDYLIPGPLEPNLIIEIASAVAKAAMDSGVATLPIADMKAYRQRLSEFVYNSAFVMKPIFARAKADPKRIVYCEGEDRDVLLAVQVVVDEQLAYPILVGRPSVIENNITKLALRLKDGENITIVNVDDDPRYNDYWKGYYEKNKRTGVSIELARRDVRRKTSLIGALLVENGDADGMICGTFGHYQLHLKYVSRVINKKEGINDFYAMNAVLMQDRNIFIADTYIHEDPTAEQLAEMTVLATEQLRRFSITPRVALVSHSNFGTSDRASAVKMRKVHQLLTEMNVDFEFDGEMQGDAALDEHIRANDLPSSNLKGSANLLILPTLDASNIAFNLLKTATGSASIGPILLGASKPVHILTPSATARRVVNMTALAVTEAQDLENKQQ

SEQ ID NO: 32192 - protein, 499 aa, Psychrobacter arcticus 273-4
MNGVSSGVLISLGAYFLVMIGIGVYAYFKQANDTEGYMLGGRSLGPAVTALSAGASDMSGWLLLGLPGYMYADGVVSIWIALGLTLGAFLNYLIVAPRLRVYTEIADNAITLPDYFANRFEDKSHMLRVISAVVIILFFTVYTAASLVGGGKLFESSLNLSYSTGLWVTAGVVVAYTLFGGFLAVSMTDFVQGIIMLFAMVIVPVVAFTDLGGISATTEAVRNIDPSLLNVTSGMTILGIVSLMAWGLGYFGQPHIIVRFMAIRSVKDIPTARNIGMSWMIVSLIGALMTGFAGRAYVQKTAMTLDDPETIFLVFTQFLFTPLVSGFLLAAILAAIMSTISSQLLVVSSSLTKDVYKLFFDKDAPEARQVMVGRLSVIVVAIVAILLASNPESSVLSLVSNAWAGFGAAFGPLVIFSLIWRGMNRNGAVAGMVVGALTVILWIYGPFQMNGMALNSWLYAIVPGFVLSTIAIFAVSIMTGGPKASVSAKFKEMEMNLDQ

SEQ ID NO: 32193 - protein, 428 aa, Psychrobacter arcticus 273-4
MALIVQKYGGTSMGSIDRIKNVAKRVKRWHDNGHQVVVVVSAMSGETNRLIDLARQISSQPDPREYDQMVSTGEQVSISLLAMAIKELGIGARSFTGRQVAIKTDNAHNKARIESIDDKNIRQQLDAGNIVIVAGFQGIDEEGNATTLGRGGSDTTGVAIAAALGADECQIYTDVDGVYTTDPRVTSKAKKLEKITFEEMLEMASLGSKILQIRSVEFAGKYGVPLRVLSSFDENNDGSFDQDFQDNVGTLITIDEGDNMEQAIISGIAFNRDEAKIVVRGVPDHPGIASAILSPIGRANIEIDMIVQNLSTNGMTDFTFTVNRTDMEKTMKVLENEVKDEIGAKEILANDEVVKVSLVGVGMRSHAGVASLMFQTLAENNINIQMISTSEIKVSVLIQEQYLEKAVRSLHTAFGLDREDGESKVAGL

SEQ ID NO: 32194 - protein, 408 aa, Psychrobacter arcticus 273-4
MSQHNNLIYLDYAATTPVAKSVAAKMSEYLTVDGIFGNPASRSHGYGWQAEEAVETARQQVAEVINADPREIVFTSGATESDNLAIKGAAHFYQSRGKHIITSKIEHKAVLDTCRELEQEGFEITYLEPQPSTGMILPEQVKAALREDTILVSLMIVNNELGTITDVAAIGEITREAGVIFHVDGAQSVGKILINLAEMKIDLMSFSGHKAYGPKGIGALFVSRKPRIRLKAEQHGGGHERGMRSGTLPTHQIVGLGAAFELANNRYQEDNAHAAKLRQKLWDGLQDIEEIYLNGDLENSVPNIVNISFNFVEGESLMMSLKDLAVSSGSACTSATLEPSYVLRAIGRPDELAHSSIRFSFGRYTTEEDIDTVITQMHQAVDKLRALSPLWDMYQEGVDLDSVEWSEH

SEQ ID NO: 32195 - protein, 405 aa, Psychrobacter arcticus 273-4
MRFIDEAVVTVKAGDGGNGIASFRREKYVPRGGPDGGDGGKGGDVYVIAEDNTNTLVDYRYTRRHDAMRAENGHSRNCSGKGSDDLFLPVPIGTTIVDTETDEVLGDLIEIGQTLLIAKGGDGGLGNTHFKSSTNQAPRKATSGFEGELKVLKFELKVVADVGLIGLPNAGKSTFIRQVSAARPKVADYPFTTLVPNLGVVDIGRHRSFVMADIPGLIEGASEGAGLGIRFLKHVARTRRLLHLVDIKPIDGSDPVENARIILNELDRFSPELANLPQILVLNKIDQVPEEELNELCTHIVAELGWTGIVFRTATLTGEGVDAIKYHLMNEIEREREREIEDPIFAEAQKARFERLEAEVRLNTEAQREAYRAARKAAREGTDLSDDDFDGSDDDDDGVEVIYAP

SEQ ID NO: 32196 - protein, 412 aa, Psychrobacter arcticus 273-4
MAQLDPKTINKIVLAYSGGLDTSIIARWLQETYDAEVITFTADIGQGEEVEPARAKAEAMGIKHIHIEDLREEFARDYVFPMFRANAIYEGEYLLGTSIARPLIAKRLVEIAKEHNADAISHGATGKGNDQVRFELGAVALSPDVVTIAPWREWDLSSRESLMEYAKEHNISIDYAGNKKKSPYSMDANLLHISYEGGILEDPYAEAEDDMWRWSVSPEQAPDVPQYLELEYAKGDIVAIDGEALKPYEVMIKLNEIGGKHGIGRLDIVENRYVGMKSRGCYETPAGTIMLKAHRGIESLTLDREAAHLKDELMPRYAKTIYNGYWFSPERMMLQALIDKSQEYVNGTVRVKLYKGAVSVVGRKSDDSLFDEKIATFEDDAGAYDQKDAEGFIRLNGLRLAIEASRGRDLSK

SEQ ID NO: 32197 - protein, 628 aa, Psychrobacter arcticus 273-4
MVKNTLLWLVVIGVLVLVFSGFDKSSEPDNLNYSEFVTAVSENQVASVEIDGEQITGEKKNGSEFETIRPAVMDDELMPLLRENKVEVQGTAPKRQSVLMQLLIASFPILLIIGLFLFFMRNMQGGAGGKGGGPMSFGKSKAKMLTEDQIKVNFEDVAGCEEAKEEVVEVVEFLRDPDKFTKLGATIPRGILMVGPPGTGKTLLARAIAGEAKVPFFSISGSDFVEMFVGVGASRVRDMFEQAKKSAPCIIFIDEIDAVGRHRGSGMGGGNDEREQTLNQLLVEMDGFEGNEGVIVIAATNRADVLDKALLRPGRFDRQVQVGLPDIKGREQILKVHLKKLPNTIGVDAHALARGTPGFSGAQLANLVNEAALFAARRNKRSVDMNDFEDAKDKLYMGPERKSMVIREEERRATAYHEAGHALVAELLPGTDPVHKVTIMPRGFALGVTWQLPEHDQISLYKSKMLSDIAILFGGRIAEEVFIHQQSTGASNDFERATKMARAMVTKYGMSDALGIMVYEDDDSSQGYFGGGSRTISEATQQKVDEEVRRMLEEQYDIARELIEGNQEKMHAMVDALMKWETIDRDQLQAILAGEQPRPPRVYQHHEVNLSKDDVKTTGVTPPPLPAM

SEQ ID NO: 32198 - protein, 570 aa, Psychrobacter arcticus 273-4
MPSIASRLIPVWLRQYQLSALPTDIIAGIVVGVLVIPQSLGYAVLAGLPPVYGLYAAIVPVAVYSWLGSSNVQAVGPAAVTAIMTASVLHPYADKGVEQYVLMAALLALMMGAILWLAGQLKLGWIMQFISRGVSAGFISGAAVLIFISQLKYLTGIPIAGNGLIGYLSSMQMYASQLHPLTLIIGMSALILMVLNRYGKKWVWQSWLSPSYAKWAERLFPLILLTIAIVLSVVLHWTTSGVATIGNVPQGLPNFTAPYLPDFHEALNLLPTAGLMALIAFVSSSSVASTYARLRGELFDANRELTGLGLANVAGSFFQSFPIAGGFSRTAINVDSGAKTPLASLVTVLVMIAALIAFGYMLAPLPYAILGATIMAAIIGLIDMATLKSAWHRDRLDAASFIAAFAGVLIFGLNTGLVIGLMVSFASLIWQSSKPHVAIVGQLAGTGHFRNINRHDVVTFHNLLMLRIDESLFFGNSESVHRHVVQATRQYPEAHEIILIMSAVNHIDLTGQEMLISLNQELLNQRKHLSFSFIKGPVMDIIEHTPVITDLSGRVYLSTMDAVNGLTDTH

SEQ ID NO: 32199 - protein, 245 aa, Psychrobacter arcticus 273-4
MLNPSQSVRFDELTVAVPDFIRYPTIRKLAERVQHETLKAIASPALYDSHDHSRSARILNTLYQTPIADASILVAITHERHPKLLLTRRAAHMNSHAGEVSCAGGKHEAGDGNNVVTALREACEETALPPNKVQLLGQLPIQTSKSGMSVRPIVALIAPDLLLVPELGEISRIFWADFETLLTQPTVEYSIEYMLQDQSATLLTPSWQVDGETVWGLTGRVIASLLETGFDRQLEWYYRIQDTRL

SEQ ID NO: 32200 - protein, 69 aa, Psychrobacter arcticus 273-4
MSDTQKGTVKWFNEAKGFGFIAPETGADVFAHYSEITGSGFKTLAEGQEVEFTVTQGQKGPQAHNIVAI

SEQ ID NO: 32201 - protein, 346 aa, Psychrobacter arcticus 273-4
MDDRRLTDVSANPQYDASKQNIAKLDAEDKNADMPDGTEVRESLEDKDFSEDISEEDKETIKKVANDDNLSQAKSYASILVEQVMDARETFERSLGSLFTSAFTAGLEIGISFFMILSAFALLSGVLPSHYAVVLASLLYPIGFIIVIIGQSLLFTEQTSLLSLPVLNKIEPLNKLLRLWGIVIAGNIVGGCLFAALMIGLGLNMQLFSVSDIDTYAEHILGFRWWVIFGSAILAGWMMGVTAWLVTSARDTLSRIVLVSLITGSIGFLGLHHSIVGNIEVFSALLYGNTVSLGRYLLFLAVVLVGNTIGGVVFVAVLKNRTFLFQIEKVKEQAADAKARTDARRS

SEQ ID NO: 32202 - protein, 1487 aa, Psychrobacter arcticus 273-4
MSMISSHTHLASPDDFSDNCGFGLIAHIEGQASHDLVKKAIHSLSCMTHRGGVAADGKTGDGCGLLLATPVAFFKDIAADQQFKLTDNFAVGMVFVNDDKTQAQHSQQVLSDEIIAQGLEVAGWRDVPLDLSIVGEIGRQTLPDFKQVFVNAPDNLAADDFNRKLFVARKKAEQRLDNDELFYVCSLSCQTIIYKGLVMPSDLPAFFLDLQDERLASHIVVFHQRFSTNTLPRWPLAQPFRYLAHNGELNTITGNRSWSEARTPKLKSEKLPNLNELTPLVNSSGSDSSSLDNMLEVLMSGGMSLFHSMSILVPPAWQNVDSMDMDLRAFYEFYSQHMEAWDGPAGLVIQDGRYAVCMLDRNGLRPSRWVTTKNGYITVASEVGVWDYKPKDVLAKGRVGPGQMLVIDTQTGQIMDTKAIATLLKKAHPYRKWLRDEATRIRDDERLEEELAAQACRGEPLKALQKMYHITKEERTEIIRPNAENAQEPVGSMGDDTPMAVLSQQIRHVGDFFRQQFAQVTNPPIDPLRESIVMSLQTCLGAETNVFAPSARDAHRLILSSPVLSASKMQQLETLDDPAFKLARIDLNYEGTLELSAAIVAICEQVASSIRAGHTLIVLSDKDIAVDKVPANAMMVTGAVHHYLIAQGIRTDANLIIETGLARDSHQVAVLIGFGATCVYPYLAYDVIDDLVATGELLGDPIQARMNFRKGLDKGLLKILSKMGISTIVSYRGAQLFEAVGLSEEVVNLCFKGVQSRIKGATFADLAVDQAQLAANAFKRRAPLDQGGLLKFVFNKEYHAFNPDVINSLHLAVRTGNYDNYRQYAEIVNSRPVATLRDLLQLKTDNPLEVDEVEDISAILSRFDSAGMSLGALSPEAHEAIAIAMNTIGGRSNSGEGGEDPVRYGTLRNSKIKQIASGRFGVTPAYLRSAEVMQIKVAQGAKPGEGGQLPGGKVNALIARLRYSVPGVTLISPPPHHDIYSIEDLAQLIFDLKQVNPDALVSVKLVSRPGVGTIATGVAKAYADLITISGYDGGTAASPLSSIHHAGSPWELGLAETHQSLRVNGLRHKVRIQTDGGLKTGLDVVKAAILGAESFGFGTTPMIAVGCKYLRICHLNNCPTGVATQKAQLRDDHFIGEAEMLINFFKFVATETREWLAKLGVRTMEELVGRTDLLDILEGNTAKQQHLDLSPLLFSHPASSGKAQTCQVERNEPFDKGLLAEQMISDMLLNIRQGNGGDYSYYVGNCDRSIGARISGEIAQVWGNLGMSDKPIKLHLTGTAGQSLGVWNAGGLHIELEGDANDYVGKGMAGGEIVIYPPKDSSFVTQDTAIIGNTCLYGATGGKLYAAGTAGERFGVRNSGAHAVIEGTGDHCCEYMTGGIITILGRTGLNFGAGMTGGFAYVLDMEGDFFDRCNHELIDLNRISSEQMESHRIYLQQVIERHVDKTGSAWGQAILVDFEHYARKFYLVKPKAANVATLLKTTTADPQ

SEQ ID NO: 32203 - protein, 420 aa, Psychrobacter arcticus 273-4
MQNQIFELQYALDTFYLLMCGALVMWMTAGFTMLEAGLVRSKNTVEILTKNIALFATACTMYMICGYAIMYDGNLFLSGIAGTESLVADALATSAENGFDGDAVYSSASDFFFQVVFVATCMSIVSGAVAERMKLWSFLLFAVVMTGVIYPLEGSWTWGGKAVFGLYSLGDLGFSDFAGSGIVHMAGAAAALAGVLLLGARLGKYGSKGEIRAIPGANLPLAALGTLILWMGWFGFNGGSVLKLGDIASANSVAVVFLNTNAAAAGGAIGALLIARLIFGKADLTMLLNGALAGLVAITAEPLTPSALQATLFGMTAGIIVVLSILLLDKIKIDDPVGAISVHGVVGLFGLLIVPLTNPAASLIGQLAGAATIFAWVFVSSLIIWSIIKFVIGLRISEEEEYQGADIAECGMEAYPEFIR

SEQ ID NO: 32204 - protein, 647 aa, Psychrobacter arcticus 273-4
MGKVIGIDLGTTNSCVAVMEGDKVKIIENAEGTRTTPSIVAYKDDEILVGQSAKRQAVTNPNNTLFAIKRLIGRRFDDKVVQKDIGMVPYKIAKADNGDAWVEINGKKLAPPQVSAEILKKMKKTAEDYLGEAVTEAVVTVPAYFNDSQRQATKDAGKIAGLDVKRIINEPTAAALAYGMDKKQGDSTVAVYDLGGGTFDVSIIEIADVDGEQQFEVLATNGDTFLGGEDFDSALIDFLVAEFKKDQDVNLKGDSLAMQRLKEAAEKAKIELSSAQSTEVNLPYITADSSGPKHLVVTISRSKLESLTEELVQRTMGPCKMALEDAGIKIGDIDDVILVGGQTRMPLVQQKVQEFFGQEPRKDVNPDEAVAAGAAIQGAVLSGEKTDVLLLDVTPLTLGIETMGGILTPIIEKNTMIPTKKSQVFSTAEDNQPAVSIQVYQGERKIANQNKQLGRFDLTDIPPAPRGLPQIEVSFDINADGIMNISATDKGTGKAQSIQIKADSGLSDEEVEQMIRDAEANAAEDEKFANLAQVRNEADGRIHAVQKALKDAADKVSDDEKSSVETAISELEAAAKEDDHDDIKAKLEALDNAFLPVSQKIYADAGAGSEGMDPNQFQQGADNAGENNQADDDVVDAEFTEVEDDKK

SEQ ID NO: 32205 - protein, 312 aa, Nicotiana benthamiana
MGEEVKITGGEAFAGDDNRILEWEDGLPSLDDITPLSQALIPPELASAFKISPEPAKTMTDVNRASENTFSSLRGSGPLQQLQILSSPETEHGSDPRKTRRIDPEMLEADSALPRNENCGGGDDSNNKSASKTLNKRPRLVWTPQLHKRFVDVVAHLGIKNAVPKTIMQLMNVEGLTRENVASHLQKYRLYLKRMQGLSNEGPTSSDHLFAFTPVPQSLQQSGGNGQNGNGHNSSGYNSNGHNSNGHAQMPMQMPMPMPMIYPPQMVPMPMMGISGHGHGHGFHHQYNMGAQQRDWSGNKFGSYHHVAPSDE

SEQ ID NO: 32206 - protein, 314 aa, Solanum tuberosum
MGEEVNLTDYEYSGGNDDRLLWEVGLPDVDDLTPLTLQLIPSELAAAFRISPELSKTMTDVNRASQNTFSSLQRWHSQDMASMNNSYFKPFSYERTREETVTERDETDLIREGSDPRKLRRVESGGTEEADSSLCNENFADDSSAKTPKRPRLVWTPQLHKRFIEVVAHLGIKGAVPKTIMQLMNVEGLTRENVASHLQKYRLYTKRMQPNEGPSSSDHLFTSTPAAESMRESSEGGHLRNTNGHMAAPTLMPYQPQMVPMPMMGMPNGGHVVMPVGYGGGPPLGFHHHYNMVQQRDWSGNNFGYYHPVASNDK

SEQ ID NO: 32207 - protein, 380 aa, Streptomyces lividans
MTYLDAAATTRVDQRVADIVLHWMTAEFGNAGSRHEYGIRAKRGVERAREYLASTVSAEPDELIFTSGATESNNIALLGLAPYGERTGRRHIITSAIEHKAVLEPLEHLAGRGFEVDFLTPGPSGRISVEGVMERLRPDTLLVSLMHVNNETGVIQPVAELAQQLRATPTYLHVDAAQGYGKVPGDLTTPIDMISISGHKIGAPKGVGALVTRRREEMDDERVPLEPIMFGGGQERKLRPGTLPVPLIMGLAEAAKIFEAEHAQWQVAAQDLRSRLLAGLASTSFQVNGDQDHVVPHILNLSFEDVDAEAFLVTLKDLVAVATGSACTSASFTPSHVLRAMGLPEEAASKSLRFSWTPGQATDLDVEELARGVAKLKPSY

SEQ ID NO: 32208 - protein, 924 aa, Pisum sativum
MMELRVICIIRLVVACVLCLCIFIRSASSATEGFESIACCADSNYTDPKTNLNYTTDYRWYSDKSNCRQIPEILLSHRSNINFRLFDIDEGKRCYNLPTIKDQVYLIRGTFPFDSVNTSFYVSIGATELGEVTSSRLEDLEIEGVFRAPKDNIDFCLLKEDVNPFISQLELRPLPEEYLHDFSTNVLKLISRNNLCGIEDDIRFPVDQNDRIWKATSTPSYALPLSFNVSNVELNGKVTPPLQVLQTALTHPERLEFVHVGLETDDYEYSVLLYFLELNDTLKAGQRVFDIYLNSEIKKEGFDVLEGGSKYSYTVLNISANGSLNITLVKASGSKFGPLLNAYEILQARPWIDETDQTDLEVIQKMRKELLLQNQDNEALESWSGDPCMLFPWKGVACDGSNGSSVITKLDLSSSNLKGTIPSSVTEMTKLQILNLSHNHFDGYIPSFPPSSLLISVDLSYNDLTGQLPESIISLPHLNSLYFGCNQHMRDDDEAKLNSSLINTDYGRCNAKKPKFGQVFMIGAITSGSILITLAVVILFFCRYRHKSITLEGFGGKTYPMATNIIFSLPSKDDFFIKSVSVKPFTLEYIELATEKYKTLIGEGGFGSVYRGTLDDGQEVAVKVRSATSTQGTREFDNELNLLSAIQHENLVPLLGYCNEYDQQILVYPFMSNGSLLDRLYGEPAKRKILDWPTRLSIALGAARGLAYLHTFPGRSVIHRDVKSSNILLDHSMCAKVADFGFSKYAPQEGDSYVSLEVRGTAGYLDPEYYKTQQLSEKSDVFSFGVVLLEIVSGREPLNIKRPRVEWSLVEWAKPYIRASKVDEIVDPGIKGGYHAEALWRVVEVALQCLEPYSTYRPCMVDIVRELEDALIIENNASEYMKSIDSLGGSNRYSIVMDKRALPSTTSTAESTITTQNVSHPQPR

SEQ ID NO: 32209 - protein, 520 aa, Lilium longiflorum
MSRHESRKLSDDYEVVDVLGKGGFSVVRRGISKSRGKNNDVAIKTLRRYGYTLPGAQRSQPGQRGLSPLGMPTLKQVSVSDALLTNEILVMRRIVEDVSPHPNVIHLHDVYEDANGVHLVLELCSGGELFDRIVAQDRYSESEAAEVVQQIASGLAALHKSTIIHRDLKPENCLFLNQEKRSTLKIMDFGLSSVEDFTDPIVALFGSIDYVSPEALSQRQVSSASDMWSLGVILYILLSGCPPFHAPSNREKQQRILAGDFSFEEHTWKTITSSAKDLISSLLSVDPYKRPTANDLLKHPWVIGDSAKQELIEPEVVSRLRSFNARRKLRAAAIASVLSSKVLLRTKKLKNLLGSHDMKSEELENLRAHFKRICANGDNATLPEFEEVLKAMKMNSLIPLAPRVFDLFDNNRDGTIDMREILCGLSNLRNSQGDDALQLCFQMYDADRSGCISKEELASMLRALPEDCVPADITEPGKLDEIFDQMDANSDGVVTFDEFKAAMQRDSSLQDVVLSSLRTI

SEQ ID NO: 32210 - protein, 527 aa, Pisum sativum
MEYGTRKLSDVYEVSEILGRGGFSVVRKGTRKSNNDDEKSQSQSKSQSQSQVAIKTLRRLGTSNNLPRKKDGGENSTETMMKFPTMRQVSVSDALLTNEILVMRRIVENVSPHPNVIDLYDVYEDTNGVHLVLELCSGGELFDRIVAQDKYSETEASTVVHQIVAGLEAIHRANIIHRDLKPENCLFLDVGKDSSLKIMDFGLSSVEEFTDPVVGLFGSIDYVSPEALSQGKITTKSDMWSLGVILYILLSGYPPFIAQNNRQKQQMILNGNFSFYEKTWKGISQSAKNLISSLLTVDPAKRPSAQELLSDPWVKGEKAKDDQMDPEIVSRLQRFNARRKLRAAAIASVWSSTIFLRTKKLKSLVGSYDLKEDEIENLRMHFKKICADRDNATLCEFEEVLKAMKMPSLIPFAARIFDLFDNNRDGTVDMREILCGFSSLKNSKGEDALRLCFQMYDTDRSGCITKEEVASMLRALPYDCLPTDITEPGKLDEIFDLMDANSDGKVTFDEFKAAMQRDSSLQDVVLS

SEQ ID NO: 32211 - protein, 483 aa, Xylella fastidiosa Dixon
MLKKHLFIVKPIEPTNHTGTGKGETQLKRSLTARQLVMLGIGAVIGAGIFVLSGHAAAEYAGPAVVLSYILAGIACALAGLCYAEFAAMLPVSGSAYSYAYATLGEFTAWFIGWNLVLEYMFSASTVAVGWSGYLNSFLSSFGYGLPASLSSAPLDVVDGRLIYSGGLINLPAVAIVAAISGLCYVGITQSAFVNSITVAIKVSVIVLFIAFATRYVNTDNWVPFVPDNVAPGKYGIEGVIRGAAVVFFSYIGFDAVSTTAGEAKNPQRDMPIGILGSLAICTVIYIVFSGVLTGLMHYSQLDTPKPVATALETYPTLSWLKHVVEIGAIAGLSSTMLMMLMAQPRIFYAMSQDGLLPKLLSKVHPKFQTPHVGTLIVGACACTLAGLFPISLLGDLVSMGTLLAFATVCIGIVVLRRTRPDLPRPFRVPIYWVIAPAGAAACLYLFWQPFTEHWPLMVGWTVLGLVMYGLYGYHHSKLRHGG

SEQ ID NO: 32212 - protein, 464 aa, Xylella fastidiosa Dixon
MFKQLWATKLSQPSQDSAEGLSLQRVLGVWGLTALGIGAVIGGGIFVITGQAAANHAGPAIMLSFALAAICCTFCALAYAEFAAMVPVSGSAYTYTYATFGELAAWFIGWMLVLEYGVSAAAVAVSWSGYFLSLLQHLGIHLSAALVNAPLDGTLHATGAIANLPAATIVLLLTWLCYFGIRKSSKINIAMVALKSGLILLIIGVGWKYVNPDYWQPFIPTNQGPGKYGWNGVLHGASMVFFAYIGFEAVSVAAQESHRPQRDLPISMMAAVMTGLVPYTQLGTDEPVVTAVAAHPQLGWLRVVVEIGALVGLSSVVLVMLIGQPRIFMIMAGDGLLPPIFSTIHSKHRTPHINTVITGLGIALLAAVFPLDVLGELTSMGTLIAFTAVCAGVLILRCTRPDLPRPFRMPAAWLFCSAGVLSCITLLSAMTRHNWMLMSVWTVLGFSLYFSYGYRHSKLHREST

SEQ ID NO: 32213 - protein, 298 aa, Xylella fastidiosa Dixon
MTQTVPYRCGRIAVIGRPNVGKSTLTNALVGTKISIVSNRPQTTRHRLLGIATFPEGQIVLVDTPGLHREQKHPMNRLMNRTARGSLEDVDAALLVTESTHWNEEDTLAYNLLNDTGIPVVLVINKIDRFKDKSALLPLLTHINENHTFATIHPVSALKRKGLETLVSDLLALLPEGDPMFSEDEITDRSQRFLASELVREQVMRQLGEELPYATTVEIEYFTENTGLFRIGALIWVERESQKAIVIGKGGARLKEIGVKARQQMERLFQTKVFLETWVRVRKDWSNNEAALKTFGYE

SEQ ID NO: 32214 - protein, 480 aa, Xylella fastidiosa Dixon
MSFLPSFLKRKSIDLITVHEEGRRLVPTLSWPHLIAFGIGAIVGTGIYTLIGVGAEKAGPAVLLSFVIAGVICACAALAYAEMATLMPVAGSTYTYSYVALGEGIAWIVGWSLILEYSLVVSTVAVGWSGYMTGFLKSVGVDMPLALTAGPYAGGIINLPAVVITCVVAGLLIVGTKESTTLNAVLVVVKIIALSVFVVIALPHFDMAHLKPFMPYGFTKSIDTGGVERGVMAAAAIIFFAFYGFDAISTAAEETKNPSRDLSIGIIGSMIGCTLIYVLVALAAIGAMHYTVFGPSTEPLALILRQLDQGNTARLIGAAAIIALPTVLLAFLYGQSRILFVMSRDGLLPRGLSTVNERTGTPIATTLFTAILVATAAGLVPLGEIAALANAGTLTAFIAVALCLLVMRVREPQRVRAFRTPLAWVVGPIAIAGCLYLFWSLPKMTQSLFLLWNALGLCVYLVYGRHTSLLSKGVSIDTPR

SEQ ID NO: 32215 - protein, 155 aa, Xylella fastidiosa Dixon
MSRRIVARKSRIHGNGVFAVVSIHQGERIIEYKGRIRTHAAVDANSHGHIESGHTFLFTLNDDYVIDANDAGNIARWINHSCSPNCEAVVEEDTGGNRRKDKIFIQAIRDIASGEELTYNYGIVLAERHTARLKKIWACLCGSDHCTHTMLQPKR

SEQ ID NO: 32216 - protein, 280 aa, Xylella fastidiosa Dixon
MTMLKIDTLHASVAGKEILKGLSLDIAPGQVHAIMGPNGAGKSTLGHILAGRDGYDVTAGQVTFDNRPLLTLQPEERAAAGLFLAFQYPVEIPGVNNTYFLRSALNAQRKARGEEELDSIQFLKRVREKLAVLHLKDELLHRGVNEGFSGGEKKRNEIFQLAVLEPKLAILDETDSGLDIDALKTVADGVNALRSPERSFLVITHYQRLLDYIKPDVVHVLAEGRIVETGGPELALELEEHGYTWLKNRVIPTSETMPPSPHDPHTDTPRLKAPTPRENV

SEQ ID NO: 32217 - protein, 345 aa, Xylella fastidiosa Dixon
MEVHFTPVLNTCMAVSSLQHNHLSDTALIASARRVIEIEREALTLLNERIGAPFVAACRLILNSHGRVISTGMGKSGHIARKIAATLASTGTPAFFVHPGEAGHGDLGMITDSDVILALSYSGESDEVRMLLPVLKRQGNPIIAMTGRPQSTLAQAADVHLDVSVTTEACPLDLAPTSSTTTSLVIGDALAVALLDARGFTAEDFARSHPAGHLGRRLLLHITDVMHSGDDLPAVHEEATLSEALLEMTRKRLGMTAIVDNEGRLQGVFTDGDLRRALDSNIDVRNARINEVMTRHPKTINADQLAAEAARLMEANKINGLIVVDPQQRAVGALNIHDLLHAKIV

SEQ ID NO: 32218 - protein, 580 aa, Xylella fastidiosa Dixon
MSEITTTDAQAQPEKKDFIRQIIREDLAHGTHTHIHTRFPPEPNGYLHIGHAKAICLDFGVAAEFGGHCTLRMDDTNPSKEDPAFAAAIQEDVSWLGFHWNALRHTSDYFEVLYLAAEKLIADGKAYVCDLNSEQVREYRGTLTEAGRPSPWRERSPDENLELFRQMRAGTFPDGTRTLRAKIDMASGNINLRDPALYRIKHVEHQNTGNTWPIYPMYDFAHALSDAIEGITHSLCTLEFEDHRPLYDWCINHVDLPNNSHLLKPLLDKGFPQEPSQPRQIEFSRLNINYTVMSKRKLTALVDEKLVEGWDDPRMYTLQGLRRRGYTPAAMRLFVERIGISKQNSIIDFSVLENCLRENLDTIAPRRMATIAPMKLVLTNLPEDHEEQLIFPNHPKDDTQGTRTVPFSRELWIERDDFSEVPPKGWKRLVPGGEVRLRGAGIARIDEVVKNAEGHIIALHGWLDPTSRPGMEGAHRKVKGTIHWVSAPHAVAAEIRLYDRLFSIEKPDDNTDGKTYRDFLNPDSKRVVHGYIEPAAAQTAPEHAFQFERLGYFVTDRHDHDATHPVFNRSVTLRDTWQRD

SEQ ID NO: 32219 - protein, 586 aa, Xylella fastidiosa Dixon
MPAPHIPNRLQRLNHLRILWPFMRRHLALFSGWLIALAVSSAATLTLPSAFKQMIDHGFSSEGQINRTFALLLLVAVILAVGTAARLFSVSLLGEKIITDLRSQLYAHLIGLDASFHDRNRSNELVSRLATDSELLRSIIGSTMSVATRSTVTAIGSLIMLFITSPRLASLSLVVIPLVILPIVLGAQQLQKAARTSQDRIADTNSFAAETLRALRTVQAYAREHYERTRFDRTLETSLQAARQRIHIQTWVTAASIVLIFSAIVGVLWAGAHDVIAGRMSAGTLGEFVLYALIGGGSIGALAEVWNELQRAAGGMGRIFELLKEKNTLTVPATPALPPHPLRGEIRFERVGFHYPQRPETPALDDIDLHIRPGETIAFVGPSGAGKSTLISLLLRFYDPTHGRILIDGVDLRQTDPKVLRTHIALVQQQPTLFTASAMENIRYGRLDATTAEIEIAARSSEADGFIRALPQGYATELGEHGLSLSGGQQQRIAIARALLKEAPILLLDEATNALDAQNEQAVQQALERLMTGRTTLIIAHRLVTILKADRIVVMDQGRIVAQGTHSELIAAGGLYAKLARLQFIE

SEQ ID NO: 32220 - protein, 322 aa, Xylella fastidiosa Dixon
MPTIQDERNLMVFSGNANKPLTQSICKELGVRMGKSLVSRFSDGEEQVEIEESVRRQEVFVVQPTCAPSAENLMELLVIIDALKRASVSSVTAVIPYFGYSRQDRRMRSLRVPITAKVAAKMISVIGADRVLTIDLHADQIQGFFDVPVDNVYASPLLLADIWRAYGTDNLIVVSPDVGGVVRARAMAKRLGDTDLAIIDKRRPRANVATVMNIIGEVNGKTCVLVDDLVDTAGTLCAAAVALKQNGATKVVAYITHPVLSGPAVDNINNSELDELVVTDTIPLSDAARECRKIRQLSVAELLAETIRRIAFGESVSSLYVD

SEQ ID NO: 32221 - protein, 104 aa, Xylella fastidiosa Dixon
MLVMERIQAEIEEHPLVLFMKGTLEFPMCGYSSRATQALLAAGARHLHIVNVLAEAEIRANLPRFSNWPTFPQLFIHGELIGGCEIILELFESGDLKRILSEAD

SEQ ID NO: 32222 - protein, 483 aa, Xylella fastidiosa Dixon
MHSNSCHLSDMKNGFFAICIFIVLALLAGGNAIGAEAQVQTNPLPSEQITTELLMSEATPSDAVAIPKTTPTPVVDKGDVAWMLTSTLLVLLMALPGLALFYGGMLRSKNVLSMMVQIGVVFSLIAILWVVYGYSLAFADGDMFIGTFNKAFLYGVDTATLTDTFSKGFKLPEYLYVAFQLTFAGITGVLIVGAFAERVKFAAVLLFIFLWFSFGYLPLAHMVWSTPGFLLSKGALDFAGGTVVHINAGIAGLVGAYFVGKRIGFGQVAVKPHNVPMTFTGAALLWVGWFGFNAGSALEANSIAALAFINTMLATAAAILVWSLLEKMTKGKFSALGVASGMIAGLVGVTPAAGTVGPFGAIAIGAVAAVCCIWGITGLKRLLKVDDTLDVFGVHGIGGIVGAILTGVFTDKALGGQGYAEGMTMSNQVMIQAMGVGISVLWIGIVSLVGFLIVKLLFGLRVSEEAEREGLDITSHGESAYES

SEQ ID NO: 32223 - protein, 397 aa, Xylella fastidiosa Dixon
MSASFSPHTITLIKSTVPLLAEHGTTIIEAMYHRLFEDPQIEALFNQANQKNGTQIHALAGAILAYARNIDNPGVLASAIERISQKHVGYAIHPEHYPHVATALLGAIKQVLGDVATSEVLEAWGEAYWFIANLLKDREAVIREGIMTKNGGWIHWRRFVISKRIPESETITSFMLHPEDGGPVVPHQAGQYLTFRFDAAGMPGMKRNYSISCGPNSDYYRITVKREHGTGASAFLHDQAKVGTIIECTPPVGDFFLPSVIERPIVLLSGGVGLTPMVSMMEQIAEAHPDAQVWYVHGTQNRETHAMDAHIRALVSRHKHMKATTFYTQRSEADDAEAGFITIDWLRANTPFQKADFYLCGPRPFLRTFVRDLIGAGVPAAQVHYEFFGPMDEEMAA

SEQ ID NO: 32224 - protein, 565 aa, Xylella fastidiosa Dixon
MNQTRVLLIFSWLTVATLLWMDWGKNKNETLEISASHNLGVDSHLELEHAVPQINAGAVPVQKDSQLIAAAPKVPVINVTTDVLQLKLDGFSILAADLLRFPQSKDRGAKPIKLLTDDPNYPYSATTGWVSQSNSPVPNLSTFLPEQSGVSYKLANDQDRLVVPFVWTAANGVSIRRTFTFERGRYAILIRDEIRNSGETPWNAYVFRKLSRVPIPNILNRAMTNPDSFSFNGAVWYSEKGGYERRAFKDYMNDGGLNREIGGGWIALLQHHFFTAWIPQKDQASLYLLAQNGSRDIAELRGPAFTVAPGQSTMTEARLWVGPKLVEQITKEHVKGLDRVVDYSRFQLMALIGQGLFWILSHLNSLLHNWGWAIVGLVVLLRIAMYPLSAAQYKSAAKMRKFQPRLQQLKERYGEDRQKFQQAMMELYKKEKINPMGGCFPILIQMPIFFALYWVLVESVELRQAPWLGWIQDLTTRDPYFILPLLNIVIMWATQKLTPTPAGMDPIAGKMMQVMPLIFGVMMAFVPSGLALYWVINGGLNLLIQWWMIHQYADFSRKRSRENIK

SEQ ID NO: 32225 - protein, 401 aa, Xylella fastidiosa Dixon
MSKKNIVLAFSGGLDTSFCIPYLKEQGYAVHTVFADTGGVDEDERDFIEKRAAELGVASHLTVDGGPAIWDGFVKQLVWAGEAYQGQYPLLVSDRYLIVDAVLQRADALGTCAVAHGCTGMGNDQVRFDLAIKAQGDYTIIAPIREIQKEHTQTRLYEQKYLEERGFGVRAKQKNYTINENLLGITLSGGEIDKWEAPGEGARGWCAPRSAWPTDPLTVAIKFVEGEAVAVDGKPLSGPQILMKLNKLFASYGVGRGIYTGDTVIGLKGRIVYEAPGLTALLTAHRALEDAVLTKQQNRFKPHIARKWVELVYEGFFHDPLKTDLETFLKSSQANVNGEIVLETRGGRVDAVAVRSPHILTSKGVTYAQTADWGIEEAEGFIKLFGMSSTLYAHVNRSLRS

SEQ ID NO: 32226 - protein, 764 aa, Xylella fastidiosa Dixon
MSNDTFKQAAIDYHRTQPAGKIKVVATKPMLTQRDLSLAYSPGVAFACQAIVENPQQASELTARGNLVAVISNGTAVLGLGNIGPLAGKPVMEGKGVLFQKFAGIDVFDIEIDESDPDKLVDIIASLEPTFGGVNLEDIKAPECFIVERKLRERMSIPVFHDDQHGTAIIVGAAVLNAMVITGKKIGEVKLATTGMGAAGVSCVNMLVSLGLNPDNILAYDREGVIHTGRTDLDPEKQRYARDTDKRTLAEIVEGADIFLGLSAAGILTPEMVVTMAPDPVIFALANPIPEIMPEAVCAVRTDAIIGTGRSDYPNQINNVLCFPYLFRGALDVGATTINEEMKIACVKAIAALARCEASDLGAAYGGETPSFGREYLIPRPLDPRLLVELSSAVAQAAMDSGVATRPITDMSAYHDKLSQFVYRTSLMMKPVYDRARADKQRVVYAEGEEEVILRAVQNVIDEGLAFPILIGRPDVIESRIQRMGLRMKVGVDFEVTNIHDDPRFNDYWQYYHGVTERRGVTVSAAKELMRSRPTLIASVMVARGEADALLTGAVGRFHKRLGYARSVIPLEPRVSSTAAMTGVINQHGAFFFVDTHVQEDPSAEQIAEATLQACYRLKLFGIEPSVALLSHSNFGSHDSRDALKMRQVRELLLKRSPRLNIDGEMQADTAWDEVLRERIMPNTTLKGRANLFVFPNLEAANIAYNLVRVFTDGVAIGPILMGISKAVHILTSSTTSRRVMNMTAIAAVDAQIRKQFEGGKRGG

SEQ ID NO: 32227 - protein, 563 aa, Xylella fastidiosa Dixon
MCSIFGIFNLQPSDNLQILRHQALECSQRQRHRGPDWSGVYVDVGAILVHERLAIVDPAGGAQPLLSEDGTLALAVNGEIYNHAVLKGTLQQPYAFQTHSDCEVINALYREETPTSFLNRLNGIFAFVLWDKTTGRGLIARDPMGVVPLYWGHDQDGRLRVASEMKALVEHCSDVAQFPPGHWYDTTTGTLVKYYERPWKNYSAVEGVQVSLQELREAFERAVHRQLMTDVPYGVLLSGGLDSSLVAAVAARYARHRIETNDQSEAWWPRLHSFAIGLKDSPDLSAANVAAEALNTVHHRFEYTFQEGLDVLPEVIRHIETYDVTTIRASTPMFLLARRIKAMGVKMVLSGEGSDEIFGGYLYFHKAPNAREFHEELVRKLNALYYYDCLRANKAMMAWGVEPRVPFLDREFLDVAMRMDAQHKMVDKTSNGPQRMEKGILRAAFDGYLPPSILWRQKEQFSDGVGYGWIDGLKAHAETQVSDHALATAETRFQVNPPQTKEAYYYRSIFERFFPSPAAAETVPGGKSIACSSPAAIAWDASFATMADPSGRAVSGVHQQALL

SEQ ID NO: 32228 - protein, 1477 aa, Xylella fastidiosa Dixon
MLYDASDERDACGFGMVAQLDDQPSRALLEIAIAALSRMTHRGGVAADGLTGDGCGLLIRKPDAFLRALACEAGIALGPRYAVGMVFLPGERAAAAHCRQVLEAELQRVGVRLCGWREVPINRSVCGQLARDTLPHIEQVFVDIDPKHSEDAFGVALFLARRRAERQLCDYHDFYVATLSPYAISYKGMVLPDKLPVFYPDLQRSELSSSVIVFHQRFSTNTLPRWPLAHPFRLLAHNGEINTIEGNRRWAQARSKVWQSPRFDMAEFDPVISMKGSDSQSLDNMLELLIAGGMDLLQALRILVPPATRTLEFKDADLASFYEFYGLNTEPWDGPAGIVAYDGRYAACMLDRNGLRPARWMLTADRHFLVASEAGVWELPVERVIRKGKLGPGEMMAIDLKRGDLLDSDAIDRINRARAPYKQWLQQGVTYLQTELIDPSLVEEPFSDQTLCSYQKLFQLSTEEVEQVLRPLAETEQEAAGSMGDDTPMAVLSAQIRPLYDYFRQAFAQVTNPPIDPLRESIAMSLTTQLGRETNIFHAGPETVNHVILDSPVLSQRKLRQLLKMPQYLEKNRLIDLSYTVEEGLQAGLKRMCDEAEQAARDGIVMLLLSDRYPVPERPMAHALLATGAVHHHLCRVGLRCDVNLIIETGTARDPHHMACLLGFGATAVYPYLSYQMLFNLGRRGILKLQKAGEQSQIGRSYRKGIYKGLSKIISKMGICTIASYRGAQLFEIVGLDPDVVALCFPDTPARIGGVSLMQLHTEACELTARAWNDRIAPEVGGLLKYVHGGEYHMYNPDVVMTLQHATRTGDAADWRLYMDAVHTRPPSALRDLLQLKKAEIPTPLDQVAPATDVLCRFDTAAISLGALSPEAHEALAVAMNRLGGRSNSGEGGEDPARYGTERRSKIKQVASGRFGVTPEYLINAEVLQIKIAQGAKPGEGGQLPGHKVNDLIARLRYAKLGIGLISPPPHHDIYSIEDLAQLIYDLKQVNPQALVSVKLVSHVGVGTIAAGVVKAGADLITVSGHDGGTGASPISSIRYAGVPWELGVAEVHQALVANDLRERTTLQTDGGLKTGLDVVKAALLGADSFGFGTAPMIVLGCKYLRICHLNNCATGVATQDERLRANHFTGLPERVENFFRLLAEEVRQWLSYLGAMSLDDIIGRTDLLQQLEVSSREGVRVNLSRLLTNACYEGTHCAAQRLYESPDSLSVQIDSLLADAIANKTGGDYRFLIHNTDRSVGTRLSGAIARVHGNHGMEDAPLHLRFRGTAGQSFGAFNVGGLHLELEGEANDYVGKGMAGGCLVVRPPRGARFEARHTPILGNTCLYGATGGELFAAGRVGERFAVRNSGALAVIEGAGDHCCEYMTDGVVLVLGKVGLNFGAGFTGGLAYVLDIERDFVDRYNHELIDIHRVSVEGFENYRQHLRHLVVRHRALTGSIWAQQILDEFRDYIGRFWLVKPKAASIESLAESLRSAA

SEQ ID NO: 32229 - protein, 868 aa, Xylella fastidiosa Dixon
MSASPTVERWIVLKFGGTSVSRRHRWDTIAMVVRKRLEEHGTRVLIVVSALSGVTNELTAIAQGVVDSAQRVAALEQRHRDFLAELGLDAQAVLGTRFAMLSDLLQDARAVTRSLDWQAELLGQGELLSSTLGAAYLGASGVDIGWMDARDWLTALPPQPNQSEWSQRLSVSCQWKSDVEWRTRFDAQRAQVLITQGFISRHQDGGTAILGRGGSDTSAAYFGALLGAACVEIWTDVPGMFSANPKEVPDARLLTRLDYYEAQEIATTGAKVLHPRSIKPCRDTDVPMLILDTERPDVLGTRIDAEVEPVLGVKAISRRDGIVLVSMEGIGMWQQVGFLADVFTLFKKHGLSVDLIGSAETNVTVSLDPSENLVNTDVLTALSTDLSQICKVKIIVPCAAITLVGRGMRSLLHKLSEVWATFGKERVHMISQSSNDLNLTFVIDETDADGLLAVLHFKLIESGAMPVQDRAVFGSPWREIIGHVRTRVMPWWHSARMRLLAMRDEEGIGPCYVYHLPTVRERARQLNSVAAVDQRYYAIKANPHPAILRTLIEEGFGLECVSLGELRHVFAVVPHLVPSRVLFTPSFASRVEYEQAFLLGVNVTLDNVEALRLWPEVFRDRTLWLRIDLGYGDGHHEKVTTGGKTSKFGLSVKRIDEFIDVAKTLNITVTGLHAHLGSGVERGNHWSRMYDELAGFASRIGSVSTLDIGGGLPIPYRPDDEPFDVGAWGASLAEVKALHPKFQLVIEPGRFLVAEAGVLLTRVTQVIEKDDILRVGLEAGMHTLIRPALYDAWHGVENLSRLDETPHVLCDVVGPICESSDVFGRRRRLPAATASGDLMLIADAGAYGFSMASTYNLRGLPAEVVLDA

SEQ ID NO: 32230 - protein, 308 aa, Xylella fastidiosa Dixon
MSLDSALRSRIETLLHSNRVVLFMKGRPGMPQCGFSAKAAGILQALGVEYAHVNVLDDQEIREGIKRYGDWPTIPQLYIDGELIGGSDIVSQMYENGELSTLLGVAAPDLTPPSITITPTAVEMLKGTLANAPGSTLALSIDSRFQPTFELAPINTQAIAAESNGLRVQFDLASARRAEGITIDWVDDIRGQGLVIDNPNVPQPIQELSPGDAAAQVDAGVLTLVDVRPADERAVASVAVPFRTMDGGERAVLEQLPKGTPLAFLCHHGGRSLQAAEHFRSLGFTSIYNIGGGIDAWSTQVDPGVPKY

SEQ ID NO: 32231 - protein, 638 aa, Xylella fastidiosa Dixon
MGKIIGIDLGTTNSCLAIIEGGKGRVIENSEGDRTTPSIVAYTKDGEVLVGAAAKRQAVTNPKNTFYAVKRLIGRKFGDAEVQKDLDLVPYKITQHDNGDAWVATADGKKLAPQEISAKVLEKMKKTAEDFLGEKVTEAVITVPAYFNDSQRQATKDAGRIAGLDVKRIINEPTAAALAYGLDKKGGDRKIAVYDLGGGTFDVSIIEIAEVDGEKQFEVLATNGDTFLGGEDFDKRVIDYLVDEFNKDQGIDLRKDPLALQRLKDAAERAKIELSSSQQTEVNLPYITADASGPKHLNIKLTRAKLEALVDDLVRKSIEPCRIALNDAGLRTSDVQEVILVGGQTRMPKVQQAVADFFGKEPRKDVNPDEAVALGAAIQGGVLAGDVKDVLLLDVTPLSLGIETMGGVFTKIIEKNTTIPTKASQVFSTAEDGQSAVTVHVLQGEREQARFNKSLAKFDLAGIEPAPRGQPQIEVSFDIDANGILHVSAKDKKTNKEQKVEVKAGSGLSDSEIQQMVADAEAHREEDKKFQELVQARNHADGLIHSTRSAIKEHGSKVGGELIGRVEASLAELEAAVKGDDKNQIEAKSKTLEEVAQSLHMAATAEQQSASTGAGAGSSAKVDDVVDAEFTEVKGDKK

SEQ ID NO: 32232 - protein, 425 aa, Xylella fastidiosa Dixon
MMSNSPQTPLVTRQRLSEVRYEIRGELARRARELEAEGRKLIKLNIGNPGAFGFRAPEHLQRAIADDMGRTDPYTHQQGLPIAREAIAAAYARRHYPDADADRVFVGNGVSELIDLSLRALLNPGDEVLVPSPDYPLWSAATILNDGRPVYYRCAPENGFQPDAVEIETLVSSRTRAIVLINPNNPSGANYSQELLERIAAIAVKHHLLLLVDEIYDQILYDGAVFVPVAPLAGTHPCITFSGLSKVHRACGWRVGWALLSGSSIQVDNLRNAMDLLGALRLCANVPGQYAIDAAVNGPDTITPLCSPGGPLYETRRAVIDACAASEHLSLVVPAGALYAFPSVVGPAARHFDDYAFALELMNEEGVLVVPGSSFNVPYRDHFRVTLLPDAGLIREVFSRIDRALSRRAEVAEKVVPLKLRSAAA

SEQ ID NO: 32233 - protein, 357 aa, Xylella fastidiosa Dixon
MKFVDEAEIQVIAGNGGDGCVSFRREKFIPLGGPDGGDGGDGGSVWLVADENLNTLVDFRHERIFKAQRGVNGMGQQMYGKAGQDKIISVPIGTVVINVQTDEVIGDMVRHGDRLLVAKGGTGGLGNMHFKSSINRAPRQARPGELGEERTLKLELKLLADIGMLGFPNVGKSTFIRAVSAATPKVADYPFTTLYPNLGVVKIEAYSSFVIADVPGLIEGAADGVGLGTQFLRHLQRTKLLLHMVDISATADAYGNEKVGVGLLPIEQVRKLEIELERHDPALLDKPRWLVLNKADLMPQEDAQDLAEALIAELHWTAPWYLVSAVSREGTWPIMKSAMTLFEHQREVAAEQSVSSR

SEQ ID NO: 32234 - protein, 410 aa, Xylella fastidiosa Dixon
MLRSMGRYSDAHSVDFAFFYVLTRDKSFMQVTSKLPQVGSTIFSVMSQLADVYGAVNLGQGFPDFPVPLRLQEALAGAVREGHNQYPPMIGVAGLRQGIAAKVLRCYGAQVDVDVEITVTSGATEAIFNAIHAVVGAGDEVIVLDPAYDCYEPGIVLAGARAVHVPLDAVSFTVDWERVGAAITSRTRLLIVNSPHNPSGALFSADDMRALAALLDGTDILLISDEVYEHIVFDGCGHESVLRWPQLRARAFVISSFGKTYHCTGWKIGYAIAPPALSAEFRKVHQYNTFTSFGPAQYAFAAMLREEPEYVEQVGLFYQARRDCFREQLLTTKLVPLPVSGGYFQLVDYGAVSDLSDVEFSRWLAVEKGVVSIPLSPFYETAPAGQRLVRLCFAKNDMTLGAAIERLQRL

SEQ ID NO: 32235 - protein, 126 aa, Xylella fastidiosa Dixon
MQLSLLKAKIHRATVSHSELNYEGSIAIDGLLLEAAGLYEFEKVHIWNVTNGARFTTYAIRAEHGSGIISVNGGAARYVQVGDLVIVAAFAQMSEDEAAVFRPNLVYVDAANAMTHTNHSIPTQVA

SEQ ID NO: 32236 - protein, 861 aa, Xylella fastidiosa Dixon
MRMDKLTSRFQNALADAQSLAVGRDHTIIEPVHVFSALLDQQGGSTRPLLVQAGVNVPLLRERLTEILEALPKVSGQTVNVSPSNELSRLFHRTDKLAQQHGDQFMASEWFVLAVVDDSGGLGQALRAAGAEKKKIEAAIDKLRGGETVQTENAEEQRQALEKYTIDLTARAESGKLDPVIGRDEEIRRTIQVLQRRTKNNPVLIGEPGVGKTAIVEGLAQRIVNGEVPEGLRSKRLLSLDLGALIAGAKFRGEFEERLKGVLNDLAKNEGRVILFIDELHTMVGAGKADGAMDAGNMLKPALARGELHCIGATTLDEYRKYIEKDAALERRFQKVFVGEPTVEDTIAILRGLKEKYALHHGVEITDPAIVAAATLSNRYITDRQLPDKAIDLMDEAASRIRMEIDSKPEELDRLERRLIQLKIQREMLKKEKDEASKQRLADLERDIEVLDREFSDLEEVWRSEKAALQGATKIKESIEQAKLDLEAAQRRQDYAKMSEIQYGVLPALEKQLVAASQAEQHDFTLVQEKVTAEEIAEVVSRWTGIPVSKMLEGERDKLLRMEADLGRRVVGQEEAIKVVSDAVRRSRTGLSDPNRPSGSFLFLGPTGVGKTELCKALAEFLFDSQDAMVRIDMSEFMEKHSVARLIGAPPGYVGYEEGGYLTELVRRRPYSLILLDEVEKAHSDVFNILLQVLDDGRLTDGQGRTVDFRNTVIVMTSNLGSHQIQELSGDDSPEVYTQMKAAVMGVVQAHFRPEFINRLDDIVVFHPLDKAQIKQIARIQLRGLEKRLAESELKLDLDDRALELLGNVGFDPVYGARPLKRAIQSQLENPLAQQILAGAFVSGDTVQVGVDGGKLVFAKV

SEQ ID NO: 32237 - protein, 611 aa, Colwellia psychrerythraea 34H
MTDQKTETVTEPEAVAFASLGLPENLLSAVLSIGFTSATDIQALTIPPLLAGKDVLGEAQTGTGKTAAFGLPALAKIDTSIKKPQLMVLAPTRELAMQVAEAIESFGKDMKGLRVATLYGGQSYGPQFQQLERGAQVVVGTPGRLMDHLRRKSLKLDELRVCVLDEADEMLNMGFLEDIQWILDHIPKTAQMCLFSATMPPAIRKIANRFLKDPEHIKVAAVKKAKANITQYAWKVSGITKMTALERIAEVVEYDAMIIFVRTRNDTVDIAEKLERAGYPALALNGDLNQAQRERCIDQMKSGKSSILVATDVVARGLDIPRISLVINYDLPGDNEAYVHRIGRTGRAGREGMSIAFVRPREMYSIRHYERLTNGTVLNYDLPNIQDIGKIRIERTRVEVAKIVADKDISSMREIVEGMAAESEVSMIDLAAALLFQKQMKQPLQPKEDPKPRRDARERTDRNDRGNDRNSRGNDRNSRGNDSRSAGRDSRGGENRSNRDEKPRKAKVNRSDVDWQTYRLEVGKEHGARPGDIVGAIANEISLDSSYIGAINLHDKHSFVQLPKGIPTDLFNQLKGVRVRRQPLSITTSDEAVVSQQQRPARRTEKAPRHT

SEQ ID NO: 32238 - protein, 372 aa, Colwellia psychrerythraea 34H
MIIGVPKEIKNHEYRIGLTPAGVKELSVNGHEVIVEHNGGASIGFDNEQYIAAGAKIIDSAAEIFATADMIIKVKEPQPVECNMLRPGQILFTYLHLAPDPKQTELLVASGAICIAYETVTAASGGLPLLAPMSEVAGRMSIQAGAHALEKAQGGLGALLGGVPGVAPAKVLVIGGGVVGTQAARMAVGMGADVTILDRSLPRLRQLDTEFDGRLKTVYSTADAMDQLIVEADLVIGAVLIPGAAAPKLVTRAHIKMMKQGAVVVDVAIDQGGCFETSKATTHQEPTYVVDGVVHYCVANMPGGVARTSTMALTNATMPFAVTIANKGAKQALLDDEHLLAGLNVAAGKITYKPVADVLGYEYVEPSVALNA

SEQ ID NO: 32239 - protein, 418 aa, Colwellia psychrerythraea 34H
MALAKKTIKKVVLAYSGGLDTSAIIPWLKENYDGCEVIAFCADVGQGDEELEGVKEKAIASGASECYVVDLKEEYVKEYIYPILKTGSVYEGQYLLGTSMARPIIAKAHIEVALKVGADAVCHGCTGKGNDQVRFESCFAALAPELTVIAPWREWDMVSREDLLDYLAERNIPCAASLTKIYSRDANAWHISHEGGELEDPWCEPSKEVWTMTVDPMDAPDVPEKVQLSFKEGELVGIDGKDFSQHGAGAYEALMYLNEKGSAHGVGRIDIVENRLVGMKSRGCYETPGGTILMAAYKGLETLILDKESLKYRESVGLEFSHVIYDGRWFTPLAKAQLASAASFAEKLTGDVVVKLYKGMAQVIQRRSPNSLYSEAFATFGADDVYDQKHAEGFIRLFSLSSRITALSQKDSLKDKAE

SEQ ID NO: 32240 - protein, 318 aa, Colwellia psychrerythraea 34H
MTDNNFNQPLGGNQMPRFGGPGTMFRLPSSEISNELDIGIVGVPLDIGASNRSGTRFGPRSVRNESVLVRPYGMYTKAAPFDSFQIADIGDTPINTFNLADSIRIIEAHYDTIMASNIKPVTVGGDHTISLPILRALHKKHGMMALVHVDAHADINDSMFGEKECHGTIFRRAIEEGLVDPKKMIQIGQRATGYSAGDFQWAVDRGVRVVQAEECWLKSLVPLMEEVREVIGEDIPTYLTFDIDGIDPAFAPGTGTPEPAGLTSPQALEIIRGMWGTNLIGADLVEVSPPYDTSGNTSLLAANLIFEMLCSFPGCIRR

SEQ ID NO: 32241 - protein, 567 aa, Colwellia psychrerythraea 34H
MSRAYTGALSYPQKIVIILLNKISSQHLKGDIFGGLTAAVIALPLALAFGVSSGAGAIAGVYGAIFVGFFAALFGGTATQISGPTGPMSVVMALVFTQLIGSHPDTGLVLAFTCVILAGLFQILFGLLKLGKYFVMVPYPVISGFMTGIGIIIILLQISPLLGSAGDSNALAALMNIPNALSQQNTLATVLGVITLLLMIYWPEKWTKIIPAPLFALITLTVISATFFSQQGISVIGEIPTGFPSLSMPSLSLESLSQVSYFAFLLAVLGAIDSLLTSMVADTLTETHHDSDKELIGQGIANTIAGFFGALPGAGATMRTAINIRAGGKTALSGIIHSITLLIVILWAGDYAQYIPHTVLAGMLIKVGLDIIDWRFIFQIKKVGLFSATLMLLVLLLTVFVDLITAVLVGMFIANLVTLDRLTHIQLDNITFKRGDELLSEISSNETNIALTDDIQNNLSKSLANTLLLEIDGPVSFAVSRELSRRFTENLAFTTLVIDLSNAKLIGTTTAIMITDLIDRTKSKEKTVLVITGNEKINQSLDKLSLATLLDKKYQFTNREQALQTLI

SEQ ID NO: 32242 - protein, 465 aa, Colwellia psychrerythraea 34H
MRLRKKVRLRYQRELELFEKTNNEGTAPVRPKGHLYDCLKCCGTGLLQSANHPIADTEHYPHVAIIGGGIGGVALAVACLHRGIPFTLYERDSGFDARSQGYGLTLQQASKAIEGLGILSLEKGLISTRHVVHTTKGKVIGEWGIRKWLQLDTKKSPKRTNIHIARQSLRLALLEQLGGHDAVQWGHQLVSFKEKTNECTDQFVDLSFQVAGKIKNAKADIVVGADGIRSSVRKLLIGEDASPLLYLGCLVILGICPLAALDGLESPLLDSATVFQTANGHERIYIMPYSSDSVMWQLSFPMPEEEAKALSALGVQALKKEACHRCQWHDPIPQILAATLEAQISGYPVYDRALLKSEFLEKGDQVTLIGDAAHPMSPFKGQGANQALLDALALARGISKGCRPFSRWRETGIRESVLTEFESEMLARSASKVKDSAEAAQFLHSDIVLHEGDEPRGRCLQKKDA

SEQ ID NO: 32243 - protein, 68 aa, Colwellia psychrerythraea 34H
MSTTTGTVKWFNEAKGFGFIEQENGPDVFAHFNAIVGDGFKTLAEGQKVEFTVTDGQKGPQAENIVAL

SEQ ID NO: 32244 - protein, 69 aa, Colwellia psychrerythraea 34H
MSDTVTGKVKFFNETKGFGFIEQENGPDVFVHFSAISGDGFRTLADGQAVTFTVKQGQKGPEAENVLAV

SEQ ID NO: 32245 - protein, 398 aa, Colwellia psychrerythraea 34H
MLTDKHIDIIKSTIPLLENAGPALTGHFYQRMFSHNPELQDIFNMANQHSGRQQVALFEAIAAYAKNIENLAALTTAVERIAQKHTSFNIKADHYAIVGHHLIETLRELASDVFTADVEEAWTVAYQFLAQIFINREAELYQQRAETLGGWRDARSFTVVDKVVESTLVTSFVFMPVDDKAVIGFQPGQYLGIEVSDPSREFKEIRQYSLSTKANDQTYRISVKREINNVDGITAKGIVSNYLHDEVNVGDSINLYAPAGDFFFNDRQAPVVLLSAGVGITPMQAILETLAQQGYNHPVQYLHACENSEQHSFDQRTTELINQNNWQQHIWYRTGDVSQQHILQGMMDFTKIDLPIEQGDFYLCGPIPFMQFAKQQLLTLGVAASNIHYEVFGPHADL

SEQ ID NO: 32246 - protein, 72 aa, Colwellia psychrerythraea 34H
MAHGTVKWFNNAKGFGFIRPDSGGEDIFAHYSTIEMDGYRTLKAGQDVDYELNDGPKGHHAASIKLADGELE

SEQ ID NO: 32247 - protein, 404 aa, Colwellia psychrerythraea 34H
MKLPIYFDYSATTPVDKRVAEKMMQYMTNDGHFGNPASRSHKFGWQAEEAVDIARNQIAELINADPREIVFTSGATESNNLAIKGAANFYNKKGKHIITCKTEHKAVLDTCRELERQGFEVTYLDPEENGLIDLNKLNDAMRDDTILVSIMQVNNEIGVIQDISEIGEMCRARKIVFHVDAAQSAGKINIDMQALKVDLMSISAHKMYGPKGIGALYVSRKPRIRLEAQTHGGGHERGMRSGTLATHQIVGMGEACRLAKEEMAQDQAHVTAMRDRLWAGLNSMEQVFINGDADKRYPGNLNVSFNFVEGESLIMALKDLAVSSGSACTSASLEPSYVLRALGLNDEMAHSSIRFSFGRFTTTEEIDYAIELIKGAIGHLRDMSPLWEMFKDGIDLDSIEWAAH

SEQ ID NO: 32248 - protein, 365 aa, Colwellia psychrerythraea 34H
MINTSQYSVNTQTWTNGRHDVQCVKVIDETIDARTYCFTSTEPVMHFFKPGQFVTLELEIDGMQVLRSYTISSSPSVPYSFSITVKRMPGGQVSNWLHDNLKQGDQIAVHGPVGIFNCIDITAEKVLLLSGGVGITPVMSMARWWFDTNGDVDMVFAHSARTPKDIIYRRELEYMDSRITNFNLNFICERYDIGDSWSGFCGFFDEQKLRMIAPDFLDRTIYCCGPTPYMTAVKSMLQNIGFDMANYHEESFGAPPEEAQLDAEQQMEDAAGESIDDDTLIEVAFSKTGKSVKIQPGGTVHLAASQVGLHIPKACGMGICGTCKVKKIHGEVIMSHNGGITDEDVADGYILSCCSVPQGDVSVEY

SEQ ID NO: 32249 - protein, 586 aa, Colwellia psychrerythraea 34H
MSDVIRFFGGQYIYGVGGDFAANLIAALSVNEHGEGIQINPSSNEMHAGFSACAQAEVDGMGFCLTTYMVGSLPCTSAAALAVTEGLPVVFISGAPAESEVNQVAIHHTIHPNASWKAEYDNALEAFSALGMRVERLQGQRVEGHPNLAGQRFYQIVSEAYKNKQPVFIEVPRDQVFAKTQPIKLPSTLDDICCGSNILAGTELIVDNILDKLAQAKAPMLYLGDRLKHNEKLKHLIISFADKFNIPYATTWFAKGLFDEYAPLCLGAYNGIFTQTTGREYIEQQVDYVIDIATSIFPQDSNIAFGTGTHKIERFDNKTLLKGGSLLEKDLIAIFERLMEQNISPFEFTAPSQRGLTALSLQLESNELARGDDDIDFNNLAQTLNDLQAQDASTYVYLPEVGNSYFASYSLKVRQSILGRSWLTNPWYGAMGTALPYARVVAQRIKSQQIAERAVVIIGDGGFHFQLNELIHFLKDKSDVTIVYMRNNVFHLGKSGDGAIYHCNDSEFDVHSLVKAYQGDSKTCTSVGEFKAYFKACSQQTGISLIEVPAKPIEARQSNELKLLNLYIKSQNGQAEAVKAWQALTQ

SEQ ID NO: 32250 - protein, 554 aa, Colwellia psychrerythraea 34H
MCSIFGILDIKTGADALRPTALECSRLLRHRGPDWSGIYHSDNAILVHERLSIVDTEHGAQPLYNGDKSNVLAVNGEIYNHKALASALNVDYEFQTASDCEVILPLYEEFGVEFVDKLQGMFAFIVYNEKDNSYLIARDHIGIIPLYTGYDSEGNFYVASEMKALMPICKTVEEFPPGHILDSRVGKLQQYYKRNWQEYAAIKDNTTSTTKIREALEESVKSHLMTDVPYGVLLSGGLDSSLISAITQKFAARRIEDNDLAEAWWPKVHSFACGLAGSPDLIAAQTVADSIGTIHHSVVFTEQEGIDALKEVIYHLETYDVTTIRASTPMYLMARKIKAMGIKMVLSGEGADEIFGGYLYFHKAPNAQEFHEELNRKLDRLHKFDCLRANKSMSAWGIEARVPFLDKNFMDVAMRINPEDKLCGNGKMEKAILRESFEGYLPKEILWRQKEQFSDGVGYSWIDGLKAHVESLVTEQQLENAHIRFPVNTPDNKEGYYYRTVFEDKYPLATAADCVIGGKSVACSTEEALAWDESFQNNADPSGRAVLSVHNESY

SEQ ID NO: 32251 - protein, 68 aa, Colwellia psychrerythraea 34H
MSKGIVKWFNSDKGFGFITPEDGSKDLFVHHSEIQSGGEYATLADGQTVEYEVGQGQKGPCANKVVAV

SEQ ID NO: 32252 - protein, 499 aa, Colwellia psychrerythraea 34H
MCGFVVSVTKNLVDFNEKVGPDTLLRGLDSYNSDVFYSNGSCLYFEFSHLYITEPEVNQPLQSNSQVLVLNGEIYNYQELAARLNIDPTKFNDVSTFFKHIECYGLLDTLMRSNGMYSGFLFNKITGQCEIFTDHVGKKPLLVWNSRIGWHVGTGIDFNYVDEKTTEIKVVPPGISAFDIKTGNTFKEYSHLPIKGNESNLIDTLEDAISLRVPKNRPFAVALSGGLDSSIIAYILEARLSENAHYYVVGERYPDSVLALLEHLNICLSRVHLIKPPPADELLKLITKTCHITKSYNPSIISNGLATLLLCKAVHQDGIRVMLSGEGADEFFCGYQGMYNGRNDPTEMRANLIKDLHFTELRRLDLISASFSVEARCPFLDQRVTQIAMMLDVKNLCDIPMNIGKTLLRDTFKHLLPHSIINAPKESFDITSGLQKLVIDELQKEFKSERVALRTIFEKTLANYPIVNHHYFSHYPAFDKMIDRRDLKYRKIEFSINTQ

SEQ ID NO: 32253 - protein, 242 aa, Colwellia psychrerythraea 34H
MTQSTVQTKHILLIDDDAELSELLTEYLESENFKVTSCLDGASGLAKAFDDSFDLILLDVMMPILNGFEVLKALGGNHKTPILMLTAKGDDNDRILGLELGADDYLAKPFKHRELLARIKAILRRISIVKSQSTLAVNAPTKQLTINQVKVNQATREITCRERLLELTGTEYLVLVYMIENHSKIISKAEISEKVLQRKLSPYDRTVDVHVGNVRRKLLAIDPIDKMKTVRGAGYVFLQGEE

SEQ ID NO: 32254 - protein, 314 aa, Colwellia psychrerythraea 34H
MPDMKIFAGNATPELAKKIANRLYMPLGDAKVGSFSDGEISVEINENVRGADVFIIQSTCAPTNNNLMELIVMIDALRRASAGRITAVIPYFGYARQDRRVRSARVPITAKVVADFLSSVGVDRVLTVDLHAEQIQGFFDVPVDNAFGTPILLDDMQNRELDNPVVVSPDIGGVVRARAVAKLLDDADLAIIDKRRPKANVAQVMHIIGEVEGRDCIIVDDMIDTGGTLAKAAEALKEHGAKRVIAYATHPVLSGNAAQNLRESVIDEVVVTDSIPLSDEIKALKMVRQLTLSGMLSEAIRRVSNEESISAMFD

SEQ ID NO: 32255 - protein, 495 aa, Colwellia psychrerythraea 34H
MAIGTLISLTLYFITMLLIGLYSYRKSTSDVAGYMLGGRSLSPSVAALSAGASDMSGWMLMGLPGAMYITGMSSIWIAIGLVIGAFLNYLVVAPRLRTYTELANDSITLPDFFENRFNDKSRVLRIVSSVVIVVFFTLYTSSGIVAGGKLFESSFGLNYEIGLYVTAGVVVAYTMFGGFLAVSLTDFVQGCIMFIALVLVPVVAISEVGGLAEMQSSIEMINPDLLNLFSGVSALGIISAMAWGLGYFGQPHIIVRFMAIRSVKDMPTARRIGMSWMIVSIIGAMATGFAGIAYVAKTGIKLDDAETIFIVLSQLLFSPLIAGFLLAAILAAIMSTISSQLLVTSSSLTGDFYQAFLHKDASEKQLVLVGRISVLIVALVAIYLAYDRDSSILSLVSNAWAGFGAAFGPVIIGCLYWKDMTRNGALAGIISGAVTVLIWIYAPITIDGQSLSAVMYEIVPGFIVCSLAIYIVSKLSPKVEESISTTFDEMLEIHK

SEQ ID NO: 32256 - protein, 373 aa, Colwellia psychrerythraea 34H
MTLSSNTVTKQRFTLVCQKIQIETRDVKTFIFSMPKQQIGFNYHAGQYLNFTVNMAGTMQTCCYSLSSSPTTSDYVSITIKRIPQGKVSNYFHDHFKVGQSIDVQGVAGHFYLTDPMPKNVLLISAGSGITPMLSMLRFMVATQCKNQVIFVHSAKQKMDLIAQAEISNLAKQHGNCQIIYTLTQGANSQWYGYQGRLNEQILGNIEQISHYQTFVCGPKLFRKATQALLFKLGLQPSNCHEESFGAHEYSKEQTINTEESTPPLAPVIESQKVRPQNLEHQSSKAKVSIYFSRWKKRVQGNKQDSLLDQGETAGLILPYSCRAGSCGSCKAKLISGQVKQNSTDGLSAREQQQGYILLCSCSALTDVEISHE

SEQ ID NO: 32257 - protein, 287 aa, Colwellia psychrerythraea 34H
MKVAFIGLGVMGYPMAGHLTKAGHQVCVYNRNRDKALAWQKEFGGDIATTPALAATGCDIVFACVGNDDDVRQVSLGDEGIFAGLSKGSIFVDHTTASAELAVELAAVADKNGQYFLDAPVSGGQAGAENGVLTVMVGGDESIFAKAEPVMAAFARFSQIMGPVGSGQLAKMVNQICFVNTVQGLAEGLNFAQKAGLDTDKLLDTIGKGAAGSWQMDNRGKTMCAREFDFGFAVDWVRKDLAIAFAEAEKLGADLTVTKQLDGYYQEIQDNGGSRWDTSSLISRFKK

SEQ ID NO: 32258 - protein, 479 aa, Colwellia psychrerythraea 34H
MSTATKILAETAEDTNALNKSSGGTGHLKRVLGLRSLLSVAIGLVVTQGVMVLALQGLGIAGIGFFIAMAIAFVLALFAAFSFAELSLMMPRAGTLSTYTQVAIGQFPAIVATFSGYVVVAMFAVAAELQLIGLILSEIFPNFLSPMALGLLILGIFAVLNIVGVDIFAKLQTVLAFTMVVSISVLGAAAILGTNEPQLSNLDLFSDWNPIGTEVFSLIALAIWLFVGAEFVCPLVEETKNPEKNIPKAMFYGLFTILGVYLLFCIGAFFYMPLEQMASSSLPHLDYAVAVFGDSGLEVLAIVAITATCSTVNTTLASVPRMLYGMAKNKQAFPIFKRLDSRFNTPAIAILFMAAIIGAPLIILGDKPDTVVILLIAASTCWLLAYIISHIDVIVLRKRMPDANRPFKTPFYPIPQVLGIIGMGYAAYYNSPSPELTQQVFLTAGAVLAVVSVIAALWVKLYMKKDLFQPESMEDVLKG

SEQ ID NO: 32259 - protein, 311 aa, Colwellia psychrerythraea 34H
MKPILVMTRPLPFPELKANGESIETRLFEGDFSVFAQAQVICSTSLDALDHNFITQLPESIKLIANIGVGYDNIDLAAATAKGIAVTNTPVVTEDTADLAFSLILAASRQLTANEKFLRNGQWSATNPIGCLGKTVHGAKLGIIGFGEIGQAVARRAKAFNMEIFYHGPRRKIDAEVSLEAVYFENLTDMLAASDIISINCPLNENTHHLINADTIATMRPDAILVNTGRGPLIDESALVGAMKKGHLFAAGLDVFEHEPEIHDQLLTLPNVTLTPHIGSATSQCRGAMAACAIGNILAQMEGRILLTSVN

SEQ ID NO: 32260 - protein, 521 aa, Colwellia psychrerythraea 34H
MPIYDALYDSDVKHFLCRHEQGAAFSAVGYARAAGTVGVCLATSGPGATNLITGLADALADSIPVVAITGQVPTAAMGSDAFQEIDIFGLSLACTKHSFQVTDINELEKVLHQAFEIALEGRHGPVLVDIPKDVQLAEVTQRLDKLSHLKNKVKLPLADISKALDLLTHAKQPILYVGGGVGMANAVEEVRDFAEKTGMPSVSTLKGLGAINPDNENHLGMLGMHGTKTANLAVQESDLLVVVGARFDDRVTGKLDEFAPNAKVIHFDIDTAEINKRRDADAAILGDLKGNLPLLTTELDIADWQQKLQQMNTDFAWRYDHPGDNIFAPAVLKTVSDLMPSNTCVTTDVGQHQMWAAQHMTFDDPSNFLTSGGMGTMGFGLPAAIGAQISRPHDTVIAVSGDGSIMMNVQELATIKRYQIPVKVVLIDNAKLGMVRQWQDLFFDGRLSETDLSDNPDFVMLARAFEIKSQLITKKSEVKAAIEEMLDHDGPYLLQVKIDAAENVWPLVPPNTANDKMMEGV

SEQ ID NO: 32261 - protein, 466 aa, Colwellia psychrerythraea 34H
MSDTPTKFTDLGLSEALLKAVRDKGYETPSPIQAQAIPAVISGRDVMAAAQTGTGKTAGFTLPLLQRLSSSKGNKVSSNNVRALILTPTRELAAQISESIEVYGKYLNLHSMVVFGGVKINPQIARLRQGVDVLVATPGRLLDLYNQRAVKFSQLEVFILDEADRMLDMGFIRDIKKLMTALPKDRQNLLFSATFSPEIRALAKGMVNNPLEISVDAENSTAEKVTQWLTAVDKKRKPAVLTHLIKENNWQQVLVFTKTKHGANKLTKHLEAEGLTAAAIHGNKSQGARTKALAAFKDGSVKILVATDIAARGIDIDLLPQVVNFDLPNVPEDYVHRIGRTARAGNTGQALSLVCADELDLLWGIEHVIQQHIERKVIEKFIPANELGESRVIKPLKQGKPPKSAKPHGAGKGRVEHKDGQRSGRNANGNNAGGNKAKPGNDSSRRKKPEYDGTGPKPRRAIRPTK

SEQ ID NO: 32262 - protein, 552 aa, Colwellia psychrerythraea 34H
MSENNKKKASDLFVQALEAEGVDHIFAVPGEENLDMVESLRKSSIKLVLTRHEQGAGFMAATYGRLTGKTGVCMATLGPGATNLSTPAAYAHLGGMPLLMITGQKPIKKSKQGQFQIIDVVGLFAPICKMSKQIVHGDTIPSLVREAFRLSEEERPGAVLLELPEDIAAEDCTESVMTPHKRYYASPSNVPLEEAVALIKAAKMPLILIGAGANRQNVRAAMCDFVHSTRIPFFVTQMGKGVVDERSSLFLGTAALSAGDYLHCAIERADLIINIGHDVIEKPPFFMEEGGKKVIHVNYKSAQVDQVYFPQLEIIGDLAASVNALKDKLGGEVEFDRGYFEMIKLAIDVHIKEGADDARFPIIPQRFVADIRKVMGDQDIIALDNGIYKLWFARNYKAYQSNTVLLDNALATMGAGLPSAMMAAMLNPNQRVMAICGDGGFMMNSQELETAIRLGLNLVVTVLNDNSYGMIRWKQASAGFADWGLEFNNPDFVKYAESYGATGHRVTSAEDIIPTYEKAFSAGGVHLVELPVDYSENQKVLIDELAKKVCLI

SEQ ID NO: 32263 - protein, 399 aa, Colwellia psychrerythraea 34H
MSEFKAFSLLESIIDRVNLKGYKQPTPIQKECIPALINGNDLLGIAQTGTGKTAAFSLPIINKFGRNKIDIKAKSTRSLILTPTRELASQIMQNIDDYSDGLGLKTKVVYGGVGRQAQVDSIELGLDILVATPGRLLDLIETGDINFKALEVFVLDEADTMLDMGFFKDVQSIISKLPKSRQTLLFSATMPAEIEILAEAILTDPTKIQITAETVTIDLVNQSVYHLDKSNKVPLLFNILTKADYEKVLIFCKTKYGADIIVKALEKASITAASLHSGKTQAVREEALQNFKDSTLRVLVATDVAARGIDVDNITLVINYNLPEDPRNYIHRIGRTARAGKSGMAISFAVENDIRQLTNIENSIGQVIPVVTEQPFHKEFSKAPIQDKKKKQVKKTKRK

SEQ ID NO: 32264 - protein, 394 aa, Colwellia psychrerythraea 34H
MSLSDPIVIVSAVRTPMGGFGGCLSPVTTPDLGATAIKAAITRANLANDQVDELIMGCVLPAGLKQAPARQAAIAAELSLSTVCTTINKVCGSGMKAAMQAHDSLLAGSIDVAVAGGMESMSNAPYILPKVRTGLRMGHGQVIDHMMQDGLENAYDGISMGCFAQDTADESSFTREAMDDFAIRSLSRANQAIDSGAFKNEIAAVTVVNRRKETIIDTDEQPGNARPDKIPSLRAAFKKDGTITAANSSSISDGAAALVMMKLSEAEKRGLTPLCKIVAHATHAQAPAEFTAAPVGAMNKLLDKAGWTARDVDLFEINEAFAMVTMLAVKEMDLDINKVNVNGGACALGHPLGASGARIMVTLIHALKNKGLSKGVASLCIGGGEATAIALEML

SEQ ID NO: 32265 - protein, 446 aa, Colwellia psychrerythraea 34H
MTEHKILVVEDDAGLREALIDTLSLADYHCVEADSGEAALLALKSQHVDIVISDVQMGGMSGLSLLKSIKNHHANLPVLLMTAFGTIDDAVQAMKDGACNYIAKPFAPQVLLNMVSQYIPPQVVNKNDPIVADKRSLELLTLAKKVASTDASVMILGPSGSGKEVLAQYVHNHSKRSTQAFIAINCAAIPENMLEATLFGYEKGAFTGAIQACPGKFEQAQGGTILLDEITEMDLGLQAKILRVLQEREVERLGGRKTISLDVRVIATSNRDLKVAVNDGVFREDLYYRLNVFPLSWLPLAQRVDDIFVLAQHLVSLHCQKNGDSIPEFSGAARSKLNAYHWPGNVRELDNVIQRALILHADQIIDAGDLLIENFDTALVVEPEQVTNKDDKLGSELKLQEHQIILDTLQACHGSRKDVAERLGISPRTLRYKIAKMRDSGIEIPA

SEQ ID NO: 32266 - protein, 191 aa, Colwellia psychrerythraea 34H
MTKDEFLLRFNLLQLAESEHNYQHPSPLRSAAVLIALVESDSGEGLQVLLTKRASHLKHHPSQVSFPGGKVEREDKSLIDTALREAFEEIGLSREAVTVAGQLPPYETISGFQVTPIIAIVASSQIYQIDTNEVTEVFQVPLQHFLTTTDHHVFVAHKGGKQHNVHFLPYKEYNIWGATAVMLKDLVAHIN

SEQ ID NO: 32267 - protein, 519 aa, Colwellia psychrerythraea 34H
MNTSKAIAEESEVKMPKIKFLEGVDIPVFLISGGALVLFCILALYDIKMVSNWVNSTFAASTKIFGAYWQVLLLLTFVIGIFMAVSRTGGVVLGGLKSPEMSTFKWISIIMCTLLAGGGVFWAAAEPMAHFTSPSPYFGGETGTTEAAYNALAQSFMHWGFLAWAILGSLTGVVLMYLHYEKGLPLKPRTLLYPVFGDKVMKGAFGTLVDSCCVLAVVAGTVGPIGFLGLQVSFGLEKLFGIPDTYVTQVSILVGLICIYTISAVSGVTKGIQLLSSINIILAIFLMAFILIFGPTAFIFDSYLHSFGLYLNNFIPMATYRANTAWLDWWTVFFWGWFLGYGPLMAMFVARISRGRTIRQMILTISVVAPVITCFWFTIVGGSGLAFELATPGVISEPFTGFNLPAALLAITEQLPFGWIISFLFLILTTIFVATTGDSMTFSVSMVMTGTDSPQSSLRVFWGVMMGVMAALLISIGSGGISALQSFIVVTAVPVSLVLLPSLWNAPQIARKMADEQGL

SEQ ID NO: 32268 - protein, 368 aa, Colwellia psychrerythraea 34H
MTTITSTFYNKLSNCLCPPGNGVFTVNTAKERKEQLHQTIFGQAVGVEDLWKTSLNQLPEASKAVILGVASDCGGGILRGANWGPLFLRSTLLATYPELTAFDLGDVRVIPHLLSDKYLNEATLANCKKALYQDEHSKYAISPLSITEDVLHDFYAEFPEKGIFGIGGDHSVSYPLTKAYLQAKKKQGKRAAIIHFDAHTDLLVERLGIDLCFGSWCTHILDDLHEKHHLIQVGIRSSGRPQSHWEETFGVRQHWAKDIKAHGIDQTIENIFAQLEDENIDELYVSFDIDAIDDSFACATGTPEPDGLMPEDAMGILRALAAKYPITGADMMEIAPFTDSCGQGLAGQEKTLKVGAEISAFLISQMSK

SEQ ID NO: 32269 - protein, 402 aa, Colwellia psychrerythraea 34H
MNKVYLVSAKRTAIGSFGGALKSVPAANLAAAAVKGALAEANVNPDQLDELIMGNVISAGQGMGPGRQAAIAAGAPETIPAYTVNMICGSGMKVVMDAASRIKAGDADLVMACGGENMSRFPYIVTSDIRFGSKMGNLELSDSLITDGLTDVFNNYHMGITAENIAEQVGVSREEQDAFALESQRRAVSAIEAGKFSDEIVPVEVMVRRKTAVVDTDEYPRQDASQESLAKMRAAFKKDGTVTAGNSSGVNDGGAAILVASQGAVDQHQLKPVAELVSYAQVGVDPTVMGLGPVPAIKEALAKANLKFSDIELLELNEAFAAQALGVMKQLCVEHDEDLDNLKQRTNVNGGAIALGHPLGASGNRIIVTLLHEMRKRGNKLGLASLCIGGGMGTAVIVRLLD

SEQ ID NO: 32270 - protein, 321 aa, Colwellia psychrerythraea 34H
MKNFKELAKNVIEIEQQAIAELVQFIDDNFELACQLMFHCKGRVIVIGMGKSGHIGGKIAATLASTGTPSFFVHPGEASHGDLGMVTSNDVVLTISNSGETSEVLAIIPVIKRIGAKLISMTGNTESTLAKLADTHVCIKVSAEACPLGLTPTSSTTATLVMGDALAVALLNARDFTAEDFALSHPGGSLGKRLLLRLSDIMHKDDRVPMISENALIKDALVEMSLKGLGMTAIVNEQQQLVGLFTDGDLRRVLDNRIDIHSESINTVMTHNPSVAQSDMLAAQALKIMEDKKINGLIIVDSNNIPVGAMNMHDFLSSGVL

SEQ ID NO: 32271 - protein, 116 aa, Colwellia psychrerythraea 34H
MDTIERIKEQISENTILLYMKGSPKLPNCGFSSQASQALISCEEKFAYVDILQNPDIRAELPKYADWPTFPQLWVDGELVGGCDIIMEMFQQGELQTLVKAAASKNASAEDSSADA

SEQ ID NO: 32272 - protein, 273 aa, Colwellia psychrerythraea 34H
MQINMRSPLKWAGGKKRVVGEILKVLPVKGKKRLVEPFVGGGSVFLNIDFDEYLLIDMNKDLISLFNIIKNQSTQFIADAQMYFAGDYNHPEKYYELRKQFNESNDSYQRSVLFLYLNRHGYNGLCRYNKSGGYNVPFGRYKHPYFPKAELDFFSKKAQKATFVQGDFEKAFSQLKSDDVIYCDPPYSPINRTSNFTAYAGNSFTDEDQIRLVACAEKAKQKGVATIISNHHVDFTRELYKNADKREFFQVQRSISPKGQGRVKVKEVLALYK

SEQ ID NO: 32273 - protein, 456 aa, Colwellia psychrerythraea 34H
MNSVQSTSSLTVAKFGGTSVADYQAMLRCANIIKNDNSNRLVVVSASSGVTNLLVRLSQKNVSVIEQKDIVENIRAIQVNITQHLSSDVEAQLNQEINSLLDELTQHALTQLLQYSTKTADAILAFGEQFSSRIFAQVLQSVDIPGEYFNVQQVMKTNSLYGKAVVDLNQLSEQSTQLLAPKLIDKVIVTQGFIGQDSQGHTTTLGRGGSDYSAALLAEALNGTNLSIWTDVVGIFTTDPRITDQARAIKEISFGEAAEMATFGAKILHPATLIPAMRRNIPVFVGSSKEPEKGGTQIKQKVDSNPTYRSIALRREQTLVTVKSPAMLHASGFLAKVFGVLAKHELSIDLITTSEISVALTFDNPSGSTQSLITNAVVAELEQLCEVSVEHGLSLVAVIGNGLTCAKGIGQSIFETINDVNIRLICHGASANNLCFLVNEDEANYVVEKLHNTLFA

SEQ ID NO: 32274 - protein, 305 aa, Colwellia psychrerythraea 34H
MHNDTSNTYAGLIAIVGRPNVGKSTLLNALLGQKISITSKKPQTTRHRILGILTEENRQAVLVDTPGLHTEEKRAINRLMNRAASSSIAEVELIMFLVEGTHWTKDDELVLSKVKQSGTPCILVVNKTDNIPDKDELLPHLQKLGAMHDFRDIVPICATKGHGVDTIRQLCLTSLPEGVFWFPEDHITDRSSRFMASEIIREKLIRFTGDELPYSITVEIEQFKMDDKGIIHINALILVERDSQKRMVIGNKGERLKTIGQEARRDMENLFESKVFLETWVKVKSGWADDERALRSLGYGDDYSG

SEQ ID NO: 32275 - protein, 426 aa, Colwellia psychrerythraea 34H
MEQNIFQLQYALDTFYFLICGALVMWMAAGFSMLEAGLVRAKNTTEILTKNVALYAIACIMYLVVGYDIMYGGGVFLNGIALDGASDAEALVGAVLAESAEAGFDGGAVYSNASDFFFQVVFVATAMSIVSGAVAERMKLWAFLAFTVVLTGFIYPMEGSWTWNGDAVFGLYTLGDLGFSDFAGSGIVHMAGASAALAGVLLLGARKGKYSKDGKVNAIPGANLPMATLGTFILWMGWFGFNGGSVLKLADINSANSVAMVFLNTNAAAAAGAISALIFAKILFKKADLTMTLNGALAGLVAITAEPSTPSPLQATIFGAIAGVIVVMSILALDKVKIDDPVGAISVHGVVGFFGLMIVPITNSSSSFSGQLIGAATIFVWVFVTSFIVWFALKKVIGIRVSAEEEYEGVDISDCGMEAYPEFTRG

SEQ ID NO: 32276 - protein, 638 aa, Colwellia psychrerythraea 34H
MGKIIGIDLGTTNSCVAVLDGDSVRVIENAEGDRTTPSIIGYTAEGETLVGQPAKRQSVTNPENTLYAIKRLIGRRFEDKETQRDIDIMPFGIVKADNGDAWVQVKGEKIAPPQVSAEVLKKMKKTAEDFLGETVTEAVITVPAYFNDSQRQATKDAGRIAGLEVKRIINEPTAAALAYGMDKQEGDKVVAVYDLGGGTFDISIIEIDEMDGEHTFEVLATNGDTHLGGEDFDNRLINYLVAEFKKDQGMDLTSDPLAMQRLKEAAEKAKCELSSAQQTDVNLPYITADGSGPKHMNIKVTRAKLESLVEDMVKATLEPLKQALKDADLSVSKIDDVILVGGQSRMPLVQKTVTDFFGKEPRKDVNPDEAVASGAAIQAGVLSGDVTDVLLLDVTPLSLGIETMGGVMTKVIDKNTTIPTKQSQTFSTADDNQAAVTVHVCQGERKQASANKSLGQFNLEGIEPAQRGTPQIEVTFDIDADGILHVTAKDKNTGKEQKITIKASSGLSDEEVEQMVRDAEANADADAKFEELVTARNQADGMIHATRKQVEEAGEELPSEDKEKIEAALTELEEAVKGDDKEVIEAKTQALMEASAKLMEIAQAKEQAQSAPEGAQEADAAPADDVVDAEFEEVKDDK

SEQ ID NO: 32277 - protein, 556 aa, Colwellia psychrerythraea 34H
MSDTENRPTNFIRNIIDADLDSGKHTGVQTRFPPEPNGFLHIGHAKAICLNFGIAQDYNGLCNLRFDDTNPEKEDIDYVHAIQKDVKWLGFEWAGEIHYSSNYFDQLHGFAVELIEKGLAYVCFLNAEETREYRGTLNKPGKNSPYRDTSVEENLALFAKMKNGEFEEGICALRAKIDMTSSFMCLRDPIIYRVRFAHHHQTGDKWCIYPMYDFTHCLSDALEGITHSICTLEFQDNRRLYDWVIEQVSVPSTPHQYEFSRLNLEYTLMSKRKLNTLVEEKLVDSWDDPRMPTIAAFRRRGYTPASMREFAKRIGVTKMENTIEMSVLEACIREDLNDNAPRAMAVLDPIKLVIENYPEDKNEDLIVKNHPSDDEQGTRIVPFSKELYIEAEDFREEANKKYKRLVIDKAVRLRGAYVVTATRCDKDEQGNVTTVYCTYNEDTLGKNPTDGTKPKGVIHWVDANKSLDAIVRLYDRLFTVPNPAAADDFNSVINPQSLVTITGAKVEPSLAEAKPEFAYQFERQGYFCLDNDIKEPGALVFNRTVGLRDTWAKISQ

SEQ ID NO: 32278 - protein, 543 aa, Colwellia psychrerythraea 34H
MESQRSLLFIALMVVTYLLFSQWQQQNAVVPEQTSISQNQSVENADADFVPESSDAQVSSIKSTNTSAKLITVTTDTLILKINSQGGDIVEAKLRKFDTEQGNDIPFTILQNGNQKYIAQSGLTGANGIDRTIKGRPIYTSAKNSYELVNDNLIVDLVFHDVSGMSVTKRFTFNKNSYSVNVDYLIDNNTANSVSVQMYGQLKQSTVVETGGGMLPTYRGAAYSTTEERYEKYDFDDIEEANLNAVTAGGWIAMLEHYFVSAWVPNAKDSNQLYTTYSNNFEAVIGFKAPAVIIDAGKQGSTSAIFYAGPKDQEVLEKIAPNLDLTIDYGFLWMISQPLFWLLLTIQSFVTNWGVAIIIITLIVKGGMYPLTKAQYTSMAKMRDLAPKMAQLKERFGDDRQKMSQATMEMYRKEKVNPAGGCLPLILQMPIFLALYWVFLESVELRHAPFVFWIQDLSAMDPFFVLPVLMGISMYVMQKMQPMTIQDPMQQKIMQYMPVVFSIFMAWFPSGLVLYWLVSNLISITQMKIIFAGIAKKKAEKAA

SEQ ID NO: 32279 - protein, 633 aa, Colwellia psychrerythraea 34H
MTKIIGIDLGTTNSCVAVMEGGIAKIIENAEGSRTTPSIVAYANNETLAGQPAKRQSVTNSTNTLFAIKRLIGRKFDDKEVQKDIKLAPYKIVKADNGDAWVEVDGKALSPQEVSAQILRKLKKDAEAYLGETVTDAVITVPAYFNDSQRQATKDAGKIAGLNVKRIINEPTAAALAYGVDKNSNADQKVVVYDLGGGTFDLSIIEISNVDGEKQFEVLATNGDTFLGGEDFDLRLINYLADEFKKESGIDIHQDTLALQRIKEAAEKAKIELSSALQTEVNLPYVTADASGPKHLNVKVTRAKLESLVDDLVKSTIAPCEQALKDAGLSKADVSEVILVGGQTRMPKVQEAVKTFFSKEPRKDVNPDEAVAMGAAIQAGVMSGAVDDVLLLDVAPLSLGIETLGGVMTKLIEKNTTIPTRASETFSTAEDNQAAVTVHVLQGQREMATDNKSLGQFNLTDINPGPRGSVQVEVTFDIDVNGILNVSAKDKATGKEQSIKITASSGLTEDEINRMVKEAELHASEDKQKRELVDQRNQADQLIHTVQTSMTSLAQDQQTELKTLIEQLKMAVNGSDKAAIEMRQSALQEAYSKTMQTEQAQSQQAAQHQGNAANDGAKDEDIIDADFEDVSNG

SEQ ID NO: 32280 - protein, 832 aa, Colwellia psychrerythraea 34H
MSSNEIADIDFIAEVAAENKLAKHAIQVHKFGGSSLATPKCIKRALEIIRENCQLNDIVVVSANGKTTDRLFALYSLVERTIAEDTIQKSDELTQAIDELAKEQAQLITELLNANNTKQLLLRLHKDIEQLTTWLTADIVQHHNDVLALGEVWSARLLSALLNEQVCPSNSIDSRDFLVIDNEQSCVVDTALSAAQLRQRRQFGKLAVITGYISKDSRGKSCTLGRNGSDYSATIIASLVAAGNVTLWTDVDGIYSADPRVVPSARKLHRLPNGVAKELGRLGNPVLHAKTLLPLINPLSEHHTHLHVASSFDAQVIGTEIGKFGQIAKQELSVTYLNDLLLAQSVSFIGEAATRAKAEFSPICIDDQKGFMVITQGQQKALSDWLASHDVEITFKPVAIIATVGHRVAERGDIRARFKRSLKAAKPLNLVGSDNNHSVIAILPEPCSIELLNTVHHEMTKDARHIGLVVAGMGNIGERFLELLPAQLNKVYALENLHLVGLLSSKKALINNDGIDVNQATSLFAQEAQSYDHEQLISWLTQNPYDELIVVDITPSEDFSLLYEQMFALGVHVIGANKWAASSSTAHYNNLVNTADSHNSLWLGNTTVGAGLPINYAIDDLRQSGDSISELSGIFSGTLSWLFETYDGSSKFSELLLNALAQGITEPDPREDLSGRDVQRKLLILARKAGFELALDDIDCQNLVPEALQALSTSEFLARANELDEYFATALSEANRKGACIRYVARFQHNPETGISAKVSLEVLPQSDAFANLTPCDNIFQISSHWYQDNPLIIRGPGAGRDVTAGGLHSDLVKICQQLAHKQSQVKIKGIN

SEQ ID NO: 32281 - protein, 407 aa, Colwellia psychrerythraea 34H
MEIILGVSMFTAIIFALVLVILFAKSKLVSSGEVTISINGDPAKAVKTAAGGKLLGALADQGIFIPSACGGGGTCGQCRVDVHSGGGDILPTEEGHINKREAKTGCRLACQVAVKQDMDIVVEDEIFGVQQWECEVISNDNKATFIKELKLQIPNGESVPFKAGGYIQIEAPAHHVKYSDFDIDEQYRGDWKHFGFFDVESKVDTDTLRAYSMANYPEEAGIIMLNVRIATPPPGRLHLPAGKMSSFIFSLKAGDKVTISGPFGEFFAKETDNEMVFIGGGAGMAPMRSHIFDQLKRLESKRKMSFWYGARSKREMFYEDDYNGLAADNDNFQWHVALSDPQPEDNWDGLTGFIHNVLFEEYLKDHEAPEDCEYYMCGPPMMNAAVIGMLKDLGVEDENIMLDDFGG

SEQ ID NO: 32282 - protein, 861 aa, Colwellia psychrerythraea 34H
MRLDRFTQSFQESIADAQSLALGKDHQFIEPVHLMMALLNQNGNSIIALLKSAGIDVRSLRQKLDEALSSLAQVQDSAGDVQLSAASGRILNLCDKHAQKMSDKFISSEMFLLAVIDDKGPLGQILAELGANQQRIKSAIDHVRGGENVDDQNAEDVRQALNKYTVDLTELAEHGKLDPVIGRDDEIRRTLQVLQRRTKNNPVLIGQPGVGKTAIVEGLAQRIVNNEVPEGLKNKRVLSLDMGSLVAGAKYRGEFEERLKAVLNELSKEEGQVILFIDELHTMVGAGKSDGAMDAGNMLKPALARGDLHCVGATTLDEYRKYIEKDAALERRFQKVLVEEPSVEDTIAILRGLKERYELHHSVNITDPAIVAAATLSHRYISDRQLPDKAIDLIDEAASSIRLQMDSKPEDLDRLERRLIQLKLEQRALEKDEDEATIKRLAIISQQISEKQKKYDELDEVWTTEKAALYGAHTIKEELEQARIELEAARRTGDLNRMSELQYGKLPELEKQLDLASQAEMQEMTLLANKVTEVEIADVLSRATGIPVAKMLEQERDKLLHMEDNLHQNVIGQHEAVTSVSNAIRRSRAGLSDPNQPIGSFLFLGPTGVGKTELTKALAEFLFDSQDALIRVDMSEFMEKHSVARLVGAPPGYVGYEEGGYLTEAVRRKPYSVILLDEIEKAHPDVFNILLQVLDDGRLTDGQGRTVDFKNTVIIMTSNIGSDIIQELAGESQYHQMKEEVMNTLGQHFKPEFINRVDESVVFHPLVAEQIKKIAKIQIEALADRLIEQELNLTINEEALSLISAAGFDPIFGARPLKRAIQQGVENPLAQKILGNEFTKGCIIEVSVVEGQLAFSAKSPH

SEQ ID NO: 32283 - protein, 357 aa, Colwellia psychrerythraea 34H
MSSLSMRPCGDFRTSYKQDNTIFETKTIRWVTIFTIIALCFAPLVVDGYFITLLIQISYLGIAALGLNILVGYTGQISLGHGAFFGFGAFASAWLNTSLHIPVFLCIPLAGFLTMGVGMMFGAPAARIKGLYLAIATLASQFIIEDFFARADWFSGGASGSMAEPVSLFGFAFDTDQSFYYIALFSLVFMFIWGCNLMRSRDGRAFVAVRDHYLSAEIMGVKLNKYRLLSFGISSFYAGIGGALYAHYLGYVSAEGFTIMMSIQFLAMIIIGGLGSIKGTLMGVIFMVFLPEVLESGVGVMKMTDWGNIPMVVDGLAYIKEMAIGLVIIGFLIFEPEGIAHRWTQIKNYWKFYPFAY

SEQ ID NO: 32284 - protein, 778 aa, Colwellia psychrerythraea 34H
MMNLPKNIQQPLSLIYLDANATTQVLPQAASAALSTMETLFGNPSSSHISGLQAKQIVDKTRQQAKRIVGAAEGKIIFTSGATEGIQTAILSALVNVKKTLNKSLNNKSYSLLYGATEHKAVPESLKHWNKILEINAEIKAIPVDEKGQLDMAFIAKEVPNALMVCTMAVNNETGVYQDISLLDQTIRTNNPNVAWMVDCVQALGKTDLVLAQTSIDYAPFSGHKLYAPKGIGFMYVKEKAPFTAFIAGGGQESGLRSGTENLPGLAALSEIFSMLLGESEASFTPIKTLHLYRQQLVSALTQAFPEITFNHSFENSVATTLNFAIPGFSSKEIMDLFDAANIRVSSGSACSSKVTRSFVLDAMGLPAWQSESAIRMSFGPAMTQTEIDIACSRIVSAAQALVQSCLTLDKKNIDTQTMNTSSTTNKTELDGLVQFKAGGSCSWLYVDKKTRSAVFIDPLSEVSERLQTLLTCRGLNLVAVIDTHGHADHKSCRNGIAKKFLAEQQTEYLGWPAGAQTTTIHGQTFQYLILGDKWLIKVATPGHTDDSMSLLLCDPVTDSAEKLQVHYAFCGDLILMDSIGRSNFSTSSAPAMYSSLKLMKSLIGNNSLICPSHDYHNEFTTCLETEMKRNSLLRQVINSEIDIEEFTSKKIKMDKDIINESGSEIMCGALIGACQKVVVREYDSASLTKAVKKSSDMKLIDIREPHEYALQHDEKFTSNVPLTRLVQFVKEQQQNKEQEFVLVCRSGGRSQLAAQALARLGFENVGHLKGGYALHQY

SEQ ID NO: 32285 - protein, 407 aa, Colwellia psychrerythraea 34H
MSLAMEINISILETLVVALIILFSGYYCNSKVSFLRNNNIPEPVVGGIIFSILAAIAHSIFDIHFNFDMSFKNPLMTVFFTTVGLGASYSLLLKGGPKVVLFLGVATVYLLVQNAIGVSIAIGTGMNPLMGLIGGSVTLSGGHGNGATYADLFITEYNMPANIFELAMAAATMGLVLGGLVGGPVSKRLITRYNLKADEYHEELDDTITFNPEDHDLVTPKKMMETLFIILLCMTVGHIVYLNLKAADIVLPAFLMPLLFGVVATNLCEVSKRYTISRACIDLWGTMALSIFLALALMSLKVWQLASLAGPMVVIILIQTVMLMMFAYFVTFRIMGKNYNAAIIAGGHCGFGLGATPTAVANMESLVARHGPSPQAFLVVPLVGAFFIDITNALVIQLYLSLPFVSP

SEQ ID NO: 32286 - protein, 530 aa, Colwellia psychrerythraea 34H
MVANHGLLKGMNPVTTLVSMAIITLFVLCGVFFTEQTAALFTAVSGWILSYLKWYYIGIVAIFLFFCIWLAFSRYGNLRLGDDDSRPEYSNFSWFSMLFSAGMGIGLVFWSIAEPIYHFQSNPFITEGLTPEAAQVAMRLTFFHWGLHPWAIYVVVGLSLAYFSYRKKLPLTIRSALYPLIGKKMYGPIGHAVDVLAVFGTVFGVATSLGLGVTQMNTGLNTMFGMEVSLSNQIILIAVISAIATISVVSGVGKGVKILSEVNMWLTIGILVFLLCFGPTRYLLGAVLQSTGDYLGNVLSLSTWTDANENSQWQSWWTAFYWGWWMSWAPFVGMFIARISKGRTIREFIVGVLLVPTMLGFIWLTLFGGTAIYLELFHQVTNEAGELVAAVGQAGIVDAVKADVTSALYVTLDKLDAGFMGTIAAFMATLLIATYFITSSDSGTLVVTTILSMGNEHPPTAHRVAWGLGEGAVAAILLLVGGLKGLQTAAITAALPFSLVMIVMMWGLMRSLKEEKLTPAVYAPAKLVTN

SEQ ID NO: 32287 - protein, 387 aa, Colwellia psychrerythraea 34H
MKFVDEVEIRVEAGDGGNGCVSFRKEKFIEYGGPNGGDGGDGGDVYLMADEGLNTLIDYRFERFHRAKRGQNGQPQNCTGKGSEDLVLKVPVGTRAVDQDTGEQIGDLTYKGQKMLVAKGGWHGLGNLRFKSSTNRSPRQRTDGTPGEIRSLKLELLLLADVGLLGLPNAGKSTLIRSVSAATPKVADYPFTTLVPNLGVVRLDTQRSFVIADIPGIIEGAADGAGLGTQFLKHLERCRILLHVIDIMPVDGSDPLENAKVIISELEQHNEKLAGKPRWVVFNKLDLVLEEEAKEITDAIIAGLDWKGEVHSISAFNRSGTKELTQKVMTFIEELPPEEEEVIDGKTVEFKWDTYHEETIAAHSQDDDLDDDDWDEDDYDVEVEYRQ

SEQ ID NO: 32288 - protein, 455 aa, Colwellia psychrerythraea 34H
MSVDSIGLSADLLKAVKACGYKNLTPIQQEAIPVIRQGVDLLASAQTGTGKTAAFSLPILDAIAKANHAAKSSTTSTDENSAEEKSASGQAIRALILTPTRELANQVADNIKQFSQYLPIKSGVVYGGGKMASQTKMLKQGLDVLVATPGRLLEHLALRNVDLSQVKFLVLDEADRMLDMGFLTDIEKLLLAVKHKHQTLMFSATFSDRVKSLANQLLKSPKTISVSKENTTSGKIKQAVYWVTEERKRELLSELIGVNNWQQVLVFAGTKESANTLAKELKLDGIKAALCHGDKTQGARNKALEQFSEGKVRVLVATDVAARGLDIPDLAFVVNFHLPFLPEDYVHRVGRTGRAGKSGTAISLVSPKDERFLENIEQLIERKFERIVAPGYEFNRLEASEYQEATVKRDSKNRYRAAQEKNQNLAKKDVKIKSLSKNKTARTNSKYNNKIQKKR

SEQ ID NO: 32289 - protein, 509 aa, Colwellia psychrerythraea 34H
MIIGIPKESFLGERRVAAAPSSVSALIKLGFTVQVQKGAGTKASFTDQEFSDANAEIVTKKACWQSEILFKVNAPTLEEVELMNDGSTLLSFIAPAQSSELLEALRSKSITTLAMEMVPRMTRSQPMDALSSMANIAGYRAVIEASHHFGRFFTGQITAAGKMPPAKVMIIGAGVAGLAALGTAGSLGAIVRAFDTRPEVKEQIESMGAEFLELDYEEPEDTGSGDGYAKEMSKAFIDAEMVLFAEQAKDVDIIITTAMIPGRPAPKLITEKMVESMKAGSVIVDLAAAGGGNCECTVVGKVVDTYGVKVIGYTDLVSRLPNQASQLYANNLMNLTKLLCKNKDGTLDIDFDDVVIRNMTVVKENEITFPPPPIQVSAAPVKKATVEAAEPIEEAASPIKKYAFIGAGIALFGWVASIAPADFLTHFTVFVLACVIGYYVVWNVSHSLHTPLMSVTNAISGIIIVGALLQIGSDNIVVQILATLATLVATINIVGGFKVTSRMLKMFSK

SEQ ID NO: 32290 - protein, 445 aa, Colwellia psychrerythraea 34H
MSVIELFTMETTMSKALILCLTLLSFFISGTAWAEEGQLNGANTSWILTSTALVLLMTLPGVALFYGGLVRKKNVLSILMQCFAIGSISSILWLLVGYSLAFGEGNAFIGDFSKVMMHGIPKDALSGDIPESLFMLFQMTFAIITPVLIIGGFAERMKFSAVLLFSGIWLLAVYAPITHWVWGGGWLAQMGIYDFAGGIVVHITAGTAALVAALVIGPRRGFPKTPMLPHNLTMTVTGAGMLWVGWFGFNGGSALAANGDASMAMLVTHISAAAGTLTWAAIEWKKFGKASVLGAVTGMVAGLGTITPASGFVGPGGALIIGISAGFVCFYSTVYIKQKLKIDDSLDVFPVHGVGGILGTLLVGVFSATSLGVFSGFGFAEGIATMAEQIGVQLIGIFSTLIYTAVVTYIILKLVGLMTDGLRVGEEQESNGLDQAEHEEVGYHL

SEQ ID NO: 32291 - protein, 442 aa, Colwellia psychrerythraea 34H
MKEDKLQLTKSLSLFGLVLFGLAYMTPMIVFGTYGVLYEESGGNVASSYLFALIAMLFTAGSYALMAHKYPSAGSSYTYVTKVFGDRIGFLVGWTILLDYLFLPMVIWLIGGIYLEAMAPGIPEWFWILSFIVVTSVLNLIGVNVAKKVNLVLMLLQIVVIVAFCALAVMYINASGGVIAAPSTDSFTGGNFSLIFSGAAIACYSFLGFDAVSTMAEETENPKKNVPKAIMLVTLIGGIIFVASSYILNSAFPDISVFAAESAAADIAKQVGGVIFSSIFVATLIIAQFTSGVSAQASASRLMYVMGRDGVLPKGIFGKLHATFKTPYMTILMVGFIGLLALKMDVATSTSFINFGAFIAFIFVNMSAFSEFFKLEKNERTLGATLIHIVFPSIGTIAVMKLLISLDSNAVMLGCIWLAIGLCYLAYLITKGQKLKMDIKES

SEQ ID NO: 32292 - protein, 409 aa, Colwellia psychrerythraea 34H
MKDVYICDGVRTPIGKYAGALSSVRADDLAAIPLKALKDRNPTLDLTQVDDVILGCANQAGEDNRNVSRMALLLAGYPTQVAGCTINRLCGSGMNAIAMATNAIKAGEADMLIAGGVESMSRAPMVMAKAEAAFSRSAELFDTTLGWRFVNQKLHTAYGTDSMPETAENVAEQFNISREAQDKFAFASQSKAKAAQEDGRFAEEIVPVVIAKRRGDDVIVEKDEHLRLSPLDKLASLKAPFREGGSVTAGNTSGVNDGAAAVILASKEAALANGLTPKARILGSAVIGVTPEIMGIGPAPASAKLLKRLGLSIDDMDIIEFNEAFAAQALASARELGLKDDDARLNPQGGAIALGHPLGMSGTRLLITATKQLERSGKRYALCAMCVGVGQGIAMVIERYSEKYSENTQ

SEQ ID NO: 32293 - protein, 558 aa, Colwellia psychrerythraea 34H
MAHKYAQLAFTETVRAMQQEQNSRAGYASMDQGEDYNFLLSAVEAEFIAQRDSLYMASVSETDWPYVQHRGGPKGFLKVLDASTLGFADYKGNRQYVSAGNFRNNDRVALIFVDYPNKRRLKLMGRISQVAEDDWQTLASLEDDDYRAKVERGFVIKVEAFDWNCPQHITPRYSESEIESLIIPLTNELSDLKAQLKTQQLASSSGEGLSKNSAVAKVSLPDYPKISGEGELPLVISGIRQLTPRIRAIELRHVKGEALPAFEAGAHLAIPVVLNDGKVTHRHYSLCSNPSRTDCYEIAVLNDHNELKEDNNVDNSDIEESGSAVIHQYFTLGLRLNCVQPQNYFPLEQSTDPVVLIAGGIGITPIKAMALTLTSQQRDFSLHYCGRSIDEMAFSDRLSRQLGDKLYLYASDEGNKLNLEKLLTSSPIKAHFYFCGPQKMIDQLLELAKQHGIDSTRLHFERFEHKIDATAKPFTVTLKRSSKQFTVSAQESILDAVLAQGINVPYSCKTGECKTCVVPVVNGNVIHKDECLTNTDKVNKLMCLCVSRAAQDTLELDL

SEQ ID NO: 32294 - protein, 412 aa, Colwellia psychrerythraea 34H
MTQQKPQRKEPASTGAILVINCGSSSVKFSLIKPLSGETLLSGLAECLHTPDAKIIVKLNGEKQTYKLPEPFNHQTALSVLVEQLQQLGLVKDITAIGHRVVHGGEQYSQPTLITEDVEQAISQLAKLAPLHNPANLIGIKACQQAFENLPQVAVFDTAFHQSMPEKAYIYGLPYSLYKAHGIRRYGFHGTSHYFVAKQAAEQLNKPLEQCNLISAHLGNGCSVTVIKNGESVDTSMGMTPGEGVIMGTRCGDLDTGIIFHLVENLGYSIGDVDKLVNKESGLLGVSGLSNDGRTLENAMLEDNHAQATLALTIFCYRIAKTIASYSASLTQLDGLIFTGGIGENSNWVRTEIVKQLALLNFSLDEEKNKATRFGASGNIATKDSRACWVIATNEEWVIAEQSAQLLTNLVK

SEQ ID NO: 32295 - protein, 461 aa, Colwellia psychrerythraea 34H
MNWKKPITSSLKSLSLSIALVCAGTYIAHAETVGEPEKEELKFGFIKLTDMAPIAIAYENGYFEDEGLYVTIEAQANWKVLLNGVIDGTLDGAHMLAGQPIAATMGYGTKAHIITPFSMDLNGNAITVSNDIWKKMKPNIPKMADGRPVHPIKADSLKPVIESLASEGKPFKMGMVFPVSTHNYELRYWLAAGGIHPGYYAPHKGDNSGQIDAQALLSVTPPPQMPSTMEAGTIHGYCVGEPWNQQAVFKGIGVPVVTDYEIWKNNPEKVFGITAAFAEKYPNTTIRLTRALIRAAKWLDDNSNANRPAAVKILSQSNYVGADYDVIANSMTGTFEYEKGDKRAVPDFNVFFRYNATYPYYSDAIWYLTQMRRWGQISDDKSDQWYKDLAAKVYRPDIYAKAAQSLIDDKLIPANEFPDFTKENGFKAPQQHFIDDIVYDGNQPNAYLEKFKLGLKKGDKL

SEQ ID NO: 32296 - protein, 601 aa, Colwellia psychrerythraea 34H
MSDQPAASDLAENASIDTAEKKKISILLELIQFIRPYKSQVLAAFIALIFTAGVMLSVGQGVRMLIDEGFAQQSIEQLQQAVLFILAITVLIAGGTFFRFYLVSWLGERVSADIRLAVFNHVITLHPSYFETNGSGDIMSRITTDTTLLQSIIGSSFSMAIRSVLMLLGALVMLFATNIKLTFIVLLSVPFILVPILFYGRKVRKLSRKSQDSMADVGSYAGEAIEHIKTVQSYTHEQHERRSFGKEVEKSFNIGRNRIKQRATLIAGVIIIVFGAITGMLWVGGSDVIQGKMSGGDLGAFVFYAILVASSLATISEVLGELQRAAGATERLIEILQVESHILPPVENAISAKDLNAQIVFEAVSFNYPSRPDQAATQALNLTAQQGKVLALVGPSGAGKTTLFELLQRFYDPQVGRITLGGTDIRQLDPKDLRQQMALVPQQPALFSSDVFHNIRYGKPEASDEEVISAAKKAHAHEFIVNLPEGYNSFLGERGVRLSGGQRQRIAIARAILKDPHILLLDEATSALDSESEQHVQQALEELMRGRTTIIIAHRLSTIQHADKIAVLEQGRIIDMGDHQSLLQNCELYQRLVELQFKKLG

SEQ ID NO: 32297 - protein, 361 aa, Colwellia psychrerythraea 34H [sequence omitted]

SEQ ID NO: 32298 - protein, 706 aa, Colwellia psychrerythraea 34H
MPHRIMLIPVGSGVGLTSVSLGLLHACQQKGIKVGHFKPISQPSRNSLAKKNKTIDAISLSQNSTSVSLSYVEGKMGDGLHDVVLEEIVANFNAFKEDHDVIIIEGLVPTPRQPYAGRINRDVAQALGANIVLVASPGNDSAEEFEDRLEVSAETYGGIKNRHLIGCVINKLNCPDQEEFGLLPKEEEIENDFNLNHWLDLSIFKGRHFDLLGTVQWEIDLIAPRVCDISNYLEAKVINNGDMEHRRFRSVAFCARTVSNLVSYLVPGRLIVTPGDRTDIIIAACLSALNGTKLGGLILTNGFEPSEQVWELCKQALDAGLPVLSVPWDTWQTSRHIMGFNPEIPKDDIQRQDKVKQHVADNLSSSWLESLTSKNNSYNLLSPPAFRHKLTELARQANKLIVLPEGTDIRTIKAAAICCERNIARCQLIGNKEEILQIAEHQGINLPDNLLITDPDSIRDNYVGPMVELRKNKGLTDVIALENLKDNVVLATMMLQLGQVDGLVSGAVNTTANTIRPALQLIKTAPDSSLVSSVFFMLLPDQVLVYGDCAINPEPNAEQLADIAIQSADSARAFDIEPRVAMISYSTGRSGHGADVEKVAKATEIAKAKRPDLIIDGPLQYDAAIMENVAKKKAPNSPVAGKATVFIFPDLNTGNTTYKAVQRSADLVSIGPMLQGMNKPVNDLSRGALVDDIVYTIALTAIQATM

SEQ ID NO: 32299 - protein, 535 aa, Colwellia psychrerythraea 34H
MSKNKEDTDKDKELVVEKSVYRSDHVIGENNVEIMGMDLHNPVFFFSSTLIVVFVLLTLLFPELAKQSFDASKSWSIDHFDWLFIVSGNLFVLFCLALVVSPFGKIRLGGTEAKPDFSKLSWFSMLFSAGMGIGLMFWSVAEPVGYFTNWYGTPLNTVAGTPEAAKMAMAATMYHWGLHPWAIYAVVGLSLAFFTFNCNMPLTIRSSFYPLLGERVWGWPGNVIDITAVLATIFGLATSLGFGAQQAAGGLSFLFDIPNTINTQIAIIFGVTMVAIFSVTRGLDGGVKLLSNINMSLAVVLMLFVIITGSTLVIINGVGTTLLAYAENIIPLSNWIGREDETFYHGWTVFYWAWWVSWSPFVGMFIARISRGRTVREFILAVLFVPTLLTSVWMATFGGMGLEQVQNGVGQLAQGIGDSSLALFQMLENLPLSNVTSFLAIVLVLIFFVTSSDSGSLVIDSITAGGKVDVPVPQRIFWAAIEGVIAAALLFGGGKDALGALQAAAITVGLPFTVLLIVMCFGLFLGLKREYKKLS

SEQ ID NO: 32300 - protein, 401 aa, Colwellia psychrerythraea 34H
MSFSTLKLSTPILNAIADLGYTKPTAIQQKAIPVVLAGKDIIAAAQTGTGKTASFVLPLLEQLNSQYKETGKKLRAKRIRALILVPTRELAVQVEASISQYAKYLDISSMAMYGGVDAQEQKQRLIWGVDILVATPGRLLDMTHQRVLHFDELDMLVLDEADRMLDMGFIDDINKIIERLPEHRQNLLFSATMSEEVRGLAKRTIHKPVEISIGADKASKPKIEQWLVTVDKANKSALLSHIITTQNWQQALIFIETKHGAAKLVSQLEKRGIVAESIHSGRAQDIREKILNDFKSGKIKFLVATAIAARGLDIGELSRVINYDLPAQVDDYIHRIGRTGRAGASGEAISLVSKDNFRELCAIESRLGHIIERKEFEEFPVKKTVPLSKLNYVTKYAASKK

SEQ ID NO: 32301 - protein, 356 aa, Triticum aestivum
MALLTDLLNLDLTDSTEKIIAEYIWIGGSGMDLRSKARTLPGPVTDPSKLPKWNYDGSSTGQAPGEDSEVILYPQAIFKDPFRKGNNILVMCDCYTPAGVPIPTNKRYNAAKIFSNPDVAKEEPWYGIEQEYTLLQKDINWPLGWPVGGFPGPQGPYYCSIGADKSFGRDIVDAHYKACLFAGVNISGINGEVMPGQWEFQVGPTVGISAGDQVWVARYLLERITEIAGVVVTFDPKPIPGDWNGAGAHTNYSTESMRKDGGFKVIVDAVEKLKLKHKEHIAAYGEGNERRLTGKHETADINTFSWGVANRGASVRVGRETEQNGKGYFEDRRPASNMDPYVVTSMIAETTILWKP

SEQ ID NO: 32302 - protein, 356 aa, Triticum aestivum
MALLTDLLNLDLTDSTEKIIAEYIWIGGSGMDLRSKARTLPGPVTDPSKLPKWNYDGSSTGQAPGEDSEVILYPQAIFKDPFRKGNNILVMCDCYTPAGVPIPTNKRYNAAKIFSNPDVAKEEPWYGIEQEYTLLQKDINWPLGWPVGGFPGPQGPYYCSIGADKSFGRDIVDSHYKACLFAGVNISGINGEVMPGQWEFQVGPTVGISAGDQVWVARYLLERITEIAGVVVTFDPKPIPGDWNGAGAHTNYSTESMRKDGGFKVIVDAVEKLKLKHKEHIAAYGEGNERRLTGKHETADINTFSWGVANRGASVRVGRETEQNGKGYFEDRRPASNMDPYVVTSMIAETTILWKP

SEQ ID NO: 32303 - protein, 427 aa, Triticum aestivum
MAQAVVPAMQCQVGVRGRSAVPARQPAGRVWGVRRTARATSGFEVLALGPETTGVIQRMQQLLDMDTTPFTDKIIAEYIWVGGSGIDLRSKSRTISKPVEDPSELPKWNYDGSSTGQPPGEDSEVILYPQAIFKDPFRGGNNILVICDTYTPQGEPVPTNKRHMAAQIFSDPKVTAQVPWFGIEQEYTLMQRDVNWPLGWPVGGYPGPQGPYYCAVGSDKSFGRDISDAHYKACLYAGIEISGTNGEVMPGQWEYQVGPSVGIDAGDHIWASGYILERITEQAGVVLTLDPKPIQGDWNGAGCHTNYSTLSMREDGGFDVIKKAILNLSLRHDLHIAAYGEGNERRLTGLHETASISDFSWCVANRGCSIRVGRETEAKGKGYLEDRRPPSNMDPYTVTALLAETTILWEPTLEAEALAAKKLALKV

SEQ ID NO: 32304 - protein, 427 aa, Triticum aestivum
MAQAVVPAMQCQVGVRGRSAVPARQPAGRVWGVRRTARATSGFKVLALGPETTGVIQRMQQLLDMDTTPFTDKIIAEYIWVGGSGIDLRSKSRTISKPVEDPSELPKWNYDGSSTGQAPGEDSEVILYPQAIFKDPFRGGNNILVICVTYTPQGEPIPTNKRHMAAQIFSDPKVTSQVPWFGIEQEYTLMQRDVNWPLGWPVGGYPGPQGPYYCAVGSDKSFGRGISDAHYKACLYAGIEISGTNGEVMPGQWEYQVGPSVGIDAGDHIWASRYILERITEQAGVVLTLDPKPIQGDWNGAGCHTNYSTLSMREDGGFDVIKKAILNLSLRHDLHIAAYGEGNERRLTGLHETASISDFSWGVANRGCSIRVGRETEAKGKGYLEDRRPASNMDPYTVTALLAETTILWEPTLEAEALAAKKLALKV

SEQ ID NO: 32305 - protein, 427 aa, Triticum aestivum
MAQAVVPAMQCQVGVRGRSAVPARQPAGRVWGVRRTARATSGFKVLALGPETTGVIQRMQQLLDMDTTPFTDKIIAEYIWVGGSGIDLRSKSRTISKPVEDPSELPKWNYDGSSTGQAPGEDSEVILYPQAIFKDPFRGGNNILVICDTYTPQGEPIPTNKRHMAAQIFSDPKVTAQVPWFGIEQEYTLMQRDVNWPLGWPVGGYPGPQGPYYCAVGSDKSFGRDISDAHYKACLYAGIEISGTNGEVMPGQWEYQVGPSVGIDAGDHIWASRYILERITEQAGVVLTLDPKPIQGDWNGAGCHTNYSTLSMREDGGFDVIKKAILNLSLRHDLHIAAYGEGNERRLTGLHETASISDFSWGVANRGCSIRVGRETEAKGKGYLEDRRPASNMDPYTVTALLAETTILWEPTLEAEALAAKKLALKV

SEQ ID NO: 32306 - protein, 475 aa, Arabidopsis thaliana
MAGAYDPSLPEVPEWLNKGDNAWQLTAATLVGLQSMPGLVILYASIVKKKWAVNSAFMALYAFAAVLLCWVLLCYKMAFGEELLPFWGKGGPAFNQGYLKGQAKIPNSNVAAPYFPMATLVYFQFTFAAITTILVAGSVLGRMNIKAWMAFVPLWLIFSYTVGAYSIWGGGFLYQWGVIDYSGGYVIHLSSGVAGFVAAYWVGPRPKADRERFPPNNVLLMLAGAGLLWMGWSGFNGGAPYAANLTSSIAVLNTNLSAATSLLVWTTLDVIFFGKPSVIGAIQGMVTGLAGVTPGAGLIQTWAAIIIGVVSGTAPWASMMIIHKKSALLQKVDDTLAVFYTHAVAGLLGGIMTGLFAHPDLCVLVLPLPATRGAFYGGNGGKQLLKQLAGAAFIAVWNVVSTTIILLAIRVFIPLRMAEEELGIGDDAAHGEEAYALWGDGEKFDATRHVQQFERDQEAAHPSYVHGARGVTIVL

SEQ ID NO: 32307 - protein, 247 aa, Rhodella violacea
MQNNNNNKNNKTILIVDDEASMRRLLEYRLSIIGYNVISASDGEEALNIFRKEHPNLIVLDIMMPKLDGFGVCQEIRKESDIPIIMLTGLGDIVDRITGLELGADDYLVKPFSPKELEARIKSVLRRSDRMTVNSNIPTSGINQIGFLTIDTNRRQVYKNNERVRLTGIEFCLLELLISRAGSPFSRAVILQKVWGYTPERHIDTRVVDVHISRLRAKLEDDPSNPDLILTARGTGYLFQRITQINQ

SEQ ID NO: 32308 - protein, 535 aa, Brassica oleracea var. alboglabra
SFKDKLFQTNNSTKLEDNSKTSTNVTSNRSSSTNTEEFSSPKKDSKNSPLVIPSKEPIMRRNMDNQAYYVLGHKTPNIRDLYTLSRKLGQGQFGTTYLCTELATGVDYACKSISKRKLISKEDVEDVRREIQIMHHLAGHGNIVTIKGAYEDSLYVHIVMELCAGGELFDRIIQRGHYSERKAAELTKIIVGVVEACHSLGVMHRDLKPENFLLVNKDDDFSLKAIDFGLSVFFKPGQIFTDVVGSPYYVAPEVLLKRYGPEADVWTAGVILYILLSGVPPFWAETQQGIFDAVLKGYIDFDSDPWPVISDSAKDLIRRMLSSKPAERLTAHEVLRHPWICENGVAPDRPLDPAVLSRLKQFSAMNKLKKMALKVIAESLSEEEIAGLREMFQAMDTDNSGAITFDEPKAGLRKYGSTLKDTEIHDLMEAADVDNSGTIDYSEFIAATIHLNKLEREEHLVAAFQYFDKDGSGYITIDELQQACVEHSMTDVFLEDIIKEVDKNNDGQIDYGEFVEMMQKGNAGVGRRTMRNSLN

SEQ ID NO: 32309 - protein, 537 aa, Brassica rapa subsp. pekinensis
SFKDKTYEGNNNNLPEENSTTITHVSSVHSPTTEQDFPKEDNNNNNNKSPVLVLPVKEPFMRRNMDNQAYYVLGHKTPNIRDLYTLSRKLGQGQFGTTYLCTEVATGVDYACKSISKRKLISKEDVEDVRREIQIMHHLAGHKNIVTIKGAYEDPLYVHIVMEVCAGGELFDRIIQRGHYTERKAAELTKIVVGVVEACHSLGVMHRDLKPENFLLVNKDDDFSLKAIDFGLSVFFKPGQIFKDVVGSPYYVAPEVLLKHYGPEADVWTAGVILYILLSGVPPFWAETQQGIFDAVLKGDIDFESDPWPVISDSAKDLIRKMLCSNPSERLSAHEVMRHPWICENGVAPDRALDPAVLSRLKQFSAMNKLKKMALKVIAESLSEEEIAGLRAMFEAMDTDNSGAITFDELKAGLRRYGSTLKDTEIQDLMEAADVDNSGTIDYSEFIAATIHLNKLDREEHLVSAFQYFDKDGSGYITIDELQQSCVEHGMTDVFLEDVIKEVDQDNDGRIDYGEFVAMMQKGNAGIGRRTMRNSLN

SEQ ID NO: 32310 - protein, 175 aa, Capsicum annuum
MASKMCEPLVIGRVIGEVVDYFCPSVKMSVIYNSNKHVYNGHELFPSSVTTKPRVEVNGGDLRSFFTLIMIDPDVPGPSDPYLREHLHWIVTDIPGTTDCSLGREVVGYEMPRPNIGIHRFVFLLFQQKKRQTISNAALSRDRFCTRKFSEENELGSPVAAVFFNCQRETATRRR

SEQ ID NO: 32311 - protein, 152 aa, Pseudomonas syringae pv. phaseolicola 1448A
MPCVQSRTLTFLGSTCLTQCKRAVPAPCSHASRYSSYKELGEQDFRRNTMYAVIVTGGKQYKVAPGEYLKIEKLEIATGESVTFDRVLLVGNGDDVNIGAPVVAGATVVAEVVSQGRHDKVRIIKFRRRKHHMKRMGHRQWYTEIKITGIQA

SEQ ID NO: 32312 - protein, 158 aa, Staphylococcus aureus
ATQLQATDYVTPIVLGDETKVQSLAQKLDLDISNIELINPATSELKAELVQSFVERRKGKATEEQAQELLNNVNYFGTMLVYAGKADGLVSGAAHSTGDTVRPALQIIKTKPGVSRTSGIFFMIKGDVQYIFGDCAINPELDSQGLAEIAVESAKSAL

SEQ ID NO: 32313 - protein, 158 aa, Staphylococcus aureus
ATQLQATDYVTPIVLGDETKVQSLAQKLNLDISNIELINPATSELKAELVQSFVERRKGKATEEQAQELLNNVNYFGTMLVYAGKADGLVSGAAHSTGDTVRPALQIIKTKPGVSRTSGIFFMIKGDEQYIFGDCAINPELDSQGLAEIAVESAKSAL

SEQ ID NO: 32314 - protein, 158 aa, Staphylococcus aureus
ATQLQATDYVTPIVLGDETKVQSLAQKLNLDISNIELINPATSELKAELVQSFVERRKGKTTEEQAQELLNNVNYFGTMLVYAGKADGLVSGAAHSTGDTVRPALQIIKTKPGVSRTSGIFFMIKGDEQYIFGDCAINPELDSQGLAEIAVESAKSAL

SEQ ID NO: 32315 - protein, 158 aa, Staphylococcus aureus
ATQLQATDYVTPIVLGDETKVQSLAQKLDLDISNIELINPATSELKAELVQSFVERRKGKATEEQAQELLNNVNYFGTMLVYAGKADGLVSGAAHSTGDTVRPALQIIKTKPGVSRTSGIFFMIKGDEQYIFGDCAINPELDSQGLAEIAVESAKSAL

SEQ ID NO: 32316 - protein, 158 aa, Staphylococcus aureus
ATQLQATDYVTPIVLGDETKVQSLAQKLDIDISNIELINPATSELKAELVQSFVERRKGKATEEQAQELLNNVNYFGTMLVYAGKADGLVSGAAHSTGDTVRPALQIIKTKPGVSRTSGIFFMIKGDEQYIFGDCAINPELDSQGLAEIAVESAKSAL

SEQ ID NO: 32317 - protein, 158 aa, Staphylococcus aureus
ATQLQATDYVTPIVLGDETKVQSLAQKLNLDISNIELINPATSEFKAELVQSFVERRKGKATEEQAQELLNNVNYFGTMLVYAGKADGLVSGAAHSTGDTVRPALQIIKTKPGVSRTSGIFFMIKGDEQYIFGDCAINPELDSQGLAEIAVESAKSAL

SEQ ID NO: 32318 - protein, 158 aa, Staphylococcus aureus
ATQLQATDYVTPIVLGDETKVQSLAQKLNLDISNIELINPATSELKAELVQSFVERRKGKATEEQAQELLNNVNYFGTMLVYAGKADGLVSGAAHSTGDTVRPALQIIKTKPGVSRTSGIFFMIKDDEQYIFGDCAINPELDSQGLAEIAVESAKSAL

SEQ ID NO: 32319 - protein, 158 aa, Staphylococcus aureus
ATQLQATDYVTPIVLGDETKVQSLAQKLNLDISNIELIDPATSELKAELVQSFVERRKGKATEEQAQELLNNVNYFGTMLVYAGKADGLVSGAAHSTGDTVRPALQIIKTKPGVSRTSGIFFMIKGDEQYIFGDCAINPELDSQGLAEIAVESAKSAL

SEQ ID NO: 32320 - protein, 177 aa, Hordeum vulgare subsp. vulgare
MAGRDRDPLVVGRVVGDVLDPFVRTTNLRVTFGNRAVSNGCELKPSMVAQQPRVEVGGNEMRTFYTLVMVDPDAPSPSDPNLREYLHWLVTDIPGTTGASFGQEVMCYESPRPTMGIHRFVLVLFQQLGRQTVYAPGWRQNFNTRDFAELYNLGQPVAAVYFNCQREAGSGGRRMYN

SEQ ID NO: 32321 - protein, 67 aa, Exiguobacterium sibiricum 255-15
PEFGKVKWFNSEKGFGFIERENGDDVFVHFSAIQTDGFKSLDEGQEVSFEVEEGQRGPQAANVTRSG

SEQ ID NO: 32322 - protein, 67 aa, Exiguobacterium aurantiacum
PEFGIVKWFNLEKGFGFIEVEGGKDVFVHFSAIQTDGYKSLDEGQEVEFEIVDGERGPQAANVTGSG

SEQ ID NO: 32323 - protein, 67 aa, Exiguobacterium antarcticum
PEFGKVKWFNAEKGFGFIERESGDDVFVHFSAIQTDGFKSLDEGQEVSLRLKKANAAHQLLLYRDPG

SEQ ID NO: 32324 - protein, 69 aa, Exiguobacterium undae
HKGLPEFGTVKWFNLEEGFGFIERESGDDVFVHFSAIQTDGFKSLDEGQEVSFEVEEGQRGPQAANVTG

SEQ ID NO: 32325 - protein, 67 aa, Exiguobacterium acetylicum
PEFGKVKWFNSEKGFGFIERESGDDVFVHFSAIQSEGFKSLDEGQEVSFEVEEGQRGPQAANVTGSG

SEQ ID NO: 32326 - protein, 454 aa, Janthinobacterium lividum
MTAVGITEPQELKRGLKSRHIQLIALGGAIGTGLFLGIAQTIKMAGPSVLLGYGIAGVIAFLIMRQLGEMVVDEPVAGSFSYFADKYCGHLPGFLSGWNYWVLYVLVSMAELTAVGIYVQYWWPGVPTWVSALIFFCVINAISLLNVKAFGEMEFWFALVKVVAIIGMIVFGAYLLASGDAGPQASVANLWQHGGFFPNGWQGLVMAMAVIMFSFGGLELVGITAAEADDPSTTIPRATNQAIYRILIFYIGALGILLSLYPWQNVVTGGSPFVLIFHALDSNLVATALNVVVLTAALSVYNSGVYCNTRMLFGLAKQGNAPRALLHLNRRGVPLVALGVSALATGACVVVNYFMPGEAFEVLMGLVVSALIINWAMISWIHLRFRAQKKIEGKTTLFQSLGYPFTNYLCLVFLAGILVIMYLTPGLRISVYLIPVWLAALGVGYWIKQSKAKA

SEQ ID NO: 32327 - protein, 67 aa, Janthinobacterium lividum
MATGIVKWFNDSKGFGFITPDEGGEDLFAHFSAIQSNGFKSLQENQRVSFEVTAGPKGKQASNIQPI

SEQ ID NO: 32328 - protein, 444 aa, Pseudomonas syringae pv. phaseolicola 1448A
MSDPISNKPAPVLRESATFDRLTIQEIQRAAETGIYDIRGGGTKRKLPHFDDLLLLGASVSRYPLEGYREKCGTDVVLGNRFAKKPLYLKIPVTIAGMSFGALSANAKEALGRGATIAGTSTTTGDGGMTPEERGQSQHLVYQYLPSRYGMNPDDLRKADAIEIVLGQGAKPGGGGMLLGMKVTERVAGMRTLPVGVDQRSACRHPDWTGPDDLAIKIAEIREITDWEKPIYVKIGASRPYYDVKLAVKAGADVIVLDGMQGGTAATQEVFIEHVGIPILPAIPQAVQALQEMGMHRKVQLIVSGGIRNGADVAKAMALGADAVAIGTAALIALGDNHPRLDEELRKIGSAAGYYDDWQNGRDPAGITTQDPELSKRLDPVEGGRRLANYLRVLVLEAQTMARACGKSHLHNLDPEDLVALTVESAAMARVPLAGTSWIPGSGY

SEQ ID NO: 32329 - protein, 437 aa, Pseudomonas syringae pv. phaseolicola 1448A
MSAPVAAPVVKPVEIKKSLIDAVVAGLLALIVFGPIVGIVLDGYSFNLQPTRVAWLVAVVMVGRFLISLFLQTPKGIRVSQSFESSDSGVHVLKPDHKSRLYWIIPLLIVIAIVFPIFANKYILTVVILGLIYVLLGLGLNIVVGLAGLLDLGYVAFYAIGAYGLALGYQYLGLGFWSALPLAAIAAALAGCILGFPVLRMHGDYLAIVTLGFGEIIRLVLNNWLSFTGGPNGVPVPSPTFFGLEFGRRAKDGGIPIHEYFGFDYNPDLKFLFIYTVLFLVVLAVLFIKHRLTRMPIGRAWEALREDEIACRSMGLNHVLVKLSAFTIGASTAGLAGVFFASYQGFVNPTSFTFFESALILAIVVLGGMGSTVGVVIAAFVLTVAPELLRSFSEYRVLLFGILMVLMMIWRPRGLIRISRTGVKPRKGALVTEGGAR

SEQ ID NO: 32330 - protein, 471 aa, Pseudomonas syringae pv. phaseolicola 1448A
MSINVLLVEDDRSLREALGETLELAGYGYQAVGSAEEALVAAEAQPFSLVISDVNMPGMDGHQLLSLLRSRHPQLPVLLMTAHGAVDRAVDAMRQGAADYLVKPFEPKALIALVARHALGRLEPAERDGPIAVEPASIQLLNLASRVAKSDSTVLISGESGTGKEVLARFIHQNSPRADKPFIAINCAAIPDNMLEATLFGHEKGSFTGAIAAQAGKFEQADGGTILLDEISEMPLGLQAKLLRVLQEREVERVGARKPIILDIRVVATTNRDLAGEVAAGRFREDLFYRLSVFPLAWQALRQRTADILPLAERLLAKHVNKMKHAPVRLSAEAQQCLVSYPWPGNVRELDNAVQRALILQQGGVIQAQDFCLSGPVTSLPAAAVVEAVPSLPVTSSPDNAGAGGNAESVGALGDDLRRREFQMIIDTLRAERGRRKEAAERLGISPRTLRYKLAQMRDAGMDVEAYLFAT

SEQ ID NO: 32331 - protein, 589 aa, Pseudomonas syringae pv. phaseolicola 1448A
MISRITRRHRQALRLAASFIAPYRWQAFGVLLALVITAGITLSIGQGIKLMVDQGFMTRSPQLLERSIGFFMLLTVGLAIGTFARFYLVSWIGERVVADLRKKVFDHLIELHPGFYENNRSSEIQSRLTADTTLLQSVIGSSLSMFLRNVLMVVGGIVLLFITNPKLTSIVVVALPLIIAPILMFGRRVRNLSRESQDRVANVGSYVAEALGQIKTVQAYNHQEQDKQRFSHTVEQAFDTARKRILQRSWLITLVIVLVLGVVAVMLWVGGMDVISGRISSGELAAFVFYALMVGMAFGTLSEVIGDLQRAAGAAERIGELLQARSEIKAPATELQSLPQRISGRLALENVTFAYPSRPERNALDNLTLNIEPGETLALVGPSGAGKSTILDLLLRFYDPTQGRILIEGVPIAQLDPHDLRRCFALVSQSPALFFGSVEDNIRYGNASASLEQVQAAARIAHAHEFILDMADGYGTHLGEGGVGLSGGQRQRLAIARALLVDAPILLLDEATSALDAQSEHLIQQALPSLMQGRTTLVIAHRLATVQNADRIAVMDQGRLVAVGTHQQLIASNPLYARLAALQFNAGVE

SEQ ID NO: 32332 - protein, 469 aa, Pseudomonas syringae pv. phaseolicola 1448A
MSETTAPSGELKRGLKNRHIQLIALGGAIGTGLFLGSAGVLKSAGPSMILGYAICGFIAFMIMRQLGEMIVEEPVAGSFSHFAHNYWGGFAGFLSGWNCWLLYILVGMSELTAVGKYIHYWLPDIPSWVSAAAFFILINAINLTNVKVFGETEFWFAIIKVVAIIGMIALGSYMLVSGSGGPQASVSNLWEHGGFFPNGVGGLVMALAIIMFSFGGLEMLGFTAAEAEQPKTVIPKAINQVIYRILIFYIGALVVLLSLTPWDSLLASLNASGDSYSGSPFVQVFSMLGSDAAAHILNFVVLTAALSVYNSGTYCNSRMLVGMAEQGDAPRALAQVDRRGVPVKAIFASAAVTVVAVLLNYFVPQQALELLMSLVVATLVINWAMISYSHLKFRQHMNRTAQVPLFKALWYPYGNYVCLAFVLFILGIMLMIPGIQISVYAIPVWLAVMWVCYRAKNRRSVVMNAETGK

SEQ ID NO: 32333 - protein, 283 aa, Pseudomonas syringae pv. phaseolicola 1448A
MHRGPSFVKACAFVLAASFTLANAAQAAEGSKLDAVLKRGNLVVGTGSTNAPWHFQGADGKLQGFDIDIGRIIAKGLFNDPSKVEFVVQSSDARIPNLLTDKVDISCQFITVTASRAQQVAFTLPYYREGVALLLPANSKYKEIDDLKAAGDGVTVAVLQNVYAEELVHQALPKAKVDQYDSVDLMYQAINSGRADTAATDQSSVKYLMVQNPGRYRSPAFAWSPQTYACAVKRGDQDWLNFVNTALHEAMTGVEFPAYAASFKQWFGVDLPVPAIGFPMEYK

SEQ ID NO: 32334 - protein, 399 aa, Pseudomonas syringae pv. phaseolicola 1448A
MREVFICDAIRTPIGRFGGGLSSVRADDLAAVPIKALMERNPSVNWEEIDEVFFGCANQAGEDNRNVARMAALLAGLPESVPGVTLNRLCASGMDAIGTAFRAIASGEIELAIAGGVESMSRAPFVMGKADAAFSRNMKLEDTTIGWRFINPAMKAQYGVDSMPETGDNVATDFRISRADQDAFALRSQQRTAVAQAAGFFEEEIVPVRVAHKKGETIVDKDEHPRSDTSLETLSKLKPVNGADKTVTAGNASGVNDGAAALILASADAVKKHGLTPRARVLGMASAAVAPRVMGIGPVPAVRKLVERLGLAVTDFDVIELNEAFASQGLAVLRELGLADDAPQVNPNGGAIALGHPLGMSGARLVLTALHHLEKTGGRKGLATMCVGVGQGLALAIER

SEQ ID NO: 32335 - protein, 574 aa, Pseudomonas syringae pv. phaseolicola 1448A
MELLSGAEMVVRFLRDEGVEHIYGYPGGALLHVYDALFKEPAVSHILVRHEQAATHMADGYARATGKAGVVLVTSGPGATNAITGIATAYMDSIPMVVLSGQVASTLVGTDAFQETDMIGISRPIVKHSFMIKHPSEIPEVLKKAFYLAQSGRPGPVVVDIPKDMTNPAEKFEYVFPKKAKLRSYSPAVRGHSGQIRKAVEMLLAAKRPIVYAGGGVIMGNASAQLTELAQLLNAPVTNTLMGLGCYPGTDRQFVGMLGMHGSYTANLAMHHTDVILAVGARFDDRVINGASKFCPNAKIIHIDIDPASISKTIKADVPIVGPVESVLTEMVATLKEIGETPDKASVAAWWKQIDEWRGAGDLFPYNRGDGTVIKPQAVIETLCEVTKGDAYVTSDVGQHQMFAAQYYRFNKPNRWINSGGLGTMGFGFPAAMGVKLSFPDAHVACVTGEGSIQMNIQELSTCLQYGLPVKIILLNNGVLGMVRQWQDMSYGSRHSHSYMESLPDFVKLVEAYGHVGMRITDLKDLKPKMEEAFAMTDRLVFMDIQVDVTEHVYPMQIKDGSMRDMWLSKTERT

SEQ ID NO: 32336 - protein, 320 aa, Pseudomonas syringae pv. phaseolicola 1448A
MLGRQRFSTRQSRASHTFTGQTSKTINTLQSLSYGTSSPDGMRCALETDQHPTFRPEISMTKRYSALLAALFASLMLSQTPAHANGLDDVVARGTLKVAVPQDFPPFGSVGPDMKPRGLDIDTAQLLADQLKVKLELTPVNSTNRIPFLTTGKVDLVISSLGKNPDREKVIDFSRAYAPFYLAVFGPPDSPVKDIADLKGKTISVTRGAIEDIELSKVAPEGATIKRFEDNNSTIAAYLAGQTDLIASGNVVMVAISERNPKRIPALKVKLKDSPVYVGVNKGQPELLGKVDEILNAAKADGALEKASQKWLKQPLPADL

SEQ ID NO: 32337 - protein, 403 aa, Pseudomonas syringae pv. phaseolicola 1448A
MQFNKSNKLANVCYDIRGPVLKHAKRLEEEGHRILKLNIGNPAPFGFEAPDEILQDVIRNLPTAQGYSDSKGLFSARKAVMQYYQQKQVEGVGIEDIYLGNGVSELIVMSMQALLNNGDEVLVPAPDYPLWTAAVALSGGSPVHYLCDEQANWWPDLEDIKAKITPNTKAMVIINPNNPTGAVYSREVLLGMLELARQHNLVVFSDEIYDKILYDDAMHICTASLAPDLLCLTFNGLSKSYRVAGFRSGWIAISGPKHNAQSYIEGIDILANMRLCANVPSQHAIQTALGGYQSINDLILPPGRLLEQRNRTWELLNDIPGVSCVKPMGALYAFPRIDPKVCPIFNDEKFVLDLLLSEKLLVVQGTAFNWPYPDHFRVVTLPRVDELEQAIGRIGNFLKGYRQ

SEQ ID NO: 32338 - protein, 522 aa, Pseudomonas syringae pv. phaseolicola 1448A
MRWLNRHKFLPFLAWLPQQNRASVGRDALVGLSGAILALPQSIAYALIAGLPPEYGLYAAIVPVLIACLWGSSWHLICGPTAAISIVLYASVSPLAVPASQDYIMLILLLTFIAGVFQLLLGMMRFGALVNFVSHSVVLGFTLGAAIVIALGQMPNLLGIDLPSQTTALRSLTAVLEHRGEVDLPSLTLGLLTLALGIGLKLLVPRWPTLLIALVSSSLLVWLWPAMFGHVRVVRAFVGHLPPFSPLPLDLELILKLLPTAVAVGMLGLVNSLSIARSLSARSQQMLNANQEVRAQGLSNMVGSLFSGYLSAGSFTRAALSYEAGARSPLAGVFSALWVALFAVAGASLISHIPIPAMAASILLICWGLVDRRGIRALFRVSRAEFFVMALTCLATLLLELQTAIYAGVLASLFFYLKRTSQPCVQQWREGDEDVLRVGGSIFFGASHYLQTRLQRTEGLRVVIDAQQINFIDYSGVEMLHQEARRLGQQGRVLVMRNARPQVIEELHKLEGPQNCPILFED

SEQ ID NO: 32339 - protein, 569 aa, Pseudomonas syringae pv. phaseolicola 1448A
MSKDPMSKPTPEPAAHSKAGPAVPTNFLRPIVQADLDSGKHSKIITRFPPEPNGYLHIGHAKSICVNFGLAKEFGGDTHLRFDDTNPAKEDQEYIDAIMSDVKWLGFEWAGEVRYASQYFDQLHDWAVELIKAGKAYVDDLTPEQAREYRGTLTEPGKNSPFRERSVEDNLDLFARMKAGEFEDGARVLRAKIDMASPNMNLRDPIIYRIRHAHHHQTGDKWCIYPIYDFTHGQSDALEGITHSICTLEFESHRPLYDWFLDNLPVPCKPRQYEFSRLNLNYTITSKRKLKQLVDEKHVSGWDDPRMSTLSGFRRRGYTPKSIRNFCEMIGTNRSDGVVDFGMLEFSIRDDLDHSAPRAMCVLRPLKVVITNYPEGQVEKLELPRHPKEDLGMRELPFSREIYIDRDDYMEEPPKGYKRLEPNGEVRLRGSYVIRADEAIKDAEGNIVELRCSYDPETLGKNPEGRKVKGVVHWVPAAESVECEVRLYDRLFRSANPEKAEDGASFLDNINPDSLQVLTGCRAEPSLGHAQPEDRFQFEREGYFCADIKDSKPGQPVFNRTVTLRDSWT

SEQ ID NO: 32340 - protein, 318 aa, Pseudomonas syringae pv. phaseolicola 1448A
MTPLKIAVLDDWQNIASDVVDWSVLDSVGDISFLHDFPADTATMAQRLQGFDIICLMRERTLFDEALLSQLPALKLLVTGGMRNAAIDIPAAKRHGIVVCGTESYKHAAPELTWALIMGITRNLVAEASSLRAGNWQVGLGSDLHGKTLGILGLGSIGKWIARYGQAFGMQVIAWSQNLTPEAAAESGVTYVSKQQLFEQADVLSVHLVLSDRSRGLVDAEALGWMKPSAYLINSSRGPIIDQTALLETLQQRNIAGAALDVFDIEPLPADHPFRTLDNVLATPHIGYVTENNYRTFYGQMIKDIQAWHAGSPIRLLG

SEQ ID NO: 32341 - protein, 392 aa, Pseudomonas syringae pv. phaseolicola 1448A
MQDVVIVAATRTAVGSFQGSLAAIAAVDLGAAVIRQLLVQTGVDGAQVDEVIMGQVLTAGAGQNPARQAAIKAGLPFSVPAMTLNKVCGSGLKALHLATQAIRCGDAEVIIAGGQENMSLSNYVLPGARTGLRMGHTSMVDTMITDGLWDAFNDYHMGITAENLAQQYDISREAQDQFAALSQQKAIAAIEGGRFVDEITPILIPQRKGEPLSFATDEQPRAGTTAETLGKLKPAFKKDGTVTAGNASSLNDGAAAVMLMSAAKAEQLGLPVLARVAAYANAGVDPAIMGIGPVSATRRCLDKAGWTLDELDLIEANEAFAAQSLSVGKELGLDPQKLNVNGGAIALGHPIGASGCRVLVTLLHEMIRRDAKKGLATLCIGGGQGVALALAR

SEQ ID NO: 32342 - protein, 664 aa, Pseudomonas syringae pv. phaseolicola 1448A
MSSPSTSSSGNVRMNAPVFYFAASFILIFGIVVIAFPQASGEWLLAAQNWAANTVGWYYMMVMTLYLVFVVVTALSGFGKIKLGADHDEPEFSYLSWAGMLFAAGISITLFFFCVSEPLTHLLQPPQGEGGTAEAARQGMQLLFLHWGLHGWGVFAFVGMALAYFAYRHNLPLALRSALYPLIGKRINGPIGYAVDGFGIIATIFGLGADMGFGVLHLNSGLDYLFGVAHTHWIQVGLITLMMGAAILVAIAGVDKGVRVMSDINMLLACALLLFVLFAGPTQHLLNTLVQNIGDYLGALPSKSFDVYAYKEPSDWLGGWTVFYWAWWIAWAPFVGLFIARISRGRTIREFVFGVLLIPLGFTLAWMSIFGNSAIDQVLNHGMTALGQSAIDDPSMTLYLLLETYPWSKTVIAVTVFISFVFFVTSADSGTVVLSTLSAKGGNPDEDGPKWLRVFWGVATALITSGLLFSGSIDALKSAVVLTSLPFSLILLLMMWGLHKAFVMESQRQIAQLYSLAPVSGSRRGGWRQRLSQAVHYPSRDEVYRFLDQTVRPAIDEVTAVFVEKGLSVVNVPDPSNDSVTLEIGHGEERPFIYQVQMKGFFTPSFARGGMGSKQLNNRRYYRAEVHLSEGSQDYDLVGYTKEQVINDVLDQYERHMQFLHLVR

SEQ ID NO: 32343 - protein, 570 aa, Pseudomonas syringae pv. phaseolicola 1448A
MGLCGCTRGRPMTQEIGGFAALELHPNIVAAVVATGYEEPSAIQQQSIPIILAGHDMIGQAQTGTGKTAAFALPILHRIDPSKREPQALILAPTRELALQVATAFETYAKQMPGVTVVAVYGGAPMGPQLKAIRNGAQIVVATPGRLCDHLRRDEKVLATVNHLVLDEADEMLKLGFMDDLEVIFKAMPETRQTVLFSATLPQSIRAIAERHLRDPKHVKIQTKTQTVTAIEQAHLLVHADQKTSAVLSLLEVEDFDALIMFVRTKQATLDLASALEAKGYKAAALNGDIAQNQRERVIDSLKDGRLDIVVATDVAARGLDVPRITHVFNVDMPYDPESYVHRIGRTGRAGREGRALLLVTPRERRMLQVIERVTGQKVAEVRLPDAQAVLDARIKKLTNSLSPLVADAESTHGDLLDRLTADIGCSPRALAAALLRKATNGQALTLAAIERERPLVPNNAPRGDRPERSGSSDRGDRPERERRAPVPLAEGRARCRTALGARDGIAAKNLLGAILNEGGLAREAIGRIQVRDSFSLVELPEDGLERLLTKLKDTRVAGKQLKLRRYRED

SEQ ID NO: 32344 - protein, 397 aa, Pseudomonas syringae pv. phaseolicola 1448A
MKEPVLYFDYAATTPVDERVIRVMVDCLGVSGNFGNPASSAHSFGQKARVAVEIAREQVARLVGAQASQIIWTSGATESSNLALKGVAQERAKRQAAFAGGRSGHIITSQIEHKATLDTARQLEEEGVEVTWLAPDSDGLISADAVSAALRDDTFLVSLMLVNNELGTVNDIAEIGRRVRAHGALLHVDAAQGAGKLPIDLSQLAVDLMSLSAHKIYGPKGIGALYVGPRAQQRVLAQIHGGGHECGLRSGTLATHQIAGMGAAFALAAEVLEEEVVEIQRLNSLICERLADIPGVCINGSPTQRIAHTLSFTFTHNDLDVAALGDKLAFSSTSACNSAKNLPSHVLLALGLSPQAAGQTIRLSLGRFTRDQDIERAAESIHACLIQPAFWAVAQSR

SEQ ID NO: 32345 - protein, 458 aa, Pseudomonas syringae pv. phaseolicola 1448A
MTSQDGLKRGLSARHIRFMALGSAIGTGLFYGSASAIQQAGPAVLLAYLIGGAAVYMVMRALGEMAVHDPVSGSFSHYATRYMGPLAGFVLGWTYAFEMIIVCLADVTAFGIYMGFWFPEVPRWIWVLGIVFLIGALNLCNVKVFGETEFWLSILKVSAIVAMIVAGFGIMIFGIGSSTSGTEIGISNLWAHGGFMPNGVTGLIASFAVVMFAFGGIEIIGITAGEAKDPQRSLPQAINAVPLRILLFYVLTLFVLMCIYPWPQIGTQGSPFVQIFDNLGIASAATILNIVVISAAVSAINSDIFGAGRMMYGLARDGQAPASFARLSRHGVPWMTVLVMGIALLGGVLLNYLIPKDVFLLIASLATFATVWVWLMILLTQVAMRRSMNRDEAAQLKFAVPFWPYGPAAAIVFMLFIFGVLGYFPDNRAALIVGAIWIVLLLIAYGLWVKPKALNNPH

SEQ ID NO: 32346 - protein, 459 aa, Pseudomonas syringae pv. phaseolicola 1448A
MQRMDAPAGIARPLLVQHWFICGHKRCLSTQNKLVLWPAVCRLVTYSPSRPSTRNANVTASRIAARVLRIKPSPSSAAADRANELRRAGKSIINLVVGEPDFDTPAHIRQAASAAIENGETRYTLNAGTAALRDAIAAKLQRENGLSYAPGQIVVTSGAKAAIFNAFAATLGIDDEVLIPAPYWVSYPDMVLACDGRPVTLPCPEDNQFKLTAEQLRHAITPRTRWLLLNSPSNPSGATYSATEWRALADVLLDYPDVLVMTDDIYEHIRYDDTPLSHLLTVEPALRERVLIINGVSKTYAMTGWRIGYAAGPSDIINAMATLQSQSTSNACSVSQAAAVAALNGDQSFVGESVKVYKQRRDRCLELINAIDGLSCIQPQGAFYLYVNCAALIGKTTPSGSVLEADTDVVLYLLESQGVAVVAGTAYGLAPFFRMSTATALETLETGCTRIATAVAALR

SEQ ID NO: 32347 - protein, 1481 aa, Pseudomonas syringae pv. phaseolicola 1448A
MKAGLYQPDEFKDNCGFGLIAHMQGEPSHHLLQTAVQALTCMTHRGGINADGKTGDGCGLLIQKPDGFLRAMAKEHFGADLPRQYAVGMVFLNQDDAKADAARENMNREILAEGLELVGWRQVPIDTSVLGRLALERLPKIEQVYIGGEGLSDQEFAIKLFSARRRSSVSNAADTDHYICSFSHKTIIYKGLMMPADLTAFFPDLSDERLQTAICVFHQRFSTNTLPKWPLAQPFRFLAHNGEINTITGNRNWAQARRTKFTNDLMDLDELGPLVNRVGSDSSSMDNMLELMVTGGIDLFRGVRMIIPPAWQNVETMDPDLRAFYEYNSMHMEPWDGPAGIVMTEGRHAVCLLDRNGLRPARWVTTKNGYITLASEIGVWDYKPEDVIAKGRVGPGQIFAVDTETGQILDTDAIDNRLKSRHPYKQWLRKNALRIQATMEDNDHGSAFYDSEQLKQYMKMYQVTFEERDQVLRPLGEQGQEAVGSMGDDTPMAVLSRRVRSPYDYFRQQFAQVTNPPIDPLREAIVMSLEICLGAERNIFQESPEHASRVILSSPVISPAKWRSLMNLERPGFERHIIDLNYDESLGLEAAVRSVADQAEEAVRAGRTLIVLSDRHIAPGKLPVHASLAVGAVHHRLTEQGLRCDSNILVETATARDPHHFAVLIGFGASAVYPFLAYEVLGDLIRTGEVLGDLYEVFKNYRKGITKGLLKILSKMGISTVASYRGAQLFEAIGLSEEVCDTSFRGVPSRLKGARFVDIEAEQKALAAEAWSTRKPIQQGGLLKFVFGGEYHAYNPDVVSTLQAAVQQGDYSKFKEYTSLVDQRPVSMIRDLLQVKTLDQPLNIDEIEPLSEILKRFDSAGISLGALSPEAHEALAEAMNRLGARSNSGEGGEDPARYGTIRSSKIKQIATGRFGVTPEYLVNADVLQIKVAQGAKPGEGGQLPGGKVNGLIAKLRYAVPGVTLISPPPHHDIYSIEDLSQLIFDLKQVNPAALVSVKLVAEAGVGTIAAGVAKAYADLITISGYDGGTGASPLTSIKYAGAPWELGLAETHQTLRGNDLRGKVRVQTDGGLKTGLDVIKAAILGAESFGFGTAPMIALGCKYLRICHLNNCATGVATQNEKLRKDHYIGTVDMVINFFTYVAEETREWLAKLGVRTLEELIGRTDLLDILPGETEKQQHLDLTPLLGSDHIPADKPQFSLVDRNPPFDKGLLAEQMVEMAKPAIESLSGGEYELDICNCDRSIGARISGEIARLHGNQGMNKAPITFRFKGTAGQSFGVWNAGGLNMYLEGDANDYVGKGMTAGKLVIVPPKGSPFKTNESAIIGNTCLYGATGGKLFAAGTAGERFAVRNSGAHTVVEGTGDHCCEYMTGGFVCVLGKTGYNFGSGMTGGFAYVLDQDNTFVDLVNHELVEIQRISGESMEAYRTHLQSVLNEYVAETDSEWGRNLAENLDDYLRRFWLVKPKAANLKSLLSSTRANPQ

SEQ ID NO: 32348 - protein, 450 aa, Pseudomonas syringae pv. phaseolicola 1448A
MNFSYGISMTFASLGLIEPLLRALEALGYQTPTPVQTQAIPPVLAGRDLMAAAQTGTGKTAGFALPLLQRLTMEGPKVAPNCVRALVLAPTRELADQVHESIRQYAEHLPLSTYAAYGGVSINPQMMKLRKGVDVLVATPGRLLDLHRQNAVKFSQLQTLILDEADRMLDLGFAEELRGIYAVLPKQRQTLLFSATFSDEIRLLAAQMLNDPLTIEVSPRNVAASSVKQWVVTVDKKRKADLFIHLMKKHRWGQVLVFAKTRVGVDQLVDRLQGLGLNADGIHGDKPQATRQRALDRFKSNEVKILVATDVAARGLDIDDLPTVVNLDLPIVAEDYIHRIGRTGRAGLTGEAISLVCADEVELLSAIEVLTRQTLERKEEQDFEPEHRVPTTDASGQILKKPKKPKKPKVSGSKRNLGKWVDSGESEPAPAVKPVRKVPVFNTGPRKKKP

SEQ ID NO: 32349 - protein, 316 aa, Pseudomonas syringae pv. phaseolicola 1448A
MIDVTVLSRNDEALDICSFELVRADGELLPPFTAGAHIDVHLPDGLIRQYSLCNAPNERHRYLIGVLNDPASRGGSRSLHEQIQSGAQLRISEPRNLFPLAGNSRRTLLFGGGIGITPILCMAEQLALEGADFELHYCVRSVERGAFIERLKRSSFADRVTLHLDEQPTTALDAANVLAQPQPDTHLYVCGPGGFMQHILDSARAAGWPEDNLHREYFSAEPVDTSNDGSFSIEIASTGQVLAVPANKTVAQVLESHGIDIPLSCEQGVCGTCLTRVLKGIPDHRDLFLTEDEQALNDQFTPCCSRSKTPLLVLDI

SEQ ID NO: 32350 - protein, 432 aa, Pseudomonas syringae pv. phaseolicola 1448A
MDNGVASTLALQWVGRRLFSGRTFDEARAMNERTGNALDWVAGSDAPEMNSLDVGFMALTDCAPLVVAATQGFAQPYGLSLNLERQTSWAGLRDRLVSGQLQAAHSLYGLIYAVELGISGGPATDMAILMGLNQNGQCINLSRELQQAGVITPEALDKRAHQSGSRLTFAQTFPTGNHAMWLYYWLASQGIHPLDDVTSVVVPPTQMAQHLQAGRIDGFCVGETWGASAVQQQLGFTMATSQSIWPDHPGKVLGCTREFVEQNPNTARALIMSVLEASRFIEESDHNRRSTAQLLSGADYLDTSPDCIEPRLLGHYSDGLGNHWQDPHAVSFHDQGQVNYPWLSDGMWFMTQFRRWGLLREDPDYLAVASRVQQLDLYRQAADALGIDAPTATLRSSQLIDGKVWDGSDPAGYARSFKLHSLAANAPAVASR

SEQ ID NO: 32351 - protein, 324 aa, Pseudomonas syringae pv. phaseolicola 1448A
MKKTVLAFSRVTPEMAERLAQDFNVIVPNPKLGDINAQFDEALPESHGLIGSGRKLGREQLQNAAKLEVVSSISVGYDNYDVDYLSERGILLTNTPDVLTESTADLGFSLIMSSARRVAELDAYTKAGQWTRSIEPPHFGTDVHGKTLGIVGMGNIGAAIARRGRLGFNMPILYSGNSRKTELEQELGAQFRSLDQLLAEADFVCLVVPLSEKTKHLIGRRELSLMKPGAILINIARGPIVDEPALIEALQNGTIRGAGLDVYEKEPLKESPLFQLKNAVTLPHIGSATTETRQAMADRAYHNLRNALLGERPQDLVNPQVWKG

SEQ ID NO: 32352 - protein, 443 aa, Pseudomonas syringae pv. phaseolicola 1448A
MNAVIVVDDEAPIRQAVEQWLTLSGFEVQVFARAEECLAQLPEHFPGVVLTDVRMPGMSGLELLSRLQGMDPDLPVILLTGHGDVPMAVEAMREGAYDFLEKPFSPETLISNLRRALEKRQLVLENRRLHEQADARTRLDATLLGESPSLQTLRRQVLELAQLPVNVIIRGETGSGKELVARCLHDFGPRAGKPFVALNCAAIPEHLFEAELFGHESGAFTGAQGKRIGKLEYADGGTVFLDEIESMPMAQQVKLLRVLQDKRLERLGSNQSIDVNLRIIAATKPDLLEEARAGRFREDLAYRLNVAELRLPPLRERLEDIAQLFSHFARAAAERMGRESPALSAARLSQLLSHDWPGNVRELANASERQALGLELTSPQPDTQLQGHSLAARQEAFEAQCLRASLARHKGDIKAVLNELQLPRRTLNEKMQRHALVREMFLS

SEQ ID NO: 32353 - protein, 181 aa, Pseudomonas syringae pv. phaseolicola 1448A
MVKLLILDRDGVINHDSDAYIKSVKEWVPIPGSIKAIADLSKAGWTVAVATNQSGIARGYYDLATLDAMHERLRKLVAEQGGEVGLIVYCPHGPDDACSCRKPKPGMLQAIVTHYAVDPKGLWFVGDSKGDLQAALAVDSQPVLVMTGKGRKTMEGGVPAGTLIFDDLAAVAAELIHNSAH

SEQ ID NO: 32354 - protein, 384 aa, Pseudomonas syringae pv. phaseolicola 1448A
MTTSALYLDYAATTPVDEQVIEAMVACMGREGHFGNPASSGHGYGQVARQAVEQARAQVADAVGAPVDTIVWTSGATESNNLAIKGIAYDASAQRRHIITSVLEHKAVLDTVSTLERQGFPVTWLKPDAQGLIQPQAVQAALREDTLLVSLMLVNNELGTLTDIASIGALVREHGALFHVDAAQGVGKVKVDLASLAVDLMSFSAHKAYGPKGIGALYVGPRAHSLLKAQIHGGGHEGGFRSGTLATHQIVGMGTAFALAISQAETENRRIEELSRHLREGLLSLPDVQLNGCPQQRIPHTLNLCITRSGFTSSQLSHSLALSSTSACNSASNAPSHVLLALGMDSAKALASVRVSLGRYTTQADVERAIEIFSKALSAPAAFW

SEQ ID NO: 32355 - protein, 342 aa, Pseudomonas syringae pv. phaseolicola 1448A
MKMLKSTLAVVTALAAFGVTGVANAGATLDAIQKKGFVQCGVSDGLPGFSVPDSTGKITGIDADVCRAVAAAVFGDATKVKFSQLNAKERFTALQSGEIDILSRNTTWTSSRDAGMGLVFTGVTYYDGIGFLVNNKLGVKSAKELDGATICIQAGTTTELNVSDYFRSNGLKYTPITFDTSDESAKSLEGGRCDVLTSDQSQLYAQRSKLAKPDDYIVLPEVISKEPLGPVVRKGDEDWFSIVRWTLFAMLNAEEAKITSKNVEAEAKSTKNPDVARMLGADGTYGKDLKLPKDWVVQIVKQVGNYGEVFERNLGDGTPLKIKRGQNALWNAGGIQYAPPIR

SEQ ID NO: 32356 - protein, 70 aa, Pseudomonas syringae pv. phaseolicola 1448A
MADRQSGTVKWFNDEKGFGFITPESGPDLFVHFRAIQGNGFKSLKEGQKVTFVAVQGQKGMQADEVQAEA

SEQ ID NO: 32357 - protein, 854 aa, Pseudomonas syringae pv. phaseolicola 1448A
MRIDRLTSKLQLALSDSQSLAVGLDHPAIEPAHLMQALLEQQGGSIKPLLLQVGFDINSLRKELSAELDRLPKIQNPTGDVNMSQDLARLLNQADRLAQQKGDQFISSELVLLAAMDENSKLGKLLLGQGVSKKALENAINNLRGEGAVNDPNVEESRQALDKYTVDLTKRAEEGKLDPVIGRDDEIRRTIQVLQRRTKNNPVLIGEPGVGKTAIAEGLAQRIINGEVPDGLRGKRLLSLDMGALIAGAKYRGEFEERLKSLLNELSKQEGQIILFIDELHTMVGAGKGEGSMDAGNMLKPALARGELHCVGATTLNEYRQYIEKDAALERRFQKVLVDEPSEEDTIAILRGLKERYEVHHKVAITDGAIIAAAKLSHRYITDRQLPDKAIDLIDEAASRIRMEIDSKPEVLDRLERRLIQLKVEAQALKKEKDEAAIKRLEKLQEEVVRLEKEYADLEEIWTSEKAEVTGSAQIQQKIEQSRQELEAARRRGDLNRMAELQYGIIPDLERSLQMVDQHGKPENQLLRSKVTEEEIAEVVSKWTGIPVSKMLEGEREKLLRMETLLHNRVIGQEEAVVAVSNAVRRSRAGLSDPNRPSGSFMFLGPTGVGKTELCKALAEFLFDTEEAMVRIDMSEFMEKHSVARLIGAPPGYVGYEEGGYLTEAVRRKPYSLILLDEVEKAHSDVFNILLQVLEDGRLTDSHGRTVDFRNTVIVMTSNLGSAQIQELVGDREAQRAAVMDAVGTHFRPEFVNRIDEVVIFEPLARDQIAGITDIQLGRLRKRLAERELALTLSPEALDKLIAVGYDPVYGARPLKRAIQRWIENPLAQMILSGSFMPGTTITGKVVDDEIVFA

SEQ ID NO: 32358 - protein, 382 aa, Pseudomonas syringae pv. phaseolicola 1448A
MIDSKLPNVGTTIFTVMSQLAAETGAINLSQGFPDFDGPQALRDAVCRHVTQGHNQYSPMTGLPALRQQVAAKIARSYGREVNPDSEITITPGATQAIFCAIHSVIRTGDEVIIFDPCYDSYEPAVELAGGRCVHVQLGLDDFSIDWQKLSDALSPRTRMIVINSPHNPSGALISRAELDRLAALIADRDIYLLSDEVYEHLVFDGARNVSVLDHEALYQRAFVVSSFGKTYHVTGWKTGYVVAPPALTSELRKVHQYVSFCGVTPLQYALADFMAEHPEHVDELPGFYQAKRDFFCGHLAESRFSFRPVGGTYFQLVDYSQIRPDLNDVDMALWMTREHGVASIPISVFYQSPPAGQRLIRLCFAKQEDTLRQAAEKLCAI

SEQ ID NO: 32359 - protein, 544 aa, Pseudomonas syringae pv. phaseolicola 1448A
MFGPDFPFAFDDWIEHPKGLGSIPAENHGAEVAIIGAGIAGLVAAYELMKMGLKPVVYEASKMGGRLRSQEFEGAKGIVAELGGMRFPVSSTAFFHYVDKLGLESRPFPNPLTAASGSTVIDLEGTTYYAQMLSDLPALFQEVADAWADALESGSQFGDIQQAIRDSDVPRLKELWNKLVPLWDDRTFYDFVATSKAFAKLSFYHREVFGQVGFGTGGWDSDFPNSMLEIFRVVMTNCDEHQHLIVGGVQQVPVGLWSHVPERCAHWPKGTSLSSLHRGAPRPGVKRIARAEDGSFTVTDNWGDTRQYAAVLTTCQSWLLTTQIECEESLFSQKMWMALDRTRYMQSSKTFVMVDRPFWKDKDPETGRDLMSMTLTDRLTRGTYLFDNGDDKPGVICLSYSWMSDALKMLPQPIEKRVKLALDALKKIYPKVDIAARIIGDPITVSWEADPHFLGAFKGALPGHYRYNQRMYAHFMQQDMPSEQRGMFIAGDDVSWTPAWVEGAVQTSLNAVWGIMNHFGGKTHAENPGPGDVFHEIGPIALGD

SEQ ID NO: 32360 - protein, 625 aa, Pseudomonas syringae pv. phaseolicola 1448A
MSFASLGLSEALVRAIEAAGYTQPTPVQQRAIPAVLQGRDLMVAAQTGTGKTGGFALPILERLFPNGVPDKSQRHGPRQPRVLVLTPTRELAAQVHESFKLYARDLKFVSACIFGGVGMNPQVQAMSRGVDVLVACPGRLLDLAGQGSVDLSHVEILVLDEADRMLDMGFVHDVKKVLARLPAKRQNLLFSATFSNDITSLAGKLLHNPERIEVTPPNTTVERIEQRVFRLAANHKRSLLAHLITVGAWEQVLVFTRTKHGANRLAEYLDKHGLAAVAIHGNKSQNARTKALADFKAGDVRIMVATDIAARGLDIDQLPHVVNFELPNVDEDYVHRIGRTGRAGRSGEAISLVAPDEEKLLKSIERMTKQKIADGDLMGFDITAVEAEKPEVRERPDVRNSRGARPAGDKNNGGRRDKGKDKGKEKPAAAAATGERPARQPREKKPREGTPRSEQRASQPSIPRPAADRAPDEFRDDEVDNFGNRADYVSPYQGKGQNRGRRPAAAPGAAPAAGGAARPANSGRPAGGARNGSGTGAPKRNGSGSSAPRSRDGQPRGRRPAREDQPLPREGQEPAVRAPRDGQPQPKIVHKESKIDRFPSAEQLDQLPTRPRGEKPALLTRNRDS

SEQ ID NO: 32361 - protein, 563 aa, Pseudomonas syringae pv. phaseolicola 1448A
MDIKRTILIVALAIVTYVGVLKWNQDYGQAAMPTQNVAASTTAPGIPDTAAGTNGSASADVPSASATANTAAAPLETPAVASKDLIHVKTDVLDLAIDPVGGDVVQLRLPLYPRRQDRPDVPFQLFDNGGERTFLAQSGLTGTNGPDARAAGRPVYTSTQKTYQLADGQDTMVVDLKFSENGVNYIKRFTFKRGLYDLVMTYVVDNQSAQPWAGNLFAQLKRDASSDPSSTTATGTATYLGAALWTAAEPYKKVSMKDIDKGQIKETVQGGWVAWLQHYFVTAWIPDHNATNAVQTRKDSQGNYIIGFTSPTLSVAPGAQGETSATLYAGPKSQAVLKELSPGLELTVDYGFLWFIAQPIFWLLQHIHAILGNWGWSIIVLTMLIKGLFFPLSAASYKSMARMRAVAPKLALLKEQHGDDRQKMSQAMMELYKKEKINPLGGCLPILVQMPVFLSLYWVLLESVEMRQAPWILWITDLSIKDPFFILPIIMGATMFIQQRLNPTPPDPMQAKVMKMMPIIFTFFFLWFPAGLVLYWVVNNTLSIAQQAYITRKIEAATKKAAA

SEQ ID NO: 32362 - protein, 310 aa, Pseudomonas syringae pv. phaseolicola 1448A
MTTVLVLVENLDMYLPILESSGYQLIRAPTAELRAQAIAAHGKSISAVMTRGPLGFFAEEMDALPNLRIICVSGAGYEKVDLPAAQARGITVTNGAGVNAATVADHTLALLLSLVRDIPQADASVRRSEWRKVVRPSLAGKRLGIVGLGAVGLAIARRAAAFDIAIGYHNRKPRTDCDYTWHATAQALAAASDFLIIATPGGSGTQHLIDAGVLEALGPDGFLVNIARASVVDTHALVSALQNEQIAGAALDVFDDEPAVPDVLKTLGNVVLTPHVAGLSPEASRDSVQMVNDNLLAFFSGQPVLTPVTG

SEQ ID NO: 32363 - protein, 438 aa, Pseudomonas syringae pv. phaseolicola 1448A
MATPPETPSLRRAITAPMLTLFILGDVLGAGVYALAGTIAGRVGGAIWAPLLIALCFALLTAASYAELVTKYPRAGGAAVYAEKAFGKPLLSFLVGFSMVAAGVTSAAGLAVAFAGDYFQALVSWPAQWVCVGFLVIVALLNARGIKESLSANLVMTLIELSGLAMVIAAAVWFVSQGNGVPQRVFELDTNSPATAILAASLLAFYSFVGFETSANLAEEIKDVRRIYPRALFGALLIAGVVYMLVGVGAAMVLPVEQLKASQAPLMDVVSASGLGIPAPWFAVIALIAVANGALLTMIMASRLTFGMAREGLLPAVMGSVLPQRRTPGVAIFATTVVAIALSFTSTLTTLAETVVLLLLFVFLSVNIAVLVLKRDKVEAGHFQVHWVIPVLAILSCLLLLTQQGPETWLRAGMMLAVGVALYGLTRLGSSVLVSHPR

SEQ ID NO: 32364 - protein, 402 aa, Pseudomonas syringae pv. phaseolicola 1448A
MSIERTPLRQDPVVIVSAARTPMGGFQGDLQSLSATELGSIAIRAAVERAGIESADVQHVLFGCVLPAGLGQAPARQAALGAGLGNATLCSTVNKMCGSGMQTAIMAHDLLMADSTAVVVAGGMESMSNAPYLLDRARNGYRMGHGKVLDHMFLDGLEDAYEPGRLMGTFAEDCAGSKGFSCEAQDGFALASLARAQEAIADGHFDAEIVPVQVTVGKESRQIIHDEQPPKARPDKIPTLKPAFREGGTVTAANSSSISDGAAALLLMRQSEAQRRGLRPLAVFYAHAAFADQPGLFPTAPIGAIQRLLSKTGWALDDVDLFEINEAFAVVPLVAMSELGLAHEKVNVNGGACALGHPIGASGARIIVTLLAALQRRQLKRGVAAICIGGGEATAVAIEIID

SEQ ID NO: 32365 - protein, 391 aa, Pseudomonas syringae pv. phaseolicola 1448A
MSLNPRDVVIVDFGRTPMGRSKGGMHRNTRAEDMSAHLISKLLERNNKVDPAEVEDVIWGCVNQTLEQGWNIARMASLLTQIPHTSAAQTVSRLCGSSMSALHTAAQAIMTNNGDVFVIGGVEHMGHVSMMHGVDPNPHMSLHAAKASGMMGLTAEMLGKMHGITREQQDAFGLRSHQLAHKATLEGKFKDEIIPMQGYDENGFLKVFDYDETIRPDTTLESLAALKPAFNPKGGTVTAGTSSQITDGASCMIVMSAQRAQDLGIQPLAVIRSMAVAGVDPAIMGYGPVPATQKALKRAGLTIADIDFIELNEAFAAQALPVLKDLKVLDKMNEKVNLHGGAIALGHPFGCSGARISGTLLNVMKQNGGTFGVSTMCIGLGQGIATVFERV

SEQ ID NO: 32366 - protein, 624 aa, Pseudomonas syringae pv. phaseolicola 1448A
MLPQQAAAKTAVIQFGLFLIRRILMTTSESSSTSSVKIYFRLLSYVRPHVGIFLLSIIGFVIFASTQPMLAGILKYFVDGLTNPEAVLFPNVPYLRELQLLQAVPLLIVLIAAWQGLGSFLGNYFLAKVSLGLVHDLRVELFNKLLVLPNRYFDTTNSGHLISRITFNVTMVTGAATDAIKVVIREGLTVVFLFIYLLMMNWKLTLVMLAILPLIAVMVGSASKKFRKQSKKIQVAMGDVTHVASETIQGYRVVRSFGGESYEQNRFAQASDSNTRKQLRMTKTGAIYTPMLQLVIYSAMAVLMFLVLFLRGDATAGDLVAYITAAGLLPKPIRQLSEVSSTIQKGVAGAESIFEQLDVEEEVDTGTIERDRVTGHLEVKNLSFFYPQTERQVLNDISFSAAPGQMIALVGRSGSGKSTLANLIPRFYGHEMGNILLDGVEINDYRLRNLRKHIAQVNQNVTLFNDTIANNIAYGDLAGAPRADIEAAAADAYAKEFIDQLPQGFDTQVGENGVLLSGGQRQRLAIARALLKNAPLLILDEATSALDTESERHIQAALDHVMKGRTTLVIAHRLSTIEKADMILVMDAGQIVERGTHTELLAQNGYYARLHAMGLDEPSPVGAV

SEQ ID NO: 32367 - protein, 395 aa, Pseudomonas syringae pv. phaseolicola 1448A
MLSTAHRDIIKATVPILETGGEALTTHFYRIMLNDYPQVRPLFNQANQANGAQPRALANAVLMYARNVDRLENLGSLAAQIVNKHVALQILPEHYPIVGACLLRAIREVLGAEIATDAVIDAWAAAYQQLADMLISAERDVYESIAAAPGGWRGGRLFKVVRKVPESSEIMSFYLQPVDGKPVIAHKPGQYIGIRLNTEGGEIRRNYSLSAPANGVSYRISVKREQGGVASGYLHDQVAVDDTLELFPPSGEFVLIEGSKPLVLISGGVGITPTLAMAEAALQAGGRHVVFIHYARNASVQAFQAVIDDWRERYAQFAAHVVYSEAKAGDVPANTVTGLASTEHLQQWLPEDTDVEAYFLGPKPFMVFMKRALHELGVPDRQSHYEFFGPAEALA

SEQ ID NO: 32368 - protein, 405 aa, Pseudomonas syringae pv. phaseolicola 1448A
MADVNKVVLAYSGGLDTSVILKWLQDTYNCEVVTFTADLGQGEEVEPARAKAQAMGVKEIYIDDLREEFVRDFVFPMFRANTVYEGEYLLGTSIARPLIAKRLIEIANETGADAISHGATGKGNDQVRFELGAYALKPGVKVIAPWREWDLLSREKLMDYAEKHNIPIERHGKKKSPYSMDANLLHISYEGGVLEDTWTEHEEDMWRWTKSPEDAPNVATYLELTYRNGDIVALDGVEMTPATVLATLNRIGGENGIGRLDIVENRYVGMKSRGCYETPGGTIMLRAHRAIESITLDREVAHLKDELMAKYASLIYTGYWWSPERLMLQQMIDASQAHVNGVVRLKLYKGNVIVTGRKSDDSLFDANIATFEDDAGAYDQADAAGFIKLNALRMRIAANKGRKLF

SEQ ID NO: 32369 - protein, 552 aa, Pseudomonas syringae pv. phaseolicola 1448A
MYVYDDYDQKIIEDRVKQFRDQTRRYLAGELSEEEFRPLRLQNGLYVQRFAPMLRVAVPYGQLTSRQARMMAKIARDYDKGYAHISTRQNVQFNWPALEDVPDILAELATVQMHAIQTSGNCLRNVTTDQFAGVAADELVDPRPWCEIVRQWTTFHPEFAYLPRKFKIAINGSTSDRAAIEVHDIGLEPLCNEAGELGFRVLVGGGLGRTPVVGAFINEFLPWQDLLSYLDAILRVYNRYGRRDNKYKARIKILVKALTPEVFAAKVDAEMAHLRGGQTTLTEAEVQRVSRHFVDPQYKALSDQHAELAALDAQHPGFARWRQRNVLAHKKPGYIAVTLSLKPTGVAPGDVTDKQLDAIADLADRYSFGQLRTSHEQNIILADVEQAELFTLWNELRDNGFATPNIGLLTDIICCPGGDFCSLANAKSIPIAESIQRRFDDLDYLFDIGELDLNISGCMNACGHHHVGHIGVLGVDKKGEEFYQVSLGGSASRDASLGKILGPSFAQEAMPDVIEKLIDVYVEKRTEDERFIDTYQRIGIDPFKERVYAANH

SEQ ID NO: 32370 - protein, 696 aa, Pseudomonas syringae pv. phaseolicola 1448A
MQTFFIAPTDFGVGLTSISLGLVRTLERAGLKVGFFKPIAQPHPGDLGPERSTELMARTHGLKPPKPLGLAHVERMLGDGQLDELLEEIINLYQQAAVGKDVLVVEGMVPTRSASYAARVNLHLAKSLDADVILVSAPENEVLAELSGRVELQAQLFGGPKDPKVLGVILNKVRTEESMEVFSSRLKEHSPLLRSGDFRLLGCIPYRAELNAPRTRDVAELLGAQVLNAGDYDQRRMSRIIICARTVLNTVPLLKPGVLVVTPGDRDDIILAVSLAAINGVPLAGLLLTSDTVPDPRIMELCRGAFQAGLPVLSVSSGSYDTANRLNQLNKEIPIDDRERAENITDFVAGHLDAGWLHQRCGTPRELRLSPAVFRYQLIQRAQAANKRIVLPEGNEPLTIQAAAICQARGIARCVLLARPEEVQAVAQAHGIELPPGLEILDPELIRERYVAPMVELRKNKSLNAPMAEQQLEDPVVIGTVMLALDEVDGLVSGVIHSTANTIRPALQLIKTAPGCTLVSSVFFMLFPEQVLMYGDCIMNPHPSASELSEIALQSADSATAFGISPRVAMISYSSGNSASGEEVEKVREATQLARETRRDLLIDGPLQYDAAANEHVARQLAPDSPVAGRANVFVFPDLNTGNTTYKAVQRSADCVSLGPMLQGLRKPVNDLPRGAQVDDIVYTIALTAIQADTLS

SEQ ID NO: 32371 - protein, 410 aa, Pseudomonas syringae pv. phaseolicola 1448A
MALIVQKFGGTSVGSVERIEQVADKVKKFREAGDDLVVVLSAMSGETNRLIELARQISDQPVPRELDVIVSTGEQVTIALLAMALMKRGVPAVSYTGNQVRILTDSAHNKARILQIDDQKIRSDLKAGRVVVVAGFQGVDEHGNITTLGRGGSDTTGVALAAALKADECQIYTDVDGVYTTDPRVVSQAQRLDKITFEEMLEMASLGSKVLQIRAVEFAGKYNVPLRVLHSFKEGPGTLITIDEEESMEQPIISGIAFNRDEAKLTIRGVPDTPGVAFKILGPISAANIEVDMIVQNVSHDNTTDFTFTIHRNDYQAALQVLESTAREISAREVFGDTKIAKVSIVGVGMRSHAGVASRMFEALAKESINIQMISTSEIKVSVVIEEKYLELAVRALHTAFELDAPRQGE

SEQ ID NO: 32372 - protein, 446 aa, Pseudomonas syringae pv. phaseolicola 1448A
MNEPQSARTSSATLRPSACPGLLRIVPALDGGICRIKLAGGVISSVQAMAVAEAAQTYAQGVIEATNRANLQIRGIGADHDGLIKALMAAGLGPANPASDDVRNLMLSPTAGLDSRMLFDARPLAAQVLDALENHPRFHELSPKFALSLDAGEALVMLEHAHDVWLSALNLDGEVLLAFGLAGCPANDRPLAAVPLAAGEALVVGLLELFLDLARPEHTRMRHLLAEVSTDDVLRELSTRLDCALRVDQAVTSWQRPAIQGNRHIGIYPQAEPARVAVGAVVPLGRLDAATLAIVAQLAEEQGDGTLRLTPWQSLLLPNVPVERAATVMTALQAAGLICSAEQPLAQMVACTGSAGCVKGLADTKADALQLATGLVASQAVHLSGCTRSCAAAHVAPVTLLAVSPGRYDLYFRDAAHAGFGVLRARDLTIEAVGAQLNADSRSNIA

SEQ ID NO: 32373 - protein, 454 aa, Pseudomonas syringae pv. phaseolicola 1448A
MSTQLKPTLGTIHLWGIAVGLVISGEYFGWSYGWGVAGTLGFLVTALMVATMYTCFIFSFTELTTAIPHAGGPFAYSRRAFGEKGGLIAGMATLIEFVFAPPAIAMAIGAYLNVQYPGLDPKHAAVGAYIVFMALNIVGVKLAATFELVVCILAVAELLVFMGVVAPAFSFSNFALNGWAGSQTFGPEAIAGMFAAIPFAIWFFLAIEGAAMAAEEAKDPKRTIPKAYISGILTLVILAIGVMLFAGGVGDWRTLANINDPLPQAMKAVVGDSSGWLHMLVWIGLFGLVASFHGIIMGYSRQFFALARAGYLPASLAKLSRFQTPHRAIIAGGLIGIAAIYSDGLVNLSGMTLTAAMITMAVFGAIVMYIMSMLSLFKLRKTEPDLERSFRAPGYPVVPGIALALAIVCLVAMAWFNMLIGLIFLGLMAIGFIYFSLTAKSRADAPTDAMLTGQ

SEQ ID NO: 32374 - protein, 590 aa, Pseudomonas syringae pv. phaseolicola 1448A
MCGLAGELRFDHQPADLAAVERITHQLAPRGPDAWGFHSQGPVALGHRRLKIMDLSDGSAQPMIDSHLGLSMAFNGAIYNFPELRAELESLGYQFHSGGDTEVLLKGYHAWGADMLPKLNGMFAFAIWERDSKQLFIARDRLGVKPLYLSKTDKRLRFASSLPALLKGGDISGMLDPVALNHYLNFHAVVPAPRTLLAGVEKLPPASWMRIDASGKVEQKVWWTLPYGPHEDEKNLTLEDWRDRVLDSTREAVAIRQRAAVDVGVLLSGGVDSSMLVGLLREVGVEDLSTFSIGFQDAGGERGDEFQYSDLIAKHYGTRHHQLRIQESEIIEQLPAAFRAMSEPMVSHDCIAFYLLSREVSKHCKVVQSGQGADELFAGYHWYPQVDGASDPVAAYRDAFVDRSYAEYAETVQPKWRTANDAAGDFVRDHFAQPGASAAVDKALRLDSTVMLVDDPVKRVDNMTMAWGLEARTPFLDYRLVELSARIPGKFKLPDDGKQVLKEAARLVIPSEVIDRKKGYFPVPGLKHLQGDTLNWVRELLTDSSQDRGLFNPAMVDKLLTNPEGQLTPLRGSKLWQLAALNLWLSEQGL

SEQ ID NO: 32375 - protein, 638 aa, Pseudomonas syringae pv. phaseolicola 1448A
MDRIIGIDLGTTNSCVSILENGNVKVIENAEGTRTTPSIIAYANDGEILVGQSAKRQAVTNPHNTLYAVKRLIGRKFEEDVVQKDIQMVPYKIVKADNGDAWVEVNGQKMAPPQISAEILKKMKKTAEDYLGEAVTEAVITVPAYFNDSQRQATKDAGRIAGLDVKRIINEPTAAALAYGMDKAKGDHTVIVYDLGGGTFDVSVIEIAEVDGEHQFEVLATNGDTFLGGEDFDIRLIDYFVDEFKKESGMNLKGDPLAMQRLKEAAEKAKIELSSSTQTEVNLPYITADATGPKHLVVKISRSKLESLVEDLVQRTIAPCEMALKDAGIDRSKINDVILVGGQTRMPLVQKLVTEFFGKEARKDVNPDEAVAMGAAIQGAVLAGDVKDVLLLDVSPLTLGIETMGGVMTALIEKNTTIPTKKSQVFSTADDNQNAVTIHVLQGERKQAGQNKSLGKFDLAEIPPAPRGVPQIEVTFDIDANGILHVGAKDKATGKQQSIVIKANSGLSEEEIQQMVRDAEVNSEEDRKFEELASARNQGDALVHSTRKMIADAGDKVTAEEKTAVEAALVALEAAIKGDDKAAIEAKVEELSKVSAPIAQKMYAEQAENPEAAAKPAEENGKADDVVDAEFEEVKDHK

SEQ ID NO: 32376 - protein, 324 aa, Pseudomonas syringae pv. phaseolicola 1448A
MNQSSDLIQSAQRTIRLEIEAIQGLLERLDGDFVRACEMILASKGRVVVVGMGKSGHIGNKIAATLASTGTTSFFVHPAEASHGDMGMITRDDIILALSNSGSTHEIVTLLPLIKRLGIKMISLTGDPESILAKAADINLNAHVVHEACPLNLAPTSSTTAALVMGDALAVALLDARGFTAEDFAFSHPGGALGRRLLLKVENVMHSGDALPSVQRGTLLRDALLEMTRKGLGMTAIVEADGTLAGIFTDGDLRRTLDRPVDIRQTIIDEVMTLHGKTAHAEMLAAEALKIMEDNKISALVVVDQYDRPVGAFNLQDLLRAGVM

SEQ ID NO: 32377 - protein, 373 aa, Pseudomonas syringae pv. phaseolicola 1448A
MHIGVPLETQAGETRVAATPETIKKLISQGHRITVQSGAGIHASVPDSAYEAAGAVIGSANEAFAGELILKVVAPDDNELSLIKSGSVVIDMLNPFNNELIGKMAAQGITAFALEAAPRTSRAQSLDVLSSQANIAGYKAVLLAAHHYPRFMPMLMTAAGTVKAARVLILGAGVAGLQAIATAKRLGAVVEASDVRPAVKEQIESLGAKFIDVPYETDEERECAEGVGGYARPMPASWMQRQAAAVHERARLADIIITTALIPGRKAPVLLSAETVAQMKPGSVVIDLAAAQGGNCPLTVADQVVVEHGVTIVGHTNLPALVAADASALYARNLLDFMKLLFDKDGTFSINLEDDIVAACLMCRDGQVVRKNG

SEQ ID NO: 32378 - protein, 366 aa, Pseudomonas syringae pv. phaseolicola 1448A
MSQSFLSPVTTQTWANGRHLVRVVKVIQETWDVRTFCFMADQPIMFFFKPGQFVTLELEIDGLPIMRSYTISSSPSVPYSFSITVKRVPGGKVSNYLHDTLSEGQELAVHGPVGLFNAIDFPNPKILYLSGGVGITPVMSMARWFYDTNANVDMVFVHSARSPKDIIYHRELEHMASRIDNFSLHLVCEKHGLGEPWAGYRGYLNQKMLELMAPDFMDREVFCCGPTPYMAAVKRLLLENGFNMAQYHEESFGATPPEARADAVEQAEIAADTPDVDAADLHQVEFTDTGKSIRVAPGETVHAAAAKLGLMIPKACGMGICGTCKVMKLSGEVEMEHNGGITDEDVAEGYILSCCSVPKGDVRIEY

SEQ ID NO: 32379 - protein, 198 aa, Pseudomonas syringae pv. phaseolicola 1448A
MLDELLRRVVSHTPETLDSDRRFPEAAVLVPVTRSEQPELILTLRASGLSTHGGEVAFPGGRRDPGDPDLIFTALREAEEEIGLPPGLVEVVGPLSPLISKHGIKVTPYVGVIPDFVEYQPNDGEIAAVFSVPLEFFRQDTREHTHRIDYEGRSWYVPSYRYGGYKIWGLTAIMIVELVNVLYDTKISLHHPPERSTT

SEQ ID NO: 32380 - protein, 108 aa, Pseudomonas syringae pv. phaseolicola 1448A
MDIIETIKEQIANNTILLYMKGAPNAPQCGFSAKASQALMACGEKFAYVDILQNPEIRANLPKYANWPTFPQLWVAGELVGGSDIITEMMADGSLQTLVKEASAAKAE

SEQ ID NO: 32381 - protein, 390 aa, Pseudomonas syringae pv. phaseolicola 1448A
MPQPYSARSRAIEPFHVMALLARANELQAAGHDVIHLEIGEPDFTTAQPIIKAGQAALADGKTRYTAARGLPQLREAISGFYARRYGVDIDPQRILVTPGGSGALLLASSLLVDPGKHWLLADPGYPCNRHFLRLIEGEAQLVPVGPQERYQLNPELVAAHWNQNSVGALVASPANPTGTLLNRDELAALSQALKARNGHLVVDEIYHGLTYGVEASSVLEVDNEAFVLNSFSKYFGMTGWRLGWLVAPQDAVADLEKLAQNLYISAPSMAQHAALACFEPQTLEIFEQRRAEFGRRRDFLLPALRELGFGIAVEPEGAFYLYADISAFGGDAFAFCRHFLETEHVAFTPGLDFGRHQAGHHVRFAYTQSLPRLQQAVERIARGLRSWGA

SEQ ID NO: 32382 - protein, 271 aa, Pseudomonas syringae pv. phaseolicola 1448A
MSLNTPQQIAEIAVESGVKKAHLGLSSLMILGFLAGAFIALGFLLDIHVSTMIPHEWASLGNLLGAVVFPVGLILVVLAGGELLTGNMMSLPMALFAGRIGLGQLVRNWVLVTLANLIGALFVAYCFGHVVGLTEGPFMAKTVAIANAKMGASFEQAFISGIGCNWLVCLAVWLSYASKDVIGKVVGMWFPVMAFVAIGFQHIVANMFVIPAAIFAGALSWAQFGDNFVPVFLGNAVGGAVFVGLAYHLAFFNAAARPAELSRASGAQAPE

SEQ ID NO: 32383 - protein, 817 aa, Emiliania huxleyi
MFERFTEKAIKVIMLAQEEARRLGHNFVGTEQILLGLIGEGTGIGPKILKSMGVNLKDARVEVEKIIGRGSGFVAVEIPFTPRAKRILELSLEEARQLGHNYIGTEHLLLGLIREGEGVAARVLENLEVDLSKVRSQIIRSLGESTDVAAGNSSTTRSKTPTLEEFGTNLTQKATEGRLDPVVGRSKEIERVIQILGRRTKNNPVLIGEPGVGKTAVAEGLAQRIANRDVPDTLEDKRVVALDIGLLIAGTKYRGEFEERLKKIMDEVRTANNIILVIDEVHTLIGAGAAEGAIDAANILKPALSRGELQCIGATTIEEYRKHIEKDAALERRFQPVMVGEPTVEETIEILYGLRDRYERHHKLVISDEALAAAAKFADQYIADRFLPDKAIDLIDEAGSRVRLLNSQLPPAAKLLDQELRDVLKSKDEAVRNQDFEKAGQLREREMEVRAQINAVIQVSKDPSSSVPTPTVTEEDIAQIVAAWTSIPVNKLTKSESEKLLQMEETLHSRIIGQDEAVVAVSRAIRRARVGLKNPNRPIASFLFSGPTGVGKTELTKALATYFFGSEEAMIRLDMSEFMERHTVSKLIGSPPGYVGYNEGGQLTEAVRRRPYTVVLFDEVEKAHPDVFNLMLQIFEDGRLTDSKGRVIDFKNTLLIMTSNIGSKVIEKGGGGLGFELGEDQDNSAYNRIKSLVNEELKQYFRPEFLNRLDEIIVFRQLTKSEVGEIAEIMLKEVFDRISQKGIELAVTDRFKARLIDEGYNPAYGARPLRRAVMRLLEDSLSEEVLSERLQSGDAAVVDVDENGKVQVLTADKFETL

SEQ ID NO: 32384 - protein, 623 aa, Emiliania huxleyi
MGKVVGIDLGTTNSVVAVMEGGKPTVITNSEGQRTTPSVVAYTKKGDLLVGQIAKRQAVINPENTFYSVKRFIGRKTSEVTEALRQVPYKVLQTEDIIKLDCPALGKQFASEEISAQVLRKLADDATKYLGETVTQAVITVPAYFNDSQRQATKDAGKIAGLEVLRIINEPTAASLSYGLDKKDNETILVFDLGGGTFDVSILEVGDGVFEVLATSGDTRLGGDDFDEKIVQWLVNEFKNDEGIDLTQDNQALQRLTEAAEKAKVELSTLTQSSINLPFISVTPEGPKHLEKDLTRAKFEELCSDLIDRCKTPIQNALKDAELSPSSIDQNVLVGGSTRIPAVQELVEQLLGKKPNQSVNPDEVVAVGAAVQAGVLGGEVKDILLLDVTPLSLGVETLGGITTKITPRNTIIPTKKSETFSTAVDNQPNVEIHVLQGERELAKDNKSLGTFRLDGIAPAARGVPQIEVTFDIDANGILSVTAKDKATNKQQSITISGASNLAKDEVERMVEEAEQNAASDKEKSEQIDVKNKADSLCYQTKKQLEELSSKLEAADKEKVEEVLTKLELAVQNDDLEGMKTLSEELQKNMMEVGQKVYTPDAGAEGGAAPSQDDAIETDFSTEK

SEQ ID NO: 32385 - protein, 477 aa, Vitis labrusca
MSHKGLDYETLNENVKKVQYAVRGELYLRASELQKEGKKIIFTNVGNPHALGQKPLTFPRQVVALCQAPFLLDDPNVGLVFPADAIARAKHYLSLTTGGLGAYSDSRGLPGIRKEVAEFIGRRDGYPSDPELIFLTDGASKGVMQILNTIIRGERDGILVPVPQYPLYSAAISLYGGSLVPYYLEETANWGLDVNNLHSSVAAARSKGITVRAMVIINPGNPTGQCLSEANLKEILHFCNQENLVLLGDEVYQQNIYQDERPFISARKALMDMGPPISKELQLVSFHTVSKGYWGECGQRGGYFEMTNIPPQTVDEIYKVASISLSPNVPGQIFLGVMVNPPTPGDISYLQFMRESKGILESLRRRAQIMTDGFNSCRNVVCNFTEGAMYSFPQIRLPPKAIEAAKKAGKVADVFYCLKLLEATGISTVPGSGFGQKEGVFHLRTTILPAEEDMPAIMESFKKFNDEFMEQYEDHRG

SEQ ID NO: 32386 - protein, 419 aa, Methylocystis sp. M
MKKLVKLAAFGAAAAVAATLGAIAPASAHGEKSQQAFLRMRTLNWYDVQWSKTTVNVNEEMILSGKVHVFSAWPQAVANPRVSFLNAGEPGPVLVRTAQFIGEQFAPRSVSLEIGKDYAFSINLRGRRAGRWHVHAQINVEGGGPIIGPGQWIEIKGDMKDFTDPVTLLDGSTVDLENYGISRIYAWHLPWLAVGAAWILFWFIRKGIIASYVRVAEGRPDDVIGDDDRRIGAIVLALTILATIVGYAVTNSTFPRTIPLQAGLQKPLTPIETEGTVGVGKEQVTTELNGGVYKVPGRELTINVKVKNGTSQPVRLGEYTAAGLRFLNPTVFTQKPDFPDYLLADRGLSNDDVIAPGESKEIVVKIQDARWDIERLSDLAYDTDSQVGGLLFFFTPDGKRFAAEIGGPVIPKFVAGDMP

SEQ ID NO: 32387 - protein, 343 aa, Chlamydophila pneumoniae AR39
MKKDKNVIMFVDQITLELRAGKGGNGVVAWRKEKYLPKGGPYGGNGGNGGSVIIEATTSVYSFEAYRNIRFLKAPDGQSGATNNRTGRSGKDLIVSVPTGTLLRDAETGEILHDFTVDGERLLVSQGGKGGKGNTFFKTSVNRAPTKATPGKPGEIRQVELELKLIADIGLVGFPNAGKSTLFNTLAHTEVKVGAYPFTTLAPSLGLVLCKDRLYQKPWIIADIPGIIEGAHQNKGLGLDFLRHIERTLLLLFVIDVSKRERNSPEEDLETLIHELHSHQPDFEKKDMLVALNKIDDLLPDEQEECLQSFQKRFPSYTFVLISGLTGEGVDGLYRFFTQRLAV

SEQ ID NO: 32388 - protein, 345 aa, Xylella fastidiosa Ann-1
MEVHFTPVLNTCMAVSLLQHNHLSDTALIASARRVIEIEREALTLLNERIGAPFVAACRLILNSHGRVISTGMGKSGHIARKIAATLASTGTPGFFVHPGEAGHGDLGMITDSDVILALSYSGESDEVRMLLPVLKRQGNPIIAMTGRPQSTLAQAADVHLDVSVTTEACPLDLAPTSSTTTSLVIGDALAVALLDARGFTAEDFARSHPAGHLGRRLLLHITDVMHSGDDLPAVHEEATLSEALLEMTRKRLGMTAIVDNEGRLQGVFTDGDLRRALDSNIDVRNARINEVMTRHPKTINADQLAAEAARLMEANKINGLIVVDPQQRAVGALNIHDLLHAKIV

SEQ ID NO: 32389 - protein, 280 aa, Xylella fastidiosa Ann-1
MTMLKIDTLHASVAGKEILKGLSLDIAPGQVHAIMGPNGAGKSTLGHILAGRDGYDVTAGQVTFDNRPLLTLQPEERAAAGLFLAFQYPVEIPGVNNTYFLRSALNAQRKARGEEELDSIQFLKRVREKLAVLHLKDELLHRGVNEGFSGGEKKRNEIFQLAVLEPKLAILDETDSGLDIDALKTVADGVNALRSPERSFLVITHYQRLLDYIKPDVVHVLAEGRIVETGGPELALELEQHGYTWLKNRVIPTSETMPPSPHDPHTDTPRLKAPTLRENV

SEQ ID NO: 32390 - protein, 868 aa, Xylella fastidiosa Ann-1
MSASPTAERWIVLKFGGTSVSRRHRWDTIAMVVRKRLEEHGTRVLIVVSALSGVTNELTAIAQGVVDSAKRVTALEQRHRDFLVELGLDVQAVLGTRFAMLSDLLQDARAVTRSLDWQAELLGQGELLSSTLGAAYLGASGIDIGWMDARDWLTALPPQPNQSEWSQRLSVSCQWKSDVEWRTRFDAQRAQVLITQGFISRHQDGGTAILGRGGSDTSAAYFGALLGAACVEIWTDVPGMFSANPKEVPDARLLTRLDYYEAQEIATTGAKVLHPRSIKPCRDTGVPMLILDTERPDVLGTRIDAEVEPVLGVKAISRRDGIVLVSMEGIGMWQQVGFLADVFTLFKKHGLSVDLIGSAETNVTVSLDPSENLVNTDVLTALSTDLSQICKVKIIVPCAAITLVGRGMRSLLHKLSEVWATFGKERVHMISQSSNDLNLTFVIDETDADGLLAVLHFKLIESGAMPVQDRAVFGSPWREIIGHVRTRVMPWWHSARMRLLAMRDEEGIGPCYVYHLPTVRERARQLNAVAAVDQCYYAIKANPHPAILRTLIEEGFGLECVSLGELRHAFEVVPHLVPSRVLFTPSFASRVEYEQAFLLGVNVTLDNVEALRLWPEVFRERTLWLRIDLGYGDGHHEKVTTGGKTSKFGLSVKRIDEFIDVAKTLNITVTGLHAHLGSGVERGNHWSRMYDELAGFASRIGSVSTLDIGGGLPIPYRPDDEPFDVGAWGASLAEVKALHPKFQLVIEPGRFLVAEAGVLLTRVTQVIEKDDILRVGLEAGMHTLIRPALYDAWHGVENLSRLDETPHVLCDVVGPICESSDVFGRRRHLPAATASGDLMLIADAGAYGFSMASTYNLRGLPAEVVLDA

SEQ ID NO: 32391 - protein, 586 aa, Xylella fastidiosa Ann-1
MPAPHIPNRLQRLNHLRILWPFMRRHLALFSGWLIALAVSSAATLTLPSAFKQMIDHGFSSEGQINRSFALLLLVAVILAVGTAARLFSVSLLGEKIITDLRSQLYAHLIGLDASFHDRNRSNELVSRLATDSELLRSIIGSTMSVATRSTVTAIGSLIMLFITSPRLASLSLVVIPLVILPIVLGAQHLQKAARTSQDRIADTNSFAAETLRALRTVQAYAREHYERTRFDRTLETSLQAARQRIHIQTWVTAASIVLIFSAIVGVLWAGAHDVIAGRMSAGTLGEFVLYALIGGGSIGALAEVWNELQRAAGGMGRIFELLKEKNTLSVPATPTLPPHPLRGEIRFERVGFHYPQRPETPALDGIDLHIRPGETIAFVGPSGAGKSTLLSLLLRFYDPTHGRILIDGVDLRQTDPKVLRTHIALVQQQPTLFTASAMENIRYGRLDATTAEIEIAARSSEADGFIRALPQGYATELGEHGLSLSGGQQQRIAIARALLKEAPILLLDEATNALDAQNEQAVQQALERLMTGRTTLIIAHRLVTILKADRIVVMDQGRIVAQGTHSELIAAGGLYAKLARLQFIE

SEQ ID NO: 32392 - protein, 638 aa, Xylella fastidiosa Ann-1
MGKIIGIDLGTTNSCLAIIEGGKGRVIENSEGDRTTPSIVAYTKDGEILVGAAAKRQAVTNPKNTFYAVKRLIGRKFGDAEVQKDLDLVPYKITQHDNGDAWVATADGKKLAPQEISAKVLEKMKKTAEDFLGEKVTEAVITVPAYFNDSQRQATKDAGRIAGLDVKRIINEPTAAALAYGLDKKGGDRKIAVYDLGGGTFDVSIIEIAEVDGEKQFEVLATNGDTFLGGEDFDKRVIDYLVDEFNKDQGIDLRKDPLALQRLKDAAERAKIELSSSQQTEVNLPYITADASGPKHLNIKLTRAKLEALVDDLVRKSIEPCRIALNDAGLRTSDVQEVILVGGQTRMPKVQQAVADFFGKEPRKDVNPDEAVALGAAIQGGVLAGDVKDVLLLDVTPLSLGIETMGGVFTKIIEKNTTIPTKASQVFSTAEDGQSAVTVHVLQGEREQARFNKSLAKFDLAGIEPAPRGQPQIEVSFDIDANGILHVSAKDKKTNKEQKVEVKAGSGLSDSEIQQMVADAEAHREEDKKFQELVQARNHADGLIHSTRSAIKEHGSKVGGELIGRVEASLAELEAAVKGDDKNQIEAKSKTLEEVAQSLHMAATAEQQSGSTGAGAGASAKVDDVVDAEFTEVKADKK

SEQ ID NO: 32393 - protein, 308 aa, Xylella fastidiosa Ann-1
MSLDSALRSRIETLLHSNRVVLFMKGRPGMPQCGFSAKAAGILQALGVEYAHVNVLDDQEIREGIKRYGDWPTIPQLYIDGELIGGSDIVSQMYENGELSTLLGVAAPDLTPPSITITPTAVEMLKGTLANAPGSTLALSIDSRFQPTFELAPINTQAIAAESNGLRVQFDLASARRAEGITIDWVDDIRGQGLVIDNPNAPQPIQELSPGDAAAQVDAGVLTLVDVRPADERAVASVAVPFRTMDGGERAVLEQLPKGTPLAFLCHHGGRSLQAAEHFRSLGFTSIYNIGGGIDAWSTQVDPGVPKY

SEQ ID NO: 32394 - protein, 424 aa, Xylella fastidiosa Ann-1
MSNSPQTPLVTRQRLSEVRYEIRGELARRARELEAEGRKLIKLNIGNPGAFGFRAPEHLQRAIADDMGRTDPYTHQQGLPIAREAIAAAYARRHYPDVDADRVFVGNGVSELIDLSLRALLNPGDEVLVPSPDYPLWSAATILNDGRPVYYRCAPENGFQPDAVEIETLVSSRTRAIVLINPNNPSGANYSQELLERIVAIAVKHHLLLLVDEIYDQILYDGAVFVPVAPLAGTHPCITFSGLSKVHRACGWRVGWALLSGSSIQVDNLRNAMDLLGALRLCANVPGQYAIDAAVNGPDTITPLCSPGGPLYETRRAVIDACAASEHLSLVVPAGALYAFPSVVGPAARHFDDYAFALELMNEEGVLVVPGSSFNVPYRDHFRVTLLPDAGLIREVFSRIDRALSRRAEVADKVVPLKSRSAAA

SEQ ID NO: 32395 - protein, 478 aa, Xylella fastidiosa Ann-1
MFKQLWATKLSQPSQDSAEGLSLQRVLGVWGLTALGIGAVIGGGIFVITGQAAANHAGPAIMLSFALAAICCTFCALAYAEFAAMVPVSGSAYTYTYATFGELAAWFIGWMLVLEYGVSAAAVAVSWSGYFLSLLQHLGIHLPAALVNAPLDGTLHATGAIANLPAATIVLLLTWLCYFGIRKSSKINIAMVALKSGLILLIIGVGWKYVNPDYWQPFIPTNQGPGKYGWNGVLHGASMVFFAYIGFEAVSVAAQESHRPQRDLPISMMSALAICTVLYIMMAAVMTGLVPYTQLGTDEPVVTAVAAHPQLGWLRVVVEIGALVGLSSVVLVMLIGQPRIFMIMAGDGLLPPIFSTIHSKHRTPHINTVITGLGIALLAALLAAVFPLDVLGELTSMGTLIAFTAVCAGVLILRCTRPDLPRPFRMPAAWLFCSAGVLSCITLLSAMTRHNWMLMSVWTVLGFSLYFSYGYHHSKLHQ

SEQ ID NO: 32396 - protein, 496 aa, Xylella fastidiosa Ann-1
MTHATIYQGEERRMLKKHLFIVKPIEPTNHTGTGKGGTQLKRSLTAGQLVMLGIGAVIGAGIFVLSGHAAAEYAGPAVVLSYILAGIACALAGLCYAEFAAMLPVSGSAYSYAYATLGEFTAWFIGWNLILEYMFSASTVAVGWSGYLNSFLSSFGYGLPASLSSAPLDVVDGRLIYSGGLINLPAVAIVAAISGLCYVGITQSAFVNSITVAIKVSVIVLFIAFAARYVNPDNWVPFVPDNVAPGKYGIEGVIRGAAVVFFSYIGFDAVSTTAGEAKNPQRDMPIGILGSLAICTVIYIAFSGVLTGLMHYSQLDTPKPVATALETYPTLSWLKHVVEIGAIAGLSSTMLMMLMAQPRIFYAMSQDGLLPKLLSKVHPKFQTPHVGTLIVGACACALAGLFPISLLGDLVSMGTLLAFATVCIGIVVLRRTRPDLPRPFRVPMYWVIAPTGAAACLYLFWQPFTEHWPLMVGWTVLGLVMYGLYGYHHSKLRHGG

SEQ ID NO: 32397 - protein, 294 aa, Xylella fastidiosa Ann-1
MIVGAFAERVKFAAVLLFIFIWFSFGYLPLAHMVWSTPGFMLSKGALDFAGGTVVHINAGIAGLVGAYFVGKRIGFGQVAVKPHNVPMTFTGAALLWVGWFGFNAGSALEANSIAALAFINTMLATAAAILVWSLLEKMTKGKFSALGVASGMIAGLVGVTPAAGTVGPFGAITIGAVAAVCCIWGITGLKRLLKVDDTLDVFGVHGIGGIVGAILTGVFTDKALGGQGYAEGMTMSNQVMIQAMGVGISIVWIGIVSLVGFLIVKLLFGLRVSEEAEREGLDITSHGESAYES

SEQ ID NO: 32398 - protein, 423 aa, Xylella fastidiosa Ann-1
MVWGAVRWADVWWMLRSMGRYSDAHSVDFAFFYVLTRDKSFMQVTSKLPQVGTTIFSVMSQLEDVYGAVNLGQGFPDFPVPLRLQEALEGAVREGHNQYPPMIGVAVLRQGIAVKVLRCYGAQVDADVEITVTSGATEAIFNAIHAVVGAGDEVIVLDPAYDCYEPGIVLAGARAVHVPLDAVSFKVDWERVGAAITSRTRLLIVNSPHNPSGALFSADDMRALATLLDGTDILLISDEVYEHIVFDGCGHESVLRWPQLRARAFVISSFGKTYHCTGWKIGYAIAPPALSAEFRKVHQYNTFTSFGPAQYAFAAMLHEEPGYVDQVGLFYQARRDCFREQLLTTKLVPLPVSGGYFQLVDYGAVSDLSDVEFSRWLAVEKGVASIPLSPFYETAPAGQRLVRLCFAKNDMTLGAAIERLQRL

SEQ ID NO: 32399 - protein, 357 aa, Xylella fastidiosa Ann-1
MKFVDEAEIQVIAGNGGDGCVSFRREKFIPLGGPDGGDGGDGGSVWLVADENLNTLVDFRHERIFKAQRGVNGMGQQMYGKAGQDKIISVPIGTVVINVQTDEVIGDMVRHGDRLLVAKGGTGGLGNMHFKSSINRAPRQARSGEQGEERTLKLELKLLADIGMLGFPNVGKSTFIRAVSAATPKVADYPFTTLYPNLGVVKIEAYSSFVIADVPGLIEGAADGVGLGMQFLRHLQRTKLLLHMVDISATADAYGNEKVGVGLLPIEQVRKLEIELERHDPALLDKPRWLVLNKADLMPQEEAQALAEALIAELRWTAPWYLVSAVSREGTWPIMKSAMTLFEHQREVAAEQSVSRR

SEQ ID NO: 32400 - protein, 1101 aa, Xylella fastidiosa Ann-1
MIEILRVRTPLKLSVLVLSLAVLLHLLAGFGGVAVLALWGVQPMLALGVSWLRGTRPLPHSLRELWRQWLLLAVLWAAGLTVVVLPALWPLAVLCNSGSLEGALVLSAAVSVSLLVLWRTWPLWPQIERGPCTFRSSWYVFPSHNLASWPGLGIAVLVLMIGSVAVALAWPGLLTLSLRWVLAVVAALLAPAVHVLLQRVQSRGLTARVEPPTPREPLPEVTASPETVPPIPSDRLVADLYEAARTGRVDRALQLLETGADPHALPFENARDQRSLMVLAAILPDLRLLRELIVRRVDVNQRHRGMTALLAATRDSWHGRSEAVQTLLANGADPRVVDADRNTPLHHAARSSDPGVAALLRDAAAELDALNCDGLSPLAAACQVGNWRLAKFLLERGAQTEPIGGTPVLLAAAGTDEDDPTGVLLLLKHKARVDARDRLRRTALHEAAEAGHSEIVKALLEAAANLEVRDMAGRTPLLEAARQARIVVLECLLSHKADRLAVDSEGRNAVFLACLSERVTLPLIRRLLEIGVPVVADKHGHRPVDIAAKVGCWSIVSLLDPDYPLPVVVSEPVSVGGVLDLPPLTLLRDGLQLGSFGSLSELIELCSAEELGTLLHDPHFALNPDVVDWLLIHGASPTVPNSSGNVPMFSLLARGIEAVPVLKVFLRHGVSPAGVGGLGLWLAACMQCDAASRSLEQFACELLEHGADPLMPSPDGDSPLVLTVRLGWLRLQQALLEAGVNCEVRDSYGMTALHQATVLGREAALKLLVMHGANPDARTPDGQTSLGMALSSGRRDLATWLDWRIWPLPRRPLRHADVPDAAMRGDTEAVRRLLDLGLPVDAVDTQGCTALLRAAGGGHLQVVRLLLMRGADLQRAANNGATPLSAAVSMRQNEIIPALLDAGAPLEYRFPEEMTVLMLAAALGFPDIVMRLIAAGADVHASNVQGFAALHCAALYGFSARDKTRLLALLDALLLAGANPGQLADGKITPLLLLLGARAERGAVCDEQVVLAGVERLLEEGETLDVVDTRGFGPLHLAALHGLPLLVKCLLRAGADSERRDALNRSPREIAIMRGFIDVAGQFESEQLGVASMGRFLRDEC

SEQ ID NO: 32401 - protein, 720 aa, Xylella fastidiosa Ann-1
MQLHTEACELTARAWNDRIAPEVGGLLKYVHGGEYHMYNPDVVMTLQHATRTGDAADWRLYMDAVHTRPPSALRDLLQLKKAEIPTPLDQVAPATDVLCRFDTAAISLGALSPEAHEALAVAMNRLGGRSNSGEGGEDPARYGTERRSKIKQVASGRFGVTPEYLINAEVLQIKIAQGAKPGEGGQLPGHKVNDLIARLRYAKLGIGLISPPPHHDIYSIEDLAQLIYDLKQVNPQALVSVKLVSHVGVGTIAAGVVKAGADLITVSGHDGGTGASPISSIRYAGVPWELGVAEVHQALVANDLRERTTLQTDGGLKTGLDVVKAALLGADSFGFGTAPMIVLGCKYLRICHLNNCATGVATQDERLRANHFTGLPERVENFFRLLAEEVRQWLSYLGAMSLDDIIGRTDLLQQLEVSSREGVRVNLSRLLTNACYEGTHCAAQRLYESPDSLSVQIDSLLADAIANKTGGDYRFLIHNTDRSVGTRLSGAIARVHGNHGMEDAPLHLRFRGTAGQSFGAFNVGGLHLELEGEANDYVGKGMAGGCLVVRPPRGARFEARHTPILGNTCLYGATGGELFAAGRVGERFAVRNSGALAVIEGAGDHCCEYMTDGVVLVLGKVGLNFGAGFTGGLAYVLDIERDFVDRYNHELIDIHRVSVEGFENYRQHLRHLVVRHRALTGSIWAQQILDEFRDYIGRFWLVKPKAASIESLAESLRSAA

SEQ ID NO: 32402 - protein, 762 aa, Xylella fastidiosa Ann-1
MLYDASDERDACGFGMVAQLDDQPSRALLEIAIAALSRMTHRGGVAADGLTGDGCGLLIRKPDAFLRALACEAGIALGPRYAVGMVFLPGERAAAAHCRQVLEAELQRVGVRLCGWREVPINRSVCGQLARDTLPHIEQVFVDIDPKHSEDAFGVALFLARRRAERQLCDYHDFYVATLSPYAISYKGMVLPDKLPVFYPDLQRSELSSSVIVFHQRFSTNTLPRWPLAHPFRLLAHNGEINTIEGNRRWAQARSKVWQSPRFDMAEFDPVISMKGSDSQSLDNMLELLIAGGMDLLQALRILVPPATRTLEFKDADLASFYEFYGLNTEPWDGPAGIVAYDGRYAACMLDRNGLRPARWMLTADRHFLVASEAGVWELPVERVIRKGKLGPGEMMAIDLKRGDLLDSDAIDRINRARAPYKQWLQQGVTYLQTELIDPSLVEEPFSDQTLCSYQKLFQLSTEEVEQVLRPLAETEQEAAGSMGDDTPMAVLSAQIRPLYDYFRQAFAQVTNPPIDPLRESIAMSLTTQLGRETNIFHAGPETVNHVILDSPVLSQRKLRQLLKMPQYLEKNRLIDLSYTVEEGLQAGLKRMCDEAEQAARDGIVMLLLSDRYPVPERPMAHALLATGAVHHHLCRVGLRCDVNLIIETGTARDPHHMACLLGFGATAVYPYLSYQMLFNLGRRGILKLQKAGEQSQIGRSYRKGIYKGLSKIISKMGICTIASYRGAQLFEIVGLDPDVVALCFPGHSGEDRRCELDAVAY

SEQ ID NO: 32403 - protein, 580 aa, Xylella fastidiosa Ann-1
MSEITTTDAQAQPEKKDFIRQIIREDLAHGTHTHIHTRFPPEPNGYLHIGHAKAICLDFGVAAEFGGHCTLRMDDTNPSKEDPAFAAAIQEDVSWLGFHWNALRHTSDYFEVLYLAAEKLIADGKAYVCDLNSQQVREYRGTLTEAGRPSPWRERSPDENLELFRQMRAGTFPDGTRTLRAKIDMASGNINLRDPALYRIKHVEHQNTGNTWPIYPMYDFAHALSDAIEGITHSLCTLEFEDHRPLYDWCINHVDLPNNSHLLKPLLDKGFPQEPSQPRQIEFSRLNINYTVMSKRKLTALVDEKLVEGWDDPRMYTLQGLRRRGYTPAAMRLFVERIGISKQNSIIDFSVLENCLRENLDTIAPRRMATIAPLKLVLTNLPEDHEEQLIFPNHPKDDTQGTRTVPFSRELWIERDDFSEVPPKGWKRLVPGGEVRLRGAGIVRIDEVVKNAEGHVIALHGWLDPTSRPGMEGAHRKVKGTIHWVSAPHAVAAEIRLYDRLFSIEKPDDNTDGKTYRDFLNPDSKRVVHGYIEPAAAQTAPEHAFQFERLGYFVTDRHDHDATHPVFNRSVTLRDTWQRD

SEQ ID NO: 32404 - protein, 563 aa, Xylella fastidiosa Ann-1
MCSIFGIFNLQPSDNLQILRHQALECSQRQRHRGPDWSGVYVDVGAILVHERLAIVDPAGGAQPLFSEDGTLALAVNGEIYNHAVLKGTLQQPYAFQTHSDCEVINALYREETPTSFLNRLNGIFAFALWDKTTGRGLIARDPMGVVPLYWGHDQDGRLRVASEMKALVEHCPDVAQFPPGHWYDTTTGTLVKYYERPWKNYSAVEGVQVSLQELREAFERAVHRQLMTDVPYGVLLSGGLDSSLVAAVAARYARHRIETNDQSEAWWPRLHSFAIGLKDSPDLSAANVAAEALNTVHHRFEYTFQEGLDVLPEVIRHIETYDVTTIRASTPMFLLARRIKAMGVKMVLSGEGSDEIFGGYLYFHKAPNAREFHEELVRKLNALYYYDCLRANKAMMAWGVEPRVPFLDREFLDVAMRMDAQHKMVDKTSNGPQRMEKGILRAAFDGYLPPSILWRQKEQFSDGVGYGWIDGLKAHAETQVSDHALATAETRFQVNPPQTKEAYYYRSIFERFFPSPAAAETVPGGKSIACSSPAAIAWDASFATMADPSGRAVSGVHQQALL

SEQ ID NO: 32405 - protein, 480 aa, Xylella fastidiosa Ann-1
MSFLPSFLKRKSIDLITVHEEGRRLVPTLSWPHLIAFGIGAIVGTGIYTLIGVGAEKAGPAVLLSFVIAGVICACAALAYAEMATMMPVAGSTYTYSYVALGEGIAWIVGWSLILEYSLVVSTVAVGWSGYMTGFLKSVGVDMPLALTAGPYAGGIINLPAAVITCVVAGLLIVGTKESTTVNAVLVVVKIIALSVFVVIALPHFDMAHLKPFMPYGFTKSIDTGGVERGVMAAAAIIFFAFYGFDAISTAAEETKNPSRDLSIGIIGSMIGCTLIYVLVALAAIGAMHYTVFGPSTEPLALILRQLDQGNTARLIGAAAIIALPTVLLAFLYGQSRILFVMSRDGLLPRVLSTVNERTGTPIATTLFTAILVATAAGLVPLGEIAALANAGTLTAFIAVALCLLVLRVREPQRVRAFRTPLAWVVGPIAIAGCLYLFWSLPKMTQSLFLLWNALGLCVYLVYGRHTSLLSKAVSIDTPR

SEQ ID NO: 32406 - protein, 868 aa, Xylella fastidiosa Ann-1
MSASPTVERWIVLKFGGTSVSRRHRWDTIAMVVRKRLEEHGTRVLIVVSALSGVTNELTAIAQGVVDSAQRVAALEQRHRDFLAELGLDAQAVLGTRFAMLSDLLQDARAVTRSLDWQAELLGQGELLSSTLGAAYLGASGVDIGWMDARDWLTALPPQPNQSEWSQRLSVSCQWKSDVEWRTRFDAQRAQVLITPGFISRHQDGGTAILGRGGSDTSAAYFGALLGAACVEIWTDVPGMFSANPKEVPDARLLTRLDYYEAQEIATTGAKVLHPRSIKPCRDTDVPMLILDTERPDVLGTRIDAEVEPVLGVKAISRRDGIVLVSMEGIGMWQQVGFLADVFTLFKKHGLSVDLIGSAETNVTVSLDPSENLVNTDVLTALSTDLSQICKVKIIVPCAAITLVGRGMRSLLHKLSEVWATFGKERVHMISQSSNDLNLTFVIDETDADGLLAVLHFKLIESGAMPVQDRAVFGSPWREIIGHVRTRVMPWWHSARMRLLAMRDEEGIGPCYVYHLPTVRERARQLNSVAAVDQRYYAIKANPHPAILRTLIEEGFGLECVSLGELRHVFAVVPHLVPSRVLFTPSFASRVEYEQAFLLGVNVTLDNVEALRLWPEVFRDRTLWLRIDLGYGDGHHEKVTTGGKTSKFGLSVKRIDEFIDVAKTLNITVTGLHAHLGSGVERGNHWSRMYDELAGFASRIGSVSTLDIGGGLPIPYRPDDEPFDVGAWGASLAEVKALHPKFQLVIEPGRFLVAEAGVLLTRVTQVIEKDDILRVGLEAGMHTLIRPALYDAWHGVENLSRLDETPHVLCDVVGPICESSDVFGRRRRLPAATASGDLMLIADAGAYGFSMASTYNLRGLPAEVVLDA

SEQ ID NO: 32407 - protein, 397 aa, Xylella fastidiosa Ann-1
MSASFSPHTITLIKSTVPLLAEHGTTIIEAMYHQLFEDPQIEALFNQANQKNGTQIHALAGAILAYARNIDNPGVLASAIERISQKHVGYAIHPEHYPHVATALLGAIKQVLGDVATSEVLQAWGEAYWFIANLLKDREAVIREGIMTKNGGWIHWRRFVISKRIPESETITSFMLHPDDGGPVVPHQAGQYLTFRFDAAGMPGMKRNYSISCGPNSDHYRITVKREHGTGASAFLHDQAKVGTIIECTPPVGDFFLPSVIERPIVLLSGGVGLTPMVSMMEQIAEAYPDAQVWYVHGTQNRETHAMDAHIRALVSRHKHMKATTFYTQRSEADDAEAGFITIDWLRANTPFQKADFYLCGPRPFLRTFVRDLIGAGVPAAQVHYEFFGPMDEEMAA

SEQ ID NO: 32408 - protein, 322 aa, Xylella fastidiosa Ann-1
MPTIQDERNLMVFSGNANKPLTQSICKELGVRMGKSLVSRFSDGEEQVEIEESVRRQEVFVVQPTCAPSAENLMELLVIIDALKRASVSSVTAVIPYFGYSRQDRRMRSLRVPITAKVAAKMISAIGADRVLTIDLHADQIQGFFDVPVDNVYASPLLLADIWRAYGTDNIIVVSPDVGGVVRARAMAKRLGDTDLAIIDKRRPRANVATVMNIIGEVNGKTCVLVDDLVDTAGTLCAAAVALKQNGATKVVAYITHPVLSGPAVDNINNSELDELVVTDTIPLSDAARECRKIRQLSVAELLAETIRRIAFGESVSSLYVD

SEQ ID NO: 32409 - protein, 861 aa, Xylella fastidiosa Ann-1
MRMDKLTSRFQNALADAQSLAVGRDHTIIEPVHVFSALLDQQGGSTRSLLVQAGVNVPLLRERLTEILEALPKVSGQTVNVSPSNELSRLFHRTDKLAQQHGDQFMASEWFVLAVVDDSGGLGQALRAAGAEKKKIEAAIDKLRGGETVQTENAEEQRQALEKYTIDLTARAESGKLDPVIGRDEEIRRTIQVLQRRTKNNPVLIGEPGVGKTAIVEGLAQRIVNGEVPEGLRSKRLLSLDLGALIAGAKFRGEFEERLKGVLNDLAKNEGRVILFIDELHTMVGAGKADGAMDAGNMLKPALARGELHCIGATTLDEYRKYIEKDAALERRFQKVFVGEPTVEDTIAILRGLKEKYALHHGVEITDPAIVAAATLSNRYITDRQLPDKAIDLMDEAASRIRMEIDSKPEELDRLERRLIQLKIQREMLKKEKDEASKQRLVDLERDIEVLDREFSDLEEVWRSEKAALQGATKIKESIEQAKLDLEAAQRRQDYAKMSEIQYGVLPALEKQLVAASQAEQHDFTLVQEKVTAEEIAEVVSRWTGIPVSKMLEGERDKLLRMEADLGRRVVGQDEAIKVVSDAVRRSRTGLSDPNRPSGSFLFLGPTGVGKTELCKALAEFLFDSQDAMVRIDMSEFMEKHSVARLIGAPPGYVGYEEGGYLTELARRRPYSLILLDEVEKAHSDVFNILLQVLDDGRLTDGQGRTVDFRNTVIVMTSNLGSHQIQELSGDDSPEVYTQMKAAVMGVVQVHFRPEFINRLDDIVVFHPLDKAQIKQIARIQLRGLEKRLAESELKLDLDDRALELLGNVGFDPVYGARPLKRAIQSQLENPLAQQILAGAFVSGDTVQVGVDGGKLVFSKV

SEQ ID NO: 32410 - protein, 401 aa, Xylella fastidiosa Ann-1
MSKKNIVLAFSGGLDTSFCIPYLKEQGYAVHTVFTDTGGVDEDERDFIEKRAAELGVASHLTVDGGPSIWDGFVKQLVWAGEAYQGQYPLLVSDRYLIVDAVLQRADALGTCAVAHGCTGMGNDQVRFDLAIKAQGDYTIIAPIREIQKEHTQTRLYEQKYLEERGFGVRAKQKNYTINENLLGITLSGGEIDKWEAPGEGARGWCAPRSAWPTDPLTVAIKFVEGEAVAVDGKPLSGPQILMKLNKLFASYGVGRGIYTGDTVIGLKGRIVYEAPGLTALLTAHRALEDAVLTKQQNRFKPHIARKWVELVYEGFFHDPLKTDLETFLKSSQAKVNGEIVLETRGGRVDAVAVRSPHILTSKGVTYAQTADWGIEEAEGFIKLFGMSSTLYAHVNRSLRS

SEQ ID NO: 32411 - protein, 142 aa, Xylella fastidiosa Ann-1
MSVIGYNHFPYFAAFPMQLSLLKAKIHRATVSHSELNYEGSIAIDGLLLEAAGLYEFEKVHIWNVTNGARFTTYAIRAEHGSGIISVNGGAARYVQVGDLVIVAAFAQMSEDEAAVFRPNLVYVDAANAMTHTNHSIPTQVA

SEQ ID NO: 32412 - protein, 1477 aa, Xylella fastidiosa Ann-1
MLYDASDERDACGFGMVAQLDDQPSRALLEIAIAALSRMTHRGGVAADGLTGDGCGLLIRKPDAFLRALAGEAGIALGPRYAVGMVFLPGERAAAAHCRQVLEAELQRVGVRLCGWREVPINRSVCGQLARDTLPHIEQVFVDIDPKHSEDAFGVALFLARRRAERQLCDYHDFYVATLSPYAISYKGMVLPDKLPVFYPDLQRSELSSSVIVFHQRFSTNTLPRWPLAHPFRLLAHNGEINTIEGNRRWAQARSKVWRSPRFDIAEFDPVISMKGSDSQSLDNMLELLIAGGMDLLQALRILVPPATRTLEFKDADLASFYEFYGLNTEPWDGPAGIVAYDGRYAACMLDRNGLRPARWMLTADRHFLVASEAGVWELPVERVIRKGKLGPGEMMAIDLKRGDLLDSDAIDRINRARAPYKQWLQQGVTYLQTELIDPSLVEEPFSDQTLCSYQKLFQLSTEEVEQVLRPLAETEQEAAGSMGDDTPMAVLSAQIRPLYDYFRQAFAQVTNPPIDPLRESIAMSLTTQLGRETNIFHAGPETVNHVILDSPVLSQRKLRQLLKMPQYLEKNRLIDLSYTVEEGLQAGLKRMCDEAEQAARDGIVMLLLSDRYPVPERPMAHALLATGAVHHHLCRVGLRCDVNLIIETGTARDPHHMACLLGFGATAVYPYLSYQMLFNLGRRGILKLQKAGEQSQIGRSYRKGIYKGLSKIISKMGICTIASYRGAQLFEIVGLDPDVVALCFPDTPARIGGVSLMQLHTEACELTARAWNDRIAPEVGGLLKYVHGGEYHMYNPDVVMTLQHATRTGDAADWRLYMDAVHTRPPSALRDLLQLKKAEIPTPLDQVAPATDVLCRFDTAAISLGALSPEAHEALAVAMNRLGGRSNSGEGGEDPARYGTERRSKIKQVASGRFGVTPEYLINAEVLQIKIAQGAKPGEGGQLPGHKVNDLIARLRYAKPGIGLISPPPHHDIYSIEDLAQLIYDLKQVNPQALVSVKLVSHVGVGTIAAGVVKAGADLITVSGHDGGTGASPISSIRYAGVPWELGVAEVHQALVANDLRERTTLQTDGGLKTGLDVVKAALLGADSFGFGTAPMIVLGCKYLRICHLNNCATGVATQDERLRANHFTGLPERVENFFRLLAEEVRQWLSYLGEMSLDDIIGRTDLLQQLEVSSREGVRVNLSRLLTNACYEGTHCAAQRLYESPDSLSVQIDSLLADAIANKTGGDYRFLIHNTDRSVGTRLSGAIARVHGNHGMEDAPLHLRFRGTAGQSFGAFNVGGLHLELEGEANDYVGKGMAGGCLVVRPPRGARFEARHTPILGNTCLYGATGGELFAAGRVGERFAVRNSGALAVIEGAGDHCCEYMTDGVVLVLGKVGLNFGAGFTGGLAYVLDIERDFVDRYNHELIDIHRVSVEGFENYRQHLRHLVVRHRALTGSIWAQQILDEFRDYIGRFWLVKPKAASIESLAESLRSAA

SEQ ID NO: 32413 - protein, 565 aa, Xylella fastidiosa Ann-1
MNQTRVLLIFSWLTVATLLWMDWGKNKNETLEISASHNLGVDSNLELEHAVPQINAGAVPLQKDSQLIAAAPKVPVINVTTDVLQLKLDGFSILAADLLRFPQSKDRGAKPIKLLTDDPNYPYSATTGWVSQSNSPVPNLSTFLPEQPDVSYKLANDQNRLVVPFVWTAANGVSIRRTFTFERGRYAILIRDEIRNSGETPWNAYVFRKLSRVPIPNILNRAMTNPDSFSFNGAVWYSEKGGYERRAFKDYMNDGGLNREIGGGWIALLQHHFFTAWIPQKDQASLYLLAQNGSRDIAELRGPAFTVAPGQSTTTEARLWVGPKLVEQITKEHVKGLDRVVDYSRFQLMALIGQGLFWILSHLNSLLHNWGWAIVGLVVLLRIAMYPLSAAQYKSAAKMRKFQPRLQQLKERYGEDRQKFQQAMMELYKKEKINPMGGCFPILIQMPIFFALYWVLVESVELRQAPWLGWIQDLTTRDPYFILPLLNIVIMWATQKLTPTPAGMDPIAGKMMQVMPLIFGVMMAFVPSGLALYWVINGGLNLLIQWWMIRQHADFSRKRSRENIK

SEQ ID NO: 32414 - protein, 454 aa, Xylella fastidiosa Ann-1
WHAIGAEAQVQTNPLPSEQITTELLMSEATPSDAVAIPKTTPTPVVDKGDVAWMLTSTLLVLLMALPGLALFYGGMLRSKNVLSMMVQIGVVFSLIAILWVVYGYSLAFADGDMFIGTFNKAFLYGVDTATLTDTFSKGFKLPEYLYVAFQLTFAGITGVLIVGAFAERVKFAAVLLFIFLWFSFGYLPLAHMVWSTPGFLLSKGALDFAGGTVVHINAGIAGLVGAYFVGKRIGFGQVAVKPHNVPMTFTGAALLWVGWFGFNAGSALEANSIAALAFINTMLATAAAILVWSLLEKMTKGKFSALGVASGMIAGLVGVTPAAGTVGPFGAIAIGAVAAVCCIWGITGLKRLLKVDDTLDVFGVHGIGGIVGAILTGVFTDKALGGQGYAEGMTMSNQVMIQAMGVGISVLWIGIVSLVGFLIVKLLFGLRVSEEAEREGLDITSHGESAYES

SEQ ID NO: 32415 - protein, 634 aa, Pasteurella multocida subsp. multocida
MGKIIGIDLGTTNSCVAVMDGDKPRVIENAEGDRTTPSIIAYTQDNETLVGQPAKRQAVTNPKNTLFAIKRLIGRRFQDEEVQRDVSIMPFEIVAADNGDAWVGVKGEKMAPPQISAEVLKKMKKTAEDFLGEPVTEAVITVPAYFNDAQRQATKDAGRIAGLEVKRIINEPTAAALAYGLDKGQGNKTIAVYDLGGGTFDLSIIEIDEVGGEKTFEVLSTNGDTHLGGEDFDNRVINYLVDEFKKEQGVDLRNDPLAMQRLKEAGEKAKIELSSAQQTDVNLPYITADATGPKHLNIKLTRAKLESLVEDLVSRSLEPVKIALADAGLSVSQIDDVILVGGQTRMPLVQQKVEAFFGKAPRKDVNPDEAVAIGAAVQGGVLAGDVKDVLLLDVTPLSLGIETMGGVMTTLIEKNTTIPTKKSQVFSTAEDNQSAVTIHVLQGERKRAADNKSLGQFNLEGINPAPRGMPQIEVTFDIDADGIIHVSAKDKGTNKEQKITIKASSGLTDEEIQQMVRDAEANAEADRKFEELVQARNQADHLVHGTRKQLSEVGDKLSAEDKAPIEKAVADLEAAAKGEDKAEIEAKVQALIQVSEKLMQAAQPQPEAQAQQAQSGKSNDDVVDAEFEEVKDNK

SEQ ID NO: 32416 - protein, 396 aa, Dechloromonas aromatica RCB
MNDPIVIVSAARTAMGAFQGGFAGLTAANLGAVAIKAAVERAGIDANLIEEVLMGCVLQAGQGQAPARQSALQAGLPLSAGCATIHKVCGSAMKATMLGHDGILAGSYGAAVVGGMESMTNAPYLLPKARGGYRLGHGQLMDHMFLDGLEDSYGKETRGRLMGTFAEECAASYGFTREAQDEFAVRSTTRAIEASNNGSFAWEIAPTTVAGRKGDVVIDKDEGPFAVNVEKIPTLKPAFKKDGTVTAANSSSISDGAAAMVLMRASQAAKLGLQPIARIVGHTTHAGTPALFPSAPVGAMQKLFAKTGWTAESVDLYEINEAFAVVTMASLHDLKLDPAKVNIHGGACALGHPIGASGARIVVTLLGALKKYGKKRGVASLCIGGGEATALAVEML

SEQ ID NO: 32417 - protein, 585 aa, Dechloromonas aromatica RCB
MSHDMTSRELYLRLLTYVRPYWKAFLAALACMGVASLAEPVFPAIMKSLLDDGFSKANGPWDWLFYPLAIMGIFLVRAIFGFLGDYLMSWVSNNVVAELRQAMFARMVRLPTRYYSDNLSGRLMSRIAYDVTGVAGAATNALTSLIKDSLSIVGLLVWLLWLNWQLTLITLSVVPFIAIVVRVFSKRLRSVARGQQESMGKITQVLQEAIEGHKVVKIFGGQSYEEDRFYESIREQRRLAMRATLASAAQSPLVQFFAASGVAIIMGVALKQASSDQTTVGSFVSFVTAMLMLMAPLKRVTDVNAPIQRGLAAAESVFSLVDEETEPDSGKEELGRAQGLVEFDGVTFTYPGSERPALDSVSLTVRPGECVALVGPSGSGKTTAANLLPRFYALDAGEIRVDGHALPNIRLNSLRDNIALVSQDVVLFNDTIGANIAYGGKRDATLDEIRAAAKAAHALEFIDALPEGLNTMIGENGVKLSGGQRQRLAIARAILKDAPILILDEATSALDTESERHVQAALDELMRGRSTLVIAHRLSTIERADRIIALAHGHKQEEGSHAELLAHDGLYARLYRMQKAEEVAV

SEQ ID NO: 32418 - protein, 513 aa, Dechloromonas aromatica RCB
MIPIMNKMKVLAVDDNRTNLHILQVFLKKLGHEVVLAENGEEAVRRFETDAPDLVLLDIMMPVMDGFEAARRIKAMTRDRWTPVIFLSALNRDENLVEGLDAGADDYLTKPINFVVLEAKLRSMQRSLTMQQQSIDSLRRVQAISDNVLDAIVTTNEEGMIVSVNQSTERIFGWSTAELLGQNASLLMPVPASASGDIMLSPGDAARPLPGAGQEQEINARHKDGHIFPATISISQVELDNQRMIISVIRDISERKETEQKLRENAQQLQDYYDQTQTEQQLALRLMEKQLHRSGLRDKRLRYKVIPAEHFSGDIVAASRSPDGLLYALLADATGHGLTAAISVLPVLALFYRMTKLNRSIQEIVLELNQQLKESMPVGRFVAVTLVCLDEKNRKGEIWVGGTPEAFLFDRWGRVASTFPSDNLPLGIVGSNELGGHPRLFSWEPESQLALCSDGLLEATDTEGKQFGNSGLINSASNTSPSDRFAKIETALKEHQNGCAASDDVSLMLIDCP

SEQ ID NO: 32419 - protein, 349 aa, Dechloromonas aromatica RCB
MARIIMQPSGKSVDCAYGDTVLMALEKAGYALPNNCRAGACGECKVKVTQGQFDQGMVLDMALSQDERKQGFGLMCMAKPISEELTIEWGTEDAKPKLFPPREDALFVVTDKKQIAARVVELRLRPVGQPIRYWPGQYVTLGNPRADIPARAYSISNAPRPDGELVLQVARADSGVTSNWVHDTLQAGDNVKVSGAYGTFIGDPSVDTPVLCIAAGTGLAPVLALAEAALRRGFKKPVTMLFSARTKEDVYSQGMMAWWRTKHRNFDYKVTLTREEADGFLKGRVDVVLPQLFKDLSKHTIFIAGSPEFVDSCVAAAKAQGALDELIHTEGFFAQQQPVVADADHLLPL

SEQ ID NO: 32420 - protein, 401 aa, Dechloromonas aromatica RCB
MNEAFICDAIRTPIGRYGGALAGVRADDLGAIPLKALMERNPQVDWTAVEDIIYGCANQAGEDNRNVARMSGLLAGLPIEVPGTTINRLCGSGMDAIGMAARSIKSGETELMIAGGVESMSRAPFVMGKAESAYSRSAAIYDTTIGWRFPNPAMKKLYDTHSMPQTADNVAADFAIGRADQDAFAVRSQQRWAAANAAGRFKDEIVPVVIPKKKGDPVVVDTDEHPRPETTLDMLAKLKGVNGPELSVTAGNASGVNDGACALLLASGAAASQYGLQPLARVVGMATAGVLPRIMGFGPAPAVRKVLAKTGLTLAQMDVIELNEAFAAQGLAVLRDLGLADDAAHVNPNGGAIAMGHPLGMSGARLVTTAAYELKRRGGRYALCTMCIGVGQGIAMVIERV

SEQ ID NO: 32421 - protein, 563 aa, Dechloromonas aromatica RCB
MKIAFHPKLLDCLPTYNRTQLGQDIAAGITVGVLALPLAMAFAIASGCSPTAGIWTAIVAGLITSLLGGSRVQIGGPTGAFIPIIYGIVAIHGFSNLLGATMLAGVFLLAMGLARMGQLIRFIPVTVVIGFTNGIAVVIFLAQIKDFFGLKIESLPAEFFHRIKTLAAYADTVDLPTLGLASACFIFLLSYNWLAQRIAILRRAPGPLAVLVVGTLVSYIFDLPVETIGSRFHGIPQELPHFGLPDLSIHDFGQLISPAITIALLGAIESLLSARVADGQIDDRHDPNQELVAQGLANIVAPLFGGFAATGAIARTTTNVKSGGRTPIAGIIHAFVLLGVVLIAAPLASYVPLATLSAIVMVVAINMGEWHEFRELQRYTYNYRIILLATFIVTVLFDLTIAVELGMVLACLFFIYRMSELTRVERRPLREEASEPQFLYPDGTMRVAAWQLFGSLFFGAVNKLEALLDPAAGHPEVVILDMTQLIQLDTTGLEGLESLLDKLKKRGCTLLVCGLNSQPGSLLYRSGFVDHLGDDNVCPDLSSALQRAYILLPNLMGSHEEDY

SEQ ID NO: 32422 - protein, 386 aa, Dechloromonas aromatica RCB
MYRPARRLADIEPFHVVELLTRARQLEAEGRDIIHMEVGEPDFPTPEPIANSAINAIKSGKTLYTQALGLPELREAISQFYGQRYGASVPASRIAVTNGASGALNLAFACLADPGSEWLLTDPGYPCNRHILRAYEGCPQNIPVGPDTNFQPTPELLRRHWKSTTAGLLVASPANPTGTLLTLPEIAGLSEVCREKNGHFLVDEIYHGLTYEIDAPTACAAGEDIWVINSFSKYFQMTGWRLGWMVIPEAYVRDVEKLAQNLTLCPSTPAQHAALAAFEPETIAILESRRSEFRRRRDFLAPALEAIGFRITARPEGAFYLYCDCSALADDSFALAKDLLEKTGVAATPGLDFGSNQPEKHIRFAYTTGVERLAEAVERLSRYFGR

SEQ ID NO: 32423 - protein, 759 aa, Dechloromonas aromatica RCB
MDSRQLREAALYYHREPKPGKIAVTPIKQLTNQYDLSMAYSPGVAFACEEIVADPREASTLTSRANLVGVITNGTAVLGLGAIGPLAAKPVMEGKGVLFKKFANIDVFDIEIEERDPDKLIDTIASLEPTFGGINLEDIKAPECFYIEKKLRERMKIPVFHDDQHGTAIVVGAAILNGLHLIGKDLAKVKIVTSGAGAAALACLDLLVMLGAPPSNIWVTDIKGLVYEGRVEEMDEIKARYAKVTDARTLGEVIADADVFLGLSAGGVLKPEMVAKMASNPLIMALANPTPEITPELVKSVRNDAIICTGRSDYPNQVNNVLCFPFIFRGALDVGATTITEEMKMAAVKAIAELARAEQSEVAARAYGEKVASFGPEYLIPNPFDPRLIVKIAPAVAKAGMDSGVATRPIKDWDAYIQGLNEFVYHSGMIMKPVFSQAKMAPKRIVFAEGEDERVLRAVQVVRDEGIAWPILIGRHAEINRRIEVAGLRIREGEDFEVVHSDNSAFFDEHYEEFWQTYHGLMERKGVSPDYARREVRRRNTLYGALMVRLGYADGLICGTFGRHETHREYVQSVIGTRADHDRYYAMNLLMLPERTVFIGDTYVNYDPTAEQLADMTLLAAEEIRNFGIVPKVALLSHSTFGTEDTPTSVKMRDVLAQLKQRAPDLEVEGEMHGDAALDEQIRKAAFPNSRLKGQANLLVMPTLDAANISFNLLKVAAGDNLTIGPILLGAAKPVNILTPTATVRRIVNMTALTVVDAV

SEQ ID NO: 32424 - protein, 318 aa, Dechloromonas aromatica RCB
MLRIVQLEGESLIAEVRRPVFAHDWVEYPKTSPGQVVERLAGAAIAITNKVAINAAAIEALPELKMIAVSATGTNNVDLDACRRRGIVVSNIRGYAEHTVPEHVMALLLALSRNLIAWRETLQAGAWQRAEQFCLFDHPIRDLHGATLGLIGSGTLGNGVARLAEAFGMRVLRAERKGAAAVRPGYTAFAEVLAEADAISLHCPLTAETTGLIGEAELRAMKRSALLINTARGGIVDEAALVLALKEGWIAGAGFDVITAEPPPVGYIMLDPALLALPNFLLTPHVAWSSRPAMLTLADQLIDNIEAFVAGTPRNQVA

SEQ ID NO: 32425 - protein, 270 aa, Dechloromonas aromatica RCB
MAYLVPSEFVTKMVDAGESKIYMSTRDSLIRAYMAGAILALAAVFAVTASVMTGQALVGAILFPVGFCMLYLLGFDLLTGVFVLTPLAWLDKRPGVTIKGILRNWGVVFTGNFLGALTVAFLMAFVFTYGFSTAPNEIGTKIGHIGEARTIGYAKYGLMGWLTIFIRGMLCNWMVSTGVVGAMISTTVSGKVIAMWMPIMLFFAMTFEHSVVNMFLFPSGLMMGGNFSILDYFIWNEIPVVLGNLIGGLAFTGLTLYATHIKTGPKRSFN

SEQ ID NO: 32426 - protein, 425 aa, Dechloromonas aromatica RCB
MEDKKLAPEGTTTAKSSLSRRDFVSTALGASLMAMVPPGVRSGAWAAGSDAPEKKEVRIGFIPLTDCASVVMASVMKFDEKYGIKIIPTKEASWASVRDKLVNGELDAAHVLYGLIYGVQLGIGGPKKDMNALMSLNHNGQAITLSNQLKDKGATDGAGLAKLVAKKEREYTFAQTFPTGTHAMWLYYWLASQGINPMKDVKTITVPPPQMVANMRVGNMDGFCVGEPWNNRAIMDNIGFTATTTQDIWTDHPEKVLGTTADWVKQNPNTARAVVAAILDASKWIDASIANKQKTAETIASKSYVNTDTEVIVARMLGRYQNGLGKSWDDKNCMKFFNEGTVNFPYLSDGMWFLTQHKRWGLLKSHPDYLATAKQVNRIDIYKQGAAAAGVALPKSEMRSHKLIDGVVWDGKDPAKYADSFKIKA

SEQ ID NO: 32427 - protein, 645 aa, Dechloromonas aromatica RCB
MGKIIGIDLGTTNSCVAIMEGGQPKVIENAEGARTTPSIIGYTEDGEILCGAPAKRQAVTNPKNTLYAVKRLIGRRFEEKEVQKDISLMPFKIVKADNGDAWVEARDKKIAPPQVSAEVLRKMKKTAEDYLGEEVTEAVITVPAYFNDSQRQATKDAGRIAGLEVKRIINEPTAAALAFGMDKTSKSDRKIAVYDLGGGTFDISIIEIANVDGETQFEVLATNGDTFLGGEDFDQRLIDYIIDEFKKESGVNLKADVLALQRLKEAAEKAKIELSSSQQTEVNLPYITADASGPKHLALKITRAKFESLVDELIERTMAPCVTALKDAGCKISDIDDIILVGGQSRMPKVQEKVKEIFGKEPRKDVNPDEAVAVGAAIQGGVLQGEVKDVLLLDVTPLSLGIETLGGIMTKLIQKNTTIPTKASQTFSTADDNQAAVTIHVLQGEREVASGNKSLGQFNLEGIPPAPRGTPQIEVIFDIDANGIMHVTAKDKATGKENKITIKANSGLSEAEIQAMVKDAELHAEEDKKAHELADARNQADGMVHMVKKSLTEYGDKLDASEKAAIEAAIKDVEDVLRDGDKETITAKTEALSAAAQKLGEKMYAQQQAEGAAAGATGQQAEAGEKTVEGDVVDAEFTEVNKDKK

SEQ ID NO: 32428 - protein, 393 aa, Dechloromonas aromatica RCB
MKQGILTINAGSSSIKFALFPLDHPISPEAEVSGQIDGIGAETTKMVAKNKAGDRIADQVLEGGKVSHAQAFDALLKWFTASHANWQIVAVGHRVVHGGERYSKPTLIDDTVLGHLQSFIPLAPLHEPHNVAGIIALQALLPSVPQIACFDTAFHRSQPEVAQTFGLPRNITAEGIKRYGFHGLSYEYIARALPQHSGRATGRVVVAHLGNGASMAAMVDRKCVATTLGFSTIDGLVMGTRCGNLDPGVILHLMETKNLSVKDMTKMLYKESGLLGVSGLSQDMRTLLASDKPEAGEAVNLFCYRIARELGSLAAAAGGLDALVFTGGIGEHAAEVRRRVCLQSEWLGIRLNPEANARHELRISAGNSSVDVLVIPTNEEWMMAHHAQTLLAL

SEQ ID NO: 32429 - protein, 472 aa, Dechloromonas aromatica RCB
MNHQPEQRYLVNKTFDEIRIGDSASLKRTLMPEDVKLFAILTGDLNPAVVDPTFSESGMFREVIAHGMWSGSLISTVLGTQFPGPGTILVDQTLHFARPVTIGDTITITVTAKQKFDHNKHVIFDCVCTNQEGLQVVRGTAEVLAPTEKVSRLQEVHMPEIRIDDKHERYIHLLERVKGLEPIPTAVAHPCDQESLKGPVMAFQAGIIEPILVGPENKIRAVAEEFGIDLHGIRIVHAAHSHDSAALAVSLVRTGDAEALMKGSLHTDELMGEVVARANGLRTNRRISHVFLMDVPTYHRPLLITDAAINIAPTLEDKVDIIQNAIDLAHIIGIPEPKVAILSAVETVNPKIQSTLDAAALCKMADRGQIKGGILDGPLAFDNAVSIVAAKTKGIKSAVAGHAEILVVPDLESGNMIAKQLEYLANALTAGIVLGTKVPIVLTSRADSAETRTASCVIAALIAHHNRKTGTV

SEQ ID NO: 32430 - protein, 220 aa, Dechloromonas aromatica RCB
MATTPCGLSLVVLRNVPLFSGLDDVELEKLSKVSGRKRVERGASVVRAGDSTDSLYILLSGRAKVTNTDEDGREIILAWLGPSEFFGEMGLIDGSPRSANVVAAEPCELLFLSKESLQRCLQDNFQVTQKLMKTLVLRLREADRKIESLALLDVYGRVARLLLDMSEVVDGRRIIKKKMSKQDMAKMIGASREMVSKVMRDLELSGYIRIENDLTVIPGA

SEQ ID NO: 32431 - protein, 349 aa, Dechloromonas aromatica RCB
MSRAPAEGNMSNIKNVTLQFSDGICKSVAVKDGESVLDAALAADLQLIHQCRSGSCSCCMATLTEGNAKMRSGSSSTLLRSEFEAGQRLLCLAEPESDCTFALNYDSNASLQQATKVRAFIDDVEKLAHNVVRLTLELAEGEWLDFRPGQFVQVKVPGLSVMRSYSPASTSADLPKIVLLIRLLPDGAMSNYLRSEAARDAVLELEGPFGSFFLREKVKAPHIMIAGGTGLAPVMSMIDSIQKTSGKKPPILLSFGCATPDSLFCLDDIELRKHWLPSLTNRISVDREAAGSLLQGNPVDALRDDDVKDPDTVAYICGPQPMIEAAYRRLEALGVRHENIFAEQFTPSN

SEQ ID NO: 32432 - protein, 67 aa, Dechloromonas aromatica RCB
MATGTVKWFNDSKGFGFITPDQGGEDLFAHFSAIQSSGFKTLTEGQKVSFDVTTGPKGLQASNIQPV

SEQ ID NO: 32433 - protein, 380 aa, Dechloromonas aromatica RCB
MALTIGVARESAPGEHRAAIVPEMSKKFQALGANVVLETNAGLESHFMDSGFEGVKVAQQLAEVYGQSQLILRVTPPSLGEIAVLPEGSVLIGLLKPFESKERLAALNAKKITAFSLELLPRISRAQSMDALSSQGACAGYQCGLIAAARCTKFFPMLTTAAGTIRPARVLIIGAGVAGLQAIATCKRLGAMVEAYDVRAAAKEQIESLGAKFVDTGVSADGTGGYARELTLDEKAAQVEKLTKVIAMADVVITTAAIPGKKAPVIITREMVGRMKYGAIIVDMAAESGGNCELTQPGEHVIANDVNIHGPLNLPSRMPTHASELYAKNLYNFLSPWIKDGSLQFDWSDEVLAGTVLCRDGATVHPVVKQVMGEPTGGNA

SEQ ID NO: 32434 - protein, 404 aa, Dechloromonas aromatica RCB
MELKPIYLDNNATTRVDPAVVETMLPFFTEHFGNASSIHAFGSEVGKALKKARSQVQALLGAEHDSEIIFTSCGTESDSTAILSALKAQPDRNTVITTNVEHPAILTLCEWLEKEGYIVHKLKVDKKGRIDMDEYKSLLNDRVAVVSAMWANNETGTLFPVVEMAELASAKGIMFHTDAVQAVGKIPIDLKNTKIDMLSLSGHKLHAPKGIGVLYLRRGCRFRPLLRGGHQERGRRAGTENSASIVGLGMACELAMQKMETENTTVKRLRDKLEQGLLSQITHCFPTGDVSNRLPNTSNIAFEYIEGEAILLLLNKLGIAASSGSACTSGSLEPSHVMRAMGIPYTAAHGTIRFSLSVYNTEAEIDRVIAAVPPIIAQLRKLSPYWTDKGPAANPEAAFAPTYA

SEQ ID NO: 32435 - protein, 399 aa, Dechloromonas aromatica RCB
MSKQIQEAYIVAATRLPVAKRNGMFKNVRPDDMLAEVIRAVVAQVPGIDPARIGDVIVGCAMPEAEQGMNVARIGLLLAGLPITVPGLTINRFCSSGVQAVADAANQIRLGLADVMIAAGTESMSVMPQIMGNKMSMNPAIFAKEENLGIAYGMGLTAEKVANQWKVSREAQDAFAVASNRKACAAIAAGHFKAETTPYTIRESLPDLKTGQIKLRERVVEFDEGPRADASLEKLAKLRPVFHARGSVTAGNSSQMSDGAGAVMLVSEKVLKEHNLTPLARFAGYAVGGVAPEIMGIGPIAAIPKVLAQVGINQDQLDWIELNEAFAAQSIAVMQELGINPDKVNPLGGAIALGHPLGATGAIRIATAVHGLRRTGGKYGMVTMCIGTGMGAAGIIEAL

SEQ ID NO: 32436 - protein, 373 aa, Dechloromonas aromatica RCB
MNTIIAERPDILIVDDTAASLDLLSDLLAQAGYAVRPTQDPRMALRSALAKTPELILLDVRMPGMDGYELCQRLKDNPKTREIPVIFLSALRETEDKVRGFSLGAVDYIAKPFQPEEVLARVRTHIELRRLQCRLEERVAERTEQLRQSSDELRASRERLQELAAFLQSVREEERTAIARELHDELGQALTALRIDLAWINRQCKTLGPEVQARADASCAIVERTIDAVRRISEGLRPGMLDVLGLTAAIEYLVEQFAKRNDIPCYLTSDRDEFAIDDRVSIAVFRLIQEALTNVVRHASATRVDITLSQDNNTICVDIRDNGIGLATGEPKQGFGLLGMRERVTMLGGTIDIDGSRGTRILARFPLFKGEKS

SEQ ID NO: 32437 - protein, 556 aa, Dechloromonas aromatica RCB
MTETLTGAQITVRLLERQGIRTVAGIPGGAILPIYDALGQSSAIHHVLARHEQGAGFMAQGMARSTGLPAVCLASSGPGATNLLTAIADAKLDSIPLVAITGQVPKAMIGTDAFQEVDTYGLSIPITKHNFLVSSPEELLAVIPRAFEIATSGRPGPVLVDIPKDVQTQAIEIGEWPEPGRAQPITPTDPALIAQATAMINAAERPILYLGGGVVHSGAARTAVDLAEKSNLPTVMTLMALGTMPVDHPLSLGMLGMHAARYTNLALEECDLLIAVGARFDDRATGKVAAFCPQAKIIHIDIDPAELDKIKTAHLGIAADVQEALTQLLPAVADNDRQVWVDRNNTLKAEFPFEMPGLDNPRSHFGLIRTVAACLDNEATVTTDVGQHQMWVAQAYPLRRPRQWLTSGGLGTMGFGVPAAIGAALAEPQRTVVCFTGDGSILMNIQELVTAAEENVNVKIVLMDNATLGLVHQQQTLFYGERLFASQFKSSPDFIKIAQGFGIAAVDLDLAANPCAALMEAIARPGPCLIHASIDAEQKVYPMVPPGAANRDMIGA

SEQ ID NO: 32438 - protein, 385 aa, Dechloromonas aromatica RCB
MFRPVYLDYNATTPLDPAVLAAMLPWLESQYGNASSRHEYGRQARQAIDEARQRVAAAVNAHPTEVIFTSGGSEANNLFLKGAAASLKPGTLAVSAIEHPCVLKPAAQLVKQGWQVKHIAVDSAGRVSAADYAEAMQAKPKLVSVMLANNETGVVQDVAVLANSAKSAGGWFHTDAVQALGKLDIDFRALNMAGVHAMTLSAHKAYGPKGAAALVLDKRVELQPLIAGGGHERGLRSGTENVPSIVGFGVAAELAANRVAELSARLRVMQAKLEAGLVALGARVFATDAMRLPNTSYFAFPDIDGETLVGKLDREGFAVASGAACSSANPEPSHVLRAMGVAPEIARGAIRVSLGASNTEVEIEQFINALQATVGRLQGLTAMAV

SEQ ID NO: 32439 - protein, 405 aa, Dechloromonas aromatica RCB
MTMKLPIYLDYSATTPVDPRVAEKMIPYLCEHFGNPASRSHSFGWVADAAVEEAREQVAALVNADPKEIVWTSGATESNNLAIKGAANFYASTKGKHIITVKTEHKAILDTVREMERQGFEATYLDVKEDGLLDLEVFKAAIRPDTVLASVMFVNNEVGVIQPIAELGEICREKGIIFHVDAAQATGKVDIDLSKLKVDLMSFCAHKTYGPKGIGALYVRRKPRIRLEAQMHGGGHERGFRSGTLPTHQIVGMGECFRLAKEEMAEENKRVGALRDKLLKGLQDIEATFVNGDLTQRVAHNLNISFAYVEGESMIMAIKDLAVSSGSACTSASLEPSYVLRALGRDDELAHSSIRFSIGRFTTEEEIDYAIKLLHQKVGKLRELSPLWEMYKDGIDLSTVQWAAH

SEQ ID NO: 32440 - protein, 294 aa, Dechloromonas aromatica RCB
MKKIRSGYIAIVGRPNVGKSTLLNRLVGEKISIVSRKAQTTRHRITGILTNDDAQFVFVDTPGFQTKFSNALNRAMNRGVTQTLNDVDVVLFLIEAGRYDAKDKAVVRLLPKDRPVILVVNKTDQIKDRSSLFPFLAEVSADHDYAAVVPISAAKGKQTDELLAEARKHLPNEGLMFPEDELTDKSERFLASEYIREKVFRLLGDELPYATAVEIEKFEVEGDLRRIFAAIVVDREGHKAIVIGKGGESLKRIASEARQDMERLFGSKVYLEIWVKVKSGWNDDERLLKSLGYE

SEQ ID NO: 32441 - protein, 403 aa, Dechloromonas aromatica RCB
MHAKQPAYLVLNAGSSSLKFSAFRQHSQTDDLETLLSGQISGIGRVARFQAKGADHRLLADHTWNDEDSACRDALLQYVLNWIRTTLVDDEIVAVGHRVVHGGRNLGRPMRVGPKLLEELDGLVPLAPLHQPHNLAPMRILARNFPDLDQVACFDTAFHSTQPWLARTFALPQELTDEGVCSYGFHGLSYEYVTSQLLDSRPDLAEGNIVICHLGNGSSLCAVKGGRSVDTSMGFSALDGVPMGTRTGSIDPGVILYLMREKKMDLEAIEDLLYKQSGLLGVSGISNDMKVLQESKDPNAQKAVDLFCFRVAKEVAALASSMGGLDALVFTAGIGENSPEIRALIAERLAWLGVRLNPCANREREYYIAAPESRVPVFVIPTNEEMMIAKHTINVLGQMMGNA

SEQ ID NO: 32442 - protein, 316 aa, Dechloromonas aromatica RCB
MLKKIDFGHDDHHADGGFKTAPHAESIAALSLDPLLPDAVALAAEDVGVKKAKQKLWTIFCLSMLGGAFVALGGLFATVTISGAAGHLPYGVMRLLMGATFSLGLMLVVIAGAQLFTSDALMVMAWASGRLKTVRMLRVWTTVWLGNFVGALGVAALVFLSGQYAFGHGEVGASALYLASAKSSLAPDKAFFLGILCNVLVCLAAWVAMAARSITDKILAMFFPIAAFVAAGFEHCVANMYFIPYGLFIKWWAPQSFWEDLAHLQIAPADIPIDQFVINLAAVTLGNWVGGALFVGGIYWLIYRKDDGATKECIAD

SEQ ID NO: 32443 - protein, 371 aa, Dechloromonas aromatica RCB
MQIGVPKEIKNNEYRVGLTPASVRELVAHGHRVIVQKNAGTAIGLTDALYAGAGAELVDTADEVFIRAELIVKVKEPQPNECRQLRDGQVLFTYLHLAPDRRQTELLLASGVTAIAYETVTGPGASLPLLAPMSEVAGRMSIQAGAAALEKSKGGSGVLLGGVPGVAPGKVTILGGGVVGYNAAQIAVGMGGDVTVIDRSLDRLRWLDRQFGNRIRTLYATAESIEASVSEADLTIGAVLIPGASAPHLVSRELLKRIRPGSVLVDVSIDQGGCFETSRPTTHAEPTYIVDDIVHYCVANMPGAVARTSTFALNNATLPFVLTLANKGYRQALRDDPNLRAGLNIHRGKLTCAPVGEALQIPVCDPEAELA

SEQ ID NO: 32444 - protein, 899 aa, Dechloromonas aromatica RCB
MSTSLKTLISKLNSTCRQAAERAASLCMSRGNYEVDLEHLLIAILENPGADLLVIGKRCGISPTGLERELNQEIDRFKTGNTRTPVFSTHILKLFEQAWLIASLDARLPRIRSGHLLLALLTEPELSQLAFRGSKLLGKVRLDELKHNFDQMTEGSAEAAEVAGLAASAEGGDESDPLLAGSPQGGKTPALDQFTTNLTQRARDGKVDPVIGRDSEIRQVIDILMRRRQNNPILTGEAGVGKTAVVEGLALRIAQDDVPPPLLGVELHTLDMGLLQAGASVKGEFENRLKNVIDEVKKSVKPIILFIDEAHTMIGAGGQSGQNDAANLLKPALARGELRTVAATTWAEYKKYFEKDAALARRFQGVKVEEPTEILASAMLRGMVPLMEKHFGIRVLDEAVTEAVRLSHRYISGRQLPDKAISVLDTACAKVALGQSATPALIDEADKRLLRERAELAALEREAASGAWHDTRIKELKAQISAIESDLSIFKTRFEEEKTLVNRVLELRGQLENGEVAVDAAPKPKARARKKGEGEAVGDSELDKALARLRELQGESPMVPLQVDGHVVAEIIAAWTGIPLGKMVKNEINTVLNLKPLLKERVIGQDHALEAVAQRVRTARAYLEDPNKPKGVFMFVGPSGVGKTETALALADILYGGERKLVTINMSEYQEAHSVSGLKGSPPGYVGYGEGGVLTEAVRRNPYSVVLLDEVEKAHPDVLELFFQVFDKGVLDDAEGREIDFRNTLIILTSNVGSTQIMQSCLNKPAEELPEADALADALRPILFKSFKPAFLGRMKVVPYYPISDDVLVSIIELKLGRIRDRIAANHKAEFIWDDKLVEAVLARCTEVDSGARNVDHILNGTLLPEIAEVVLARMAEGAAVERIKVGAGKSGEFKYAIK

SEQ ID NO: 32445 - protein, 414 aa, Dechloromonas aromatica RCB
MKHVKKSAKLANVCYDIRGPVLQKAKQMEEEGHKIIKLNIGNLAAFGFDSPEEIQQDMIRNLPNAAGYTDSKGIFAARKAIMHYTQQKGIKGVTLEDIYVGNGVSELIVMAMNALLDAGDEVLVPAPDYPLWTAAISLSGGTPKHYLCDESKGWLPDLDDIRSKINAHTKAIVLINPNNPTGALYPDDLLYEIIDIARQHHLTIYADEVYDKVLYDDVKHTSIASLAEDVLMITFNGLSKNYRSCGYRAGWMVVSGDKRHAKDYIEGLDMLASMRLCANAPGQHGIQTALGGYQSINDLIKDGGRLRRQRDIAHELITAIPGVTCVKPKAALYMFPRLDPKIYPIKNDQQFISELLQEEKVLLVQGTGFNWPHPDHFRLVFLPHEDDLREAVARIARFLENYRKRHNTNQLIKD

SEQ ID NO: 32446 - protein, 635 aa, Dechloromonas aromatica RCB
MCGITGIFDTRSKRDIDRAVLHRMNESQIHRGPDEGGTHVEPGVGLGHRRLSIIDLSTGQQPLYNEDNSVCVVFNGEIYNYQELIPELQALGHVFHTRSDTEVIVHAWEAWGESCVDRFRGMFAFALWDRNRETLFLARDRLGVKPLFYALLDDGTFLFGSELKSLLAHGGLKRDIDPCAVEEYFALGYVAEPRSIFKQALKLPPASTLLVRRGQPVGTPREYWDVRFTLDNPISDADAQAELTHRLEESIKLRMISEVPLGAFLSGGVDSSAVVALMAGLSQKPVNTCSIGFSDPAFNESEFAKMVADRYQTNHHLDIVESDDFDLIDTLARLYDEPYADSSAIPTYRVCQLARKHVTVALSGDGGDESFGGYRRYRLHMMEEKMRSALPLGLRRPLFGALGKLYPKADWAPRVFRAKTTFEGMARNSVEAYFHSVSILRAPMRDRLFSTQFKSALSGYDALKVFTDHAAKADTTDPLALIQYLDLKTYLIGDINTKVDRASMAHSLEVREPLMDHKLVEWLATLPSTLKIRGQEGKYLLKKSMEPHLPNDVLYRPKMGFSVPLARWFRGPLKTRVQESILGSRLADTGWFNRDYLQKLVTDHNNGSRDYSASIWTILMFEAFLRNVMEQGEAA

SEQ ID NO: 32447 - protein, 306 aa, Dechloromonas aromatica RCB
MTYNSPAMKPLGSLKYSRIRIIGAASGLGAQDQACEDGPVAFHHSQAWHELEHHPLVDWGKTLFAPDNDGTSTTARIAELCRHLADEVALTLRADEFPVVIGGDHSIAIGTWSGLARVLGQPFGLLWIDAHLDSHTPETSYSGAVHGMPLACLLGRGDKRLLNIGLNGPQVSAAHTVILGPRSYEPEELEFLQRMGVRIIDSEEIQLRGFAACLDEAIAIVAGAPAGFGVTLDLDAIDPRSAPGVGSPEPDGLTSYDVLTAMHWIAAQAGLKALEIVEYNPDRDRHGTTAALISNMIEQILPVGAK

SEQ ID NO: 32448 - protein, 406 aa, Dechloromonas aromatica RCB
MALIVQKYGGTSVGNPERIKNVAKRVAKFQAQGHQVVVVVSAMSGETNKLIALAKEVQANPDPRELDAIMSTGEQVTTGLLSMALMDIGCKAKSYTGGQVKVLTDSTHTKARILSIDEANMRRDLDAGYVIVVAGFQGVDANGNITTLGRGGSDTSGVALAAALKADECQIYTDVDGVYTTDPRVVPEAKKLDTITFEEMLEMASLGSKVLQIRSVEFAGKYKVKLRVLSSFQDEGEGTLITVEEDKNMEQPIISGIAFNRDEAKLTMLGVPDTPGIAYQILGAIADANIDVDMIIQNVGHDGTTDFSFTVNRGEFAKAKEILEGVKAKLGAREITGDNKICKVSAVGVGMRSHPGVASQMFKALADEGINIQMISTSEIKISVVLDEKYLELAVRVLHRTFGLDQ

SEQ ID NO: 32449 - protein, 863 aa, Dechloromonas aromatica RCB
MRLDKFTTKFQQSLADAQSLAIGGDQQFIEPQHLLLALINQDDGGTTSLLSRAGVNVPGLKRDLEQALTRLPQVQGHGGDVSIGRDLNNLLNLTDKEAQKRGDQFIASEMFLLALCDDKNETGRIAKQHGFSRKSIEAAIMAVRGGQGVDSQEAEGQRESLKKYCIDLTERAAQGKLDPVIGRDDEIRRAIQILQRRTKNNPVLIGEPGVGKTAIVEGLAQRIVNEEVPETLKGKKVLVLDMAGLLAGAKYRGEFEERLKAVLKEVAQDEGRIILFIDELHTMVGAGKAEGAIDAGNMLKPALARGELHCIGATTLNEYRKYIEKDAALERRFQKVLVEEPSVESTIAILRGLQEKYELHHGVDITDPAIVAAAELSHRYITDRFLPDKAIDLIDEAAARIKMEIDSKPEVMDKLDRRIIQLKIEREAVKKEKDEASKKRFGLIEEEIAKLTKEYSDLEEVWKAEKSAVLGSAQIKEEIDHLKADIARLQREGKLGEVAELQYGKLPQLEAQLKAAEKAGEGEGRKNKLLRTQVGAEEIAEVVSRATGIPVSKMMQGEREKLLNMEDRLHKRVVGQDEAVRLVGDAIRRSRAGLSDPNRPYGSFLFLGPTGVGKTELCKALAEFMFDAEDHLIRIDMSEFMEKHSVARLIGAPPGYVGYEEGGYLTEAVRRKPYSVILLDEVEKAHPDVFNVLLQVLDDGRMTDGQGRTVDFKNTVIVMTSNLGSQMIQQMSGDDYGVIKVAVMAEVKNYFRPEFINRIDEVVVFHALDEKHIAGIAKIQLGYLEKRLAQLEMGIVVEDSALAELAQAGFDPVFGARPLKRAIQQQIENPLAKAILEGKFGAKDTINVSCDPATGGIMRFSKA

SEQ ID NO: 32450 - protein, 336 aa, Dechloromonas aromatica RCB
MTYRIALNFEDGVTRFIDCKPTETVADAAYRQSINVPIDCRDGACGACKCSCESGSFRLGEYIDDALSADEAAQGMVLTCQMYPQGDCVVRVPASSDVCKTKQASFNATISDLRQLSDSTISLTLSGEALNKLAFLPGQYANLAVPGTPQHRAYSYSSMPKEGSVSFLIRNVPGGLMSGYLREQAKAGDSITMAGPLGSFYLREIKRPVLMLAGGTGLAPFLAMLDKVVADGGSAHAIHLIYGVNTDTDLVELDKLAAFAATLPNFTYALVVVAADSAQPKKGYVTQHIEPAQLNDGDVDIYLCGPPPMVEAVAQNLRERAIQPASFHYEKFAASV

SEQ ID NO: 32451 - protein, 557 aa, Dechloromonas aromatica RCB
MYKYDAIDRQLINQRVDQFRDQVRRWKAGELSDDEFRPLRLQNGLYIQRHAPMFRIAVPYGMLSSDQLRTLGQIAIKYDRGYGHFTTRHNLQLNWPKIEDVPDMMAELAKVEMHAIQTSGNCLRNITTDPFAGVAADEVIDPRPLAEILREWTTFHPEFAFLPRKFKIAISGTREDRAVTWFHDIGLHLQEQNGEVGFRVIVGGGLGRTPIRGQVVSEFLPWQHILTYCEAILRVYNRAGRRDNAYKARIKILVQATGIEAFSQQVEAEWAYMKDGPATLTQAEFDRVAAHFGAPDYAKQDEVTLPADQAFVKWVERNTHPHKVPGYAAVTLSLKKHGIAPGDITSEQMAAVADLADQYSFGELRISHEQNIILADVKKSDLHEVWQKAKAAGLATPNIGLLTGIICCPGGDFCDLANAKSIPIANAIQARFDDLDYLFDIGEIDLNISGCMNACGHHHVGHIGVLGVDKNDSEFYQVTLGGRQGNDAKLGKVIGPSFAAEEMPDVVDKIIKVYIENRHADERFLDTLDRIGIDPFKNRVYEGRAHGKAKAAQQEAA

SEQ ID NO: 32452 - protein, 772 aa, Dechloromonas aromatica RCB
MSEIDLKRFFLEQVRLFENFPADKVEEIVIKSRLATYEGNEAILETGDEGRFIGVMISGHAEISMTDNTGTRAVITQLGTGDVFGVMSLLTGDRIVADVIAGNRCFVLMIPQDVFNTHILTNPKAVGYLSRLLAERTRAMSVDLVTAQANAITRSTDPYALSLTTNQPGKVVVINVGISQIHFGIYDTEESGADVHGIIDHADQQVTLISVMVGPQQKTIEHAPFKLSDLFKVMQEATALLGEAFTFHPEDVTAIGHRVVHGGNKFSSSVVITPSVIAEIEELALFAPLHNPANVAGIRVAIKQFPNVPQVAVFDTAFHQTLPPYAYLYGLPYDLYKQHGIRRYGFHGTSHRYVSLKAAEVLKRPLGELEIVSCHLGIGASLCAIDHGRSVDTSMGMTPSDGLIMPSRSGSIDPAVMIHLMEQHKMTPDQLSTLINSESGLKGISGISSDIHDIETAASEGHHRALLAHKAYCYQVRKNIGAYVAAMGGIDVLAFTGDVGETSAAVRSLACQGLGYMGIKLDEEKNRNLGRIDGYAVISADDSPVTILVVANDDERLVAWETLRAIERNALLLAANAEDAPIPVEISAHHVHLSQGDVEKLFGPGHQLTPMHELSQPGQFACEEQVHLVGPKGRIAKVRVLGPTRKETQVEIAMTEQFKLGVQPPIRQSGDLTGTPGVTLEGPYGSTTIERGVICAQRHIHMTPEDAMRFHVRDNYVVRVRIEGERQLIFGDVVVRVNPGFRLAMHIDTDEGNAGNIQTGMLGYIEEIQNRH

SEQ ID NO: 32453 - protein, 393 aa, Dechloromonas aromatica RCB
MSRDVVVLSAVRSAIGAFGGALADFESTELAGIVMKEAIARSGVDPQAINYVTVGTTMPTDSRYAYVSRVASIQAGLSMDSVAMQVSRLCASGLQGIVTTAQNLMLGDADYGIGGGVEVMSKAAYLLPALRNGARMGDTKAIDSMVAVLTDPFGVGHMGITAENLAAKHGFSREDQDAFAVESQRRAAAAIDAGYFKSQIVPIVKQTRKGDVVFDTDEHLKRGTTMESLAKMKPAFKKDGTVTAGNASGINDGAAFFVLAAADVAAKAGHKARARIAGYAVAGVPNDVMGEGPIPATKAALKKAGLTLDQMDVIESNEAFAAQALSVSKVLGLDPAKTNPNGGAIALGHPVGCSGAFIATKALYELERIGGKYALVTMCIGGGQGIAVIFERA

SEQ ID NO: 32454 - protein, 198 aa, Dechloromonas aromatica RCB
MTIDLERLRASLLPEPLAGHFVQEDGVDDQPLTPAAVLFPIVLREAGHTVLLTQRTAHLRDHAGQISFPGGRVEEEDLSPIHTALRETEEEIGLPRERVEIVGFLPEYRTGTGFRVTPVVALVRPPFDLQPDPFEVAEIFEVPLSFLLDPANHQQHSLHYRGALRNYFAMPYGEYFIWGATAGMIRSLSERLGLLHGA

SEQ ID NO: 32455 - protein, 468 aa, Dechloromonas aromatica RCB
MSDIKKVVLAYSGGLDTSVILKWLQDVYKCEVVTFTADLGQGEELEPARAKALKAGIKPKNIYIDDVREEFVRDFVFPMFRANTVYEGEYLLGTSIARPLIAKRLIEIVNETGADAICHGATGKGNDQVRFELGAYALKPGIKVIAPWREWDLMSREKLMAYAEKHGIEIDMKHKKGGSPYSMDANLLHISYEGRHLEDPAAEAEESMWRWTVSPEKAPNKAEYLDLEFAKGDVVAVNGKKLKAHEVLALLNELGGKHGIGRLDLVENRYVGMKSRGCYETPGGTILLRAHRAIESVTLDREVAHLKDDLMPRYASLVYNGYWWSPERKALQVLIDHTQQTVNGVVRLKLYKGNVIVVGRDSKTDSLFDSTIATFEDDAGAYDQRDAGGFIKLNALRLRIAANLAGRKAGKPVAKKAAAKPVTKAVPKAVAKPVTKAVAKAAEKPVAAKATAKPVKAPVKKPIAKKKG

SEQ ID NO: 32456 - protein, 566 aa, Dechloromonas aromatica RCB
MMISGAEIVIRCLQEEKVEYVFGYPGGSVLHIYDALFKQDQVKHILVRHEQAAVHAADAFSRSSQRVGVALVTSGPGVTNTVTGIATAYMDSIPMVVICGQVPTQYIGQDAFQECDTVGITRPCVKHNFLVKDVKDLALTIKKAFHIAATGRPGPVVVDVPKDITAQMCEFDYPKTVQMRSYNPVVKGHLGQIKKAVQILQEAKRPIIYTGGGVILSDAAEKLTQLARKLNFPVTNTLMGLGGYPATDRQFVGMLGMHGTFEANNAMHYADVILAIGARFDDRVIGNPDHFGSEKRRVIHIDIDPSSISKRVKVDVPIVGNVTDVLDEILKLLDGGFKTDPEVADWWKQIDEWRGRDSLRYKQGEHIMPQYVVEKLYEVTGGDAFITSDVGQHQMFAAQYYKFDKPRRWINSGGLGTMGVGLPYGMGVLLANPGAQVACVTGEGSIQMCIQEMSTCKQYELPVKIINLNNGMLGMVRQWQEMFYSKRYSQSYVTSLPDFVKLAEAYGHVGMRIEKPEDVEPALRKAFTEHKNDLVFMDFIIDPGANVFPMVAAGKGLTEMILAEDL

SEQ ID NO: 32457 - protein, 72 aa, Dechloromonas aromatica RCB
MKVANMAIGTVKWFNDSKGFGFITPDDGSEDLFAHFSAINMNGFKTLKEGQKVSFDVVQGPKGKQASNIQSA

SEQ ID NO: 32458 - protein, 380 aa, Dechloromonas aromatica RCB
MPLTLAVARESTDGESRTALSPETAKKFAALGARLRMEQSSGIQSHFLDSDYTDIDFLPGPSEAYAQADLILRVTPPSLGEIAALPEGSVLIGLLKPFESKERLAALNAKKITAFSLELLPRISRAQSMDALSSQGACAGYQCGLIAAARCTKFFPMLTTAAGTIRPARVLIIGAGVAGLQAIATCKRLGAMVEAYDVRAAAKEQIESLGAKFVDTGVSADGTGGYARELTLDEKAAQVEKLTKVIAMADVVITTAAIPGKKAPVIITREMVGRMKYGAIIVDMAAESGGNCELTQPGEHVIANDVNIHGPLNLPSRMPTHASELYAKNLYNFLSPWIKDGSLQFDWSDEVLAGTVLCRDGATVHPVVKQVMGEPTGGNA

SEQ ID NO: 32459 - protein, 127 aa, Dechloromonas aromatica RCB
MQRTMLKSKLHRVTATHADLHYEGSCAIDEDLLEAANIKEYEQIDIWNVNNGERFTTYAIRAERGSGVISVNGSAARRAAPGDILIIATFAVYNEVELAKHEPDLIYVDTQNRIVRRGHKIPVQAAA

SEQ ID NO: 32460 - protein, 764 aa, Dechloromonas aromatica RCB
MSAKPLNSASTELALPGHWTAAIEPRLTSGETTQAWLEIDLDNRLKFSSGLVLVTNRRLLALPAGETDWQEWPLRGGLTLNHHDHAGVGALELIDEQGQLATWRYTLAKNLAALRVISEFDLNRDSIVSGQPVQRTTEDCCPKCKAPLPPGEDECPICNREATVAPSTWTLFRLWRFARPYRWQLLTGFLLTLASTAAQLVPPYLTMPLMDNVLIPFQNGKPIDWPLVSMYLGGLFGAAMLAWVLGWIRTYILSLVSERMGRDLRTTTYEHLMGLSLEYFGGKRTGDLMARIGNETDRINIFLSLDLLNFATDVLMITMTAVILFSINPWLALVTLLPLPIIGWMIHFVREKLRTGFEKIDRVWAEVTNVLADTIPGIRVVKAFAQEKRESERFRAANEHNLQMNDKLNKTWSLFTPTVTLLTEVGLLVVWVFGIWQISKGNSSVGVLTAFLAYIGRFYTRLDSMSRIVSATQRAASSTKRIFDILDHVSSVPEPTSPVHLTGVTGQIELKKAGFRYGTRAVTRDVDLIIQPGEMIGLVGHSGSGKSTLVNLICRFYDVSEGQVLIDGVDVRSVPVAEFRSHIGLVLQEPFLFFGTIADNIAYGKPNATRQEIIAAARAAHAHEFILRLQHGYDSLVGERGQGLSGGERQRISIARALLIDPRILILDEATSAVDTETEKEIQKALDNLVKGRTTIAIAHRLSTLRKADRLVVMDRGKIVEVGNHDELMAKEGHYFKLYMAQARNVDTEPMLPRTTSLPKTHAE

SEQ ID NO: 32461 - protein, 507 aa, Dechloromonas aromatica RCB
MSEINTLAGENAIIIAADAVPEITFADLGLAPELLRAVLDEGYTKPTPIQAQAIPLVISGKDIMGGAQTGTGKTAAFTLPILQRILPFASSSPSPAKHPVRALILAPTRELAMQVFESVKTYSKHTPIRAMCAYGGVDIRPQIAELKKGVEILVATPGRLLDHVENKSVSFNSVQALVLDEADRMLDMGFVPDVTRILNMLPAQRQSLLFSATFSEEIKKLADTMLKSPILIEVARRNQVSDTITHRVHPVSEYGKRGLLTKLLKSGEIRQCIVFCRTKQGCSRLTRELQRAGIKADAIHGDKSQLERIKALEAFKGGETDALIATDVAARGLDVDDLPYVINYELPHTPEDYVHRIGRTGRAGKKGNAISLVSAHEVCYLVDIEKLIKRPIEQVEVAGFEPEPEYEYPPGNKRKRSAAPPAKAPVAHRPERPERSERSERPDRGDRDRRPPRRNPMIAADGFDFSKPYEDNSPRGEVPDSPQAPSKVDPHKPKRVVAALLGGLGRK

SEQ ID NO: 32462 - protein, 385 aa, Dechloromonas aromatica RCB
MDTPIRIDSRFPNMGTTIFTVMSRLAAECGAVNLSQGFPDFQAEPALFDAMHRHMLAGRNQYAPMAGLPELRQAIADKVAALYGTRFDVESEVTVTAGATQAIFTAIAAFVRPGDEVLVFEPVYDSYVPAIETVGGTAVYAQLKFPDYTPDWAQVAGLISPKTRMIIVNSPHNPTGSLLTAADLDKLAELVRGTDIVILSDEVYEHILFDGEQHASLCGHPELAVRTIVVSSFGKTYHITGWKIGYVVGPAALMAEFRKVHQFNVFTVHAPSQLAIAEYMQDASRHLGLAAFYQEKRDFFRQLMAATPFELLPCRGTYFQLARYDRISDLPDRAFAEWMAREVGVAVIPVSVFNADGRDDKVVRFCFAKREETLRAAAERLCKAL

SEQ ID NO: 32463 - protein, 284 aa, Dechloromonas aromatica RCB
MKVGFIGLGVMGRPMALHLQRAGHELAVWARRPESIGDLPARVCATPAELGRCCEVVFTVITSSADVEAVALGREGLCEGMVAGSVLVDCSTIAPKSARYVGARLAEKGIHMLDAPVSGGAQGAIDATLAIMAGGEAEVLERVRPLLNCLGKRIVHVGPNGAGQVAKACNQMIMVAAIEAAAEAMRLATASGVDCAKVRQALAGGSAASRVLDVMGERMVRRDFSAGIEARLHHKDFGLVLEAARQSGVPVPLAAVVDQQLNALMAQGWGRDDTSSLLRVLEKL

SEQ ID NO: 32464 - protein, 287 aa, Dechloromonas aromatica RCB
MKIGFIGLGIMGRPMALNLIKGGHQVTVWARRAESMQPLLDAGAKGAASPAEAARGNELVISMVADAPDVAEVMRGVASAGESGLVAVDMSTIAPAAARRIGEDLAAAGIDFIDAPVSGGEVGAIAGSLSIMAGGSDAAFAKAKPAFECMGKNIVHVGASGAGQVAKAANQIVTGMGVLAVAEAFAFAAKNGVDSAKVREALLGGFAYSKILENHGQRMLDRNFKPGFKSWMHEKDLNIVMQTAHELGLCLPGSAATAQMFNAMVGSGLGEEDSIAVLKLLERLSGQ

SEQ ID NO: 32465 - protein, 68 aa, Dechloromonas aromatica RCB
MANGTVKWFNDSKGFGFISPSEGGEDLFAHFSAIQGNGFKTLAENQKVTFDVVNGPKGKQAANIRPAE

SEQ ID NO: 32466 - protein, 332 aa, Dechloromonas aromatica RCB
MNPSPKPHRFSPERALELGRQTLSIEAAAVEALQGRINGDFAKAVELILNSHGRLIVSGMGKSGHIARKIAATMASTGTPAYFVHPAEASHGDLGMITRDDVLLALSNSGESGELLSILPALKRQGAKIISMTGVPTSTLAREADIHLDAGVEQEACPHNLAPTASTTAALALGDALAVALLDARGFGPEDFARSHPGGSLGRRLLTHVRDVMRADDKVPAVTPATPITDAIIAMSRGGLGLVAITDPANIVLGIFTDGDLRRAFEKRIDLQQGDIASVMHAAPRTIGPDRLAVEAVEMMERLRINALLVVDAENHLIGALNMHDLFTAKVI

SEQ ID NO: 32467 - protein, 601 aa, Dechloromonas aromatica RCB
MSSPNQPANTPAPAANFIKNIVEADLAAGKHAQRHWAGHPGTAADHAAAPLDPAKLRTRFPPEPNGYLHFGHAKSILLNFGLAEQYGGRCHLRFDDTNPEKEDQEYVDSIVDAVKWLGCSWEKDGEANLYYASNYFDWMLQCAEALIAAGHAYVDSQNAEEMRANRGTLTQPGKNSPFRDRSVAENMDLFKRMQAGEFADGAHILRARIDMAAPNINLRDPAIYRIRHATHHNTGDKYCVYPMYTFAHPIEDALENITHSICTLEFEDQRPFYDWLLERLAEAGLLQRPLPQQIEFSRLNLTYVVLSKRKLIQLVEEKHVTGWDDPRMPTLVGARRRGYSAEGFRLFADRIGVSKNDSLIDYVLFEDAMREVMNESDLRRIAVLDPVKLIIDNYPDGQVEECFAPNHPLHPELGQRSIPFSRELWIEGEDFMEVPSKGFRRLFPGNMARLRYGYVVECTGCDKDENGKVIAVHCNYLPETKSGTPGADSVKVKGNLHWVSAAQSYQAEIRLYERLFKVPAPGARREGDAPDLERDFLDDMNTDSAKTITAQLEPCLRDAKPEERFQFERHGYFVADRVDSKPGAPVFNRAVTLKDSWGKAS

SEQ ID NO: 32468 - protein, 103 aa, Dechloromonas aromatica RCB
MYAVIKTGGKQYRVSAGQKLKVEQIPADVGAEVTLDQILMVGEGESVKIGAPFLAGATVKCTVVSHGRHDKVKIFKMRRRKHYQKRQGHRQNYTELRIDTIAA

SEQ ID NO: 32469 - protein, 363 aa, Dechloromonas aromatica RCB
MKFIDEAKIYIKAGDGGNGAATFRREKYIPMGGPNGGDGGRGGSIYAVADRNINTLVDYRYTRKFIGKRGENGGGADQYGAGGDDIILRMPVGTVIYNLNTEEIIADLSEHDQKVMIAKGGKGGLGNIHFKSSTNRAPRQKTNGEQGEELELRLELRVLADVGLLGLPNAGKSTLIRAISSARPKVADYPFTTLHPNLGVVRVDDEKSFVMADVPGLIEGAADGAGLGIRFLKHLQRTRILLHLVDIAPIDPDSDPVRDAKAIVGELIKHDPDLANKPRWLVLNKLDLIPEEDREAAVKNFIKAYKKATKYDGPVFPIAAINGEGTKPLIYAISEALEQMARPEIGDLDDNDEDSDEIIRDTE

SEQ ID NO: 32470 - protein, 183 aa, Dechloromonas aromatica RCB
MPTKLVILDRDGVINFDSAQFIKNPAEWKPIPGSLEAIARLSQSGYKVVVATNQSGVGRGLFDMETLNQIHTKMHKAVVALGGRIDAIFYCPHAADSKCDCRKPKPGMFKRISETLNVDLKGVPAIGDSLRDLQACAAAGCLPMLVLTGKGEKTKTEGNLPEGTLEFKDLSAAVDSILQETTP

SEQ ID NO: 32471 - protein, 1211 aa, Dechloromonas aromatica RCB
MAPPVIDRNNPWPWLDPFTEKAEAFFNGRDDDSAALQRCVLAGVATVLFGKSGLGKTSLLQAGLFPRLRKSGLLPVLVRLEHGSASPTAAAQIRTCLHKECTAYGLTMPGNPQFAPQLEKPEDRLWLDLHTNPVGLRDAHGQTWQVVFVLDQFEEIFTLGGQDSERQRLDFGALGDLVENRIPRALENAISVDEDLLDELRLDVQPYRVVFSLREDYLPNLERWCDRIPRLGPNRYRLLPMQEAQALDAIRLTGGDLVSPQDADRIVRFVSSQQEGPAVGMASGESAEVSIEPALLSLLCSGLNLERQKAGAAHLDASNLEQSGGRIMERFYDDATLDVAPAAIAFVEDELITPDGVRLFYPLKSILQNPGITKADIDTLIERRLLRRQPFTEGDRIELVHDRLAAVARQRRRNRESVAAQQRRLDEARREAAAKEANVRADLESKARESETRARLRAEKDASSQRRLQGILKFVVAALVVLLCLAGASAWFAREQSALARAAEGKAKRSAEEASIRRLVAEGQAMTTGAQSGGSILGILQLLAAHRLSDEAYPQASPGALGALRAEFMRSARLLHLSESDEAITTLDLSPDGLRIVTGSRNGSLQLWEAASGAPIGKPLIGHSSYVNSVAFSPDGKAIVSASRDHTLRLWEAGTGNPLGKPLQSDSAVCSVAFSPLGQRIVAGGLDGNLRLWDAATGQMLGEPLKGHSQRVCAVAFSPDGQHIVSGGDDKTLRLWNVSSGQPSGEVLKGHTEAVYSVAYSPNGLRIVSGSSDATLRLWDARTGKPIGDPLKRHRKAILGVAFSPDGRYIVSGSGDYTVRLWETETQKPAGDSLRGHTDEITGVLFSRDGERVVSGSYDKTLRLWTVAADDPTSVVLNGSDKALKSVAFSPDGTRLVWAGEDQDVHVLDLTTGKTTGKPFSGHREAVYSVAVSPDSKRIASGSSDMSVRLWDAATGALLVPPLQGHLGTVYGVAFSPDGARLVSGSADGTLRQWNAGSGAPIGSPMSGEGGSVSSVAFSRDGRRIVSASEDGKLRLWDTATGKPIGKPLVGHLKAVNSVAFSRDGRLIVSASDDMSLRLWDANSGAPIGKPLTGHTHYVNSVAFSPDGRYVVSGSKDQTLRLWDVRTGTPVGAPLEGHSDVIFGVTFSPDGRQVASVSGDSSLRRWPVLESWAERLCAKLGRNMSDSEWQRLVSPDIPYARQCPGLPKPGD

SEQ ID NO: 32472 - protein, 106 aa, Dechloromonas aromatica RCB
MSDVQQRIHATVTGNPVVLYMKGDARFPQCGFSATAVQILKVCGVNDFVTVNVLADEEIRNGVKEYANWPTIPQLYIKGEFVGGCDIMKEMYQTGELQQMLEGIAA

SEQ ID NO: 32473 - protein, 316 aa, Dechloromonas aromatica RCB
MAYNSLMVFTGNANPKLAADVAKQLNVDLGRANVGRFSDGEVSVELQEHVRGRDIFVLQSTCAPTNDNLMELLVIVDSLKRASAGRITATIPYFGYARQDRRSRSSRVPIAAKLVANMLVASGVDRVLTMDLHAEQIQGFFDIPVDNIYALPILLDDIRKQNYENPLVVSPDHGGVVRARSLAKRLECDLAIIDKRRPKANVSEVMNIIGEVDGRTCIIMDDMVDTAGTLCKAATALKANGAKKVVAYCTHPVLSGPAIERVNSSDLDALVVTDTIPLRDDAAASPRIRQLSVAEIMAETIRRISNDDSVSSLFID

SEQ ID NO: 32474 - protein, 353 aa, Dechloromonas aromatica RCB
MAYELTIEPLGQTIEVEDGQTILDAALRAGIYLPHACCHGLCATCKVQVTDGEVDQGEASTFALMDFEREEGKCLACCARLESDVVIEAEIEDDPDSENLPVKDYSGEVVRIETLTPTIKGIWLKLDRPMKFQAGQYVNLEVDALGGQTRAFSLANSPQTGDIVELNVRIVPGGQVTTWLHEQLAVGDRLKFTGPYGRFFVKKSANVPLIFMAGGSGLSSPKSMIEDLLSEGCSLPITLVYGQRSRAELYYDAEFRELAAKYPNFNYVPSLSDEPAGSDWSGSRGFVHEAAKAHFDNDFRGHKAYLCGPPAMIEACITTLIQGRLFERDIYMEKFFSAADASQQLKSPLFKNI

SEQ ID NO: 32475 - protein, 121 aa, Dechloromonas aromatica RCB
MPVKNILVVDDSPTERFFTVDVLTKAGYQVSTAETGEEGIAKAKATKPDLILMDVVMPGLNGYQATRTLTRDEETKGIPIIVCTSKGQETDKIWGLRQGAIDYLVKPLNPEELLQRIAALP

SEQ ID NO: 32476 - protein, 758 aa, Dechloromonas aromatica RCB
MEKDLREAALEYHRWPTPGKISVRPTKGLTNQRDLALAYSPGVAAACDAIVEDPATAAWYTSRANLVGVVTNGTAVLGLGNIGPLASKPVMEGKGCLFKKFAGIDVFDIELAENDPDKLIDMIAALEPTLGGINLEDIKAPECFYIEEKLKARMNIPVFHDDQHGTAIISGAAMLNGLKVVGKKIDQVKVVVSGAGAAAISCVNLWCELGVKRENITICDSKGVIYVGRPGGMDETKARYAQNTDKRTLGEALVGADIFLGLSAAGVVKQDMVKAMADKPMVFALANPTPEIMPELVKEVRPDAIIATGRSDYVNQVNNVLCFPFIFRGALDVGATRITEEMKMASVRAIAELAEAEVTDEVAMAYPGADLSFGPEYLIPKPFDPRLIVKIAPAVAQAAMDSGVATRPITDWAAYRAKLSEFVYHTGVGMRAIFQAARQAKGKRIIFAEGEDERVLRAAQVVIEEKFARPILIGRPEVIAHRLEKAKLRIQPGVDFDVVNPESDERYRECWTAYHKAMARQGITPAIAKEAMRRKPTVIGAMLLKLGYADGMICGMTGQYSHHLGVISQIIGKRAGVSTLAAMNYLMLPGRSLFICDTHVNENPNAQEIAEMTLMAAEQVKRFGSHPKVALLSHSNFGSANSESARKMSIAAGLVSAMSAGELEVDGEMHGDSALNEDLRREANPDSPLKGEANLLVMPNIDAANISYNLIKMTGGEGVTIGPILLGAARPAHVLTSTATVRRLVNMTALAVVESMER

SEQ ID NO: 32477 - protein, 547 aa, Dechloromonas aromatica RCB
MDTRRLILVLIFTFSSFMLWENWQKYNQPKPADAVAAAPVSGAAPTPSAALQAKAAPGTPPVATPVSTAETFSITTDLLKATISAQGGDLVSLELLNYKEHDDIQKNFDLFDAKHQYLAQAGLIGEGLPTHRTTFKHVGGATKLADGTDELKVRLESADQNGIKVAKILTFKRGSYLIDIAWEVANGSDKAIAPHAYYQLQRDDLAPAGETKMVSTFTGPAVFTDADKYQKVTFEHIADNKAKFTKTADNGWLAMVQHYFVSAWVPKDKTQREFYMRKVEGSNVFQAGVIVPVAEIAPGAKGEASVSLYAGPQMQSALKQVAPGLDLVVDYGWLTVVAAPIFWALEAIHKLVGNWGWAIVVLTIMIKAVFFPLSAASYKSMAKMKMLTPRLAQLKERFGDDKQRLNQEMMKLYQTEKVNPLGGCLPILVQIPVFIALYWVLLGAVEMRGAPWILWIKDLASADPYYILPVIMMVSMFVQTKLNPTPPDPIQAKVMMMMPLIFGFMFFWFPAGLVLYWVVNNVLSIAQQWQITRLIDAGGKAANDAKA

SEQ ID NO: 32478 - protein, 331 aa, Xanthobacter flavus
MARKTIVTNWVHPEVLDLLSTRGPAEANTTREPWPRDEIIRRAHGADAMLAFMTDHVDAAFLDACPELKIVACALKGADNFDMEACRARKVAVTIVPDLLTAPTAELAVGLMITLGRNLLAGDRLIRERPFAGWRPVLYGTGLDGAEVGIVGMGAVGQAIAHRLRPFRCRLSYCDARPLSPAAEDAQGLLRRDLADLVARSDYLVLALPLTPASRHLIDAAALAGMKPGALLINPARGSLVDEAAVADALEAGHLGGYAADVFETEDWARPDRPAAIEARLLAHPRTVLTPHIGSAVDSVRRDIALAAARDILRHLDGLQQDPPSRDRSAA

SEQ ID NO: 32479 - protein, 450 aa, Solanum lycopersicum
MIATWRKKRTEKRVTKRGFMKKTNMELVIPSQFTCPISLDLMKDPVTLSTGITYDRENIEKWINEGGNQTCPITNQELKSYGNGIVDPVLIPNHNIRKMIQQWCVENKEHGIDRIPTPRIPISSSDVSELLAKITNSSKLEMEKSSSCEELVTSVKNLASESDRNKCCFVTNGIGKVLSSAFLELSKGKNAKNASTEEVILSTLTLFLPLDVKSKTILGSISSLRSIAWFLKNGSLSSRRNAVVVLREIMKLEEQEKVEILLNIEGALEGLVKLVKEPICPNTTKASLLTIYYMVNNSSSQSSRSRFVDVGLVEMLIEILVNCDKSICEKALGVLDGILRYEEGVKRASSYALSVPVLVKKLLRVSDLATEFSVSILWKILCKNENNGDCGILVEALQVGAFQKLLVILQVGCSETTKEKASELLKLLNVHRDRAECVDSLDFKSLKRTF

SEQ ID NO: 32480 - protein, 334 aa, Nitrosomonas sp. TK794
  misc_feature (302)..(302): Xaa can be any naturally occurring amino acid
  misc_feature (327)..(327): Xaa can be any naturally occurring amino acid
  unsure (1)..(334): unsure at all Xaa locations
MGIKNLYKRGMMGLCGVAVYAMAALTMTVTLDVSTVAAHGERSQEPFLRMRTVQWYDIKWGPEVTKVNENAQITGKFHLAEDWPRAAARPDFAFFNVGSPSSVYVRLSTKINGHPWFISGPLQIGRDYAFEVQLRARIPGRHHMHAMLNVKDAGPIAGPGAWMNVTGSWDDFTNPLKLLTGETIDSETFNLSNGIFWHILWMSIGIFWIGIFVARPMFLPRSRVLLAYGDDLLLDPMDKKITWVLAILTLAIVWGGYRYTETKHPYTVPIQAGQSKVAPLPVAPNPVAIKITDANYDVPGRXLRVSMEVTNNGDTPVTFGEFTTAGXRFVNSTG

SEQ ID NO: 32481 - protein, 713 aa, Vigna radiata
MASVSLSATDTTLQETKKQSAKKAKNQSPTIAEKKSASKLLSDPNTPDPDQDGVSGKLQKKAKKRKASDIEAMAATNDADEDTSSELVEPESSREDDHKKKKKKKKAKSEEQPLVMEAEEKEEKKEDPNAVSKLRISEPLRLKLKEKGIESLFPIQAMTFDLVLDGSDLVGRARTGQGKTLAFVLPILESLINGPTKSSRKTGYGRTPSVLVLLPTRELACRVHADFEVYGGAMGLSSCCLYGGAPYNTQEIKLRRGVDIVIGTPGRVKDHIERGNIDLSQLKFRVLDEADEMLRMGFVEDVELILGKVENVNKVQTLLFSATLPDWVKHIAAQFLKPDKKTADLVGNTKMKASTNVRHIVLPCSAPARSQLIPDIIRCYSSGGRTIIFTETKESASQLAGLLPGARALHGDIQQAQREVTLFGFRSGKFMTLVATNVAARGLDINDVQLIIQCEFPREVESYIHRSGRTGRAGNTGVAGTLYDPKRSNISKIERESGVKFEHISAPRPDDIAKAVGGEAAEMITQVSDSVIPAFKETAEELLKSSGLTVVELLAKALAKAVGYTEIKQRSLLTSMENYVTLLLEIGKPIFTPSFAYGILRRFLPEEKVEAVKGLSLTADGNGAVFDVPAEDLNTYLSGQENAANVSLEVLKALPRLQQRDQSRGGRFGDGGGQGGGNRFGRGGGGRNGRFSNDRFSNGGGRGGRGNWGGKRW

SEQ ID NO: 32482 - protein, 423 aa, Thermobifida fusca YX
MALIVQKYGGSSVADADAIKRVAERIVAQKKAGYDVVVVVSAMGDTTDELLDLAKQVSPLPPGRELDMLLTAGERISMALVAMAIGNLGYEARSFTGSQAGVITTSLHGNAKIIDVTPGRIRDALAEGAICIVAGFQGVSQDSKDITTLGRGGSDTTAVALAAALNADLCEIYTDVDGVFTADPRIVPSARRIPQISYEEMLEMAASGAKILHLRCVEYARRYNIPLHVRSSFSQKPGTWVVSEVEETEGMEQPIISGVAHDRSEAKITVVGVPDRVGEAAAIFKALADAEINVDMIVQNVSAASTSRTDISFTLPADSGQNALAALKKIQDKVGFESLLYNDRIGKVSLIGAGMRSYPGVTARFFDAVAREGINIEMISTSEIRISIVVAQDDVDAAVAAAHREFQLDADQVEAVVYGGTGR

SEQ ID NO: 32483 - protein, 324 aa, Thermobifida fusca YX
MREGGNPVSTPIGPTDSSLVPRFAGPATFARLPRTDEVAKTDIAVVGIPFDSGVSYRPGARFGPAAIREASRLLRPYNPGLDVSPFAEVQVADGGDIAVNPFAIKEAIATVEASASELLSQGTRLVTLGGDHTIALPLLRAVHRVHGPVALLHFDAHLDTWDTYFGEPYTHGTPFRRAVEEGILDTEALTHVGIRGPLYGKKDLEDDRRFGFGIVTAADVMRRGVDEIADMVRQRIGNRPLYVSVDIDVLDPAHAPGTGTPEAGGLTSRELLELLRGLASCNLVGADVVEVSPAYDHAQITATAAAHVAYDLVSLLALTAKKDR

SEQ ID NO: 32484 - protein, 228 aa, Thermobifida fusca YX
MVDETNEVLSKAPLFEALDEEGAAALRSSITEVRLGRGQTLFSEGDEGDRLYVMLSGKVKLTRKSADGRENLLAVLGPGEMLGELSLFDPGPRTASAVAVTDAVLAGLGHDDLRPFIMRQPEVAVHLLKALATRLRRTNDVVADLVFTDVPGRVAKALLDLAERFGKQSEDGLHVHHDLTQEELAQFVGASRETVNKALAEFALRGWLRIEAKAVVLLDVERLRRRAR

SEQ ID NO: 32485 - protein, 602 aa, Thermobifida fusca YX
MHRACRGGGATPRQDVVVRPTHGSSDTTTNSADNQDLLWEPPPVLEAERPPRTDWAVFLTAAAFTLAFVAWGAISDETLAQVAENLLAGLMRYGGWAFVLVAGVFVVFALWLAFSKYGQIPLGREGEEPQYTTVSWVAMMFATGMGIGLVFYGVAEPLAHYVTPPPGTDAASESQRTLTAIATTLFHWTLYPWGIYAVVGLAIAYTTFRRGHSQLISAAFIPLFGERAAKGPLGKAVDVIAILATLFGSACSLGLGALQIAGGFQTLGWTSQTTFGLLFLIIAAIMACYLVSAVSGIARGIKWLSNTNMVMAVLLLVFVLVTGPTVYILDLVPGAVATFFQDFFEMAGRTQAVGGNTAEWLSTWTVFYWAWWISWTPFVGLFIAKISRGRTIREFVAGVIVVPSVVSLIWFVIFGCTAIHFQQSGVDLAASNQIEAQFYGMLQNLPWSGVVNVVLAVLVAIFFITGADSASIVMGTLTQGGVDKPRLAMTVLWGMLIAAVAAIMLLVGEGGSTAIDGLQNITILGAAPWAIVMLLLCVALLKGLRRDPLAVRERKARELMDEAVITGARTYGESGFQFPVAPARREEAPPPPRKGDGDASET

SEQ ID NO: 32486 - protein, 241 aa, Thermobifida fusca YX
MFGLFSAFLAAAHALTMAVHSTLAVFLGPVSAAATIAFLTLAARVLTLPLSYLQVRGEKIRARLAPQLYALRERYGHNPERLVAKTRELYAREGASPFAGCLPALAQAPMFTLLYTLFTVPEIDGSANALLALPFAGTPLGSTLPRILASGDLGALPVFAALLAALAAVAWANRRWLTLPALSAAPAAGQPTPVPAFVTYLPFLTVVIAAFVPLASGIYLVTSTTWTVVERLTLRRLVRVD

SEQ ID NO: 32487 - protein, 613 aa, Thermobifida fusca YX
MARAVGIDLGTTNSVVAVLEGGEPTVIANAEGARTTPSVVAFAKNGEVLVGEIAKRQAVTNVERTIRSVKRHMGTDWKTHIDGKDFTPQQISAFVLQKLKRDAEAYLGEEVTDAVITVPAYFSDAERQATKDAGKIAGLNVLRIINEPTSAALAYHLEKEGEATILVFDLGGGTFDVSLLDVGDGVVEVKATHGDNHLGGDDWDQAVVDWLVERFKSSNGIDLSKDKMAMQRLREAAEKAKIELSSSTETSINLPYITASAEGPLHLDEKLTRAEFQRLTSHLLERTKGPFFQVIKDAGISVDQIDHVVLVGGSTRMPAVVDLVRELTGGKEPNKGVNPDEVVAVGAALQAGVLKGDVKDVLLLDVTPLSLGIETKGGVFTKLIERNTAIPTKRSEIFTTAEDNQPSVQIQVYQGEREIAKYNKKLGVFDLTGIPPAPRGVPQIEVTFDIDANGIVNVTAKDLGTGKEQSVTITGGSALPKEDIERMIREAEEYAEQDRKRREEAETRNNAESLVYQTEKVISENEDKIPEDVKNETKEALDGLKKALEGSDIEAIRSASEKVALASQKIGSAIYSQSQQASGAAAGGQQNAEDAEVVDAEIVDEEPKREGNS

SEQ ID NO: 32488 - protein, 867 aa, Thermobifida fusca YX
MDYKLTRKSQEALSAAIRRATADGNPQVEPVHLLSALIGQAEGVVRPLLKEVGADPGRLSTKVEEEIARLPRASGSTVNAPASSRQLIISLNTAAQRAKQMEDEYVSTEHLLVGLAADGGTAATLLREAGATPEALLDAFSRVRGSARVTSETPEDTYQALEKYGVDLTQRAREGKLDPVIGRDAEIRRVIQVLSRRTKNNPVLIGEPGVGKTAVVEGLAQRIVAGDVPESLRDKRLISLDLPAMVAGAKYRGEFEERLKAVLNEIKQSEGQIITFIDELHTVVGAGAAEGAMDAGNMLKPMLARGELRMVGATTLDEYRERIEKDPALERRFQQVMVNEPSAADTIAILRGLKGRYEAHHKVQIADSALVAAATLSDRYITARFLPDKAIDLIDEAASRLRMEIDSQPVEIDELQRVVDRLKMEEMALSKESDAASKQRLERLRADLADKEEQLNALIARWEQEKAGLNRVGELKEKLDELRGQAERAQRDGDFEEASRLMYGEIPQLERQLEEALSEEDSAEHATMVKEEVGADDVADVVSSWTGIPVGRLMEGESAKLLRMEEEIGKRLIGQRRAVAAVSDAVRRARAGISDPDRPTGSFLFLGPTGVGKTELAKALAEFLFDDERAIVRLDMSEYSEKHSVARLVGAPPGYVGYEEGGQLTEAVRRRPYTVVLLDEVEKAHIEVFDTLLQVLDDGRLTDGQGRQVDFRNTLLILTSNLGSQFLIDPTLDDAQRHEKVMQVVRNTFKPEFLNRLDDVIVFDALSTDDLTKIVDLQVDRLARRLADRRLKLEVTPAAREWLALAGYDPVYGARPLRRLVQTAIGDPLARELLAGNLVEGDTVRVDVDESKDSLTVGPVKEPASAA

SEQ ID NO: 32489 - protein, 479 aa, Thermobifida fusca YX
MDKAQILVASNRGPVSFSIGDDGAVKSRRGGGGLVSGLSSVATEIETLWVCAALSDADRKAAAAAPEGRLDKAGYDVGGASVRMLNIPADVFNNAYNSVANSTLWFVHHMLYDTPNKPSFGSRFRAEWEDYRAYNSAFAEALLTGADEGAKVAVQDYHLALVPKMLRVRRPDLRIAHFSHTPWAPPEYFRMLPADIGRELLEGMLGADHLGFLSVRWADAFLRCCEVFLRAPVNWGTRTVEHGGRVIRVGVHGLGADAQGLRERAAAEDVARWRERLRERVGDRKLIVRVDRTELSKNIVRGLEAFGELLRKRPEWRNRVTHLAFAYPSRSGVAEYRAYTESVRATAEAINAEFGTDDWTPVVLEVNDDYPRSLASYQIADVLLVNPIRDGMNLVAKEGPVLSLNGVALVLSTEAGAADDLGADAILVNPYDVSETAEALHRALTMDEEERRQRTERLAEAAAALPPQRWFTDQLRALD

SEQ ID NO: 32490 - protein, 67 aa, Thermobifida fusca YX
MAQGTVKWFNSEKGFGFIAVDGGGPDVFVHYSAIAGTGFRNLEENQAVEFEIVPGPKGPQAADVRAL

SEQ ID NO: 32491 - protein, 322 aa, Thermobifida fusca YX
MTGMKAAGQKKLMLFSGRTHPDLAAEVAVELGIETVPTRFQDFANGEIFVRYLESVRGCDAFVIQCHSDPINKSIMEQLIMVDALKRASAKRITVVTPFFGYARQDKKHRGREPISARLITDLFKAAGADRLMAVDLHTDQIQGFFDGPVDHLFALPLLADYVAANVDLSNTTVVSPDSGRVRTADRWADRLGTPLAIVHKRRDPDVAHEVRVHEVVGEVRGRTCVLVDDMIDTAGTIVKAADALFEQGAAKVIAVATHGVLSGPAVDRLKDSRISEVVITNSLPVSKDRQFDKLTQLSIAPLLARAINEVFSDGSVTSLFE

SEQ ID NO: 32492 - protein, 394 aa, Thermobifida fusca YX
MLSTQSADIVRATLPVVGAHLDEITSRFYSTMFSERPELLDGLFNRGNQANGEQRRALAGSIAGFASALLANPDERPDALLARIAHKHAAVAVTDDQYVIVHKYLFGAIADVLGDAATPEVIAAWDEVYWLMGGALIALEARLYAEKNADNGRTWREWTIVDRREETPDVFSLVLRPSDGGPLPEARPGQYVSVLHRMPDGIRQIRQYSISGGDEHTRRITIKRVRGTEHTPEGEMSALLYATAKAGDTLTVSAPFGDVVLTDSDRPLVFATAGIGCTPIVGMLNYLAATGATRRILALHADRSRAEHALWQETSTLIARLPHAQYVVWYEEGDGGLPGQMDLTGLEIPADAEVYLCGPLPFMREIRTQFLAAGVPAKDIHYEVFGPDLWLPAD

SEQ ID NO: 32493 - protein, 503 aa, Thermobifida fusca YX
MEASTLTTVRSTHSSDQTTFRDLGVIDDIADALEAEGIVAPFPIQSMALPLALTGADIIGQARTGTGKTFAFGLPLLQRVHTQPGSAKRPRALVVVPTRELAIQVAADLATASKRIDVRIATVYGGRAYEPQISALRKGVDIVVGTPGRLLDLVKQRHLILSEVTALVLDEADKMLDLGFLPDIERILAKTPDQRQTMLFSATMPSEIVALSRKYLRRPTHIRAEDDPLDTGSGQVTQHVFRTHPLDKLEMLARLLQARNRGLTMVFCQTKRECHHVSTELCRRGFAAAAVHGDLGQGQRERALRAFRNGKVDVLVATDVAARGIDVDDVTHVVNYECPDDEKTYTHRIGRTGRAGRSGTAVTFIDWQELLRWKLINRALGLPFADPPETYSTSPHFFDALDIPRDAKGVLAKEEQDRAGLAAEEVEDIGETGRASRTKDRERSRQRRSRPRKRTRRGVPTTRSAAEPTGETAAKSDADSSARTRRRTRRRSRRNAGTNSDRA

SEQ ID NO: 32494 - protein, 391 aa, Thermobifida fusca YX
MSEPLVARMAAFGETIFAEMTRLAEHTGAINLGQGFPDTDGPPFLLAEAARYLTEGVNQYPPGYGREELRTAIAADRQERYGLAYDPATEVYITVGATAGIAASILALVEPGDEVVLFEPMYDSYSAVIALAHGVRRPVTLRPSPDNGRYTFDPDELAAAITPRTRAIIVNTPHNPTGTVFTADELAWIARLCRENDLVAVTDEVYEHLTFDGTPHLPLAALPGMAERTLSVSSAGKTFSVTGWKIGWVTGPEPLVRAVATVNQYLTFTANGAQQLAVATALRHGMDWVSEQRDALHAKRDRLVAGLAAAGFQVHPPQGTYFVMADIRPLGYDDGLTFVRTLARRAGVVAIPAQVFYADERHGRHLVRFAFCKRDDVLDEAAARLRAWGDR

SEQ ID NO: 32495 - protein, 390 aa, Thermobifida fusca YX
MVYLDHAATTPVRPEVLADLTDAFGLLGNASSLHEAGRHARRVVEEARETLAEAMGCTPHEVVFTSGGTEANNLALKGLYWARNAQDPTRQRILVSAVEHHAVLDPARWLADHQGAVVEELPVDSYGRLHPDTLREAIERDPASVALVSVMWANNEVGTLQPIPELAAIAAEHGIWFHTDAVQAVGLEDIDFAASGVSALTLTGHKLGGPVGVGALLLARGVDPVPVLHGGGQERDVRSGTLATPLIRGFATAVRLAVAEREEHAAHLADLRDELVAAVRGVVPDIRVNGHPTERLPGHANIGFPGCEGDALLMLLDAQGIYCSTGSACSAGVSQASHVLLAMGADPDTARESLRFSLGRGSTSADIKALADAIGPAVARARQARARRRA

SEQ ID NO: 32496 - protein, 589 aa, Thermobifida fusca YX
MTEQMTGAQSLIRALEHVGVDVVFGIPGGAILPAYDPLYDSTKVRHILMRHEQGAGHAAEGYAYATGRPGVCIATSGPGATNLVTPLADAYMDSVPVVAITGQVASPAIGTDAFQEADICGITMPITKHNFLVRDPSKIASTIAEAFHIASTGRPGPVLVDIAKDALQAQTRFEWPQRPELPGYRPVTKPHGKQVREAARLIAEAKRPVLYVGGGVFKSGASKELRVLAELTGIPVVTTLMALGTFPSSHPQNLGMPGMHGTVAAVGALQRADLIVALGARFDDRVTGKLSSFAPHATIVHADIDPAEISKNRYADVPIVGDCREVIADLIVAVRADQAAGRQGDYTAWWEQLNRMRETYPLGYTEPEDGSLAPQYVIKRIGQIVGPDATYVAGVGQHQMWAAQFIDHQRPGSFVNSGGAGTMGFAIPAALGAKVGDPDRVIWAIDGDGCFQMTNQELATCAIEGIPIKVAVINNGNLGMVRQWQTLFYDGRYSNTNLHTAPTPEDGKVRIPDFVRLAEAYGCVGLRCDRAEDVDATIEKAMAINDVPVVIDFTVHHDAMVWPMVPAGVSNDDIQYARDMAPEWDDEEE

SEQ ID NO: 32497 - protein, 528 aa, Thermobifida fusca YX
MPKPVVLVAEELSPAGIALLEEDFEVRHVNGADRSQLLPALAGVDALIVRSATKVDAEVLAAAPSLKVVARAGVGLDNVDVEAATKAGVLVVNAPTSNIISAAEQAINLLLATARNTAAAHAALVRGEWKRSKYTGVELYDKTVGIVGLGRIGVLVAQRLQAFGTKLIAYDPFVQPARAAQLGVELVELDELLERSDFITIHLPKTKDTIGLIGEEELRKVKPTVRIINAARGGIVDETALYHALKEGRVAGAGLDVFAKEPCTDSPLFELENVVVAPHLGASTHEAQEKAGTQVARSVKLALAGEFVPDAVNIQGKGVAEDIKPGLPLTEKLGRILAALADGAITRVEVEVRGEIVAHDVKVIELAALKGLFTDIVEEAVTYVNAPLVAKERGIEVSLTTEEESPDWRNVITVRAILSDGQRVSVSGTLTGPRQLEKLVEVNGYTMEIAPSEHMAFFSYHDRPGVVGVVGQLLGQAQVNIAGMQVSRDKEGGAALIALTVDSAIPDETLETISKEIGAEISRVDLVD

SEQ ID NO: 32498 - protein, 315 aa, Thermobifida fusca YX
MDDLDTTTPLSAPTQQEGFRSGFVCFIGRPNVGKSTLMNALVGRKVAITSDRPQTTRRTIRGIVHRENAQLIIVDTPGLHKPRTLLGERLDSLVRSTLVEVDVIGFCIPADEPIGRGDTYIARELAQQKETPVVAIVTKTDKARRAQIAQQLVAVSELGDWADIVPVSAASGFQLDELVDVLCSHLPEGPPLYPDGDLTDEPEEILVAELVREAALAGVREELPHSIAVVVDEMVPREDRDLIEIYASLYVERPSQKAIVIGTKGSRLREVGTRARRQIEALLGSRVYLDLRVRVAKDWQSDPKQLRRLGFDQQV

SEQ ID NO: 32499 - protein, 597 aa, Thermobifida fusca YX
MNLPVLSRDSALRPVLDRFRVMIPARADLARMRHAPGRNLLAGVTVAVVALPLALGFGISSGLGAQAGLVTAIVAGALAAFFGGSNLQVSGPTGAMTVVLVPIVAQHGPSGVLTVGLMAGLMLVLLALLRAGRYVRYIPASVVEGFTIGIAAVIALQQVPAALGVPVPEGDRVLVVAWQAVLDFAAHPEWTAVAIALGVVVVMLVGARWRPTVPFSLMAVVLATVLVEVTPLHAERIGDLPAGLPAPSLGFLDLSQVGTLVAPAAAVAALAALESLLSATVADGMSVNQRHDPDRELFGQGVANIAAPLFGGVPATAAIARTAVNVRSGASSRLAAITHALVLAGIVYLAAPLVERIPLAALAGVLLATAVRMVEVGSVRAMVRATRSDGVVLVLTAVVTLTVDLVVAVLVGMLVAGALALASLARNASLDQEELARHLPPGDHTEEERALLAKHIVAYRIDGPLFFAAAHRFLLELSEVADVRVVILRMARVSTIDATGAQVLGDAVDRLQARGITVMMSGLRPGQLRPLESLGTLPRLREAGCVFETTPEAIQAALTMLHHAGVIPSSLRSAEAAPQGAAVLSSPGHQAPAPGKA

SEQ ID NO: 32500 - protein, 391 aa, Thermobifida fusca YX
MTDVYILDAVRTPFGRYGGALSGIRPDDLAAHVLRALAERSPGLDPAAVDDVFFGDANGAGEDNRNVARMAALLAGWPTSVPGVTLNRLCGSGMESVIAANRAIAVGDASLAVAGGVESMSRAPWVLPKPAQGFPTGHETLYSTTLGWRMVNPAMPEQWTVSLGESTEQVAATYGISRAEQDAFALRSHERAARAWAEGVFDAEITQIPGAELERDESIRETSAEKLAALKPAFRPDGTITAGNASPLNDGAAALLIGDAAAAERVGREPLARIVSRGVAAVDPDVFGIGPVQAAEIALRRAGIGWDDLSVVELNEAFAAQSLACLKLWPDLDPEIVNPNGGAIAIGHPLGASGARIVGTLAHELHRRGGGWGLAAICIGVGQGLAVVLHR

SEQ ID NO: 32501 - protein, 373 aa, Thermobifida fusca YX
MRVGVPREIKDHEYRVAITPAGVQELVRHGHDVLIERDAGVGSAISNAEYAAAGARIIDSADEVWGAADLVLKVKEPVPEEYHRLRPGQVLFAYLHLAASRDCTEALLKHGVTAIAYETVQLPDGSLPLLAPMSEIAGRLAPQVGATALQRSNGGRGVLLGGVPGVGPAKVMVLGAGVSGMNAAQVAAGMGAEVTLLDIDIAKLRRADAVFQGRVRTLASTAYEIERTALESDLIIGAVLIPGAKAPTLISSDLVAQMKPGTVLVDIAVDQGGCFADSRPTTHSDPTYPVHNTVFYCVSNMPGAVPTTATQALTKDTLRYALALANKGWRDALADDPALAAGLNTFAGELTNEAVAQAHGMAARTVTEVVAAG

SEQ ID NO: 32502 - protein, 328 aa, Thermobifida fusca YX
MDILQVLADATRSAIGPVAAVYALAAIGLNMHFGYTGLLNFGQVGFMLVGGYGVAVSVSTFGLPLGVGFLIGIASAVALALVLGLPTLRLRADYLAITTIAVAEVARLIYRAEFLRDITGGVYGLQSFSTAFYQWNPFPSGTYGFGWLSFSARDLWVMTVTWGLVLVGSAVMWLLIHSPWGRVIKGIREDEDAVRSLGKNVFVYKMQSLIIGGVFGALAGAMLVVNQQTITPDQFMPQVTFYLWAILLLGGAGRTLGPVLGSVVMWFLLSVTDSVLRQLIAADVITFIASSEIGGVRHALVGVALLVLIIFRPQGLIGNRKEMLINVK

SEQ ID NO: 32503 - protein, 397 aa, Thermobifida fusca YX
MAKARSNDVVIVDAVRTAAGRGREGGALADVHPVDLLAQTLRQLISRHDLDPGTVDDVIIGCVSQVGEQSATPGRMAWLGAGFPTHVPATTIDRKCGSSQQAVHFAAQGIMAGVYDIVVAGGVESMSRVVMGSARMGADPYGTLVAKRYHPGLVSQGVAAELVAARWNLDRTALDEYSVRSHTLAAQTQEAGLFDREIIPVETPSGTVNRDETIRPNSTVEKLATLKTVFGTPELSERFPEIEWRITAGNSSQITDGASALLLMSRAKCEELGYTPRARIHSMAVCGDDPLLMLTAPIPATRKVLERSGLSLSDIDHVEINEAFAPVPLAWLSEFDIDIDKVNPRGGAIALGHPLGASGARLMTTMLHALEDNDQQFGLQLMCEAGGMANATIIERI

SEQ ID NO: 32504 - protein, 314 aa, Thermobifida fusca YX
MIGWYEANIVLIEATFLNFLLALSIQVPLRVGVFSFAGVGSYGLGAYTAAILTIRYDVPAFVAIGAAVVFAAVVGYLFSLIVARLNGLYLAMATIAFVLIISVLATNGGELTGGANGLYGALSDLTTGGVVAVCVVVAFLLALTERGPLRRRIEAVREDPELSMSMGIGVVTVRQLAFTVSGALGACAGAMNALLRTTVSPEEINFHLIVLALTMVIIGGSRSWMGAFIGAVIFTWLPSMLATTGRWQDVVYGLIIILAAIFMPTGLLGLVQSLYQKLRGRSQTAAPAEPPAEEAVEERAMLQALSGESKEGVR

SEQ ID NO: 32505 - protein, 562 aa, Thermobifida fusca YX
MTEKTITEQFSFADLGLRPELLDALAEVGYEEPTAIQREAIPSLLEGRDLLGQAATGTGKTAAFSLPILHRLPDSDRGDTPSALILVPTRELALQVSEALHRYGRHLKARILPIYGGQPIGRQLRALERGVDVVVATPGRALDHIGRGTLVLDTVRTVVLDEADEMLDMGFAEDIEAIIEEVPENRQTVLFSATMPDRIEGIARRHLTDPVRVRIARTSPAPGEEPKVRQNAYIVARPYKPAALGRVLDMESPTAALVFCRTREEVDQLTETLNARGYRAEALHGGMSQEQRDRVMARLRGGTADLLIATDVAARGLDIEHLTHVVNYNVPSATETYVHRIGRVGRAGREGVAITLVEPREHRMLKTIQRSTSGPISVEKLPTVADLRARRVELTRAALHEALKEEDDDREAFRVVVESLAEEFDIMEIALAAVKLAHEASGAVTEEEEIPEPVLRPERSERRERRGRRGGPGRGERRGRGPSDGMTRLFVGIGRNARVRPQDLVGAIAGETALSGRDIGAIEIADRFSLVEVPESTADGVIAALKKSTIKGRRTVVRRERF

SEQ ID NO: 32506 - protein, 393 aa, Thermobifida fusca YX
MSSPERIIVVDGARTPVGSFGGAFKDVPAHELGAVAARAALQRSGIAASDIDEVVMGCIGQVGPDAYNARRVAIAAGLPESVPAYTVNRLCGSGLQAVWSGAMQIRWGAADIVLAGGDENMSRMPFYDFGARSGYRLGDRTLVDGTVAMLTDPFSNVHMGCTAEAVARKYGVSRAEQDEFALESQRRAAADAARAAFAEEITPVEVGGRKPVVVEVDEHPRPDTTLEGLARLRPVFEKDGTVTAGNASGINDGAAALVLARESVVRERGLKGLAVVESVATAAMDPQLMGYAPVLALRKLFEQTGTSPAVVDVVELNEAFAAQAVAVIRDAGLDPEKTNPYGGAIALGHPVGATGAILTLRVARDLVRRDLELGVVTMCIGGGQALAALLRRV

SEQ ID NO: 32507 - protein, 631 aa, Thermobifida fusca YX
MSMEMTAWHALYHTTQAPEERRPLSLATLRRIGGFARPHAALLGSFLVCSVLGSVLAVATPVVAGQAVDGIVGGAPIGVVGGWALLIAGIALAEAGVGLVARWLSARIGEGLILRLRTAVFDHVQRMPIAFFTRTHTGALVSRLNNDVIGAQRAFSDTLSGVVGNVVTLALTLVVMVGLSWQVTVAALVLLPVFVLPARRVGFRLARLEREAAEHNSAMSTRMAERFSAPGAALVKLFGDPGRESAEFAARATRVHDIGVRQAMLEHVFFTALTLVSALALALVYGLGGFFALRGHLDAGAVVALALLLTRLYAPLTALAHARVEMMGALVSFERVFEVLDLEPLIQERAAARTVPEGPVSVEFDRVRFAYPAPDEVSLASLEEVAQLEARGGADVLHGVSFRVEPGQLVALVGSSGAGKSTIAHLLARFYDVDEGAVRLSGVDVRDLSFASLRATVGMVPQDGHLFHDTIRANLLLARPQASEEELWEALRRARAADLVAALPDGLDTVVGERGYRFSGGERQRLALARLLLARPRVVILDEATAHLDADSEAQVQEALAEALAGRTALVIAHRLATVQTADLIVVVEDGRIVERGTHVELLAARGRYAQLYWTQFAQPAGGQAADGSYA

SEQ ID NO: 32508 - protein, 137 aa, Thermobifida fusca YX
MLRTMLNGKIHRATVTHADLHYVGSITIDADLMDAANLVDGEQVHVVNITNGHRLVTYVLTGERGSGVIGINGAAARLVAPGDLVIIISYVQLTEAERATHRPHVVHVDANNRIVALGDDLAEPVPGSDQKSGALLP

SEQ ID NO: 32509 - protein, 564 aa, Thermobifida fusca YX
MPSAPTPTGRPARKTTRPRRGEGQWALGYREPLNKNEEIKKNDDGLNVRKRIIDIYSKQGFDSIDPADLRGRFRWYGLYTQRAPGIDGGKTAVLEPEELDDRYFMMRVRTDGGQLNVAQLRVLAEVSTAYGRDTADITDRQNIQMHWVRIEDVPTIWERLESVGLTTTEACGDTPRGLLGCPLAGIAEDEIIDATPQLRQIVADHIGSPLFSNLPRKFKTAIDGCAVHCTNYEVNDVAFVGVIGPDGTPGYDLFVGGGLSTNPMFAQRLGAFVRPEQVSEVWAGVCSVFRDYGYRRLRHRARIKFLIKDWGPQKFREVLEKEYLGYSLPDGPEPVLDPGTRRDHVGIHRQKDGRFFVGFAPRVGRVSGTILGRIADIAEAHGSNRVRTTADQKLAILDITEDRLDSVVAALEAEDLQVNPSVFRRQTMACTGIEYCKLAIVETKNRAMALIDELERRLPDFTEPLTINVNGCPNACARTQIADIGLKGQLVTDAHGNQVEGFQIHLGGGLGLQAGFGRKVRGLKTTAAELPDYIERVVRRFAEQRQAEETFAEWVARADEADLK

SEQ ID NO: 32510 - protein, 433 aa, Thermobifida fusca YX
MTRTLWHNWADTCRITPTRIATPTSTAEVVAEVRAAAAAGSRIRMVGSGHSFTDIAATDGTLLSPAALASVRSVDLAAGRATVEAGMRLCDLNETLAAHGAALTNMGDIAVQTLAGATQTGTHGTGRASASLAAQIQQLELVLADGSVVTCSRDEDPDLFDAARAGLGAFGVVTAITMAVEPAFLLHARETPMPLGEVLERLEELRTTNDHFEFFWFPHTERTITKRNNRVPGPARPLSAFRAWLDDEFLSNSVFEVVNRMARRLPRLIPAINQISARALTAREYVDVSYRVFTSPRRVKFVEMEYAIPVEHLPDVLHDMRAVFASSRHRISFPVEVRFAPADDVWLSPGYGRESAYVAVHVYQGCPWQEYFADLEAIFTAAAGRPHWGKMHTRTLSYLDKVYPRLRDALEVRERVDPHRRFTNAYLDRVWGE

SEQ ID NO: 32511 - protein, 253 aa, Thermobifida fusca YX
MTTFEIRGLRADVLISEEERREILKGVNLTIRSGETHAIMGPNGSGKSTLAYAIAGHPRYEITDGEVLLDGENVLEMSVDERARAGVFLAMQYPVEVPGVSMSNFLRSAVTAVRGEAPKLRAFSKELQEAMKGLSIDPSFAARGVNEGFSGGEKKRHEILQLELLKPKVAILDETDSGLDVDALKIVSEGINRAKEANDMGVMLITHYSRILNYVKPDFVHVFADGKIVESGGMDLAETLETEGYERFVKVGA

SEQ ID NO: 32512 - protein, 500 aa, Thermobifida fusca YX
MSIWRTKSIEQSIRDTDEPGYRLRRDLNGFDLIVFGIGVIIGTGIFVVTGRQAAENAGPAIVLSFLAAGAVCALAAMCYAEFASTVPVAGSAYTFGYATLGEFVAWIIGWDLILEFTLAASVVSVGWSEYAGDLLALPTTVTLAGLPVNLGAVAIAVLLGLVGMLGAKLSGRVTAVVVAIKVGIVLFIIAVGAAYVDPANWTPFIPPAQPAAADTTGVSDATLTHVLFGLEPTSFGPWGVVAAASVVFFSFIGFDIVATTAEETRNPRRDIPVGIFGSLLIVTLLYMAVAAVVTGMRPYTELNVTAPLSDAFRSVGADWAATLISLGGVIGITTVILVLMMGQARVAFAMSRDGLLPRALSRIHPRFGTPYVTTLLTTAAVALLGGLVPISTLEEMVNIGTLFAFVVVSVGVVVLRSLRPDLPRAFRVPWSPVLPLLAALSCLWLMLNLTALTWIRFAVWLVIGVAIYFLYGIHHSRLAAPPAQPSGEEGEGVGEGFLGA

SEQ ID NO: 32513 - protein, 399 aa, Thermobifida fusca YX
MTERVVLAYSGGLDTSVAIGWIAEETGAEVIAVAIDCGQGGEDMEVIRQRALACGAVEAVIADAKEEFANDYCVPAIQANALYMDRYPLVSALSRPLIVKHLAEAARYHGATMVAHGCTGKGNDQVRFEAGLAALFPELKVLAPVRDSGMTRDKAIAFAEEKGLPIDVTKKSPYSIDQNLFGRAVETGFLEDIWNGPIEDIYDYTQNPAEPREPDEVVITFTAGVPTALDGKELSPLEIIQELNRRAGAQGVGRIDMVEDRLVGIKSREVYEAPGAITLITAHQELENVTVERELARFKRWVDQRWGELVYDGLWFSPLKNALDKFILEANKHVTGDIRMVLHGGRAVVTGRRSEASLYDYHLATYDSGDTYDQSLARGFIDIWSMPAKIANMRDRRLS

SEQ ID NO: 32514 - protein, 454 aa, Thermobifida fusca YX
MSDFVDEAVLHLKAGDGGHGCVSIHREKFKPLGGPDGGNGGHGGDVILEVDRNTATLLEYQRRPHRKAENGAPGQGSNRSGASGADLVLPVPDGTVVTTLDGEVIADLVGHGTRLVVARGGRGGLGNAALASPKRKAPGFALKGEPGEKVDIRLELKTIADVGLVGFPSAGKSSLIAAMSAARPKIADYPFTTLVPNLGVVEAGQTQYVVADVPGLIPGASEGKGLGLEFLRHVERCSTLLHVLDCATYEPGRDPISDLEAVERELAVYGERTGVDLSDRPRLVALNKIDVPEARELAELVEPMLVERGYRVLQVSAATREGLKELAYALGEQVAAARAARPPEEPTRLILRPREIGEIPFQVIPLGNNVFRVIGDKPTRWVRQTDFSNDEAVGYLADRLNRLGIEEALAEAGATAGAEVHIGDEDNPVVFDWDPTVDSEQTVLGPRGTDPRLS

SEQ ID NO: 32515 - protein, 627 aa, Thermobifida fusca YX
MVISGHRTVWTLVNDGSAAKAALQPGTVRRVLSYARPHWRRILLFVLATSVGSGIIIANPLLLKTIIDRGIGANNPSLVVGLSLVVAVLALLETGLSLVSRWLSASIGEGVIYRLRTQAFTHVQRMPLAFFTRTQTGSLISRLNTDVVGAQRAVTSVLQSLVANSVSVVAVLSAMLALSWPITTAALLVIPLFLLPARYLGRRLAQVHRTSMDVNAEMSSMMSERFNVGGAMLVKLYGRPDEESAEFAARAGRVRDIGVTRSVYSGMLFSVLGLITALATAMVYGAGGLLVVHDTFEVGTLVALATLLTRLYGPVTALSNVQVDVMTALVSFERVFEVLDMKPSVAEPENPVDLPAGGLSVEFSNVSFRYPGAEATLESLELVPQPEHSVSTQVLSDITFTVQPGQMVALVGPSGAGKTTLTHLVSRLYDPTEGTVRIGGVDLRQVRTQSLRDAVGVVTQDTQLFHDTIRANLRYARPDATDEELIAAMRAAHLDALLETLPEGLDTVVGDRGYRLSGGEKQRLAIARLLLKSPSVVVLDEATAHLDSESEAAVQQALATALHGRTSLVIAHRLATVREADLILVLEDGRILERGTHEELLARGGLYTALYRTQFAPQERERRSTAN

SEQ ID NO: 32516 - protein, 395 aa, Thermobifida fusca YX
MPGSVIVGGARTPIGKLLGALSGFAAVDLGAIAIKAALQRAGISGDQVDYVIMGQVLQAGQGQIPSRQASVKAGIPMSVPSLTINKVCLSGLDAIALADQLITAGEFDVVVAGGMESMTNAPHVLPKARHGYKYGSIEVLDATAHDALTDAFDHVSMGLSTERYNARHGMTREEQDAFAARSHQRAAAAIEAGLFKDEIVPVEVPRRKGDPTIVDTDEGVRPDTTVEALARLRPAFDPDGTITAGSSSQISDGACAVVVMSRTKAEELGCEILAEIQAHGNVAGPDNSLHCQPANAIKHALAKAGRDVADLDLVEINEAFASVAIQSMRELGVSEDIVNVNGGAIALGHPVGMSGARIVLHLVHELRRRGGGLGAAGLCGGGGQGDALLLSVPAS

SEQ ID NO: 32517 - protein, 393 aa, Thermobifida fusca YX
MAQPHAVIIGGGVGGLTAAVALHDRGWAVTVCEPSTSPGAVDTGLGILPNGLRVLRALGVGEAFHAAAAWPPTVELRRADGRVLLRLEQERLTRRYGAAVAVVSRSALLRLLAARLPAGAIHVGVTVTELHVGDIHQRAHVRTTAGDLAADLVVAADGVHSRMRALLFPRHPEPTYAGFTTWRFLAPAPVHAVPAGETWGSGASFGVLPLPDGRAYCYATATAPAGQRSADERAELLRLFGSWHDPIPALVRAVPAQAVVRADAWVADDPLPAYHSGRVALVGDAAHAAPPNLDLGVCLAMEDAVVLAHRASGSAAYLPTALTSYTDDRIQRTSRVVQRVAQFAEMARTASPALVRFRDAGIRAVGAFAAHQVAQRYLDSLVEWEPPRQSALL

SEQ ID NO: 32518 - protein, 225 aa, Thermobifida fusca YX
MKGRVLVVDDDLALAEMLGIVLRGEGFEPSFVHDGDKALEAFRETKPDLVLLDLMLPGADGIDVCRQIRAESGVPIVMLTAKSDTVDVVLGLESGADDYIVKPFKPKELVARIRARLRRTEEPAPEILQIGDITIDVAGHSVRRGDQVINLTPLEFDLLVALARKPRQVFTREVLLEQVWGYRHAADTRLVNVHVQRLRAKIEKDPEHPEIVVTVRGVGYKAGSP

SEQ ID NO: 32519 - protein, 258 aa, Thermobifida fusca YX
MRDRSRGCAPHRRWVSGNTRNPGILSWEDKLYVADPACTAGQPRIRRTFFPGETLSQISEPLELAKDAQDLLFREARTANTFSGEPVSEEQVRAIYDLVKYGPTAMNTQPLRIVLLRSRESRERLVQHMAEGNQAKTLSAPLTAILAYDSEFHEKADRFFPDRAQGIRDMFSSSAEARATTAKLNASLQIGYFLIGVRAAGLAAGPMTGFDAAAIDAEFFPNGRYRTLVVMNIGKPGADHPQFPRLPRLDYEDVVTEL

SEQ ID NO: 32520 - protein, 349 aa, Thermobifida fusca YX
MLASPLSIDVRRGAIADLGLLLADRRIANEGRIAVAVGPGQGARIVADLNLPHCEVFQVDEGTVDVANELGKKLRTEAFEAVAGIGGGKTIDVTKFAATMAGIPMIAVATNLSHDGIASPVSSLEHESGKSSYGVNMPVAVVVDVDYVRSAPDRLVRSGIGDVLSNLSAITDWELAGKEMDEPVDGMAVTFARVAAESVLHRRDSVESESFLTALAEALVLSGMAMSVAGSSRPASGADHEILHAIDQLYPGTSNHGELAGLGTLFAFFLRSRYLGHGEQQLEDIRASLLRHRLPTLPSDVGLDEEQFVKAVVHAPSTRPGRYTVLEHLNLSEDEIRRSVRDYVQTFGR

SEQ ID NO: 32521 - protein, 402 aa, Thermobifida fusca YX
MTDRPRISARIGGISESATLAVDAKAKALKAAGHPVIGFGAGEPDFPTPDYIVEAAVAACRDSRFHRYTPAGGLPELKEAIAAKTLRDSGYRVEPNQVLVTNGGKQAIYEAFATLLDPGDEVIVIAPYWTTYPESIRLAGGTPVYVVTDESTGYLATVEQLEAARTDRTKVLLFVSPSNPTGAVYSPEQVREIGRWALEHNLWVLTDEIYEHLVYGDARFSSMPVEVPELADRTVVVNGVAKTYAMTGWRVGWLIGPVDVVKAATNLQSHATSNVANVSQAAALAAVSGDLSAVEEMKQAFDRRRQTIVRMLNEIPGVVCPEPQGAFYAYPSVKEILGKEIRGQRPQTSSELASLILEHAKVAVVPGEAFGTPGYLRLSYALSDADLVEGVSRIAKLLSEAH

SEQ ID NO: 32522 - protein, 395 aa, Thermobifida fusca YX
MAKTTTMPTTRSLLAPGRYVQGRGVLADLGTYVAAIGSVPLILADPVVRQLTEATVTESFRQAGLAVRFEEFGGIPTAAEARRVADVLSDRGCDVIIGLGGGSTIDTAKAAGDNAGIRWVSVPTVASTDAPTSALSVVYSEEGVFETYRFYSRNPDLVLVDTQLVANAPARFLVSGIGDALATWIEARAVQRANGPTLAGGMATHTGIALAKLSWDLLWENALPAVEAVRSNLVTPAVEAVVEANTLLSGLGFESGGLAAAHSVHDGLTVVPHTHHLMHGEKVNIGSITQLILEAAAAEEIREFIEFTARLGLPTTLTEAGLGHVDDEVLRMVVEAALAPEETIHNLPFSVSENDLLDALKMVEELGRSVRAEAGLPEPRAPQEERPPVPAARMA

SEQ ID NO: 32523 - protein, 361 aa, Thermobifida fusca YX
MRVLIVNTGSTSVKLRLLGSDDALLGRCDFPVVDGTIPVDAMTGALEQLGAFDAVGHRVVHGGTVYRSAVRVDDTVLQQLQALVELAPLHQPQALAAIDLLRTLLPGVPQVACFDTTFHTTVPEVAATYALPASWRDRFQLRRYGFHGLSHAYASRRAAELVGGDPGRVVTAHLGAGASLAAVRHGQCVDTTMGFTPLEGLVMATRPGDVDPGLVLWLLRDGRLSFAEVDRGLTYYSGLAGLGGAADIRTVVAQAEAGDAAARLALDVYVYRLRSKIAAMAAALGGLDTLVFTGGVGENQPLVRSGAAAGLGFLGVRVDEDADRGAEPDAEVTGDGSRVRVFVVAAREDLQIAAETRNVVA

SEQ ID NO: 32524 - protein, 308 aa, Thermobifida fusca YX
MLDWLYNIVGQVLVWIHSGLSIFLDPDSGLAWGLSIVLLTILVRVLMIPLFVKQMNTQRKLQELQPKLLKVRERYKNDKQRLQQEQIKIYQESGTNPLMGCLPLLLQMPVFFALFNVLRQIAEGEAKFGFTQELANSAQSALIFGAPIAAHFTSSADELAAFGADPIMAKVIIAVACVIMGTTTFLTMRQSMSRTLKQPGMEDNPMVQSQKIMMYIAPAFGLFGLAMPVGVLIYWVTSNLWTMGQQHFLYRKFPPVASDGGEKNKAGVSATGKPGSTKRGQQSEKPEQPKIERKQPKRQPRSKRTGGK

SEQ ID NO: 32525 - protein, 608 aa, Brassica rapa
MCGILAVLGCVDNSQATRSRIIKLSRRLRHRGPDWSGLHCYEDCYLAHERLAIIDPISGDQPLYSEDKTVVVTVNGEIYNHKALRESESLKSHKYHTGSDCEVLAHLYEEHGEEFINMLDGMFAFVLLDTKDKSYIAVRDAIGVIPLYIGWGLDGSVWFASEMKALSDDCEQFMAFPPGHIYSSKQGGLRRWYNPPWFSELVPSTPYDPLVLRDTFEKAVIKRLMTDVPFGVLLSGGLDSSLVASVAIRHLEKSDARQWGSKLHTFCIGLKGSPDLKAGKEVADYLGTRHHELHFTVQEGIDAIEEVIYHVETYDVTTIRASTPMFLMSRKIKSLGVKMVLSGEGSDEIFGGYLYFHKAPNKKELHEETCRKATPLEFLDHDVSCAYLLCLNLVCLLLMQIKALYQYDCLRANKSTSAWGVEARVPFLDKAFLDVAMGIDPEWKMIRPDLGRIEKWVLRNAFDDEKNPYLPKHILYRQKEQFSDGVGYSWIDGLKDHANKHVSDAMLTNANFVFPENTPLTKEAYYYRAIFEKFFPKSAARATVPGGPSVACSTAKAVEWDAAWKGNLDPSGRAALGVHVAAYEGDKAEAPRPEKVQKLAEKTAEAIV

SEQ ID NO: 32526 - protein, 384 aa, Brassica rapa
MELKEGSNQISEIEEGENKRDRYKRSANMRRSPCSDDSGLKKGPWTPEEDEKLVNYIQKHGHSSWTALPKRAGLNRCGKSCRLRWTNYLRPDIKRGRFSPEEEQTILNLHAVVGNNQRFCVPVLLAYVDNVIRWSTIANNLPGRTDNEIKNFWNTHLKKKLIQMGVDPMTHRPRPDIFSSLSQLVSMSSNLRGFVDMQLQFQTDQEQTILKLQTEMAKLKLLHDLLQPPSMNNNTNPNDFDTRSLLHSIASLKETYTTSNNPDLGPYLQDFSSIPSLETLNTNMVPSSISPRDLEDSHFKFFSQRDNLPVSPVWLSDPSSSNQSLLPSLDHSSVVSGDLIRNQYIIEDVNSNLMTSSSGQESGASASPVWPDHLLDDSIFSNIL

SEQ ID NO: 32527 - protein, 313 aa, Salvia miltiorrhiza
MEAIGVLMLCPMNSYLEQELDKRFKLFRYWTQPKQREFLAQQAESIRAIVGNSNSGADADIIDSLPKLEIVSSFSVGLDRIDLLKCKEKGIRVTNTPDVLTEDVADLAIGLMLAVLRRICECDKYVRSGAWKLGDFKLTTKFSGKRVGIIGLGRIGLAVAERAEAFDCPINYYSRSKKANTNYTYYGSVVELASNSDILVVACALTPETTHIVNREVMDALGPKGVLINIGRGPHVDEAELVSALVEGRLGGAGLDVFEKEPEVPEQLFGLENVVLLPHVGSGTVETRKVMADLVLGNLEAHFSSKPLLTPVV

SEQ ID NO: 32528 - protein, 863 aa, Prochlorococcus marinus str. NATL2A
MKVNPDDFTNNAWQGIIDAKDLALIEKHQTLETEHLFWSLLKKNEIAIKIIERSGGVIKNLLTEIESFIKNQPKMLLAQESIFFGKKISLSISRAKNIQQSFKDDFISSEHLVISLFDDERICNRLFEENNVDKNSLLEAINALRGDKKVTQKNAENSYEALQKYGLDLTSAARDGKLDPVIGRDEEIRRTIQILSRRTKNNPVLIGEAGVGKTAIIEGLAQRIINGDVPTALENRQLISLDMGALIAGAKFRGEFEERLKSVLKNVTDSEGKIILFIDEIHTVVGAGASGGAMDASNLLKPMLARGELRCIGATTINEHRENFEKDPALERRFQQILVKQPSVQDTISILRGLKERYEVHHGVRISDNALIAAAILSDRYIPERFLPDKAIDLIDESASRLKMEITSKPEEIDEIDRKIIQLEMEKLSLEGESDTSSKERLELITSELALLTKNQIEVNKKWKREKESIEEISTLKEEIEKVQLEIEKAKRNYDLNRAAELEYGTLVNYQQNLKSKELNLKNSSQNAEKSLLREEVVADDVAEIIAKWTSIPVKRLAQTEIEKLLNLESELQKKVIGQDKAVQSISSAIQRSRTGLSDPSRPIASFLFLGPTGVGKTELSKALASQLFDSENSLIRIDMSEYMEKHSVSRLIGAPPGYVGYEAGGQLTEAIRRKPYCVLLFDEIEKAHKDVFNVLLQILDEGRVTDGQGRTTNFKNTIIILTSNLGSELISENDVTNDPLTNIDELINQELKSNFRPEFLNRLDEIINFEPLKKETLLKVVDLQLNRLRERLGAKGIELKIDDDVLFFITELGYNPSYGARPLKRVIQKELESEIARYILKGKYKEGCTIKIENKESKLIFH

SEQ ID NO: 32529 - protein, 392 aa, Prochlorococcus marinus str. NATL2A
MTDKSQISIRALSIKPSLTLEISAKAKALKAEGKNICSLSAGEPDFDTPEFIVDATLKALKDGKTRYGPAAGDPELREAIAQKQSDINKVPTKTDNVLVTNGGKQAIYNLFQVVLNPGDEVLIPTPYWLSYPEITLLAGAKPIKIKSSTKDKFKIDINSLEEHVTEKTRLLIINSPSNPTGCVLTEQEMKTISDFLRRHPRILLMSDEIYEFLISPNQVHHSFAKIAPDLKNRIFTVNGFAKAWAMTGWRIGYLTGNAEVIKKAIALQSQSTSNVCSFAQKGAIAALQGSKDCVHEMANIYNKRRLLITERLKKIKHISFVPPNGAFYVFPEINLEEIDSISFCKLALEKVGLAIVPGIAFGDDKCIRISYAASNKMIEDGVNRLERLLNDF

SEQ ID NO: 32530 - protein, 287 aa, Prochlorococcus marinus str. NATL2A
MKLAFIGLGAIGKPMSERLIDNGYDLNIYKRDKLKNNDPKKYFVDPIEAVTDCDGLLICVTDDNAVESVLFGDNGVADSLKPKSFVIDFSTISPNKSISIHKRLSKKNIFYVDCPVSGGTEGAYKGSLSLFIGASKKECLSFEHIFEVLGKSINYFNGVGKGQQVKALNQILVAGTYAAVAEAMELGKLLDLPMDDVVAALKVGAANSWPLENRSKAMLIDKHPLGFKLELHHKDLAIAIDLAKSINIDLPIASKVKEIEQRLMQAGLGELDVSVLHRYISGAKKEG

SEQ ID NO: 32531 - protein, 640 aa, Prochlorococcus marinus str. NATL2A
MDKKWKVVALWVLPITIVILITWQILGSSTNTQVNQTNTSNPSRNAPVAKISYGRFLDYVKAGRVTSVDIYEGGRNAIVESVDPEIDNRIQRLRVDLPGLAPELVSSLKDEGISFDIHPPKTAPAGVGILGNLLFPIILIGGLILLSRRSNSMPGGPGQAMQFGKTKARFAMEAETGVKFDDVAGVNEAKQDLEEVVTFLKQPERFTSVGAQIPRGVLLVGPPGTGKTLLAKAIAGEAGVPFFSLSGSEFVEMFVGVGASRVRDLFKRAKENSPCLIFIDEIDAVGRQRGAGIGGGNDEREQTLNQLLTEMDGFEGNSGIIIIAATNRPDVLDSALMRPGRFDRQVTVDAPDISGRLSILKVHSRNKKLEKDLTLESIARRTPGFTGADLANLLNEAAILTARRRKNQIGLSEIDDAVDRIIAGMEGTPLVDGRSKRLIAYHEVGHALIGSLVKDHDPVQKVTVIPRGQAQGLTWFSPDDDQSLISRAQLKARIMGALGGRAAEDIIFGREEVTTGAGGDVQMVASMARQMVTRFGMSSLGPVSLEGDSQEVFVGRSLMNTSDISDGISKQIDEQVRSIVKKCYQETLELVEKNRSAMDKLVEILIEKETMDGDEFCKILSQYTTIPEKDRFIPVLPDAK

SEQ ID NO: 32532 - protein, 393 aa, Prochlorococcus marinus str. NATL2A
MNDIYLDASATTPPHLDVITKLKDIQFECWGNPSSIHKVGVIAREILERSRLSIANKLKASSDELFFTSGATESNYLALKAVSNNLDRGRIVISSVEHPSINLIANQLRNEGWDIKYWPVDSYGIIDLDLLEEVLSPPTKLVSIIWGQSVIGSIQPINLIGMECKKRNILFHTDATQVLPCGLIDWSNLNVDMLSASAHKLQGPKGIGLLMLRKGIQDLLMKNPSYGFKNGSIRSGTESVPLIAGFSTAIDLLNEYIEVKDNQTLFPVNNVSKMTSLLKRKLINNKHLTFIGPDKERLPNNLSFLCHTEAMIPIKGREIVRLLSKHGVYISSGSACSSSSQGPNPILVAINVDKTFQESGLRITIGPWISNDDITSVSNIIFESLKSLELKKQ

SEQ ID NO: 32533 - protein, 245 aa, Prochlorococcus marinus str. NATL2A
MTSRVSDKISKAKRLLIVEDDKSIRETLNEALVAEGYQVEACKTGDEAEARVFSQFDTRKKIDLIVLDLMLPNLNGIELCRRVRKNNIKTPILIVSAKDSESDRVLGLEVGADDYLIKPFGLNELIARCRAILRRSETNHEKAQDSSQVLSYKNISLYRQEYRVTKNSKEINLAPKEYKIMELFLQNPKRVWSRDQLLEQIWGIDYVGDSKTVDVHIRWIREKIEDDASDPDYIRTVRGFGYKFG

SEQ ID NO: 32534 - protein, 107 aa, Prochlorococcus marinus str. NATL2A
MDSNTRSKIESLINSKPIFVFMKGNKLMPQCGFSNNVVQILNSLGMSFETFDVLSDMEIREGIKEYSNWPTIPQVYLKGEFMGGSDILISMYNSGELKEKLEIALAS

SEQ ID NO: 32535 - protein, 589 aa, Prochlorococcus marinus str. NATL2A
MTNKNPHEDSSCPVEQDVLEESSEEILEEIEQNSENGFSEFNFSEELIQTISDKGYSSPTPIQKAAIPELLLGRDLVGQAQTGTGKTAAFALPILERLKKNVGHPQVLVLAPTRELAMQVAESFRTYSAGHPHFKVLAIYGGSDFRNQINTLRRGVDVVVGTPGRVMDHMRQKTLNTSHLSCLVLDEADEMLRMGFIDDVEWILEQLPEERQLVLFSATMPSEIRRLSKKYLNSPAEITIKATELKERLIRQRYISVQNVYKVNALQRVLEAVSEEGVIIFARTKAITIVVAEKLESYGYNVAVLNGDIPQNQRERTVERLRQGSINILVATDVAARGLDVDRIGLVINYDMPFDREAYVHRIGRTGRAGRNGEAILFVNPRERSFLSNLERAVGQPIEKMDIPDNDLINNNRIKKLQAKLIKAASTERDNPEEANILEELIKNVEKELDIDPKDLTLAALNLAVGFNALLEKGNEDWIRQSAQRNTRNDRRDNNKFKQRRRGDFDNNRLEDEMDRFRVEVGHRDRVKPGNLVGAIANEAGLKGRSIGRIRIFENYSLVDLPKQMPDKVFQALKKVKVMNRELQINRAD

SEQ ID NO: 32536 - protein, 372 aa, Prochlorococcus marinus str. NATL2A
MFINNHSISPSNVVRGEGAWADSLDLITKLCKRPLIIGRSSSTKKIRTSFKKDLLLKGIQSISLDLDHDCCELDIKNAYLISKHNNCDGIIAAGGGKVLDAGKLIADLLGINCITVPLSASTCAGWTALSNIYTPDGKFVKDVTLKSCPNLLIFDHTIVRNAPPRTLASGMADAVAKWYESSLTSSSSQDGFVQQAVQMARVLRDQLFLNGQKAFLDPLSNSWETVAEGCALTAGIIGGLGGARCRTAAAHPIHNGLTQLAYTNKPLHGELVGFGLLVQLHLEEKNSTSQLPKQAKSQLLEFFSQLNLPISIESICLRNTTSNELYKACKFACNDDSDIHKLPFPINEKDLLEAIQSLQSFPTSSRIKINNT

SEQ ID NO: 32537 - protein, 464 aa, Prochlorococcus marinus str. NATL2A
MGLLNLLSTNRNENLFLPAHGRGNSLPKNIKTLLRLRPGIWDLPELFEIGGPLISEGAIAESQKSSAYEVGVDRCWYGVNGATGLLQSSLLALAHPGQAVLMPRNIHKSCIQACLFGGLTPLLFDVPYLTDRGHASVMDRKWLQRVLKKAKEYEDDIAAVVLVNPTYQGYSADMESLIKEIHSHSLPVLVDEAHGAYLISQIRPDLPKSAISFGADLVVHSLHKSASGLVQSAVLWSQGDKVDPFKIERAIELLQTSSPSSLLLASCESSIKELLESKGIKKLRLCIEEAEMLKDFLIKNEVPLLKNSDPLKIILHTSKFGLSGIEVDKSFIRKRMIGELAEPGTLTFCLGLSSHKRLGKRFVRIWNEILKACGKQKPCFFKRPPFGIVSKPYKSYSDSWGSNFEKVNLKDAIGRISVEMVCPYPPGIPLLIPGEILDEARVDWLIEQKSFWPEQISDFVRVIS

SEQ ID NO: 32538 - protein, 331 aa, Prochlorococcus marinus str. NATL2A
MTSFITAANPEPTSLEHDTNRLRLISGTSNTALAKEIATYMGITNVPLVSKRFADGELYVQIQQSIRGCDVFLIQPTCAPVNDSLMELMIMVDACKRASARQITAVIPYFGYARADRKTAGRESITAKLTANILVKSGVDRVLAMDLHSAQIQGYFDIPCDHIYGSPVLVDYLSTMKLDEIVVVSPDVGGVARARAFAKQMKDSPLAIIDKRRSGHNVAESLTVIGEVSGKTAILIDDMIDTGGTICAGAELLRKEGAKKVIACASHAVFSPPAYARLSKEGLFEQVIVTNSIPVPSNLDFSQLKVLSVANMLGEAIWRIHEESSVSSMFR

SEQ ID NO: 32539 - protein, 381 aa, Prochlorococcus marinus str. NATL2A
MAYSETKVVLGGLAHIPIIIGFFYLIRRQYSFGAMLRTGKNALSEKVTKATPAKAATPAKAATPAKAATPAKAATPSKASAAKKPHADVPVNTYKPKAPFTGTVTENYSALKEGAIGKVQHITFDLSGGDPDFKYVEGQSCGILAAGEDAKGKPHRPRLYSIASTRYGDNFAGNTLSLCVRQLQYEKDGETINGVCSTYLCNLSPGDKVKISGPVGKEMLLPEEEDSNIIMLATGTGIAPMRAYLRRMFEPTEIEKHQWNFKGKAWLFMGAPKTANLLYDADFEHYKSKFPENLRYTKAISREQNNTKGGRMYIQDRVLEHAEEIFDMIENPKTHIYLCGLKGMEPGIDEAMTTAASAKGLDWSELRPKLRKAGRWHAETY

SEQ ID NO: 32540 - protein, 381 aa, Prochlorococcus marinus str. NATL2A
MVSFLIPFESALGETRVSATPETVKKFLDLGCKVFFEKGAGKAAGFLDDTYMDAGAELVEIENDEVKKIVDIVLCVQPPNEKFLSHLKPGSFLVGLLNPYGNKLLAETLKSKNISAIALELLPRISRAQSSDALSSQANIAGYKSVLLAASALDRYFPMLMTAAGTIQPSKIVVLGAGVAGLQAIATAKRLGAVVYVSDIREAVKEQVESLGARFIELPKIDETPSESGGYAKQVSDEFIVAQRKELAKQLSEADVAICTAQVPGKKAPKLIDEKMLDDMRPGSVVIDLAVLSGGNCACSKPGETIVREGVKIIGASNLPCSIPNHASSLYSRNLLSLLQPMFKEGKFLIDNDDELIAGSLISKDGVILKSEIIENGGTRS

SEQ ID NO: 32541 - protein, 313 aa, Prochlorococcus marinus str. NATL2A
MSLGDLSQEDFKSGFIALIGRPNVGKSTFINKFIGEKIAITSPIAQTTRNRLKVILTNEKSQIIFVDTPGIHKPHHLLGERLVQSAKRSIGDVDAVLVIFEASHSPGRGDAFILNLIRNLKIPVIVALNKWDLLALSQFKERKKEYFEFLEGTNWPVFCCSALTGQGCNELISEIEETLPFGPQLYPSDMNCDHPEKFLIAEFIREQVLINTREEVPHSVAVSIDKIEDITSKKKSEQKSRTGILATICVEKKSQKGILIGKGGSMLKKIGQESRMQIQTLINGNVYLELFVKVVPDWRSKSSRLNEFGYEGS

SEQ ID NO: 32542 - protein, 139 aa, Prochlorococcus marinus str. NATL2A
MADKKSSPKKENPQDKTYAIVEASGKQFWLQPNRYYDFDRCQAEVDDVLTLENVLLLNDGKDLKLGKPYVKDAKVEIKVLEHRRGPKIIVYKMRPKKKTRRKNGHRQELTRVLVQSISIGSNTKKSKAVKTTASKVESE

SEQ ID NO: 32543 - protein, 528 aa, Prochlorococcus marinus str. NATL2A
MTKVLVSDPIDQAGIDILTQVAQVDQKVGLSPDQLKNIIGEYDGLMIRSGTQVTSDVISEAKKLRIIGRAGVGVDNVDVPTATRKGVLVVNSPGGNTIAAAEHALAMMLALSRNIPQANGSMFAGGWDRKKYVGNELYKKTLGVVGLGKIGSHVAKVANAMGMEVIGFDPFVSNERAQQMQVRLSDIEELFKESDYVTLHLPRTPETENLVDIDLLRKMKPTARLVNCARGGIINENDLANALAENVIQGAAIDVYAKEPLAENSPLRAVKKGLVLTPHLGASTVEAQQNVAIDVAEQIRDVLLGLPARSAVNIPGLSAEIMDSLKPHLKLAETLGLLVSQISGGQIQKLEVRLQGEFAQHPSQPLVIATLKGLLTSALGDKINYVNASLEAKGRGIDVVEIKDELCPEFARGSLQLDSFSDKGGHSVSGTVFGDGDLGITSIDEYPINFVPSRHMLFTRHRDMPGIIGQIGSLLGKYNVNIASMQVGRRIVRGEAVMVLSIDDPIPSELLGSILSMQGINEAHSVTL

SEQ ID NO: 32544 - protein, 1529 aa, Prochlorococcus marinus str. NATL2A
MHQRISRSNWPYCDSTYPDAFSGEKDSCGVGFIASVEGKQNHWVLTQALRGLSCMEHRGGCGGDSDSGDGAGILCEIPWSYFKQVWDKAKHCEPQASGIGMIFMPKDLKNRELAKKICEQEAESLGLTSKGWRDVPVHEEVLGKLARENEPFITQWIVDIKDKEINLEALLFRLRQRISNRANIELKEDELGLYICSLSSKTIVYKGMVRSEILAPFYNDLKDDRFEVSYAVYHRRFSTNTLPKWPLAQPMRLLGHNGEINTLLGNINWAKATETDISSVWKENANDLKPIVDNLYSDSANLDLNLELLVRSGRPITDSLLTLIPEAFRDQPELINKPEITAFYEYAAGTQEPWDGPALIVFTDGTNIGATLDRNGLRPARYCITKNGYVVMGSETGVVELEEDVIQEKGRLGPGQMLAVDLESKRILRNWDVKEESANRYPYLDWLKANRINLNNQSWEINNKFDKQKLLQYQIAFGFSAEDFDYIINSMAANAKEPTYCMGDDIPLAILSNKSHILYDYFKQRFAQVTNPPIDPLREKLVTSLEMNLGVRKAPLRPKEESARLIHLESPILNEKELNSIKNSELSCKQISTLIPINDDKIILEEGLKNLCKEAEDSVINGREILILSDRDINRENSYIPPLLAVGAVHHHLLRKGLRLKTSIIIDTAQCWSTHHIACLIGFGASAICPWLTWETTRHWWQLPKTQKLISDGKLSNLSIEIAQDNVKKAMEDGLRKILSKIGISVLASYHGAQIFEAIGIGADLIDLAFKGTTSRIAGLTLSELSIETISFHKKAFPELEQKKLDFNGFVQYRNSGEFHLNNPEMSKILHAAVKAGPEYDHFKTYQQLLENRPATTLRDLLTFKTATQPLPLDQIESVENICQRFCTGGMSLGALSREAHEVLAIAMNRIGGKSNSGEGGEDPARFNVLEDVDENNQSKTLPNLKGLLNGDTACSAIKQIASGRFGVTPEYLTSGKQLEIKVAQGAKPGEGGQLPGPKVDEYIARLRNSKPGVALISPPPHHDIYSIEDLAQLIHDLHQINPTAKVSVKLVAEIGIGTIAGGVAKANADVIQISGHDGGTGASPLSSIKHAGLPWELGLTEVHRSLLENGLRERVLLRADGGLKTGWDVVIAALLGAEEYGFGTVAMIAEGCIMARICHTNKCPVGVATQQEGLRKRFPGLPEHVVNFFIFVAEEVRQLMSQVGVAKVEDLIGRTDLLIPRNIDLTKTKKVDLSSLLKPIDNPTDRSWLSHEIEAHSNGEVLENALLKDKEVSNAIQTQGSITKEIPIVNTDRSVCARISGEIAKKYGNKGFNGNLNLIFKGSAGQSFGAFILKGMNISLIGEANDYVGKGINGGSITIVPEIINDTSNTQVILGNTCLYGATGGKLFALGIAGERFGVRNSGAHAVIEGAGDHCCEYMTGGVVVVLGKTGRNIGAGMTGGIAFILDKKNELDLRMNKEIVEVHPLTATNHEQFLNDLIYEYHQKTKSPLAQKILADWSSWKELFKAVVPPSEKSKLGIEEVLEKATI

SEQ ID NO: 32545 - protein, 588 aa, Prochlorococcus marinus str. NATL2A
MALLVQKFGGTSLGSIERIKAVAQRIKSSKEKGDDLVVVVSAMGHQTDELTRLASEITVDPPHREMDMLLSTGEQVSISLLTMALNELGTPAISLTGTQAGIITESAHGRARILEIRTERIKNLLDQGQTIVIAGFQGTTLGIGGIAEITTLGRGGSDTSAVALAASLEAAKCEIYTDVPGVLTTDPRIVKNAKLMKSISCDEMLELASLGAAVLHPRAVEIARNFGVTLVVKSSWDNLDGTTLTSNKKPDFSQGGIEHRSPVDGLELLENQAVVALSNIPDRPGIAAELFESLSEGGVNVDLIIQATHQIDSNDITFTVAENELHNALTQCKKLVNTIGGDISFQKDLTKLSIYGAGIMGRPGIASSLFQILSDSGINIRLIATSEVKVSCVIDAELGKKALRNVSEVFKLTDKQITVNPTIENNNEPEVRGIALDKDQIQISVKNVPDKPGTASTICSTLAEKNISLDTIVQSERKHKDKTKDISFTLKKNDRSDAKYALKELIGNWKGSNLEEGESIVRISAVGSGMPFTKGTAGKIFRALANQKINIEMIATSEIRTTCIISEKYGEKALNEIHSCFKLGKNES

SEQ ID NO: 32546 - protein, 299 aa, Prochlorococcus marinus str. NATL2A
MTKSNLRDLSLFNNDGAIFMGAQRDIDQSRVSLLGVPYDGTCCFRPGARFGPSAIREDSYGIETYCPQLDLDLEDINFTDIGSLDVPLGDAELTLDYISDATNILLKNNLKPLIIGGEHSITIGIIKSIITNYPDLIMLQLDAHADLRDEWLGSKLSHACTMKRCLEILPSKKIFQIGIRSGTKSEFLEMNNSKRFIQHTLGENAKSLEEALKSFKGRPIYLTFDLDWFDPSVMPGTGTPEPGGYFWGDFAAIINVIKSHNLIGADVVELSPKLDTTGISSILAAKVIRSLIMLLDKSS

SEQ ID NO: 32547 - protein, 553 aa, Prochlorococcus marinus str. NATL2A
MVQYYLEGKKLNQVEKNKAAKDGLEIGKDIDKFAEMGWEQMDKTDLELRLKWYGMFWRPKTPGKFMLRLRIPNGIINAEQLKVIASIVARYGENGSCDITTRQNIQLRGVLISDLPEILNRLKKVNISTTQSGFDNPRNVTGNPIAGVDPEEIIDTRIYTSKMQDHLTSDGKGNSEFSNLPRKWNTAIAGSKDNFLLHNDLIFHPVKINEVLGFSVWIGGVLSSVMNEYAVPLNAWVEEEKIYELTSIILSLWRDNGERNIRPKGRFRFYLDKIGIETFRNLIEKQYGTLKEDPGSIFSDKPRSFFGIHSQKQEGKYFAGIHVPVGRLLAEDLQDLANICENFGDKEIRLTEDQNIIITGIDTNLIEEFKEQSILQKFPLEPETIAAGTVSCTGNTYCGFALTNTKDQALKVSHELDKELDLKDELKIHWTGCPNSCGQAYMGGIGLTGKKAKDKEGKTVEAYDISIGGSQGPNYKLGELIKKSVPQNELKDVLKDLLISDFDAKEKIFLSKKSGSLTRFMNWFSPLGKDKPLINRANGSHDIFSKFMNRISN

SEQ ID NO: 32548 - protein, 303 aa, Prochlorococcus marinus str. NATL2A
MTSSASQMDYVLPNELVDGMIAAGGKKSSVSVKNLLIRGFYSGAILGLATCLAITIGIQSGMPWLGSFIFPFGFASIVLFGMELVTGNFALLPMAVWAGKSSWSATVRNWLWVWIGNFLGTAFVAVLLSISLSSAGNVDPLTAAEGGKGWAVVAAKIIAIHKANTVVKYEALGSTGFFLAFLRGVIANWLVCLGVTMALVSKSVPGKILACWLPITAFQTMGMEHIVVNMFLHTTGPLLGSGIPFTKVIFWNFLPVTIGNIVGGMVFIGMLFYSTHKTPISNVLPDVKDEKLERELEAQLGAR

SEQ ID NO: 32549 - protein, 630 aa, Prochlorococcus marinus str. NATL2A
MGKVVGIDLGTTNSCVAVMEGGKPTVIANAEGFRTTPSVVAYTKNQDQLVGQIAKRQAVMNPENTFYSSKRFVGRRVDEVNDESKEVSYGVEKAGSNVKIKCPILDKQFSPEEVSAQVLRKLSDDAGKYLGETVTQAVITVPAYFNDSQRQATKDAGKIAGLEVLRIINEPTAAALAYGLDKKSNERILVFDLGGGTFDVSVLEVGDGVFEVLSTSGDTHLGGDDFDRVIVDHLASTFKGNEGIDLRQDKQALQRLTEAAEKAKIELSNATQSEINLPFITATPEGPKHLDLTLTRGKFEELASNLIDRCRVPVEQALKDAKLSTGEIDEIVMVGGSTRMPAVKELVKRVTTKDPNQTVNPDEVVAVGAAIQGGVLAGEVKDILLLDVTPLSLGVETLGGVMTKMISRNTTVPTKKAETYSTAVDGQTNVEIHVLQGEREMASDNKSLGTFRLDGIPPAPRGVPQIEVTFDIDANGILSVNAKDKGSGKEQSISITGASTLSDNEVDKMVKDAEMNASADKEKREKIDIKNQAETLVYQAEKQIGELGDKVDEAAKAKVEEKRIKLKEATEKDDYESMKTLVEELQQELYSLGASVYQQANDASQAAADSNTDSKVDGDDVIDADFTETK

SEQ ID NO: 32550 - protein, 400 aa, Prochlorococcus marinus str. NATL2A
MGKANKVVLAYSGGVDTSVCIPYLKEEYGVEHVIAFAADLGQGDELDEIKKKAISAGASQSLIGNLVKPFIEDFAFPAIRSNALYQGRYPLSTALARPLIAKKLVEIARELNADGVAHGCTGKGNDQVRFDVTIGALAPDLQLLTPAREWGMSREETIAYGEKYGIVPPVSKKNPYSIDLNLLGRSIEAGPLEDPFQMPSEEVFGITSSIADSPNEPEIADILFENGYPVAINGEEMEPVSLIKKANSLAGKHGFGRLDIIEDRVVGIKSREIYETPGLLLLIKAHQEIESLTLPADLLDTKSRLERQWADLVYKGFWFSPLKEALDGFINYSQKQVNGTVRVRLFKGNVDVIGRKSKENSLYISDMSTYGSEDKFNHKSAEGFIYVWGLPSRIWSWINK

SEQ ID NO: 32551 - protein, 263 aa, Prochlorococcus marinus str. NATL2A
MISSTSETILSIKDLHASVEDQEILHGVNLLVKEGEIHAIMGRNGSGKSTLSKVIAGHPSYKVLSGSIQFKGKNILELEPEERARIGIFLGFQYPVEIPGVSNLEFLRVATNSRRKELLKSELDTFQFEDLVKQRLKIVEMNPAFLERSVNEGFSGGEKKRNEILQMALLEPVISILDETDSGLDIDALRIVASGINRLSQPNSATILITHYQRLLNEITPDFVHIMADGKIIKTGNKELAIDLEKSGYDCIDKNTKEKEIAK

SEQ ID NO: 32552 - protein, 248 aa, Prochlorococcus marinus str. NATL2A
MTATSPSKETILVADDEASIRRILETRLSMIGYQVVTACDGNEALDLFRNCEPDLVVLDVMMPKLDGYGVCQELRKESDVPIVMLTALGDVADRITGLELGADDYVVKPFSPKELEARIRCVLRRVEKEQIAGLPNSGVIAVMNLKIDTNKRQVYRNDERIRLTGMEFSLLELLVSRSGEPFSRGEILKEVWGYTPERHVDTRVVDVHISRLRSKLEDDPANPELILTARGTGYLFQRIVDSMIPEGS

SEQ ID NO: 32553 - protein, 382 aa, Prochlorococcus marinus str. NATL2A
MDNNHLIFDFQSSTPCCTKVVEEMAPYWNELWGNPSNTNNRSGVFASAAVEVSREKIASYLNINPKRLIFTSGATEANNLGLVGHARAKAQLIGKPGHIITVSTEHHAVLDPLRQLQKEGFRLTELHPNKEGLINIEQLSEAFEKDTFLVSVMAANNEIGVLQPIGDIGSFCKRKGIAFHSDAAQAFGYLDLDPDKFRIDLMSLSAHKIYGPKGIGALVIREGFPLEPSQYGGGQELGLRSGTLPVPLIVGFAKAVEITKNDQDERNKRLLFFRNLLLSGLKKNISGLIVNGSIDQRLPHNLNITFPGVKGSQLHGQLRRFIFCTSGSACSNGEASHVLQEIGLSKKDAEASIRMSIGRNTTEKDINKAINIITNIVINLRQ

SEQ ID NO: 32554 - protein, 329 aa, Prochlorococcus marinus str. NATL2A
MQFIDQAIIDVKAGSGGDGISAFRREKYVPAGGPAGGDGGQGGNVVLEADDNLQTLLDFKFQKLISAENGQRGGPNKCTGASGKDTVLKVPCGTEVRHLSTNIILGDLTNKGQQLIVAFGGKGGFGNARYLSNSNRAPEKFTEGKVGEEWSLQLELKLLAEVGIIGLPNAGKSTLISVLSSARPKIADYPFTTLIPNLGVVRRPSGDGTVFADIPGLISGASKGIGLGHDFLRHIERTKVLLHLIDSASTDPINDFKTINEELTSYGHGLISRPRIFVLNKKELLNENEIKKLLNKIEKMTMKKVHIISAVTKFGLDDLLSSIWNELGY

SEQ ID NO: 32555 - protein, 416 aa, Prochlorococcus marinus str. NATL2A
MVEFNENNFLNMGPLSGRISRLLKEKMTSKQSSNKNLAGLIKPYGGELINLMASDQEAKELKKNSFKTLNCSDRNACDIELLLIGAFSPLNGFMNEKNYNSVVKQNRLESGLLFGLPIVMDTDREDINPGDSVLLNYKDQELAILEIQEKWTPDKVIEAKFCYGTTSLEHPAVRMISMERKKYYLGGSIKGLELPKRVFTCQTPAQVRENLPSGEDVVAFQCRNPIHRAHYELFTRALEANNVSKNGVVLVHPTCGPTQEDDIPGSVRFQTYEKLASEVNNPKIRWSYLPYSMHMAGPREALQHMIIRRNYGCTHFIIGRDMAGCKSSLDGEDFYGPYDAQNFANECCQELEMQTVPSLNLVFTEEEGYVTADYAKEKGLHIKKLSGTQFRKMLRSGEEIPEWFAFKSVVDVLRAA

SEQ ID NO: 32556 - protein, 243 aa, Prochlorococcus marinus str. NATL2A
MVTSYRGFTRFNQPKNSQMVGSSSTPLPPNKTLLDVIKSLEGVSTETVDRSKTIFFPGDPAERVYLIRRGAVRLSRVYETGEEITVALLRENSLFGVLSLLTGHRSDRFYHAVAFTRVELVSAPATSLRNAIEQDASVGLLLLQGLSSRVLQTETMIETLTHRDMSSRLASFLLVLCRDFGVPGEKGVTIDLRLSHQAIAEAIGSTRVTITRLLGELKSSSLLAIDRKKITIFDPIALAKRFN

SEQ ID NO: 32557 - protein, 496 aa, Prochlorococcus marinus str. NATL2A
MTTALQSPPRRTTSRLQDASLLNGPMLLLRSIKGFRRSQSWAWLASIPLALLGLGVFTFSARAEVALSDLTGPQAASFLADNLWLFIATILVIFMNAGFAMVEAGMCRQKNAVNILAKNLFVFALAVTAYWVIGYSLMYGGSVIDGWLYFQGLFVDPDPSGALECAAAGDTGCLVPAVDFLFQSAFAGTAATIVSGLVAERVKFGEFVVFSIVLTAFIYPIAGSWQWNGGWLAELGFIDFAGSSIVHSVGGWAGLVGAMLLGPRIGKFVDGKAQAMPGHNMAIATLGALILWIGWYGFNPGSELAMDQYVAYVAVTTTLAAAGGAIAATVLSTITSGKPDLTMIINGILAGLVSITAGCGNMTFAGSWLAGAVGGLIVVVAVAALDSAGIDDPVGAFSVHGVCGVWGTVVIGLWGVDGMDPGAAGIGLLNGGGINQFFIQALGAAAYGIWTVVTCWIAWQIIGGFFGGIRVSEAEETQGLDIGEHGMEAYPDFASS

SEQ ID NO: 32558 - protein, 582 aa, Prochlorococcus marinus str. NATL2A
MTLTSTPNQIEDSGTQTQYEMSGADALMDSLRRHGVDTIFGYPGGAILPIYDAVFKAEQEGWLKHILVRHEQGGTHAADGFARATGKVGVCFGTSGPGATNLVTGIATAQMDSVPLVVITGQVPRPAIGTDAFQETDIFGITLPIVKHSWVVRDPSEIAKVVAQAFLIASSGRPGPVLIDIPKDVGQEMFKYVPVEPGSIKPLGFELPFAPEHKAISSALDLIENAEQPLLYVGGGVISSGAHETLAAIANRYQIPVTTTLMGKGAFDERDPLSVGMLGMHGTAYANFAVTECDLLIAIGARFDDRVTGKLDTFAPKAKVIHFEIDPAEINKNRVVEVSVLGDVGISLVKLLDLSNQRKTNPRTSQWLNKIKNWKNNFPLITPPKEGEIYPQEVLIALRDLAQDAYITTDVGQHQMWAAQYLLNGPRQWISSAGLGTMGFGMPAAMGVKVALPKEKVICIAGDASILMNIQELGTIAQYKLNLKVIIINNHWQGMVRQWQESFYDERYSASNMSVGEPDFISLSKAFGIEGIVISERENLIPQLQKALENEGPVLVNVNVRKGENCYPMVPPGKSNAEMVGI

SEQ ID NO: 32559 - protein, 337 aa, Ralstonia eutropha JMP134
MTQASRAGSRALVLLTDPIVPEAHARLAANADVELLPPGLTGAASDQALRDRIAKVDGLIVRRQLPGDLFEREHRLRAVVRHGVGVDFIPVDRATAHGIPVANTPDTNSNAVAEYAIAAMLAMTRRLATFDKAVRDGDWNRRMIAGEQSRELRGSTLGIIGFGAIGRRVAEIAGAGFAMKLLAHTSTPSKLPPHVTPAELADLFARSDYIVLACPLTKATRGMVNKALLAHARPTTVLVNVARGPIIQQADLIDALSSGTIGGAVLDVFEQHPLPDDSPLRALQNVLLTPHIAGLTQDASMAMGLAAADTMLALLQGERPRNIVNPEFNAVNQETTK

SEQ ID NO: 32560 - protein, 327 aa, Ralstonia eutropha JMP134
MMAQDHNQSRENAYVCRRMPAEIEAALKERFVVKLNESDELTDSATIIERAKGASVLLVTATERIDGNVLRALSPTLKTVATLSVGYDHIDLATAGELGIEVLHTPDVLSDACAEVALMLLLNAARRGYEADRMVRSGQWPGWAPTQLLGKGLVGKRLGIFGMGRIGRAIATRARAFGMQIHYHNRSQLGPEDAEGAIYHATLDGLCRHSDMLLVAAPGSPQLKGALNQVHIRALPRGAVVANISRGDIVDDDALIEALNNGHVFAAGLDVFANEPNVDPRYRALDNVFLSPHIGSATEETRNAMGWLLIDGIEALRRGERPANRLS

SEQ ID NO: 32561 - protein, 400 aa, Ralstonia eutropha JMP134
MLNSNIDPIVILSAARTPMGGFQGELSPLTAPELGGAAIRAAVERANVNETSIQELLMGCVLPAGVGQAPARQAGIHGGLSLSVPCTTISKVCGSGMKAVMLAHDLLVAKTNDIMVAGGMESMSNAPYLLPKARGGYRLGHGTVLDHMFLDGLEDHYREDTRGRLMGTFAEDCAATYGFTRDAQDEWAVSSTLRAQAAMEAGDFDWETVPITLEGRKGPVQVRSDEQPRKADLNRVSTLKPAFRKDGTVTAANSSSISDGAAAMVLARQSVAETMGLQPIARIVGHATHAQTPATFTTAPIGAIHKLLGQLEWSASEVDLWEINEAFAVVAMAAVRDLRLDREKVNIHGGACALGHPIGASGARILVTLLGALKKTGGRRGIASLCIGGGEATAVAVEMA

SEQ ID NO: 32562 - protein, 67 aa, Ralstonia eutropha JMP134
MATGTVKWFNDTKGFGFITPDDGGDDLFAHFSEVQGSGFKSLQEGQKVSFEVKQGPKGKQAASIKPL

SEQ ID NO: 32563 - protein, 67 aa, Ralstonia eutropha JMP134
MATGTVKWFNDAKGFGFITPDDGGDDLFAHFSEVQGSGFKSLQEGQKVSFEVKQGPKGKQAATIKPL

SEQ ID NO: 32564 - protein, 372 aa, Ralstonia eutropha JMP134
MQIGIPQETRAGETRVAATPETVKKYVAQGHEVIVQAGAGVRASQPDSAYEAAGARIGTAAQALGAELVLKVRAPDEAELCQMKPGATLVGMLNPFDAENNARMAAAGVVAFALEAAPRTTRAQSMDVLSSQANIAGYKAVLEAAHHYQRFMPMLMTAAGTVKAARVLILGAGVAGLQAIATAKRLGAVIEASDVRPAVKEQIESLGAKFLDVPFETEEEREIAQGVGGYARPMPADWMRRQAELVHQRASQADIVITTALLPGRPAPVLLEEETVMAMKPGSVVVDLAAAQGGNCPLTVADQVVERHGVVLVGHTNLASMVAADASALYARNVLDFLKLIIDKEGKLAINLEDDIVEACLTTRRDKMALAS

SEQ ID NO: 32565 - protein, 372 aa, Ralstonia eutropha JMP134
MHIGIPQETRVGETRIAATPETVKKYVAQGHKVTVQSGAGLRASLPDGTYESAGAHIGTAAQAFGAELVLKVRSPDEDELAQMKPGAVLVGMLNPFDAENKARMAAAGITAFALEAAPRTTRAQSMDVLSSQANIAGYKAVLVAAHYYQRFMPMLMTAAGTVKAARVLILGAGVAGLQAIATAKRLGAVIEASDVRPAVKEQIESLGGKFLDVPFITDEEREIAQGVGGYARPMPPDWMRRQAELVHERARQADIIITTALIPGRQAPVLLQEATVREMKPGSVVVDLAAAQGGNCPLTVADEVVERHGVTFVGHTNLASMVAADASALYARNVLDFLKLVIDKEGQFTLNLEDDIVAACLMTRREEEALAC

SEQ ID NO: 32566 - protein, 405 aa, Ralstonia eutropha JMP134
MEATSRPIYMDYSATTPVDPRVVAKMTPYLYELFGNPASRSHAYGWESEEAVEEGRQHVADLLGADPREIVWTSGATEGNNLAIKGAAHFYCGRGKHIVTVKTEHKAVLDTCRELERQGFEVTYLDVDVDGLVDITRLTEALRPDTILVSVMMVNNEIGVIQPIREIGELCRERSILFHCDAVQAAGKIEIDLDDLKVDLMTVTAHKVYGPKGIGALYVRRKPRVRLEAQIHGGGHERGMRSGTLPTHQIVGMGEAFRLASLEMREESKRVGRLRDRLLAGLSGMDEVYVNGSLTKRIPHNLNASFNFVEGESLIMGIKGVAVSSGSACTSASLEPSFVLRALGRSDELAHSSIRFTLGRFTTEAEVDKVIEQVVATVTKLRTLSPLWDMYQEGVDMNAIQWAAH

SEQ ID NO: 32567 - protein, 372 aa, Ralstonia eutropha JMP134
MQIGIPTETRAGEARVAATPETVKKYVAQGHKVVVQAGAGLRASQPDSAYEAAGATIGIAADALGAPLVLKVRAPEITELAHMKPGAVLVGMLNPFDTENNARMTAAGITAFALEAAPRTTRAQSMDVLSSQANIAGYKAVLVAAHHYQRFMPMLMTAAGTVKAARVLILGAGVAGLQAIATAKRLGAVIEASDVRPAVKEQIESLGGKFLDVPFVTDEEREIAQGVGGYARPMPPDWMKRQAELVHQRAIQADIIITTALIPGRKAPVLLHEATVQQMKPGSVVVDLAAAQGGNCPLTVADEVVERHGVTFVGHTNLASMVAADASALYARNVLDFLKLVIDKEGQFTLNLEDDIVAACLMTRREEAALAG

SEQ ID NO: 32568 - protein, 372 aa, Ralstonia eutropha JMP134
MHIGVPVETHACESRVAATPETVKKYVAQGHQVVVQAGAGVRASQPDSAYEAVGATIGTAAEALGADLVLKVRAPDATELAQMKPGSVLVGMLNPFDAENNARMTAAGITAFALEAAPRTTRAQSMDVLSSQANIAGYKAVLIAAHYYQRFMPMLMTAAGTVKAARVLILGAGVAGLQAIATAKRLGAVIEASDVRPAVKEQIESLGGKFLDVPFVTDEEREIAQGVGGYARPMPPDWMRRQAELVHERAKQADIIITTALIPGRKAPVLLQEATVQQMKPGSVVVDLAAAQGGNCPLTVADEVVERHGVILIGNTNLASMVAADASALYARNVLDFLKLVIDKDGQFVINKEDDIVAACLMTRREEAALAC

SEQ ID NO: 32569 - protein, 639 aa, Brassica rapa subsp. pekinensis
MAMANSGSSAAAPPRQDQHDRSKWLLDCPEPPSPWHELKIQVKESFLTKAKRFKSLQKQPLPKRILSILQAVFPIFGWCRNYKLTMFKNDLMAGLTLASLCIPQSIGYATLAKLDPQYGLYSSVGPPLIYALMGTSREIAIGPVAVELIDPETDPLGYKKLVLTTTFFAGIFQASFGIFRLGFLVDFLSHAAIVGFMGGAAIVIGLQQLKGLLGITNFTTNTDIVSVLRAVWRSCHQQWSPHTFILGCSFLSFILIARFIGKRNKKLFWLPAIAPLISVVVSTLMVFLTKADEHGVKTVRHIRGGLNPISINDLEFNTPHLGHIAKIGLIVAVVALTEAIAVGRSFAGIKGYRLDGNKEMVAIGVMNVLGSFTSCYAATGSFSRTAVNFAAGCETAMSNIVMAVTVFIALECLTRLLYYTPIAILASIILSALPGLIDINEAIHIWKIDKLDFLALIGAFFGVLFGSVEIGLLVAVVISFAKIILISIRPGIETLGRIPGTDIFADTDQYPMSVKTPGVLICRVKSALLCFANASSIEERIMRWINEEEEDENTKSNDERKILFVVLDMSNLMNVDTSGITALVELHNNLIQNGIELVIVNPKWHVFHKLNQAKFVSKIGGRVYLTIGEALDACFGLKV

SEQ ID NO: 32570 - protein, 325 aa, Brassica rapa subsp. pekinensis
MGRSPSSGDSRLKKGPWTPDEDEKLVKYVKKHGHSSWSALPKLAGLNRCGKSCRLRWTNYLRPDIKRGKSLRRREQTILNLHAVVGNKWSTIANNLPGRTDNEIKNFWNTHLKKKLIQMGVDPMTHRPRTDVLSSLSQLISLSSNLRGFVDQEQIMLKLQTEMAKLELFQYLLQPPSMYNNINPNDFDTRSLLSSIASTTNNNLNLGSYLQDFNSLPSLKTLNTNIGPSSVFPQNLDDNHFKFFNQRENLPVSPIWLSDPSSSNQSFLPSLDPSYSMADDLIRNQYVIEDVNSNLTSSSCQESGASVSAAWPDHLLDDSIFSHIP

SEQ ID NO: 32571 - protein, 809 aa, Malus x domestica
MGIVTLPPLPPPPPKGNLHHRHHSIDSENYSNPPNSMSQDYHQGIFTFSNGFERSAMTTHQEQQQQQQHHLAQQIRREKLRVQGFETPPPPPLVGLNEEESSGLPAYETAGMLSEMFNYPPGGGPVGAAELLEHPMSANYRMMPRPQQAAAVSAAADWYGRVGGGGLGPLGDSKNQHHHQISTINADSAAAMQLFLMNPSQPRSPSPPPSHTTSSTLHMLLPNPSTTTNSLQGFAAASGGGAFGQFTWVPESHQGHEAGGNTAGGGGEIGGVVEGQGLSLSLSTSLQHLEAAKAEEFRMGSDSASGLLYYNNQGDHQHQGSNPQYKNLGSHHHQALHSLQQGGVVGGHHVSFGSSSSFGVVNVLRNSKYVKAAQELLEEFCSVGRGQLKKNKFGGSTSGRQNTTTNPSSNPASGGGGDGGASSSSSKDVPPLSAADRIEHQRRKVKLLSMIDEVDRRYNHYCEQMQMVVNAFDLVMGFGAAVPYTALAQKAMSRHFRCLKDAIAAQLKHSCELIGEKDGAGTSGITKGETPRLKLLEQSLRQQRAFHQMGMMEQEAWRPQRGLPERSVNILRAWLFEHFLHPYPSDADKHLLARQTGLSRNQVSNWFINARVRLWKPMVEEMYQQEANEEEEVGEGGVGGATSAAADQERERNSNAGLAAQTPTPTTTTTTTTKNSPASKRSDINASENDPSLVAINRHQQQQHHHPMMATTTSTTVASPAYQCFPAAASDDTCRSYGTTSANANIAAHHDHQNSSNIDSSTTLISFGTTTAAGDVSLTLGLRHAGGGGGNNMPDKTSSSFSIRDFGGC

SEQ ID NO: 32572 - protein, 358 aa, Saccharomyces cerevisiae
STKVVNVAVIGAGVVGSAFLDQLLAMKSTITYNLVLLAEAERSLISKDFSPLNVGSDWKAALAASTTKTLPLDDLIAHLKTSPKPVILVDNTSSAYIAGFYTKFVENGISIATPNKKAFSSDLATWKALFSNKPTNGFVYHEATVGAGLPIISFLREIIQTGDEVEKIEGIFSGTLSYIFNEFSTSQANDVKFSDVVKVAKKLGYTEPDPRDDLNGLDVARKVTIVGRISGVEVESPTSFPVQSLIPKPLESVKSADEFLEKLSDYDKDLTQLKKEAATENKVLRFIGKVDVATKSVSVGIEKYDYSHPFASLKGSDNVISIKTKRYTNPVVIQGAGAGAAVTAAGVLGDVIKIAQRL

SEQ ID NO: 32573 - protein, 563 aa, Saccharomyces cerevisiae
MSEITLGKYLFERLKQVNVNTVFGLPGDFNLSLLDKIYEVEGMRWAGNANELNAAYAADGYARIKGMSCIITTFGVGELSALNGIAGSYAEHVGVLHVVGVPSISAQAKQLLLHHTLGNGDFTVFHRMSANISETTAMITDIATAPAEIDRCIRTTYVTQRPVYLGLPANLVDLNVPAKLLQTPIDMSLKPNDAESEKEVIDTILVLIKDAKNPVILADACCSRHDVKAETKKLIDLTQFPAFVTPMGKGSIDEQHPRYGGVYVGTLSKPEVKEAVESADLILSVGALLSDFNTGSFSYSYKTKNIVEFHSDHMKIRNATFPGVQMKFVLQKLLTAIADAAKGYKPVAVPARTPANAAVPASTPLKQEWMWNQLGNFLQEGDVVIAETGTSAFGINQTTFPNNTYGISQVLWGSIGFTTGATLGAAFAAEEIDPKKRVILFIGDGSLQLTVQEISTMIRWGLKPYLFVLNNDGYTIEKLIHGPKAQYNEIQGWDHLSLLPTFGAKDYETHRVATTGEWDKLTQDKSFNDNSKIRMIEVMLPVFDAPQNLVEQAKLTAATNAKQ

SEQ ID NO: 32574 - protein, 237 aa, Arabidopsis lyrata
RYLKPAQNLLDEVVSVKKELNQMGKKKMKVNDFNNGSKEIEGGGSGELSNDLNGKSMELSTVEREELQNKKNKLLTMVDEVDKRYNQYYHQMEALASSFEIVAGLGSAKAYTSVALNRISRHFRALRDAIKEQIQIIREKLGEKGGESLDEQQGERIPRLRYLDQRLRQQRALHQQLGMVRPAWRPQRGLPENSVSVLRAWLFEHFLHPYPKESEKIMLAKQTGLSKNQVANWFINA

SEQ ID NO: 32575 - protein, 368 aa, Pseudotsuga menziesii
IQPFGCMVAVNDKTFEVIAYSENAPDMLQVSAHAVPSVEDQQILCIGSDARTLFTPSSTMALQKAAKFGDLNLLNPILVHSKSSGKPFYAILHRIDVALVMDFEPIKPSDVSTSAMGALQSYKLAAKAISRLQSIPSGNIGLLCDMIAQEVHELMGYDRVMAYKFHDDDHGEVISEIRRSDLEPYLGLHYPATDIPQASRFLFMRNRVRMICDCCAPPVIVIQDKRLPRDLSFCGSTLRAPHGCHAQYMANMGSIASLVMAVVVTEKEEDADSEGQIQQKGRRLWGLVVCHHTSPRYVPFPLRYACEFLMQVFGIHLNKEVELAIQMKEKRILRTQTLLCDMLLRDAPLGIVSQKPNIMDLVKSDGAA

SEQ ID NO: 32576 - protein, 528 aa, Arabidopsis thaliana
MAMYSLSNDPFIHVHGLMMVMYSLSNDLFIRILWKKVIMVTNRRRWVECYKIHDRDPFQATYPCVRLIKVMQKAFGSFIYKMLAFYEYMTRGLNRFHLLLVAYKNPKCRNLLASLSFQVKKSKPLQILFLNPTMEESSNQQILNSETRPDPIQKPPESPATKLSFPRLFLWFDQSNRIKTLLSWSIFFLLAVIVPMISHFVLICADCDFKHRRPYDGLVQLSLSIFAGISFVSLSDWSKKYGIRRFLFFDKLKDVSDKVRIGYEAKIQRSMKLLAIFVLPSTTLQAIYRIWWYASGFNQIPYIINPTLSHVLACTLQLSSWLYRTSLFIIACILYQNICHLQVLRLDEFARCFASEIKDFSSILAEHLKIRRELKIVSHRFRRFILLSLFFVTATQFMALLTTIRASVPFNIYEVGELALCSTSLVSGLFICLKSATQMTHKAQSVTSIATKWNVCASLDTFDVLYDGETPKCPTTTQHSQILSRRRNVVQSSDDDEEGEGDDNDLEIHPIFARAISSQKRQALVNIT

SEQ ID NO: 32577 - protein, 349 aa, Arabidopsis thaliana
KPVFCGNFEYDAREGDLERLFRKYGKVERVDMKAGFAFVYMEDERDAEDAIRALDRFEFGRKGRRLRVEWTKGERGGDKRSGGGSRRSSSSMRPSKTLFVINFDADNTRTRDLEKHFEPYGKIVNVRIRRNFAFIQYEAQEDATRALDASNNRKLMDKVISVEYAVKDDDARGNGHSPERRRDRSPERRRRSPSPYKRERGSPDYGRGASPVAAYRKERTSPDYGRRRSPSPYKKSRRGSPEYGRDRRGNDSPRRRERVASPTKYSRSPNNKRERMSPNHSPFKKESPRNGVGEVESPIERRERSRSSPENGQVESPGSIGRRDSDGGYDGAESPMQKRRSPRSPPADE

SEQ ID NO: 32578 - protein, 498 aa, Solanum lycopersicum
MAKKNFVLHYNLLLISLLAFLFLLTEGAPQSALVTQLPGFNGTFNSKHYAGYVNIDESHGKNLYYYFVESERNPSKDPVVLWLNGGPGCSSFDGFVYEHGPFNFDFGKPSGSLPSLHNNPYSWSKVSNIIYLDSPVGVGLSYSGNKSDYNTGDLKTASDSHSFLLKWFEIYPEFLKNPFYISGESYAGIYVPTLASEVIKGIDAGVRPAINFMGYMVGNGVADDIIDGNAIVPFQHGMGLISDDLYEEAVVACHGNFYEPVDSNCSEKLNKIDQVVYDLNVYDILEPCYHSKKPSVITTGNSRLPMSFRKLGETERPLPVRKRMFGRAWPYKAPVRAGHVPTWPEILNSVEVPCTDDRVATLWLNNADVRKAIHAEPATVIGPWELCTDKIDLDHDSGSMIPYHKNLTARGYRAIIFSGDHDMCVPFTGSAVWTKSLGYPIVDEWRPWYVNDQVAGFIQGYANNLIFMTIKGAGHTVPEYKPREALAFYSRWLEGKKI

SEQ ID NO: 32579 - protein, 322 aa, Coccidioides posadasii
MTSPSTIKQKFIAKGHQLGVVAVGFSDGQPNQGVDPSGLIEAGLLDQLRDDLEYDIRHDGQVHTYAEFVPEHDPNHRGMKKPRTVSAATQQLSRQVYEHAREGRLVLTLGGDHSIAIGTISGTAKAIRERLGREMAVIWVDAHADINRPEDSVSGNIHGMPLAFLTGLAKDDNEDMFGWLQPDNLISPRKLVYIGLRDVDRAEKRLLREHGIKAFSMHDIDKYGIGRVVEMALAHIGQDTPIHLSFDVDALDPQWAPSTGTPVRGGLTLREGDFIAESIHETGSLVAMDLVEVNPTLETLGASETIRAGCSLVRSALGDTLL

SEQ ID NO: 32580 - protein, 57 aa, Sporosarcina globispora
IKWFNSEKGFGFIEVEGQDDVFVHFSAIQGEGFKCLEEGQAVSFEIVEGNRGPQAAN

SEQ ID NO: 32581 - protein, 365 aa, Mesembryanthemum crystallinum
MAAAVTAAVSFPSTKSTPLSTRTSSVITHEKINFNKVPLYYRNVSVGGKVGTIRAVASDVEAPVAKVEKHSKKMEEGVIVNKYKPKNPYTGRCLLNTKITGDDAPGETWHMVFSHEGEIPYREGQSVGVIPEGIDKNGKPHKLRLYSIASRPLGDFGDSKTVSLCVKRLIYTNDNGEIVKGVCSNFLCDLKPGSEVVLTGPVGKEMLMPKDPNATIIMLATGTGIAPFRSFLWKMFFEKHDDYKFNGLAWLFLGVPTSSSLLYKEEFEKMKEKAPENFRLDFAVSREQTNEKGEKMYIQTRMAQYDRELWELLKKDNTYVYMCGLKGMEKGIDDIMVSLAAEDGIDWFDYKKQLKKAEQWNVEVY

SEQ ID NO: 32582 - protein, 363 aa, Vicia faba
MAAAVTAAVSLPYSNSTSLPIRTSIVAPERLVFKKVSLNSVSISGRVGTIRAQITTEAEAPVTKVVKHSKKQDEGIVVNKFKPKEPYVGRCLLNTKITGDDAPGETWHMVFTTEGEVPYREGQSIGIVPDGIDKNGKPHKLRLYSIASSAIGDFGDSKTVSLCVKRLVYTNDAGEVVKGVCSNFLCDLKPGSEVKITGPVGKEMLMPKDPNATVIMLGTGTGIAPFRSFLWKMFFEKHEDYKFNGLAWLFLGVPTSSSLLYKEEFEKMKEKAPENFRLDFAVSREQVNDKGEKMYIQTRMAQYAEELWELLKKDNTFVYMCGLKGMEKGIDDIMVSIRPKDGIDWIEYKRTLKKAEQWNVEVY

SEQ ID NO: 32583 - protein, 356 aa, Hordeum vulgare
MALLTDLLNLDLSGSTEKIIAEYIWIGGSGMDLRSKARHLPGPVTHPSKLPKWNYDGSSTGQAPGEDSEVILYPQAILKDPFREGNNILVMCDCYTPRGEPIPTNKRYNAAKILSNPDVAKEEPWYGIEQEYTLLQKDINWPLGWPVGGFPGPQGPYYCGIGADKSFGRDIVDSHYKACLFGGVNISGINGEVMPGQWEFQVGPTVGISAGDQVWVARYILERITEIAGVVVTFDPKPIPGDWNGAGAHTNYSTESMRNDGGFKVIVDAVEKLKLKHKEHIAAYGEGNERRLTGKHETADINTSSWGVANRGASVRVGRETEQNGKGYFEDRRPASNMDPYVVTSMIAQTTILWKP

SEQ ID NO: 32584 - protein, 1515 aa, Azospirillum brasilense
MTTELNQGEQFVADFRANAAALTTANAYNPEDEHDACGVGFIAAIDGKPRRSVVEKGIEALKAVWHRGAVDADGKTGDGAGIHVAVPQKFFKDHVKVIGHRAPDNKLAVGQVFLPRISLDAQEACRCIVETEILAFGYYIYGWRQVPINVDIIGEKANATRPEIEQIIVGNNKGVSDEQFELDLYIIRRRIEKAVKGEQINDFYICSLSARSIIYKGMFLAEQLTTFYPDLLDERFESDFAIYHQRYSTNTFPTWPLAQPFRMLAHNGEINTVKGNVNWMKAHETRMEHPAFGTHMQDLKPVIGVGLSDSGSLDTVFEVMVRAGRTAPMVKMMLVPQALTSSQTTPDNHKALIQYCNSVMEPWDGPAALAMTDGRWVVGGMDRNGLRPMRYTITTDGLIIGGSETGMVKIDETQVIEKGRLGPGEMIAVDLQSGKLYRDRELKDHLATLKPWDKWVQNTTHLDELVKTASLKGEPSDMDKAELRRRQQAFGLTMEDMELILHPMVEDGKEAIGSMGDDSPIAVLSDKYRGLHHFFRQNFSQVTNPPIDSLRERRVMSLKTRLGNLGNILDEDETQTRLLQLESPVLTTAEFRAMRDYMGDTAAEIDATFPVDGGPEALRDALRRIRQETEDAVRGGATHVILTDEAMGPARAAIPAILATGAVHTHLIRSNLRTFTSLNVRTAEGLDTHYFAVLIGVGATTVNAYLAQEAIAERHRRGLFGSMPLEKGMANYKKAIDDGLLKIMSKMGISVISSYRGGGNFEAIGLSRALVAEHFPAMVSRISGIGLNGIQKKVLEQHATAYNEEVVALPVGGFYRFRKSGDRHGWEGGVIHTLQQAVTNDSYTTFKKYSEQVNKRPPMQLRDLLELRSTKAPVPVDEVESITAIRKRFITPGMSMGALSPEAHGTLNVAMNRIGAKSDSGEGGEDPARFRPDKNGDNWNSAIKQVASGRFGVTAEYLNQCRELEIKVAQGAKPGEGGQLPGFKVTEMIARLRHSTPGVMLISPPPHHDIYSIEDLAQLIYDLKQINPDAKVTVKLVSRSGIGTIAAGVAKANADIILISGNSGGTGASPQTSIKFAGLPWEMGLSEVHQVLTLNRLRHRVRLRTDGGLKTGRDIVIAAMLGAEEFGIGTASLIAMGCIMVRQCHSNTCPVGVCVQDDKLRQKFVGTPEKVVNLFTFLAEEVREILAGLGFRSLNEVIGRTDLLHQVSRGAEHLDDLDLNPRLAQVDPGENARYCTLQGRNEVPDTLDARIVADARPLFEEGEKMQLAYNARNTQRAIGTRLSSMVTRKFGMFGLQPGHITIRLRGTAGQSLGAFAVQGIKLEVMGDANDYVGKGLSGGTIVVRPTTSSPLETNKNTIIGNTVLYGATAGKLFAAGQAGERFAVRNSGATVVVEGCGSNGCEYMTGGTAVILGRVGDNFAAGMTGGMAYVYDLDDSLPLYINDESVIFQRIEVGHYESQLKHLIEEHVTETQSRFAAEILNDWAREVTKFWQVVPKEMLNRLEVPVHLPKAISAE

SEQ ID NO: 32585 - protein, 667 aa, Nicotiana tabacum
MAGGAWNRRTSLIVFGIVLFGCLFAFSIATEEATKLGTVIGIDLGTTYSCVGVYKNGHVEIIANDQGNRITPSWVAFTDGERLIGEAAKNLAAVNPERTVFDVKRLIGRKFDDKEVQRDMKLVPYKIVNKDGKPYIQVKIKDGETKIFSPEEISAMILTKMKETAEAYLGKKIKDAVVTVPAYFNDAQRQATKDAGVIAGLNVARIINEPTAAAIAYGLDKKGGEKNILVFDLGGGTFDVSILTIDNGVFEVLSTNGDTHLGGEDFDQRIMEYFIKLIKKKHGKDISKDNRALGKLRREAERAKRALSSQHQVRVEIESLFDGVDFSEPLTRARFEELNNDLFRKTMGPVKKAMDDAGLEKTQIDEIVLVGGSTRIPKVQQLLKDYFDGKEPNKGVNPDEAVAYGAAVQGGILSGEGGDETKDILLLDVAPLTLGIETVGGVMTKLIPRNTVIPTKKSQVFTTYQDQQTTVTIQVFEGERSLTKDCRLLGKFDLTGIAPAPRGTPQIEVTFEVDANGILNVKAEDKASGKSEKITITNDKGRLSQEEIERMVKEAEEFAEEDKKVKERIDARNSLETYVYNMRNQINDKDKLADKLESDEKEKIETATKEALEWLDDNQSAEKEDYEEKLKEVEAVCNPIITAVYQKSGGAPGGESGASEDDDHDEL

SEQ ID NO: 32586 - protein, 668 aa, Nicotiana tabacum
MAGAWKRRASLIVFAIVLFGSLFAFSIAKEEATKLGTVIGIDLGTTYSCVGVYKNGHVEIIANDQGNRITPSWVAFTDGERLIGEAAKNQAAVNPERTIFDVKRLIGRKFDDKEVQRDKKLVPYEIVNKDGKPYIQVKIKDGETKVFSPEEISAMILTKMKETAEAYLGKKIKDAVVTVPAYFNDAQRQATKDAGVIAGLNVARIINEPTAAAIAYGLDKKGGEKNILVFDLGGGTFDVSILTIDNGVFEVLATNGDTHLGGEDFDQRIMEYFIKLIKKKHGKDISKDNRALGKLRREAERAKRALSSQHQVRVEIESLFDGVDFSEPLTRARFEELNNDLFRKTMGPVKKAMEDAGLEKNQIDEIVLVGGSTRIPKVQQLLKDYFDGKEPNKGVNPDEAVAYGAAVQGGILSGEGGDETKDILLLDVAPLTLGIETVGGVMTKLIPRNTVIPTKKSQVFTTYQDQQTTVTISVFEGERSLTKDCRLLGKFDLTGIAPAPRGTPQIEVTFEVDANGILNVKAEDKASGKSEKITITNDKGRLSQEEIERMVKEAEEFAEEDKKVKERIDARNSLETYVYNMRNQINDKDKLADKLESDEKEKIETATKEALEWLDDNQSAEKEDYDEKLKEVEAVCNPIITAVYQRSGGAPGGASEESNEDDDSHDEL

SEQ ID NO: 32587 - protein, 149 aa, Vicia faba
MKGGKSKGESKKAETKLAVNKKGAAATKGGKKPAKGKEPKDPNKPKRPPSAFFVFMADFREQYKKDHPNNKSVAAVGKACGEEWKSLSEEEKAPYVDRALKKKEEYEITLQAYNKKLEGKDDEEGSDKSKSEVNDEDEDEEDEEDEDDD

SEQ ID NO: 32588 - protein, 643 aa, Davidiella tassiana
MAPAIGIDLGTTYSCVGIYRDDRIEIIANDQGNRTTPSFVAFTDTERLIGDSAKNQVAINPHNTVFDAKRLIGRKFQDAEVQADMKHFPFKVIEKAGKPVTQVEFKGETKDFTPEEISSMILTKMRETAESYLGGTVNNAVITVPAYFNDSQRQATKDAGLIAGLNVLRIINEPTAAAIAYGLDKKQEGEKNVLIFDLGGGTFDVSFLTIEEGIFEVKSTAGDTHLGGEDFDNRLVNHFSNEFKRKHKKDLSDNARALRRLRTACERAKRTLSSSAQTSIEIDSLFEGIDFFTSNTRARFEEVGQDLFRGNMEPGERTLRDDKIDKSSVHEIVLGGGSTRIPKVQKLVSDFFNGKEPCKSINPDEAVAYGAAVQAAILSGDTSSKSTKEILLLDVAPLSLGIETAGGVMTALIKRNTTIPTKKSETFSTFSDNQPGVLIQVFEGERARTKDINLMGKFELSGIRPAPRGVPQIEVTFDLDANGIMNVSALEKGTGKTNKIVITNDKGRLSKEEIERMLADAEKYKEEDEAEAGRIQAKNGLESYAYSLKNTVSDPKVEEKLSAEDKETLTGAIDKTVAWIDENQTATKEEYEAEQKQLESVANPVMMKIYGAEGGAPGGMPGQGAGAPPPGAGDDGPTVEEVD

SEQ ID NO: 32589 - protein, 318 aa, Paracoccus denitrificans
MKPLDRIHEAAKALDRHIILPEGEDPRVAEAARRLLAAGLARVTLMGGPEIPGAGRIDPAGGPDLAELADHWHRMRAARGMTAERALTEMRDPIRQAAMRVRLGQADGTVGGAVATTADTVRAALQIIGKAPGAGIVSSFFLMLSCGPGAPVRGGMIFADCGLVIQPDARELAAIALSAADSCRRILAEEPRVALLSFSTAGSAEHPSLGRIREALALIRAAAPGLEVDGEMQFDAALDEAIRARKAPESPLTGRPNVFVFPDLADGNIGYKIAERLAGLTAIGPILQGLAKPANDLSRACSVKDIVNATAITAMQTK

SEQ ID NO: 32590 - protein, 346 aa, Volvox carteri
MQTMRAPAAQGAATRVASRRVFRPVASTKVSTAVTTDVSKRTVPTALEEGEMPLNTYSNKAPFKAKIRSVETITGPKATGETCHIIIETEGKIPFWEGQSYGVIPPGTKINSKGKEVPHGTRLYSIASSRYGDDFDGKTASLCVRRAVYVDPETGKEDPAKKGICSNYLCDATPGTEIVMTGPTGKVLLLPADANAPLICVATGTGIAPFRSFWRRCFMENVPSYKFTGLFWLFMGVANSDAKLYDEELQALAKAYPSQFRLDYALSREQKNRKGGKMYIQDKVEEYSDEIFDLLDNGAHMYFCGLKGMMPGIQEMLERVAKSKGLNYEEWVEGLKHRNQWHVEVY

SEQ ID NO: 32591 - protein, 332 aa, Gonyaulax polyedra
MAGPQLDDFTLVKVLGKGSYGKVMLVRGAQDNRLYAMKMLRKENVIKRNQVEHTKTERSVLETVSHPFIVTLHYAFQTPKKLYMVMEYCPGGELFFHLSRAGRFSEGRTRFYVAETSSAVAYLHQLNVIYRDLKPENLLIDGEGHAKITDFGLRKEGIQDNHSAMTMCGTPEYLAPEILDKKGHGKAVDWYSVGALTYEMLTGLPPFYTKDLQKLFDRIRRGELTYPDYVSVLAKEFLRALLQRNPDARLAGGVPGGDEVKGHEFFGGLDWVALEKRAIPPPFKPTFGGQKEDDVVKYFEKDFVGQPVVNSEVGEGGRDLGHLEASTLTGKR

SEQ ID NO: 32592 - protein, 319 aa, Staphylococcus aureus
GLDGKNMILRSAILLTITVIFAISSYTGLKKGIQKLSDINVWLSFVLLAFIFIIGPTVFIMETTVTGFGNMLRDFFHMATWLEPFGGIKGRKETNFPQDWTIFYWSWWLVYAPFIGLFIARISKGRRLKEVVLGTIIYGTLGCVLFFGIFGNYAVYLQISGQFNVTQYLNTHGTEATIIEVVHHLPFPSLMIVLFLVSAFLFLATTFDSGSYILAAASQKKVVGEPLRANRLFWAFALCLLPFSLMLVGGERALEVLKTASILASVPLIVIFIFMMISFLIILGRDRIKLETRAEKLKEVERRSLRIVQVSEEEQDDNL

SEQ ID NO: 32593 - protein, 316 aa, Triticum aestivum
MASASRLGLVVLVAMASAASAQLSSTFYDTSCPNALATIKAGVTTAVQNEARMGASLVRLHFHDCFVDGCDGSVLLADTGSFIGEQGAAPNNNSIRGMNVIDNIKTQVEAVCKQTVSCADILAVAARDSVVALGGPTWTVLLGRRDSTTASKTNAENDLPPPTFDLQNLTTLFGNKQLSMTDMVALSGAHTIGQSQCRFFRDRIYNETNINTTFATSLRANCPQSGGDSSLAPLDTQTPNGFDNAYYTNLMSQKGLLHSDQVLFNGGGADNTVRSFSSSAATFNSAFTTAMVNMGNIAPKTGTQGQIRLVCSKVNS

SEQ ID NO: 32594 - protein, 314 aa, Triticum aestivum
MAMGSASRISLVVLVALATAASGQLSSTFYDTSCPRALATIKSGVAAAVSSDPRMGASLLRLHFHDCFVQGCDASVLLSGMEQNAGPNVGSLRGFGVIDNIKTQLESICKQTVSCADILTVAARDSVVALGGPSWTVPLGRRDSTTASASLANSDLPGPSSSRSQLEAAFLKKNLNTVDMVALSGAHTIGKAQCSNFRTRIYGGDTNINTAFATSLKANCPQSGGNTNLENLDTTTPNAFDNAYYTNLLSQKGLLHSDQVLFNNDTTDNTVRNFASNAAAFSSAFTTAMIKMGNIAPLTGTQGQIRLSCSKVNS

SEQ ID NO: 32595 - protein, 631 aa, Arabidopsis thaliana
MSCSYLLSGDASVVASRRWSDVSSRQRLFLPRQSLRQPSGSSFSRCVRLVANVNDHFSKQSLATRNCLASVFSADLGGSNGNNDNGNGGGGGGDGGGDNSDDSSFDLRYLCFLLLGLSCFFHFRLSAASAIAKDQNSDSNGDAVKETVWEVRGSKRKRLVPDFVKDEFVSEESAFELSSSLTPENLLAQCRNLLTQFLLPEGFPNSVTSDYLDYSLWRGVQGIASQISGVLATQSLLYAVGLGKGAIPTAAAINWVLKDGIGYLSKIMLSKYGRHFDVHPKGWRLFADLLENAAFGMEMLTPVFPQFFVMIGAAAGAGRSAAALIQAATRSCFNAGFASQRNFAEVYNNFYMALVLITYQQLFVFLNYSGSLGEAQGMVSKSVGILLGIVVANCIGTSTSLALAAFGVVTTIHMYTNLKSYQCIQLRTLNPYRASLVFSEYLISGQAPLIKEVNDEEPLFPTVRFSNMKSPEKLQDFVLSSEAKAAAADIEERLQLGSKLSDVIHNKEEAIALFDLYRNEGYILTEHKGRFCVMLKESSTPQDMLRSLFQVNYLYWLEKNAGIEPASTYSDCKPGGRLHISLDYVRREFEHAKEDSESVGWVTEGLIARPLPTRIRLGHDRELLLSSPNSS

SEQ ID NO: 32596 - protein, 245 aa, Phalaenopsis amabilis
MGRGRVQLKRIENKINQQVTFSKRRSGLLKKAHEISVLCDADVALIIFSNKGKLCEYSTDSSMEKILERYEHYSYTERALYSNEDNPQADWRLEYNKMKAKVESLQKSQRHLMGEQLDYLSIKELQHLEQQLESSLKHIRSRKTQLMVDSISELQKKEKLLLEQNKTLQDMAKAKAKALVQNAAWEQQNKSQYSSEPPHAVISDSVPTPTSRTFQTRANGEESPQPQLRLGNSLLPPWMLSHVNG

SEQ ID NO: 32597 - protein, 250 aa, Phalaenopsis amabilis
MGRGKVQLKRIENKINRQVTFSKRRSGLLKKAHEISVPCDAEVALVIFSAKGKLYGYSTDSCMDRILDRYERYCYAEKALQITEPESQGDICNEYGKLKNKIEALQKSRSHLMGEQLDSLSIKELQHLEQQLETALNHIRTQRIQLLLNCITEFQRKEKSLLEHNSLLEAKLCSFQLDPQITETATQNPNRKQQKQDQVNSSPSPFLPPNHLPTLNLGTYPASDGEEAEDPTLLQMNSISLPPWMLRSST

SEQ ID NO: 32598 - protein, 532 aa, Petunia integrifolia subsp. inflata
MGNCCSRGQPNESNDHTESISTAKNGDGKVMQGGSVTPPKTPPPASPDPSSKPSKTSPIGPVLGRPMEDVRKTYSIGKELGRGQFGVTHLCTHKQSGEQFACKTIAKRKLVNKEDIEDVKREVQIMHHLTGQQNIVELKGAYEDKHSVHLVMELCAGGELFDRIIAKGHYTERAAATLLRTIVQIGHTCHSMGVIHRDLKPENFLLLNKDEDSPLKATDFGLSVFYKQGDVFKDIVGSAYYIAPEVLKRRYGPEVDIWSVGVMLYILLSGVPPFWAETEHGIFNAILRGHIDFSCDPWPAISHGAKDLVRKMLTIDPKQRLTAIQVLNHPWIKEDGDAPDTPLDNAVLSRLKQFRAMNNFKKVALRVIAGCLSEEEIMGLKQMFKSMDTDNSGAITLEELKTGLAKQGTKLSDYEIQQLMEAADADGNGTIDYEEFITATMHMNRMDKEEHLYTAFQYFDKDNSGYITVEELEQALREFGITDGKDIKDIVAEVDSNNDGRINYDEFVAMMKKGTPDTAANLKKRRESFDAK

SEQ ID NO: 32599 - protein, 304 aa, Anabaena sp.
MTQAKAKHADVPVNLYRPNAPFIGKVISNEPLVKEGGIGIVQHIKFDLTGGNLKYIEGQSIGIIPPGVDKNGKPEKLRLYSIASTRHGDDVDDKTISLCVRQLEYKHPESGETVYGVCSTYLTHIEPGSEVKITGPVGKEMLLPDDPEANVIMLATGTGIAPMRTYLWRMFKDAERAANPEYQFKGFSWLVFGVPTTPNILYKEELEEIQQKYPDNFRLTYAISREQKNPQGGRMYIQDRVAEHADQLWQLIKNQKTHTYICGLRGMEEGIDAALSAAAAKEGVTWSDYQKDLKKAGRWHVETW

SEQ ID NO: 32600 - protein, 242 aa, Castanea mollissima
MVYPNQSMSLSPQRKIGRGKMEMKRIENTTNRQVTFCKRRNGLLKKAYELSVLCDAEVALIVFSTRGRLYEYANNSVKSTIERYKKACADSSNTGSVAEANTQFYQQESAKLRAQIGNLQNSKQANDGESLSNLTVKELKSLEIKLERGISRIRSKKNELLFAEIEYMQKREVELHNNNQLLRAKIAENERNQQNLNVMPAGGGSYELMQTQQYDSRNFFQVNALQPNHQYPREDQMSLQLV

SEQ ID NO: 32601 - protein, 243 aa, Castanea mollissima
MGRGRVEVKRIENKINRQVTFAKRRNGLLKKAYELSVLCDAEVALIIFSNRGKLYEFCSTSSMLKTLERYQKCSYGAVEVNKPGKELEISYREYLKLKARFESLQRTQRNLLGEDLGPLNTNDLERLERQLDSSLKKSGPLRQYMLDQLSDLQNKEHLLVEANRALAIKLDEISPRNNLRQSWEGGEQSMSYGPQNAHSQSFFQPLDCNPTLQIGYNASGSDQQLSGTTHAQQVNGFIPGWML

SEQ ID NO: 32602 - protein, 312 aa, Ralstonia eutropha JMP134
MMKRICISEFMDPAAVQALTPGFDVRYEPGWVDQRGALLDALAGADALIVRNRTQVDAALLERAPALRVVGRLGVGLDNIDVAACRDRGIRVIPASGANARSVAEYVVTTAALLLRGAYLGSAEVAGGKWPRARLSEGREALGKTLGLIGFGDIGRQAAALAQAFGMRVVAHDPMLAPDDPVWSATGVVCMTLDALLAQSDAVSLHVPLVAATRHLMNAQRIGAMKRGAVLINTARGGVVDEGALAGALLEGHLAGAALDVFEAEPLPADSVLADVPNLVLTPHIGGVTREANARVSMMIAEKVRQTLEALP

SEQ ID NO: 32603 - protein, 318 aa, Ralstonia eutropha JMP134
MSAHKTLTMRVQAMRYEARGIVSLELQDPDGATLPEYGPGAHIDLHLGNGLVRSYSLCGAPEVRDRYTVGVLQDRNSRGGSRYVHEQLRVGATLNVSAPRNNFELDESAAHTVLVAGGIGVTPIVCMARRLAELGRSFTLLYCARTRAEAAFVDSLSAYGDAVRFHFDDEAGAPPDMKAMLAGQDAQTHLYCCGPGPMLNAFEAACEAHGYPNVHIERFAADPSTESVQEGEYVVQLSRTGSLVKVPSGKSLLDALLEAGLDVEHSCREGVCGSCETAVLEGCPDHRDSVLSNSERASNKTMMVCVSGCKGSRLVLDL

SEQ ID NO: 32604 - protein, 266 aa, Ralstonia eutropha JMP134
MKLLQSLLQSALLATVLGFTAPAVHAEDLLDTVKASGVLKVGMEGTYPPFGYRNGQGQLDGFDVAVARAVADKMGLKVQFITTEWSGIIAGLQAGKFDVIVNQVSMTPARKQALDFTQPYVYSAVQVLQRSNDKREFGSLDALKGKSVGVTLGSNYADLAKSVPGIQVQTYPGTSENLRDLAAGRIDAALNDRLMLPYLIKNANLPLRTGALLAGTKLEMGIPYRKGNPKFAKAIDDALIALQQDGTLRKLSIEWLGTDASQPLAQ

SEQ ID NO: 32605 - protein, 392 aa, Ralstonia eutropha JMP134
MAEAYIVGAVRTAGGRKGGKLAGWHPADLAAEVLNALLDRTGADPALIEDVIMGCVSQVGEQAGNVARNAILASRLPESVPGTSVDRQCGSSQQALHFAAQAVMSGAMDIVIAAGVESMTRVPMGLSSQLPAKNGFGVPKSPNVEQRYPGVQFSQFTGAEMIARNYGFSREDLDRYALQSHQRAAAATRAGRFNAEIVPVEVRLADGTRNGEMHTADEGIRADATLESIGSVKLIAEGGRVTAATASQICDGAAGLMVVNEAGLKKLGVKPLARVHHMTVIGHDPVIMLEAPLPATQHALKKAGMNINDIDLFEVNEAFAPVPLAWLKATGADPERLNIHGGAIALGHPLGGSGAKLMTTLIHSLHTHGKRYGLQTMCEGGGLANVTIIERL

SEQ ID NO: 32606 - protein, 478 aa, Ralstonia eutropha JMP134
MTQTPQPSSGLSHGLKQRHMTMIALGGVIGAGLFVGSGVVIKSAGPAAVLSFLITGLLVVLVMRMLGELACAMPGGGSFYEYAREAWSDRPAVGNLASFLTGWMYWYFWVIVVALEAVAGADLVRYWLPDVPNWTISLVLLVMLTLTNLISVKSFGEFEFWFASIKVAAIMVFLFVAGVYVLGLAPGAHGMNVANLTANGGFMPNGIVPVLTGAVAATGFYFGAEIVTIAAAETAEPQKAVARATNSVITRVLVFYVGSVLLVVCLVPWNATGIATPYVSALNVMGIPAAAQIMNAIVLTAVLSALNSGLYASSRMLFALTKRGDAPRSLARVSRNGVPTRAILVATLFGYGAVVMSYVSPDKVFAFLVNSYGTVAIFVYILIAVSQLRLRARLEREAPHLLKVRMWCYPYLTWLAIFGMLAIVVAMAFIPDQRTPLALGVASLGLLVSAYIVRHLFRRGVQQVVPLAEMPRPDLHEY

SEQ ID NO: 32607 - protein, 345 aa, Ralstonia eutropha JMP134
MKPILRIIDRARAAPRRIVLCEGEDPRILQAAERAAREGIAQVILVGNAARITDAAANQGIDLPRMTIVDPATSALTPSFAQALYAMRQKKGMTLDQARQAVLDPLCFANLMVRQGHADGSVAGAVHTTANVVRNAIQLIGLAPGFRLVSSFFLMMLCEPFHALKGGLIFSDCGLVVDPDAEELSEIAMAASDSARSLLNEDPRVAMLTFSTCGSAKHAAVDKVVAATERVRAQRPGLAIDGDVQLDAAIVAEIAERKIPHSQVGGHANVLVFPNLEAGNIGYKLAERLGGAKAIGPMLQGLRRPANDLSRGCSAEDVFHVIAVTVVQAQAASAQQPSSGEQAAA

SEQ ID NO: 32608 - protein, 616 aa, Ralstonia eutropha JMP134
MRDLDTTTQPAVSGGSATETQVPAGPQTMTPSEAFVETMVANGVTEMFGIMGSAFMDAMDIFAPAGIRLIPVVHEQGAGHMADGYARVSGRHGVVIGQNGPGISNCVTSIAAAYWAHSPVVIVTPEAGTTGIGLGGFQEAKQLPMFQEFTKYQGHVTHPQRMAEFTGRCFDRALAEMGPTQLNIPRDYFYGKVNVEIPKPQRLDRGPGGEQSLNEAAELLAQAKFPVIISGGGVVMADAIEECKALAERLGAPVVNSYLHNDSFPASHPLWCGPLGYQGSKAAMKLISRADVVIALGSRLGPFGTLPQHGMDYWPKNAKIIQIDADHKMLGLVKKISVGICGDAKAAAIALTQRLANRTLACDSSRDGRATEIANEKAAWEKELDGWTHERDPYSLDMIEEQKNERTFNGGTYLHPRQVLRELEKAMPADVMVSTDIGNINSVANSYLRFEKPRSFFAAMSWGNCGYAFPTIIGAKVAAPHRPAVSYAGDGAWGMSLMETMTCVRHNIPVTAVVFHNRQWGAEKKNQVDFYNRRFVAGELDNQSFAAIAKAMGAEGIVVDRLEDVGPALKRAIDLQMNHGKTTIIEVLCTRELGDPFRRDALSKPVRYLDKYKDYV

SEQ ID NO: 32609 - protein, 568 aa, Ralstonia eutropha JMP134
MYLYDSTDQQLVDERVTQFTDQTARFLSGDLTEDEFRILRLQNGLYIQRHAPMLRVAIPYGMLVSRQLRKLAEISRRWDRGYGHFSTRQNMQFNWPRLEDAPAILAELATVQMHAIQTSGNCIRNTTTDHFAGIAPDEVVNPLVWCEIIRQWSMLHPEFAFLPRKFKIAVSGATTDRAAVGVHDIGLQAVERDGETGFRVWVGGGMGRTPMVGKEISGFVHWSDLLTYLQAILRVYNLHGRRDNKYKARIKILVKDLTPEVFAQQVHEHWQPIRGGPDTVDADFVRDIATRFTTPDYDAAAAQDHDPNPALAAANPRFARWLRSNVHAHRVPGYAAVTVSLKATGTPPGDITADQMEAAADLADHYGFGELRVSHEQNLIIADVRRTRLHELWQQLQTWNLATPNIGLLTNIIACPGGDFCSLANAVSIPLAEAIQQRFDDLDYLYEIGELDLNISGCINSCGHHHVGHIGILGVDKAGEEWYQVTLGGRQGGPSGAAIGRIIGPSFARDEIPEVVEELIKRYIAMRDSEAERFIDVVERVGIEPFKVAVYQNPVIAKRRLEAEAARV

SEQ ID NO: 32610 - protein, 291 aa, Ralstonia eutropha JMP134
MRVAFLGLGVMGFHMAGHLAAKGHEVTVYNRTAAKAQAWVEKFGGKAADTPAQAVRQADVVCSCVGNDDDLRSVLTGPDGAFFAAPTGCIFVDHTTASANVARELYAAARERGLHFVDGPVSGGEVGAEKGILTIMCGGDADVYARVEPVIAAYARAVTRIGEAGAGQLAKMVNQISIAGLIQGLSEAIAFGERAGLDMKLVLDVISKGAAGSWQLENRGPTMIENKFDFGFAVDWMRKDLGLCLDEARRNGASLPVTATVDQFYADLQQMGCGRSDTSSLIKRLRRFSQN

SEQ ID NO: 32611 - protein, 311 aa, Ralstonia eutropha JMP134
MTPRPFPMPSFRLTASNLFRPLTALLLAVATLSPLGARAQSPVLDKIRDSGTIVLGYRESALPFSFADDKGQPAGYAVDLCLRVAEAARQKLGLKDIKVRWLPLTPQNRFPAVVNGLVDLDCAPNTNSLERQKQVAFSVSHYVSTVRMLVRADSGIQSFEDLRGKTVVTSAGSTGDRHVRRLKQQYGYRDVYAKDHGESFLLLESGRAQAFVMDDVLLAGLRARAKDPSQFVIVGPALSTEQNALMMSKADPEWKRFVDQTLAGTFAGTGITTLQKHWFQQPIGSRKINLALLPSNQVRDAWKHPSDVASE

SEQ ID NO: 32612 - protein, 294 aa, Ralstonia eutropha JMP134
MRIGFIGTGKMGLPMARHIAAAGHDVVAYDIAPEQASAARHAGLAVAPSLADAVSAAEVIFSSMPNDGAFSAVAGQIAKAARPGALYIDTSTVSPAASAAVAPLLAARDIAYLRVTVSGNNHMAEAAKLTALVSGPADAYERIKPLLAALGPAQFYLGDAEQARLMKLVVNLLIALTGGMLAEALTLGSKGGLEWQAMWDVITASAVASPIVKAKAAQLAVHDYTPTFTVEQMLKDVGLILDAGAQLHVPMGLTALLGQMLHGAAAQGMAGDDYAAIIKSAELAAGMQPGQRQP

SEQ ID NO: 32613 - protein, 203 aa, Ralstonia eutropha JMP134
MALNRPARGAVLLDKDGTLLRNVPYNVDPHHMQLADTAGDALRILGATGRPLVVVSNQPGVALGGFQESALQAVHRRLAELFRLHGARLSGFFYCPHHPDGAVAQYAVPCSCRKPSPGMLQAASSVLGFDLRTSWMIGDILDDIEAGRRVGCNTILVDCGGETEWVTGAWRTPDFIVPTLGQAAQIVAGEPVAACAPFVAGQA

SEQ ID NO: 32614 - protein, 339 aa, Ralstonia eutropha JMP134
MEHTIALQFEDGVTRFITCGENETLSDAAYRQKINIPLDCRDGACGTCRGLCESGSYDLPESSYIEDALTSEEAAQGYVLACQTRPRSDCVIRIAASSTACKTGVTKFEGAIASVDKLSDSTIGFSIDLDDAGALDFLPGQYVNVEIPGSGLTRSYSFSSAPGAGHTGFVVRNVPDGRMSSYLTNDAQPGQRIAFSGPYGSFYLRPVQRPVLLLAGGTGIAPFLSMLDVLASNGNPHPVRMVYGVTNDIDLVELPRIDGAAQQLTGFEYRTCVASAESGHDRKGYVTQHVEPEWLNGGDVDIYLCGPVAMVDAVRNWLKESGVEPAGFYYEKFSASSVA

SEQ ID NO: 32615 - protein, 331 aa, Ralstonia eutropha JMP134
MHTFPSPSEQTIEKNEISVKNLPVNLFASVMGISGLALAWRQTASQFGVSPIISDVISVVAVIAFLVLTVSYAAKIAKHPDAVVKEFCHPIAGNFFGTVPIAILLISSLIGPSNEAIAEVVWTVGAVATIALAFTIFSRLVRGKIDSGHALPAWLIPGVATLDIAVAGGSMRMPWARELNIVSLGIGTVLALVLFTMIISRLIHHEKLASHMIPSLMILIAPFEVGFLAYTNFTQSIDVFAAILFYFGLFLFFTLFLKVFRRSIPFSAGWWGVSFPIAALTNATLRYADTVRLWPITVLSVVLLAFVSGVIVMLSVRTLRVVFNGELLSGR

SEQ ID NO: 32616 - protein, 500 aa, Ralstonia eutropha JMP134
MSETPAVNSVAMAVFIAFFVLVTVLGFVAARWKRGDLSQLHEWGLGGRQFGTVISWFLVGGDFYTAYTVIAVPALVYSVGAYGFFAMPYTIIVYPFVFAVMPRLWEVCHRKNHITAADYVQGEIGGRWLPAAVAITGIIATLPYIALQLIGMQVVIKGLGVDGELPLIVAFAILAVYTYSSGLRAPAMIAFVKDIMIYIVVIAAISVIPSKLGGYGALFHAADTYFNAKGGATGIILKPSQFTAYATLALGSALAGFMYPHTMTGILSSGSANTVRKNAIALPAYTLLLGLIAVLGYMAIAAGVHVSSASDVVPVLFLKLFPSWFVGFCAAAIAISALVPAAIMSIGAANLFTRNLYKPLVAPNVSPEKEAKSAKLFSLVVKFGALLFIIVLPTQYAIDLQLLGGVWILQIFPAVVFTLYTRRLTATGLLAGWFVGIVTGTGLAISLGLKPVYALHIGDGVYPTYVGVIALLVNIVVSVAVSALTQARRVAGEVGTVTTR

SEQ ID NO: 32617 - protein, 461 aa, Ralstonia eutropha JMP134
MVESNNDGTLKRGLKNRHIQLIALGGAIGTGLFLGIAQTIKMAGPSVLLGYAVAGIVAFFIMRQLGEMVVDEPVAGSFSYFANKYCGHFAGFMSGWNYWVLYILVSMAELSAVGIYVQYWWPGIPTWISALAFFLIINAINLSSVKSFGEMEFWFSIIKVAAIIGMIGFGGYLLMSGNAGPQASITNLWQHGGFFPNGLGGLVMAMAVIMFSFGGLELVGITAAEADQPEKSIPKATNQVIYRILIFYVGALAVLLSLYPWENVVTGGSPFVLIFHALNSNWVANVLNVVVLTAALSVYNSGVYCNSRMLFGLAQQGNAPKSLLKVSKRGIPLTALGVSAAATGLCVLINYFMPGKAFELLMGLVVSALIINWAMISIIHLKFRADKRKAGQETRFKSFGYPLTNYLCLAFLGGILVVMYLTDGLRISVYLIPVWLAVLGISYRLRQKNAVPALQGSVSAQ

SEQ ID NO: 32618 - protein, 393 aa, Ralstonia eutropha JMP134
MQNPVKESIVIVGAKRTPIGAFNGSLAAHSAPELGAIAIRAAVAQVGVDPASVDEAIMGLCLFAGVGQAPARQAVLGAGLPTSTPATTLSKMCGSGMKSVMLAHDLLLAGTCNVAVAGGMESMTNAPHIVPRGRHGYRLGHGQLLDHMYCDGLEDAYEGHLMGHYADLAAAERGIGREAQDAYARESLQRAQAAVAEGRFSDEIAPVALKRGGELAQDETPGQCDAEKLPKLKAVFRSGGTVTAGNASSISDGAAALVLMRESDARRQGLAPLARIVAHATHANPPQQFADAPVHAARRVLDKAGWTARDVDLYEINEAFAVVTMIALDELGIGHDRLNVNGGACALGHPVGATGARLLVTLLHALKQRGGQRGLASLCLGGGEAVAVGVELC

SEQ ID NO: 32619 - protein, 365 aa, Ralstonia eutropha JMP134
MVRTMGFPGQYLQGPGALRQLPPLLQRMGWRRPLAICDAIVAEKVWPAVAQALCEAGVAARQLAFPGECTRAVIAGMVDQASQGSHDVVIGLGGGKALDTAKGVARALDVPIVISPTIASNDAPTSRVIVLYDDAHRLEGAEFLKTNPAAVIVDTQVIAQAPVRFFAAGIGDAISKKFEAAQCRATGRNNAFGTPPLDTALLLAGATYETLVKHGPAACEAIRRQEPNEAVERVVEATVLLSGLGFEGGGLALAHALTRGFSAVPGMAQALHGEQVAFGALVQLVAEQRDQEEIAELVDLLCAVGLPVTLQQLGVAPENHHDSIATIVQATLAGQTSNVISPSLNPQQLAAALAHADSIGTLALG

SEQ ID NO: 32620 - protein, 330 aa, Ralstonia eutropha JMP134
MDGVPILGPSTTAPRRLPVKPAILLTQPVVPSLEAGLKAAYEIHRLYAAASPDALIDEVGPRIEGVVTGGSLGLKESVMRRLPALKIVAVSGVGTDAVDLPYARGRGIHVTTTPDVLTADVADQAIGLLIAVYRRLTEAERYVRAGQWGKAPLPLARRFSGKRVGIVGLGRVGLAIAVRAAAFGCPVSYTDLRAIPDVPYTFLPDIAALASHCDALVLAASADGAKPVVDAAVLDALGPDGVLINVARGRLVDEPEVVRALEAGRIAGAGLDVFADEPAVPPALLAMDNVVIQPHRASATWETRDAMGEIVLANLRACLAGERPPATVMA

SEQ ID NO: 32621 - protein, 518 aa, Ralstonia eutropha JMP134
MPMTIGVPREVHPGERRVAATPDSVRELTKLGYEVAVESGAGQQASFSDEAYRAAGAAIVDAASLWASVDVVIKVRPPQVHPSLGVEEAALLKKHATLISFVWPAQQLTLLERLSQRGATVLAMDCVPRISRAQKLDALSSMANMAGYRAVIEAAHAFGRPFAGQITAAGKIPPARVLVIGAGVAGLAAIGAARSLGAVVRAFDTRPVVRQQIESLGAEFLTVEIEEDGSGSGGYAKEMSPAFIEAEMKLFAEQAREVDIIITTALIPGKPAPRLLEADTVALMRSGSVVVDLAAEQGGNCVLTVPGESVTHNGVTVVGYTDLPSRMAAQSSQLYATNIRHLLTELTPAKDGQLVVDMDDEMIRGATVLHQGDVTWPPPPLKTLPPPAPAAEVQAPSEPVAPPSRTGTTLAALAIAVIALLALGAVAPPAFMAHFTVFVLAIFVGYQVVWNVTAALHTPLMSVTNAISGIIVVGALVQLGKPSLVTAIVAGAAVLIATINIAGGFLVTQRMLKMFQRD

SEQ ID NO: 32622 - protein, 394 aa, Ralstonia eutropha JMP134
MNTREVVLCHPVRTAIGAFNGTLKGTPAVELGAAAIGESLKRAGIDAGRIGSVVFGNVIQAGNRMNPARQAAIGAGLPVSVPAMTVNRVCGSGAQAIATAADEVRLGYADVAVAGGMENMDRAPYLVPSGRWGQRMGDTVMHDSMLFDGLQDAFSGLHSGWHTEDLATRYELSRDAQDRWAERSQQRFARAQAQGRFASQIVEVAVKAKGGTAAFKVDEANRPDTTLETLARLKAAFREGGTITAGNAPGINSGAAAMLVAERAFAESQGMKPMARLVAYGVGAVEPGLFGLGPVPAVRQALERARWTLGDIERIEINEAFAAVPLAVAAELGLPHDIINVDGGAIAHGHPIGATGAVLTTRLLHAMQSDGIRRGIVTLCIGGGQGIALAIESL

SEQ ID NO: 32623 - protein, 322 aa, Ralstonia eutropha JMP134
MSNTDTLQVRVKSISWEADGILAFELRPEPPLRALPAFAAGAHIDLHLPNGLIRSYSLLNAQCEPHRYVIGVNRDAQSRGGSRYLHETLRPGDVLTISPPRNNFPLDDSASLAVLVAGGIGITPILGMIHRLRELGRPWRLHYAARTRKQAAFVETLEAMGMEPGGEVRLTFDREAGADRLDVTAIAASLPEGAHIYCCGPVPMLEAFEQATASLPPGRVHREYFAARESAATDGGFTVELARSGRSIEIQPGRTILECLIAEGVEPMYSCQEGVCGTCEVRVLDGEPDHRDLVLNAEERAANNRMMVCCSGAKTRKLVLDL

SEQ ID NO: 32624 - protein, 386 aa, Ralstonia eutropha JMP134
MEMMRDAVQFEPADSRVTRPSFWSSLPERWTSDVEETLVCCHVRQETHDVKSFFFHSPDGRAFVFEPGQFITLELEIEGETINRCYTISSSPARPHTLSITVKRVPGGKVSNWLHDNVRPGTPIRVLGPAGEFTCARHPARKYLFLSAGSGITPLMSMSRAHHDLGEDRDIVFVHSARTPDDIIFSRELDLIASNHANFRTSFVCESVGARTSWPGVTGFLSLPLLKLIAPDFMEREIFTCGPAPYMKAVRDLLDEGGFDRRRYHEESFSFETLTADGPADAPAPDTGVASAPHGIADMAAFSVSFAKSRREIVCSSGQHVLEAARQSGVRLPASCTQGMCGTCKVKLVSGQVEMKHNGGIRQREIDQGMVLLCCSKPLSDLVIDK

SEQ ID NO: 32625 - protein, 459 aa, Ralstonia eutropha JMP134
MSANSEHLQRGLGERHIRLMALGSAIGVGLFLGSANAIRMAGPAIMLAYLIGGAMIFLIMRALGEMAVHNPVAGSFCRYAQDHMGPLAGYLTGWNYWFLWLVTCVAEITAVAIYMGVWFPDVPRWIWALAALATMGSVNLLTVKAYGEFEFWFAMIKIVTIVLMLFGGGAMIVFGLGNGGIATGISNLWAHGGFMPNGASGVLMSLQMVMFAYLGVEMIGLTAGEAKNPRKSIPDAINSVFWRILIFYVGALFVILSLYPWNEIGAQGSPFVMTFERLGIKTAAGIINFVVLTAALSSCNGGIFSTGRMLYNLAQQGQAPAAFARVDRNGVPRRALLVSIGALLCGVLLNYLVPEKVFVWVTSISTFGAIWTWAIILVTQMQFRKNLSPAERDKLAFRMPFWPYGSWIALAFLALVIALMAYFPDTRIALYVGPAWLVLLTVLYYRLGMQARGPVTYQA

SEQ ID NO: 32626 - protein, 67 aa, Ralstonia eutropha JMP134
METGTVKWFNDAKGFGFITPDAGGNDLFAHFSAIEGAGFKSLKEGQKVRYVKAMGQKGEQATKIQAV

SEQ ID NO: 32627 - protein, 67 aa, Ralstonia eutropha JMP134
MATGIVKWFNNEKGYGFITPDDGGKDLFAHHSEIQGSGFKSLDEGAKVEFDVTQGQKGLQASNIRKL

SEQ ID NO: 32628 - protein, 67 aa, Ralstonia eutropha JMP134
METGTVKWFNDSKGFGFITPDAGGNDLFAHFSEIQGNGFKSLQEGQKVRYVAGVGQKGPAATKIEPI

SEQ ID NO: 32629 - protein, 441 aa, Ralstonia eutropha JMP134
MTTILQHIPTGERVGIAFSGGLDTSAALLWMRQKGAIPYAYTANLGQPDEPDYDDIPRRAKAYGAEEARLVDCRTQLVAEGIAALQCGAFHISTAGVTYFNTTPIGRAVTGTMLVAAMKEDGVNIWGDGSTFKGNDIERFYRYGLLTNPGLQIYKPWLDQQFIDELGGRAEMSEFMRQNGFDYKMSAEKAYSTDSNMLGATHEAKDLEHLDSGIRIVQPIMGVQFWRDEVEVKREEVTVRFEQGQPVALNGKTFANSVELFAEANVIGGRHGLGMSDQIENRIIEAKSRGIYEAPGLALLFIAYERLITGIHNEDTIEQYRDNGRRLGRLLYQGRWFDPQAIMLRETAQRWVAGAVTGEVTIELRRGNDYSILNTTSPNLTYKPERLTMEKGESMFTPLDRIGQLTMRTLDIVDTREKLQTYAKTGLLSSAVSASLPKLED

SEQ ID NO: 32630 - protein, 783 aa, Ralstonia eutropha JMP134
MTAATPETTTQKCPFSHGAQPAAAAPNGCPVSAEAAAFDPFGDGYQQDPPEYVRWSREQEPVFYSPQLGYWVVTRYDDIKAIFRDNLTFSPAIALEKITPTGPEANAVLASYGYAMNRTLVNEDEPAHMPRRRALMEPFTPEQLKHHEPLVRKLAREYVDRFIDDGKADLVDQMLWEVPLTVALHFLGVPEEDMDLLRQYSIAHTVNTWGRPKPEEQVAVAHAVGNFWQLAGRILDKMRADPSAPGWMQYGIQKQKELPEVVTDSYLHSMMMAGIVAAHETTANASANAIKLLLQHPDVWREICEDPALIPNAVEECLRHNGSVAAWRRVVTRDTEVGGIPIAAGSKLLIVTSSANHDEAHFADADLFDIRRENAADQLTFGYGSHQCMGKNLARMEMQIFLEELTRRLPHMRLAQQSFTYLPNTSFRGPEHLWVEWDPAQNPERTQPSLLAQQTPVRIGEPSGQAISRPVVVQSVTQAADGIVRLRLASPDGKAMPRWSPGSHIDVDCGETGLSRQYSLCGDPAETGVLEIAVLREPESRGGSAWIHDHVKPGDRLKIRGPRNHFRMDEGCRKAIFIAGGIGITPVSAMARRALALGIDYEIHYSGRTRTGMAMIDELRALHGERLHLYIKEEGGRNDLDALLARTDRNAQIYACGPARMVEALEQACTGWPDDALRVEHFATTLGTLDPSKEQPFEVELKDSGLTVTVPADQTLLTTLRCAGIDIQSDCEEGLCGSCEVRVLSGSVDHRDVVLTRGEREANTKMMTCCSRALPGSRLILEL

SEQ ID NO: 32631 - protein, 372 aa, Ralstonia eutropha JMP134
MQIGIPTETRAGEARVAATPETVKKYVAQGHKVVVQAGAGLRASQTDSAYEAAGATIGTAADALGAPLVLKVRAPESAELAQMKSGAVLVGMLNPFDTENNARMTAAGITAFALEAAPRTTRAQSMDVLSSQANIAGYKAVLVAAHHYQRFMPMLMTAAGTVKAARVLILGAGVAGLQAIATAKRLGAVIEASDVRPAVKEQIESLGGKFLDVPFVTDEEREIAQGVGGYARPMPPDWMKRQAELVHQRAIQADIIITTALIPGRKAPVLLQEETVQQMKPGSVVVDLAAAQGGNCPLTVADEVVERHGVIFVGHTNLASMVAADASALYARNVLDFLKLVIDKDGQFSLNLEDDIVAACLMTRREEAALAG

SEQ ID NO: 32632 - protein, 83 aa, Ralstonia eutropha JMP134
MAVSPFAFFIFSGKQIMQTGIVKWFNDAKGFGFIKPDAGGDDLFAHFSEIRSEGFKSLQENQRVSFEVKNGPKGLQAANITPL

SEQ ID NO: 32633 - protein, 67 aa, Ralstonia eutropha JMP134
MATGTVKWFNETKGFGFITPDDGGADLFAHFSEIQGSGFKTLKDGQRVTFEVKQGPKGLQASAIKPA

SEQ ID NO: 32634 - protein, 676 aa, Ralstonia eutropha JMP134
MCGFAGFLGGIPGSLEDRAILLTRMGQRILHRGPDHGDLWCEPGAPFGFTHRRLAIVDLSPAGRQPMISASGRYVIVFNGEIYNHPEIRAELESAGAAPRWRGHSDTETLLAGIDAWGADATVRRTIGMFAFAVWDRQTHSLTLARDRLGEKPLYYGWQGSGQARAFLFGSELKALRPHPAFDGSIDRNALTLYMRYNNVGGGHSIYQGIAKLPPAHLLTVSMLAREPVLRAYWSGSAAALQGKQDPFTGGPQEAVDSLDALLRDAVARQMMADVPLGAFLSGGIDSSTVVALMQSQSTQPIRTFSIGFHDAGYNEAAHAKAVARHLGTSHTELYVSPEHAMAVIPRLPEIYDEPFSDSSQIPTLLVSGLARQHVTVSLSGDAGDELFGGYNRYQITAELWGRLARIPGPVRAAAAWGLTRLSPHQINRVAALLPMASRWSHVGEKVHKGAGVMAAHTVDELYRGMVSQWQCPDAIVMGGAEPATLPEPVARALAMLGDVERMMAADLLTYLPDDILTKVDRAAMARSLETRIPFLDHRVVEFAWRLPLAYKIRQEDAGHTTKWVLRRVLDRYVPRELIERPKMGFGVPIDAWLRGPLRDWADDLLSEERLRREGFLNPQPIRQRWTEHLSGRRNWQHPLWCVLMFQAWLGHETTERTAPPLTDIPTSDRRLACAF

SEQ ID NO: 32635 - protein, 292 aa, Ralstonia eutropha JMP134
MAVGFIGLGVMGQPMALNLARAGTPLVVWNRSGGKYEPLVEAGAAVADSPADVFTCAGVVILMLANDRANDEALGRGTPDFAARVRERTIVHMGTTSTAYSHGLEADIRLAGGQYVEAPVSGSRKPAEAGQLVAMLAGDPAAMEQVRPLLAPMCREAISCGAVPNALTMKLAVNVFLITMVTGLAEAMHFAERHGLDPAHFMAVANASPMASDVSRFKVAKLAARDFSVQAAITDVLKNSRLVTEAARAAGMASPLLDVCHALYGETEALGLGQDDMAAVIRALEQRTAQLG

SEQ ID NO: 32636 - protein, 400 aa, Ralstonia eutropha JMP134
MTEAFICDAIRTPIGRYGGSLSAVRADDLGAVPLKALMARNPNVDWKAVDDVIYGNANQAGEDNRNVARMSSLLAGLPQDVPGATINRLCGSGMDAIGTAARAIKAGEATLMIAGGVESMSRAPFVMGKATSAFSRDAQIFDTTIGWRFINPAMRAAYGVDSMPETAENVATDYKISREDQDLMALRSQEKASRAQADGTLAQEITAVTIAQKKGDPIIVERDEHPRATSMEALGKLRGVVRADGTVTAGNASGVNDGACAILLASEAGIKQHGLTPRARIVGMATAGVAPRVMGIGPAPATQKLMKQLGMTLDQIDVIELNEAFAAQGLAVLRELGIADDDKRVNPNGGAIALGHPLGMSGARLVTTAMYQLHRTGGRFALCTMCIGVGQGIAMVIERV

SEQ ID NO: 32637 - protein, 460 aa, Ralstonia eutropha JMP134
MKHLQRNLGARHIRFLALGSAIGTGLFYGSASAIQLAGPAVILAYILGGAAVYMVMRALGEMAVREPVSGSFGRYASEYLGPLAGFLTGWTYILEMIIVCLADVTAFGIYMGFWFPEVPQWIWVLGIVMLICGLNLCNVKVFGELEFWLALVKILAIGAMIIGGTLILFLGVKMNGEHSPGLTNLWAHGGFLPHGAGGLIASLAVVMFAYGGIEIIGITGGEAKEPEKVIPRAINAVPARILLFYVLTMVVLMAIFPWTGIGGQGSPFVQIFSGLGIKSAAAILNLIVISAAISAINSNIFGAGRMMFGMAEQGQAPRLFAITSRQGVPWVTVLAMAAALLGGVVLNYLIPEQVFVIIASIATFATVWVWLMILLSQVAMRRRLSAEEVRALKFKVPMWPVGPALAIAFMLFVICVLGYVEDTRVALYIGAGWVALLSLAWYLRAKPHEDRILTGESSAL

SEQ ID NO: 32638 - protein, 324 aa, Ralstonia eutropha JMP134
MEEKMFAPVTGTVTPRYAGLATLMRLPHIELMSENIPDVDIGLIGVPWDGGTTNRPGARHGPRQVRDISTMVRNVNRSSGIKPFEICNCADLGDTPVNPVDLIDSMNRITAFYDAVCRANIAPLSVGGDHLVTLPILRALATDGPVGMVHFDAHTDTWNRYFGDNLYTHGTPFRRAIEEGLLDPKRTIQIGIRGALYNDSENDWGERQGIRVIDMDEFRSMGVEAVIQEAWRVVGNGRTYVTFDVDALDPVYAPGTGTPEIGGLTTIEAQHMIRGLRGLNLIGGDVVEVSPPFDPTGNTALVAATLMFEILCVLAANISKQKRR

SEQ ID NO: 32639 - protein, 372 aa, Ralstonia eutropha JMP134
MNIGVPVETHACESRVAATPETVKKYVAQGHKVVVQAGAGLRASQPDSAYEAAGATIGTAADALGAPLVLKVRAPETAELAQMKSGAVLVGMLNPFDTENNARMTAAGITAFALEAAPRTTRAQSMDVLSSQANIAGYKAVLVAAHHYQRFMPMLMTAAGTVKAARVLILGAGVAGLQAIATAKRLGAVIEASDVRPAVKEQIESLGGKFLDVPFVTDEEREIAQGVGGYARPMPPDWMRRQAELVHERAKQADIIITTALIPGRKAPVLLHEATVQQMKPGSVVVDLAAAQGGNCPLTVADEVVERHGVIFVGHTNLASMVAADASALYARNVLDFLKLVIDKDGQFSLNLEDDIVAACLMTRREEAALAG

SEQ ID NO: 32640 - protein, 1142 aa, Ralstonia eutropha JMP134
MSEVEKKGFCTLCRSRCGTVNVVDGETLVAVRPDGDHPTGKAMCLKGKAAPELVHSADRILYPMRRTHPKGADDPGWVRISWDEALDEIAARLLHARATRGAESVAFAVTTPSGTALSDSIDWIERFVRLYGSPNICYATEICNWHKDFAHAFTFGCGMPTADYRNAGLILLWGHNPTNTWLSQAEAIGAGRAGGARLIVVDPRQTALAEDADQWLRVKPGSDAALAMALANLMIEANAFDIDFVRRWTNGPLLVRQDNGAFLRGGDIGLADTDALLVWDARQRMAVPAGKGVDDAQHIALRGTFAIPRIGGGERKSLLCQPAFDLYAAECARYTVERAAALTWIPEGDIRHAASLIGAAGRIAYHAWSGVGQHENATQTERAIACLYALTGSFDRRGGNRVYSKPPFNAVSRFDLLSPDQAHKALGLDARPLGPPAQGWVTAPDLYRAITHHAPYAVTSLIAFGTNTLLSQPDVANAEQALRELELYVHCDLFENPSARHADILLPVNTPWEREGLRIGFEVSADAEQFVQLRQRMVAPLGESRSDNDIVFALAARIGLDEAFFGGSLEAGWNHMLAPTGLTVAALRDAPEGIRVLVEDVEMKYAAGTDGQPFNTPTGLVELYSERLLRHGYPPLPGLPESAWNDAGQTSASFPYLMTSAKNGYYCHSQQRGVASLRRKALLPQLDISSDIAAARNIRTGDPVRVSTPAGSARFTARVQPGLHPAVVVGEYGWWQGCDPMGQQPTAVLGTDSANFNALIDATRQDPVSGSSPLRCCHCNVERDATLDIRRRRWEGYRPFRIVGLRKEATDVTAVDLEPADGGRLPDYLPGQHVTIRLCVDTGQQEVVRSYSLTGPAVVADRRRYAIAVRHARARLASGEVVSGVASSFINTRLAIGDTIELRAPAGTFVMPTRTARPLVLLAGGIGITPFINLLESLVGQQDPPRMLLLYANQNGTTHAFRDPLRELEALIPALKVINFYDAPADGDILGSDFQVHGRVTAAAVPDALLASRPLVYMCGPDAMMTAFAAGLAARGVPRFDIQKEVFRSPTVRRIEASQAFQVQFRRSDITLSWRSEHGPLLGFAEALGIRLPSGCRVGQCESCAVRIVSGTVHHLHGEAPDDPGVCLACQAVPASDLVIDA

SEQ ID NO: 32641 - protein, 320 aa, Ralstonia eutropha JMP134
MNDLPQFTGALLELRLESIQFLARDTLLYAFASPVGAALPPCEPGSHIGLHLPNGLVRQYSLLEGGREPRRYQVGVKRDPKSRGGSSFMHEQLRPGAVIQVEPPRNNFPLNEEAEHSVLVGGGIGITPILCMARRLKALGRSMTLVYSCRDRVDVAFLEELRSYENLHLHIDAEAGGVLDIAEVVKAHPANTHFYCCGPGPMLSAFEAATAHLPAAQVHVEYFTAKQEAALDGGYTVELKRSGKSLQVPGGKTILQVLKDAGVEVAHSCEEGVCGACETRVLSGIPDHRDAILSEPEKAANNTMMICCSGCKGERLVLDL

SEQ ID NO: 32642 - protein, 403 aa, Ralstonia eutropha JMP134
MQSNQSDRKVLIIGGGIGGLAAALALAKQGIRIELLEQADQIGEIGAGIQLAANAFAALDALGVGQAARDRAVFTEQMILKDAIDTGDVAVVNVGARYRERFGNPYAVIHRADIHLSILEAVQDHPLITFRTSTRVEKLEQGERGVTVIDQRGECHVADAVVGCDGVKSAIRQTLIGDEARVTGHVVYRALVDVEDMPKDLQVNAPVVWAGPNCHLVHYPLRGGQQYNLVVTFHSREKEEWGVKDGSKEEVLSYFEAIHPLPHQMLDRPSSWKRWATADREPVERWSFGRATILGDAAHPMTQYVAQGACQALEDAVTLGAAVQEANGDFEAAFTLYEQARIPRTARVLYAARDMGRIYHAKGVDRHVRNSLWTGRTQSQFYDSLQWLHGWRAEKCLSQTPWL

SEQ ID NO: 32643 - protein, 465 aa, Ralstonia eutropha JMP134
MSLFRTKDIDAMLVNSHVGGLKKVLGPVDLVLMGIGAIIGTGIFVLTGTGALTAGPALTISFVIAAMACGFAALCYAEFASAIPVSGSIYTYSYATLGEIIAWMIGWDLLLEYGLATSAVSVGWSGYFQSLAAGFGLHLPAALTAAPGAVPGVQTLFNLPAFLIMLITTWVVSCGVRESARLNNVMVAIKVAVVVLFIAVGVWHVKPANWQPFAPFGVSGIFNAAALVFFAFIGFDAVTSAAEEVRNPHRDLPVGIIGSLAVCTVLYVIVAAIMTGVVPFAKFAGIDHPVSLVLQYAGQNWVAGFVDLGAILGMTTVILVMTFGQTRVIFAMSRDGLLPARLSSVHPVHATPFFATWTVGIVFAMIAAFVPLNVLAELINIGTLSAFTLISIAVLVLRRTRPELHRAFRCPGVPVVPLLSVGFCLFLMAHLQALTWIAFLTWLAIGLSVYFLYARRNAVLHEGSR

SEQ ID NO: 32644 - protein, 317 aa, Ralstonia eutropha JMP134
MNDTLRVRIGRIEQLAAGIKRFTLQPCDGDALPPFESGSHVVVHMDNGRYRNAYSLTSALDDDSHYQISVRLEEASRGGSRFLHETVREHDELEIGRPGNLFSLHRGASKHLLIAGGIGITPFMTHIQTLKRQGAAFELHYCFRNRASAAFLDTLSTALNQGQWQQYESDAGIQLDIAALIARQPTDAHVYVCGPSALNDAVVDAARAAGWDASRIHFEQFRNEVDATGGAFEVTLRKSGLTLQVAPDDTLLRVIEKAGVKVDCMCREGICGSCETAIVEGEADHRDSYLSDEEKAAQKTIMLCVSRSKAQRLVLDL

SEQ ID NO: 32645 - protein, 404 aa, Ralstonia eutropha JMP134
MNTSQDTGRKVLIIGGGIGGLAAALALARKGIRIELLEQAEQIGEIGAGIQLAANAFAAMDALGVGEAARGRAVFTDYLSLRDAIDTHEIARVDVGTPYRERFGNPYAVIHRADIHLSILEAVKDHPLISFRTATRVEKLEQDERGVTVIDQRGARHQAEAVVGCDGVKSAIRDALIGDAPRVTGHVVYRAVVEVENMPKDLQVNAPVVWAGPNCHLVHYPLRGGQQYNLVVTFHSREQETWGVREGSKEEVLSYFDGIHALPHQMLDRPTSWKRWATADRDPVERWSFGRATLLGDAAHPMTQYVAQGACQALEDAVTLGAAVEAAGNDFEAAFKLYEQARIPRTARVLYAARDMGRVYHAKGVDRMVRNSLWTGRTQTQFYDALQWLHGWRAERCLSATPWL

SEQ ID NO: 32646 - protein, 372 aa, Ralstonia eutropha JMP134
MRIGVPKEIKNHEYRVGLTPSSVREMTAHGHHVLVQTTAGAGIGASDADYRKAGATIVDTAQEIFAKAEMIVKVKEPQANERAMLREGQILYTYLHLAPDPDQCADLVRSGAVCIAYETVTQAGGGLPLLAPMSEVAGRMSVQAGAHCLEKARGGMGVLLGGVAGVEPAKIVILGGGVVGSNAAQIAVGTGAHVVVIDRNIDVLRRMDRLLGARVTTVYSNQDNVERHVLSADLVIGGVLIPGAAAPKLVTAGMVDAMKPGSVIVDVAIDQGGCCETAKATTHAEPTYLVGQVLHYCVANMPGAVPRTSTYALNNATLPFALQIADKGWKAALADNPHLANGLNVAFGKVTCKEVAHDLGYECHDAAKLLAH

SEQ ID NO: 32647 - protein, 474 aa, Ralstonia eutropha JMP134
MNTSSLPPQAGAAAPAADFSTLPLAPATLATLAQLGYDEMTPIQAASLPLTLAGHDLIAQAKTGSGKTAAFALALLHRLDARRFDVQAMVLCPTRELADQVTQEIRRLARAEENVKVLTLCGGSPMRPQVDSLVHGAHVVVGTPGRILDHIDRGSLELSAINTLVLDEADRMLDMGFFDDISYVASRCPRERQTMLFSATYPAGIDKLSQKFLRKPQEVKLAEKHDSSSIRQYFYEVDESERLSAVGRLLDHFRPASTLAFCNTKARCRDLVDLLRGQGFQALALHGDLEQRDRDQVLVQFANGSCSVLVATDVAARGLDIAQLEAVINVEITPDPEVHIHRIGRTGRAGEEGHAFSLVSMDEMGRVGNLEQHHGGEFEWHPLAELRAASTERLLPPMVTLQMLGGRKEKIRPGDILGALTGEAGFTKEQIGKINVMEMSTYIAVDRAIGREAVRRLNAGKVKGKKVKVRMLTE

SEQ ID NO: 32648 - protein, 393 aa, Ralstonia eutropha JMP134
MQDPIVIVSAARTPMAAFQGEFASLTAPQLGAVAIRAAVERAGIKPEQVEEVVFGCVLPAGQGQAPARQAALGAGLPLSVGCTTVNKMCGSGMRAAMNVYDGLVAGSFDIAVAGGMESMTNAPYLIPKGRGGYRIGHGMMYDHMMLDGLEDAYDKGRAMGTFGEDCAAKYGFTREQQDTFAIESVRRAQQATEAGDFRWEIAPVTVSGKGGDTVIDTDEGPRRIKTDKIPSLKPAFAKDGTITAASSSSINDGASALVMMRESTAKKLGLRPIARMLGHTTHAQAPGWFTTAPVEAMAKLYRKLDWTTDSIDLFEINEAFAVVPMAAMHDLKIPREKVNIHGGACALGHPIGASGARIMTTLIGALRKTGGKRGVASLCIGGGEATAVGIEIV

SEQ ID NO: 32649 - protein, 465 aa, Ralstonia eutropha JMP134
MSLFRTKNIDAMLAVAHNDGLKKVLGPMDLVMMGIGAIIGTGIFVLTGTGALTAGPALTVSFVIAAMACGFAALCYAEFASAIPVSGSIYTYSYATLGEIIAWMIGWDLLLEYGLATSAVSVGWSGYFQSLVSGFGVKLPAALTAAPGAVPGVETMVNLPAVLIMLAITWIVSYGVKESARLNNVMVAIKIGVVLLFIAVGVWHVKPANWEPFAPFGMTGVFNAAALVFFAFIGFDAVTSAAEEVRNPSKDLPIGIIGSLAVCTVLYVVVAAIMTGIVPFAKFAGVDHPVSLALQYAGKNWVAGFVDLGAILGMTTVILVMTYGQTRIIFAMSRDGLLPERLSSVHPVHATPYFATWTVGIVFAAIAGFVPLNVLAELINIGTLAAFTLISIAVLVLRRTRPDLPRAFRCPGVPVVPLLSAGFCLFLMAHLQALTWIAFLVWLVIGLAIYFLYARRNAVLHNHGG

SEQ ID NO: 32650 - protein, 437 aa, Ralstonia eutropha JMP134
MPSRLRIAKPLPAAVDTTLAAPDAAPASSGRRRALASIAGASVMTLVDPLVRAGAWAAGSDAPEKPEVRIGFIPLTDCASVVMAAALGFDKKYGIKITPSKEASWAGVRDKLVNGELDAAHVLYGLIYGVQLGIGGPKKDMAVLMSLNHNGQAITLSSKLAEKGAKDGASLKALMSKEKREYTFAQTFPTGTHAMWLYYWLAANGINPMQDAKAITVPPPQMVANMRVGNMDGFCVGEPWGARAIADKIGFTVETTQAIWKDHPEKTLGTTAEFVQKYPNTARAMVAAVLEASKFIDASASNRRKTAETIAAKSYVNTDMDIILDRMLGRYSNGLGKTWDDPDSMKFYQDGSANFPFLSDGMWFLTQHKRWGLLKEHPDYLGVAKQVNRIDIYKQAATAAQVPLPKSDFRTAKLIDGVVWDATRDPKAYADGFKIKA

SEQ ID NO: 32651 - protein, 317 aa, Ralstonia eutropha JMP134
MSSEGLMVFTGNANPKLAEAVVQHLGIPLGKALVGRFSDGEVQVEIQENVRGKHVIVLQSTCAPTNDNLMELMVMVDALKRASARSITAAMPYFGYARQDRRPRSARVAISAKVVANMLEVAGVERVLTMDLHADQIQGFFDIPVDNIYASPVLLGDLREKNYGNLLVVSPDVGGVVRARALAKELNCDLAIIDKRRPKANVAEVMNIIGEVDGRNCVIMDDMIDTGGTLCKAAQVLKERGAQKVFAYCTHPVLSGGAAARIADSALDEVVVCDTIPLSEEAAKCGKIRQLSTAPLLAETFTRIVKGDSIMSLFAGS

SEQ ID NO: 32652 - protein, 327 aa, Ralstonia eutropha JMP134
MIANFDADRALRLAQSTLQIEAEAVAALSGRLTPDFSHAVQLVLQCTGRVVVSGIGKSGHIGRKVAATLASTGTPAFFVHPAEASHGDLGMVTRDDVLIAFSNSGETGELLSIIPIVKRIGARLISVTGNPESNLAKLADAHLDAGVEKEACPLNLAPTASTTAALALGDALAVAVLDARGFGEEDFARSHPGGALGRKLLTHVRDVMRSGNAVPEVRENTPLAQALMEITRKGMAMTAVVDSDGKAIGVFTDGDLRRLLETPRDWKTVPIGDVMHHNPHVVHEDQLAVEAVQVMEANRINQLLVVDHDGRLVGALHIHDLTRAKVI

SEQ ID NO: 32653 - protein, 403 aa, Ralstonia eutropha JMP134
MPDSPSRHSPDPQLPLARDAVHNLRASRIREVANAGIGLPEVLPFWFGESDQVTPDFVRDAAARALAGGATFYTHNLGIAPLRSALADYVGALHGATRIENVAVTSAGVNGLMLAAQLIAGPGDRVVAVTPLWPNLVEIPKILGASVETVSLDYGPHGWTLDVDKLLAALTPDTRALMVNSPNNPTGWVMSRAAQLTVLDHCRRHGIWIIADEVYERLYYGDEPGGGDSRTAPSFLDIASREERVICVNSFSKAWLMTGWRLGWMVLPSSMTDDLGKLIEYNTSCAPSFVQEAGVAAVREGEAFTRDLVQRLRTARDHLVDALSALPGVDAHAPEGAMYVFFRLSGATDSLALCKQLVREAGLGLAPGSAFGDEGEGFVRWCYACDTDRLDEGVRRLRGFIGR

SEQ ID NO: 32654 - protein, 463 aa, Ralstonia eutropha JMP134
MPRLVAVSNRVADPRNVAAGGLAVALSEALRQTGGMWFGWSGKALETNHGGTPGEGELHLQQAGNVTLATVDMCREDHDAYYLGYSNGVLWPAFHYRLDLADFDSNYLNGYRRVNQLFARKLAPLLKPDDIIWIHDYHLIPLAAELRAIGCGQRIGFFLHIPLPPPLILAAIPQHDWLMRALFAYDLIGFQSHTDLEHFSRYVQNEAFAEPMGEHRYRAFHRTVRAEAFPIGIDVEEFRELGRGAEAQETFEMMRAQYASRRLLLGIDRLDYSKGLPQRLKAFYRLLAEYPENRMSATLVQIAAPSRESVDAYADLRSEMERLSGAINGEFGELDWMPVRYIHRTTARKRLPGLCRASRVALVTPLRDGMNLVAKEFIAAQDREDPGVLVLSRFAGAAEQLKEALLVNPYDTHATAQAIQQALHMPLAERQARHEKLLERIRTQDVHWWSQEFLRALTETDGG

SEQ ID NO: 32655 - protein, 398 aa, Ralstonia eutropha JMP134
MKQLQDAYIVAATRSPIGKAPKGAFKNTRPDDLLATILKAAVAQVPNLDPKLIEDAIVGCAIPEAQQGLNVARIGALLSGLPNTVGGITVNRFCASGVSAVAMAADRIRVGESDVMIAAGVETMSMVPMMGNSPSMSPDIFTRDENVGIAYGMGLTAEKVAQQWNVSREDQDAFSLASHQKAIAAQQAGEFNDEITPIEIVEKFPNLATGEVSVKTRTISLDEGPRPETSLEGLGKLRPVFANKGSVTAGNSSQTSDGAGALILVSEKILKQFNLVPLARFVSFAVRGVPPEIMGIGPKEAIPAVLKAAGLTQDQIDWIELNEAFAAQSLAVMRDLELDPSKVNRMGGAIALGHPLGATGAIRSATVVHALRRHNLKYGMVTMCVGTGMGAAGIFERV

SEQ ID NO: 32656 - protein, 383 aa, Ralstonia eutropha JMP134
MPSFRSCFRMTLAAALLAGCATRPTLPPAPKSAAVPAAAPTPAAKPLVIAHRGASALRPEHTLAAYAKAIEDGADVIEPDLVSTRDGVLIARHENDIGGTSNVAELPQFASRKRTKVIDGVRLTGWFTEDFTLAELKTLRARERIPKLRPANARLNDQFEIPTFDEIVQLAQQASLRTGRQIGLYPELKHPSYFRGIGLPLEDKLVDALRRQPYLREAPVFIQSFEAGSLRQVRKMINHGMPNVRLMQLIGNLKQTPPDWRLAGDTRTYGDMLTTTGLREVASYADGIGPEKNSVVPRDAQGGLGAPTAVVRNAHAAGLLVHPYTFRPENAFLPKAFQTGGDDATRSPAGMVREVQVFVAAGVDGVFTDDPALGRRAIDAGTP

SEQ ID NO: 32657 - protein, 192 aa, Ralstonia eutropha JMP134
MPQTPPKFVVLDRDGVINLDSDQFVKSPDEWVPIEGSLEAIAAMNQAGYRVVVASNQSGIGRGLFEMSALNAMHEKMYKALAHLGGRVDAVFFCPHTAADSCDCRKPKPGLLDQISERFGIELKGVPIVGDSLRDLEAGVAVGCTPHLVLTGKGQKTLDKGGLPPGTRVHDDLRAFARWLSGGDGQPRTSSS

SEQ ID NO: 32658 - protein, 506 aa, Ralstonia eutropha JMP134
MSFSELGLSDKLVRAVAEQGYTTPTPIQAQAIPAILKGGDLLAGAQTGTGKTAGFTLPMLQLLSESAPQRQGKPAVRALVLTPTRELAAQVEESVRNYGKYVRLRSMVMFGGVGINPQIEQLRRGVEIVVATPGRLLDHVSQRTIDLSSVELLVLDEADRMLDMGFIHDIRKILNVLPPKRQNLLFSATFSDDIRALADRLLNNPASIEVARRNTTAETVAQRVYPVDRERKRELLAHLVREHDWHQVLVFTRTKHGANRLAEQLTKDGLSALAIHGNKSQSARTRALSEFKAGTLRLLVATDIAARGIDIDQLPHVVNFDLPNVPEDYVHRIGRTGRAGAEGEAISLVCVDEHGLLRDIERLIKRKLEQTVLTGFEVDPTIAAEPIQKGRQQRGGGQGGGQGGGRGRAQAKPAAPAAAKPSQGQPRQRPAQNAPRGASQAGGEAARGHGGANRNAGQAQPRNPQRNGGGQARPAQDATGAPARNNNRRPASQAALLGGARAKPAR

SEQ ID NO: 32659 - protein, 407 aa, Ralstonia eutropha JMP134
MSATHPVVLVVNAGSSSVKVSVYTVPEAAHDNADINPVLSAHGQIESIGVAPRLRASMADGHVVADESFPVAQVADHDAAFRLIRLVLSVGLRDNPPVAIGHRVVHGGSDFAQAVRIDDDVISRLEALIPLAPLHQPHNLTAIRAVRKAAPDLLQVACFDTAFHAGHDMLAQLIALPYEYYERGIRRYGFHGLSYEYIARRLGQVAPDVAAGRVIVAHLGNGASLCAMRDGRSVESTMGLTALDGMPMGTRCGSIDPGAVLWLAQQGMTADAIQTMLYGASGLKGLSGVSSDMRALLASEEPRARLAVDFYAYRAAQEIGKLAVTLGGLDTLVFTAGIGANSPPVRARICAHLTDLFGISLDNAANNDNSQRVSSDASRVPVLVLPTDEEGMIALSTARILRESGKL

SEQ ID NO: 32660 - protein, 327 aa, Ralstonia eutropha JMP134
MTAASSALSLPAEPGPPGTDKYATLLARCAGLPPIPTAVAHPCDASSLSGAMQAASLGLIVPILFGPQARIREVAAEQGLPLGDTVIIDTPHSHASAARAVEAVRNGEAELLMKGSLHTDELLHEVTASGSGLRTGRRLSHVFAMDVPSYHKPLFITDAAVNIFPTLNDKADICRNAIDLVRVLGVERPKVAILSAVETVTDKIPSTIDAAALCTMSRRGQITGALLDGPLAFDNAISREAAVTKGIDSEVAGDPDILLVPDLEAGNMLAKQLTFLAGAEAAGIVLGARVPIILTSRADSVRARIGSCAIAVLLAHARRSAEAAVPV

SEQ ID NO: 32661 - protein, 313 aa, Ralstonia eutropha JMP134
MSAIQILQVGPLAPQTNSTLQERFSAAALWQQADPLAWAREHGGEVRVVVTSARHGCTAALIGALPKLEAIVSFGVGYDSIALDAARARGIQVSNTPDVLNDCVADLAFGLLIDAARGIAHGDRFVRAQRWPQGGFPLTTRVSGKKLGILGLGRIGEIVARRASGFDMEIAYHNRRPRDGAPWRFEGDLKALAAWADFLVVAVVGGPETAGLVSREVIDALGPKGILVNVSRGSVIDEAAMVEALVEGRLGGAGLDVFRDEPNVPPALLALDNVVLAPHMASGTHETRAAMTALTLQNLEAFLDTGKVLTPVL

SEQ ID NO: 32662 - protein, 583 aa, Ralstonia eutropha JMP134
MPDQPYRPSAGEASEARPAKGWLRWLPGVQTLRQYEAAWLPRDVAAGLVLTTMLVPVGIAYAEASGVPGIYGLYATIIPLLAYALFGPSRILVLGPDSALAAPILAVVIQLSAGDPARAIAVASMMAVVSGAVCILAGLLRLGFVTELLSKPIRYGYMNGIALTVLISQLPKLFGISIEDAGPLRELWDLIQALGDGKANWYSAAVGGSALALILLLKRFERVPGILIAVILATLAVAWFGLQDHGVKVLGKMPQGLPVFHLPWLSGVDIAKVVAGGFAVAMVAFADTSVLSRTYAARMKRPVDPNQEMVGLGAANLAAGLFQGFPISSSSSRTPVAEAAGAKTQLTGVIGALAVAALLLFAPNLMRYLPNSALAAVVIASALGLFEFADLRRIFRIQQWEFWLSMACFAGVAVFGAIPGIGLAVALAVIEFLWDGWRPHYAILGRADGVRGYHDVERYPNARRVPGLVLFRWDAPLFFANAELFQTCVMQAVEGSPTEVRRVVVAAEPVTSVDVTSADMLRELDKTLDERGIELHFAEMKDPVKDKLKRFELFDHLGQDVFHPTVGAAVDDYLSDHNVDWKA

SEQ ID NO: 32663 - protein, 188 aa, Ralstonia eutropha JMP134
MGQPALFLDRDGVINVDTGYVHCPEDCRFVDGIFDLVRRANAAGMAVCVVTNQAGIARGYYDEAQFQHFTTWMLARFEEEGAHIDKVYHCPHHPMAGQGEYLKACQCRKPAPGMLLAARDALGLDMGRSVMVGDTLTDMQAAASASVGTRWLVPHGDAALAEAGRSAGCCVAEHLSEIDPTRALRLKA

SEQ ID NO: 32664 - protein, 393 aa, Ralstonia eutropha JMP134
MDPQRLATASRLANIDAFHVMELAKQANELERVGRHIIHMGIGEPDFTAAEPVVRAAEAAMRRGVTQYTGALGIHALREAIAGYYKTMYGLEIPARRVIVTAGASGALLLACAVLVEIGAEVLMPDPSYPCNRHFVAAFDGAARMIPSGPAERFQLTAAQVEAHWNERTRGVLLASPSNPTGTSILPDELGRILQAVRARQGFAILDEIYQGLSYDAPPVSALSLDDNVVTVNSFSKYFNMTGWRLGWLVVPDALVADFEKVAQNLFICASAVAQHAALACFSPEAMAIYDERKAEFRRRRDLIVPALESLGLHVPVMPDGAFYVYADCRQVNHPAAGDADKLTQAMLHDAGVVMVPGQDFGPHTAQDYIRISYATSRQNIEEAMARLQKLFR

SEQ ID NO: 32665 - protein, 609 aa, Ralstonia eutropha JMP134
MKLAIRHATLKTKRSIQPLAGATMSHDNKPTDSTPASPAVSNFLRSIIDQDLAAGTYAGRQDSQGEPLPTVITRFPPEPNGYLHIGHAKSICLNFGLARDYGGRCHLRFDDTNPVKEDTEYVDSIIDAVHWLGFSWDSKTPGGQPHLHYASDYFDQLYAFAEKLIERGAAYVDSQSAEQIAANRGNFSEPGKPSPFRDRSVEENLQLFRDMRDGKYKDGEHVLRAKIDMTAPNIVMRDPVIYRIRHAHHHRTGDKWCIYPMYDFTHCISDAIENISHSLCTLEFENNRPLYDWVLEHLRDAGVFRDPLPHQYEFARLNLTYAITSKRKLKQLVDEQRVDGWDDPRMPTIVGIRRRGYTPESIQLFCDRVGVAKADSWIDMSTLEGSVRDDLDARAARGVAVLDPLKLILDNYPEGQTEECSAPVHPKKPELGKRVFPISRELWIEREDFNETPPKGYFRLFPGNKVRLKYGYVIECTGVDKDADGNVIAVHANYLPDTKSGTPGADSVKVKGVIHWVSAAAAYECEVRLYDRLFNDPNPDAGGKNFLEALNPDSKKVITAYLEPSLRDAKPEDRFQFERHGYFVADRNDSQPGKPVFNRIVGLKDSWGK

SEQ ID NO: 32666 - protein, 537 aa, Ralstonia eutropha JMP134
MPSKALPCQDPRRIWPPARRDEFQTRIRLCRVRLPPHPDTMTTTTLPDQNAAEQTFESFGLDARILRALSEQGYTKPTPIQAQAIPVVLLGKDVMGAAQTGTGKTAGFALPIIQRLLPMASASASPARHPVRALMLTPTRELADQVYDNVARYAKHTDLRSTVVFGGVDMNPQTDALRRGVEILVATPGRLLDHVQQKSVNLSQVQMLVLDEADRMLDMGFLPDLQRIINLLPAQRQTLLFSATFSPEIKRLAASYLKQPVTIEVARSNSTNENVRQMVYQVEDGQKQAAVVHLLRQRAEQGLSKQCIVFVNSKIGCSRLARHLEREGINAAAIHGDKTQTERMQTLEGFKNGTIDALVATDVAARGLDIADMPCVINFDLPFSAEDYVHRIGRTGRAGASGDALSIFVPGDERLLTDIEKLIKRSVPRGTLEGFDPTGEKARQEDSDRRRQRTDVRRARGNGDGEGEDRRRRHDHGGSRSAFRPSDDPFFSRPYEPSPNSASAKPADEMIAAALSRGRQAPKRPVAALLGGAPRKS

SEQ ID NO: 32667 - protein, 632 aa, Ralstonia eutropha JMP134
MTQHDTRAEQAIASATDASITSAVQSPLDKLDAMLNPAQVTETVAAEEVTNGFATLGLDAAILRALSELNYNNPTPVQAQAIPAFLAGRDLLVSSQTGSGKTAAFMLPAIQRISEKPATNRPTEPAKRMKGKRPRPSPAQPSLLVLTPTRELALQVTEAAAKYGRNLRRIVCASILGGMPYPKQLAALSKMPDILVATPGRLLDHISAGRIDLSALDMLVFDEADRMLDMGFADDIDAIVDATPASRQTLMFSATLDARIAQLASRQLKDPQRIEIAAARADQSHIEQRLHFTDDMSHKERLLDHLLRDATLKQAIVFTATKRDADSLAERLSDTGFAAGALHGDMTQGARNRTLTALRRGNLRVLVATDVAARGIDVPDITHVVNFDLPKQAEDYVHRIGRTGRAGRSGVAINLVNHNDTFQWKRIERFTNNRIDASVIEGLEPRRSPKPRSNFGGKPGGRGNGGGYRGGERSFGDRNFGDRKFGGESRGFGNRGNQEGGRSFGDDNRGFGNREGSGYRGGEQRSFGGGDRNFGGERKFGGDNRGFGQRANPEGGRSFGDDNRGFGNREGGGYRGGEQRSFGDRSFGDRKVGGEGRSFGDRGGRDGGRSLGNREGGFGGQRNGNSRSRYER

SEQ ID NO: 32668 - protein, 587 aa, Ralstonia eutropha JMP134
MNMPSAEFSHADSNSSAAPEMIGAEILVHALAEEGVEYVWGYPGGAVLYIYDELHKQKKFEHILVRHEQAAVHAADGYARATGKVGVALVTSGPGVTNAVTGIATAYLDSIPMVVITGNVPTHAIGQDAFQECDTVGITRPIVKHNFLVKDVRDLASTIKKAFYIASTGRPGPVVVDIPKDVSRNTCKYEYPKSLDMRSYNPVNKGHSGQIRKAVALLQGAERPYIYAGGGVVLANASEELRQLAALTGHPVTNTLMGLGSFPGTSKQFVGMLGMHGTYEANMAMQNCDVLIAIGARFDDRVIGNPSHFTSQARKIVHIDIDPSSISKRVKVDIPIVGNVKDVLQELIAQLQASDVKPKREALAKWWEQIEQWRSVDCLKYDRSSEIIKPQYVVEKIWELTKGDAFICSDVGQHQMWAAQFYKFNEPRRWINSGGLGTMGVGLPYAMGIKKAFPEKEVVTITGEGSIQMCIQELSTCLQFDTPVKICSLNNGYLGMVRQWQEIEYDNRYSHSYMNALPDFVKLAEAYGHVGMRVEKTSDVEPALREAFRLKDRTVFLDFQTDPTENVWPMVQAGKGISEMLLGAEDL

SEQ ID NO: 32669 - protein, 390 aa, Ralstonia eutropha JMP134
MSADSTLAPLTPPVSRLPSVGTTIFTVMSALAAEKNAVNLGQGFPDFDCDPRIVDAVTHAMRTGHNQYPPMAGVPRLRQAIADKIATLYGHRYSWESEITVTAGATQGILTAILCAVHPGDEVIVLEPCYDSYLPAIELAGATAVPVTLEAPDFRVPFDRLAAAITPRTRMILINTPHNPTGTIWRAADMDKLAQLLAGTDILLLSDEVYEHMVYDREPHASVSRHPELARRSFVISSFGKTYHVTGWKVGYVAAPAALSAEFRKVHQFNVFTVNTPVQHGLADYMADPAPYLELSAFYQAKRDYFRAGLANTRFKLLPSEGTYFQCVDYSAISDLSEAEFSMWLTREIGVAAIPVSAFYTQPRESGVVRFCFAKKEETLSRALERLAKL

SEQ ID NO: 32670 - protein, 195 aa, Ralstonia eutropha JMP134
MTQIDQAALAQLFTEARTHNVWQDRHVDDAVLNQVYEAMKFGPTAANSCPVRIVFVKSAAEKARLVECVSAGNTEKTRSAPVTAIIAFDKAFHDQLPKLFPHADARSWYAGNDAKIARDALMNSSLQGGYFILAARAMGLDCGPMGGFDADKVNAAFFPDGKWEVNFLCNLGYGEGDKLHPRLPRLSFDEACRIV

SEQ ID NO: 32671 - protein, 405 aa, Ralstonia eutropha JMP134
MSTPHFPIYMDYSATTPVDPRVADKMIPYLREQFGNPASRSHAYGWEAERAVEEAREQVAALVGADPREIVWTSGATESNNLAIKGAANFYSGKGKHLITVKTEHKAVLDTTRELERQGFEVTYLDVKENGLIDMDVLKQAIRPDTILVSVMFVNNEIGVIQDIEQIGEICREKGIIFHCDAAQATGKVVIDLNKLKVDLMSFSAHKTYGPKGIGALYVRRKPRVRIEAQMHGGGHERGMRSGTLATHQIVGMGEAFRIAREEMATENERIRMLRDRLWNGLKSMEEVYLNGDLEQRVPHNLNVSFNFVEGESLIMAIKDVAVSSGSACTSASLEPSYVLRALGRNDELAHSSIRFTVGRFTTEQEVDYTVELLKNKIGKLRDLSPLWEMFKDGVDLNSIQWAAH

SEQ ID NO: 32672 - protein, 416 aa, Ralstonia eutropha JMP134
MALIVHKYGGTSMGSTERIKNVAKRVAKWHRAGHRVVVVPSAMSGETNRLLGLAKEISAQPDPRELDMLASTGEQASVALLAIALHGENIDAVSYTGWQVPVKTDSSYTKARIESIDDERILGDLDAGRVVVITGFQGIDDDGNITTLGRGGSDTSAVAIAAAIEADECLIYTDVDGVYTTDPRVVEDARRLDKITFEEMLEMASLGSKVLQIRSVEFAGKYRVKTRVLSSLTDPLMPLENEINSGTLITFEEDSNMEAAVISGIAFARDEAKITVLGVPDKPGIAYQILGPVADANIDVDMIIQNQSVDGKTDFTFTVPRGDYQRTLTLLTDSVKPHVGAANVSGDPKVSKVSVVGVGMRSHVGVASKMFRTLSEEGINIQMISTSEIKISVLIDEKYMELAVRALHKAFELEQA

SEQ ID NO: 32673 - protein, 371 aa, Ralstonia eutropha JMP134
MRIGVPREIKDQEYRVGLTPASVRELVSRGHQVVVQAGAGAAIGLTDHSYKLAGAQLAGDAEEVFASAEMIVKVKEPQPSERALLKPGQILYAYLHLAADREQTSELVKSGAVCIAYETVTAPDGSLPLLAPMSEVAGRMSVQVAAAYLEKPRGGMGVLLGGVPGVAPGHVVVIGAGVVGANAIQMAVGMGARVTVLDRNVDRLRHLGLVYGNRLVTLYSSADAIERALLTADAVIGAVLVPGAEAPRLVTRAMVARMKGGSVVVDVAIDQGGCFETSRPTSHSDPTYVVDGVLHYCVTNMPAAVARTSTFALNNATIGYAMALADKGWSRALKEDPCLRAGLNICQGNVTYAAVASAHGCTYVPTERVLG

SEQ ID NO: 32674 - protein, 396 aa, Ralstonia eutropha JMP134
MADVILVLNAGSSSLKYCAYDAQGDALKLVLRGSIEGLYTSPSFRATDGGGTEVEARQWDEGTELGHGGGIAFLADFLRGHGEGHHLVGVGHRVVHGGLRFAQPERVTEAVLSELDALCPLAPLHQPHNLKPIRVLAERRPELPQVACFDTAFHRAQPEIAQAFALPASMTGRGIRRYGFHGLSYEYIASVLPGVDAKAATGRTVVAHLGNGSSMCALVAGRSVASTMGFTAVDGLPMGTRCGSLDPGVILYLISELGMGAREIEDLIYRKSGLLGVSGISSDMRVLLASDDPRARLAVELYTYRIGRELGSLAAAAQGIDALVFTAGIGEHAAVIRERVCRQAAWLGVTVDAAANASGATCISEPSARVAVWVIPTDEELMIARHTKALIGAGER

SEQ ID NO: 32675 - protein, 588 aa, Ralstonia eutropha JMP134
MEDSSSPDTQRGAAAAGSWQTWFPPAQWLLHYRSEWLRHDAVAGVTLAAYGIPVSLAYASLAGVPPQYGIYCYLAGGLAYALFGSSRQLAIGPTSAISMLVGVTIAGMAQGDPSRWASIAALTALLVAAMCILAWLFRLSSLVNFISETILLGFKAGAALTIALTQLPKLFGVKGGGEFFFERIAILAQQLPLTNLAVFGFGAVAIAVLLLGEKFLPGRPVALLVVVASIMLLSLTPLGALGFKVVGALPQGLPELHWPGLRPSDVDGVISLAFACLLLSYVESVSAARALAQAHGAEIDARQELLGLGAANLATGLFQGYPVAGGLSQSSVNDKAGARTPLALVFASATIALCLMFLTGLLANLPNVVLAAIVLVAVKGLVDIRELRHLWRVSRFEFIVSMVAFGAVLLLGILKGVIVAVLVSMLMIIRRAAHPHVAFLGRIPGTRSFSDMDRNPDNEAVPQILIFRAESSLLYFNVEHVRSVVWRAIRSSALPLRLVVCDLSVCPVVDLAGARMLATLHKELQAAGIELRLVAAHAVVRDMLRAEGLEERVGYFGRRISVADVIEEFRTSTAQETPIASITALAAT

SEQ ID NO: 32676 - protein, 472 aa, Ralstonia eutropha JMP134
MPASHHDSFLDLCRAALGPQHVLTDAADKAPYLTDWRKRYTGDAIAILRPANAEEVAAAVHACHAHKIAVVPQGGNTGLCGGATPTTTDSVVISLQRLNRVRQVDPLNNTITVESGVVLQHLQDVAHEHGRLFPLSLAAEGSCTIGGNLSTNAGGTAVLRYGNTRELCLGLEVVTPKGEIWHGLRGLRKDNTGYDLRDLFIGAEGTLGIITAAVMKLFPLPRASVTALAAVASPRAALALLAIAQSHAGAMLTGFELMSALSMQLVTTHFPQLRYPFSEVHPQLVLMELSDSESEDHARAIFERLMQVALDAGVVIDAVVAESVQQSRDFWNLREHIPLAQVEEGKNIKHDIAVPVSRVADFIETTDALLQVSFPGARMVTFGHLGDGNLHYNVSPPAGVDHDDFLRNQDAVNRVVHDSVHSHGGSISAEHGLGQLKREENRLYKSEVELAMMRAIKQALDPLGLMNPGKVI

SEQ ID NO: 32677 - protein, 599 aa, Ralstonia eutropha JMP134
MTVSATSPGTRLQRLLPWTQRVSRATLRADGIAGLLGAVLVLPQGVAFATLAGLPPEYGIYTAVVPCIVAALFGSSWHVMSGPTNANSLALFAMLSPVAFAGSPAYIGLALSVTILVGLMQLAVGTLRLGTLANFISPSVLLGFTCGAATLIGLYALKDLFGLAVPTGTSAFGVLRFLSDNVDAINWGAATVGAVTLGATLLFKRLGKRLPFMLLGLMAGYGVALLLNRTGWGGGHHVNVVGPIPSAIPAFHVPDISWRSVPDLLGIASALTIVALGQSISIAKAVALRSGQHIDANREFIGQGLSNIAGGLFSGYISCGSLNRSVPNFEAGAKTPLASVFSALWLLALVAVSASLLAQIPLAAIAAMLLLVAWGLFDFARLRRIAALSRTEFAIAVGTFAATLMIRLEMAVLLGTILSLVAYLYRTSRPAVRSLVPDADDPGRRFTPLDELHRPQPECPQLKLLRMEGAIYFGAVQYVTDRLHWLRTVNASQKHLLAMTKSMNFIDLAGAEMWEAELSERRAAGGDLYFHRPRTQVLQTWEQTGFTGKLGPDHVFSTKRQALHTIIGQLPPDVCAQCKVRIFEECAQRPGAQTHAETL

SEQ ID NO: 32678 - protein, 417 aa, Ralstonia eutropha JMP134
MGAPEMIKQHLIDPEICIRCNTCEDTCPIDAITHDERNYVVKADVCNACNACLSPCPTGAIDNWRTMLKGQAYPIEEQLLWDELPAEIPLPAAELDAAGTDEALRADTATAAAEGGVTVQAVETSRHTSARAPWSAAHPYVNLHGVRAPMAATVAGNYRLTAEDASSDIHHIVLDFGTHFFPVLEGQAIGIVPPGTDAAGKPHYIRMYSVASPRDGERPGYNNLALTVKRVEEDHDGNPVRGVASNFLCDLAKGDTVQVVGPFGTTFLMPNHREASIMMICTGTGSAPMRAMTERMRRNMEHFGGRRMLFFGARNARELPYFGPLLKLPKDFLDIHFAFSRDAEVPRRYVQDAIREASAGVTALLSDPHGHVYICGLKGMEEGVLAAFGDVCAASGMSWPELEATMKAEGRLHIETY

SEQ ID NO: 32679 - protein, 393 aa, Ralstonia eutropha JMP134
MTDIVIVSAARTAVGKFGGSLAKIPAPELGAIAIKAALERAGVKPEQVSEVIMGQVLTAGSGQNPARQASIKAGLPSSVPAMTINKVCGSGLKAVMLAANAILAGEAEIVVAGGQENMSAAPHVLPGSRDGFRMGDAKLVDTMIVDGLWDVYNQYHMGITAENVAKEYGITREAQDEFAVASQNKAEAAQKAGKFDDEIVPVMIPQRKGDPVAFKTDEFVRQGATLDNMSGLKPAFDKAGTVTAANASGINDGAAAVVVMSAAKAKELGLTPLATIKAYANAGVDPKVMGMGPVPASKRCLSRAGWGVGDLDLMEINEAFAAQALAVHQQMGWDTSKVNVNGGAIAIGHPIGASGCRILVTLLHEMKRRDAKKGLASLCIGGGMGVALAVERN

SEQ ID NO: 32680 - protein, 394 aa, Ralstonia eutropha JMP134
MTREVVVVSGVRTAIGTFGGSLKDMAPTQLGALVVREALARAQVSGDDVGHVVFGNVIQTEPRDMYLGRVAAVDGGVTINAPALTVNRLCGSGLQAIVSAAQTILLGDADVAIGGGAESMSRAPYLAPAVRWGARMGDASMVDMMLGALHDPFHRIHMGVTAENVAKEYDITRSQQDEAALESHRRASAAIKAGYFKDQIVPVTLKTRKGEVSFDTDEHVRHDATIDDMTKLKPVFVKENGTVTAGNASGLNDAAAAVVLMERAEAERRDLKPLARLVSYGHAGVDPKTMGIGPVPATKKALERAGLSVSDLDVIEANEAFAAQACAVTKALGLDPAKVNPNGSGISLGHPIGATGALITVKALHELQRVQGRYALVTMCIGGGQGIAAIFERI

SEQ ID NO: 32681 - protein, 392 aa, Ralstonia eutropha JMP134
MNEAVIVSTARTGLAKSWKGAFNMTHGATLGGHAVEHAIARAKIEAGEVEDVLMGCANPEGATGSNIARQIALRAGCPVTVPGATVNRFCSSGLQTIAMAAQRVIADEGDIFVAGGVESISCVQAEMNRHMLADPWLVKNKPEIYWNMLQTAENVAKRYNISKDRQDEYGVRSQQRAAAAQEAGKFKDEIVPITVLAGVADKSTGQLVTKEVTLDRDEGIRGDTTLEAVSKIRTAVPGGVVTAGNASQFSDGASAAVVMNARVAAAKGLQPLGVFRGFAVAGCEPDEMGIGPVFAVPKLLKKAGLKVDDIGLWELNEAFAVQVLYCADKLGIPMDRLNVNGGAIAVGHPYGVSGARLVGHALIEGKRRGVKYVVVTMCIGGGQGAAGLFEVL

SEQ ID NO: 32682 - protein, 582 aa, Ralstonia eutropha JMP134
MHDRPHNPARQTEQLQTFIRPDLAMTSTPAQAARTGGRVLVDQLRIHGTERIFCVPGESFLDVLDALHDQPAIDLVVCKHEGAAANMAEADGKLTGRPGICFVTRGPGATHGSIGVHIARQDSTPMILFAGQIAREHKGREAFQEVDYAAVFGSMAKWAAEIDDPARIPEMVARAFQVATSGRPGPVVLALPEDVLDGLVNCADAAPYRPVAAAPRAEDANALATALRAAQRPLVIAGGANWTEQATIDFAAFVRAWDLPVACAFRRQDVIDNRDRHYVGHLSLGVNPKLAERVKTADLIVAVGTRLGDIATDGYTMLQVPVPTQKLVHIHADSAELGRVYQAALPIHAGVAPAAAMLAALPAPATAPWKDWTAGARADHEGFVAPPKPHAELTGVDMIAAMSHLSQVLPEDAVVTNGAGNYAVWLHRFYTYKQSRTQLAPTCGAMGYGLPAAIAAKLRHPQKTVLCLAGDGCFLMYPQEIATAAAHGVNLVVIVVNNGMYGTIRMHQERRYPGRQSGTTIVNPDFVAMARSCGAWAERVERTEDFAAAFERARQAGKPAVLELVTDPLQITPAMRVSDLPQ

SEQ ID NO: 32683 - protein, 299 aa, Ralstonia eutropha JMP134
MSKIGFIGLGVMGKPMAEHLQAGGHIVYAHTRSGVPQELLDKGMQSCSSAADVARQAEVIFLMLPDTPDVARVLFDKNGVAEGLSAGKIVVDMSSISPIETREFAAKIEKLGCNYVDAPVSGGEVGAKAATLSIMAGGKQDVFDKVLPLLQLMGKNITLVGNAGDGQVAKVANQVIVALTIEAVSEALVLAAKAGADPARVRQALMGGFASSKILEVHGERMIQRTFNPGFRIELHQKDLNLALSTAKQLGLGLPNTASTQQLFNVCVAQGGAGWDHSGLVKAIEHLSSFAIGDTPKKA

SEQ ID NO: 32684 - protein, 354 aa, Ralstonia eutropha JMP134
MVQAQFHRLQIAEVVAETDQAHSLVFALPESLRDTFAYRPGQFLTLRVPVDGVPQQRCYSLSSAPDVDSALRVTIKRVQGGRVSNWVCDHLGAGDTVEVMPPAGVFTPPTLHGDFLLLAGGSGITPVLSIAKAALRHGRGTVTLVYANRDEQSVIFREALGELARRHPGRLRVIHWLDSVQGPPSQRQVEELVRPWSLAECFICGPGPFMDSAQAALQELGVPRGKLHVERFVSLPDRTSAPVQAVMPAASTVVTPVPVATMHGAALTVQLDGETHQVSVAPDETVLDAMQRAGVAAPNSCRAGLCGACMCQVTQGDVTLGENHVLDQADLESGWTLACQARPASGDIHLKFPD

SEQ ID NO: 32685 - protein, 401 aa, Ralstonia eutropha JMP134
MNEAVIVAVARTPIGKAFRGAFNDTEAPVLGGHVVRAVVERAGVDPAEVEDVLIGAAAQQGTQGYNLGRLCAVAAGLPDSVPGMTLDRMCGSGLMTIAAAARAIQCGEADILVAGGVESISLTQNKHKNAFRAQSEAVLAHQPAAYMAMIETAEVVARRYGISRAEQDAYAWRSQQRTAEAQRRGAFDDEIVPLETRRALFDKSGVLTGHETVRLERDECNRPDTTAESLAALKPVWSGGQAIAQGEYITAGNASQLSDGAAAVLLMSAKEAQRRGLRPLGRYRGMAVAGCAPDEMGIGPVFAVPKLLERHGMTVADVGLWELNEAFASQVLYCQQKLGIADARLNVSGGAISVGHPFGMSGARMTAHALIEGRRRGVRQAVVTMCIGGGMGAAALFDVLP

SEQ ID NO: 32686 - protein, 196 aa, Ralstonia eutropha JMP134
MQTNELLDKIFRGARSQNGWLPTPVPDSKLRELYDLMKFGPTSVNCSPARLVFVRTEEGREKLRPALAPGNVEKTMAAPVVAIVGYDTRFYEQLPDLFPHNPAVKAWFEGDEKVDFANTTAFRNGTLQGGYLIAAARALGLDCGPMSGFNNQAIDQAFFAGTSIRSNFICGLGHGDPEKVFARSPRLSFEQACQLA

SEQ ID NO: 32687 - protein, 392 aa, Ralstonia eutropha JMP134
MQQAVIVDAIRSPMGRSKPGSAFTELHATELLAQVLKGLVERNKLDPGLVDDVITGCVTQAGEQSAGPGRVAWLAAGFPDHVPATTIDRKCGSSQQAVHFAAQGIMAGAYDIVIACGIESMSRVPMGSARIGQNPYGPSMEARYAPGLVSQGVAAELVAAKYELSRAQMDGYSARSHELAAAAREAGAFRREILPIVTPNGVIEHDETIRPGTSVEKLGTLQASFRNDELSARFPQIGWNVTAGNASQISDGASAMLLMSESMAQRLGLKPRARFVAFDVCGDDPVMMLTAPIPASQRAIKKSGLKLDQIDHYEINEAFACVPLAWQKALGADAARLNPRGGAIALGHPLGASGVRLMTTMLHALEDSGGRYGLQSMCEAGGMANATIIERL

SEQ ID NO: 32688 - protein, 352 aa, Ralstonia eutropha JMP134
MTYQLTIEPLGQTIGIEEGQTVLDACLRAGVWLPHACGHGLCGTCKVQTLEGELDHGEASPFALMDFEREEAKCLACCAKPMSDMVIEVDIEPDPDAQCLPLMDFTAEVVRIEALTPTIKGVFLRIEGEPLQFQPGQYVNVWIGKEAAPRAFSIASAPTAGEIELNIRLVPGGSATTYVHEQLSVGERLQLSGPLGRFFVRKSDPRPLVFMAGGSGLSSPRSMILDLLESGDQREIVLVQGARNAGELYYRDAFEALARQHDNFTYLPVLSGEPEQSDWGGERGYVHDLASRHFSQDFRGWRAYLCGPPPMIEACIATLMQGRLFEKDIFTEKFLSAADASQATRSPLFRSL

SEQ ID NO: 32689 - protein, 317 aa, Ralstonia eutropha JMP134
MKPHILQLNPILIPAANDELAALYHVHKLFEVEDQAAWLKEHGSAIQAVITGGHTGISRAMLEQLPALKVVAVNGVGTDAVDLPYCRERGLPVTATLGALTEDVADLAIGLLIAACRNICAGDRFVRDGQWERFPQPSAIPLARRFSGMRVGIVGMGRVGRAVATRAAAFGCPIRYTDLRRMDDLPHAFVPDLVDLARNSDALVLCAAADKAEGIVNGAVLDALGPRGFLVNVARGRLVNEDDLAQAIEAGRIAGAGLDVFVDEPRVPLALRRSDRTTLQAHRASATWETRAAMIRMVLDSVAEGLAGKRPAMSLTT

SEQ ID NO: 32690 - protein, 862 aa, Ralstonia eutropha JMP134
MRLDKLTTRFQEALADAQSLALANDNQYIEPQHLLRALIAQNDGAAKALLQRAGVNVNGLQTALDAAIKRLPQVQGTSEVQVGRDLVNLLNAAEKESIKRGDQFIASELFLLAVSEDKGEAGRIARENGLNRKPLEAAIQAVRGGDAVNSADAETQREALKKYTIDLTERARMGKLDPVIGRDDEIRRAIQILQRRTKNNPVLIGEPGVGKTAIVEGLAQRIVNGEVPESLKNKRVLVLDMAGLLAGAKYRGEFEERLKAVLNDVAKDEGQTIVFIDEIHTMVGAGKAEGAIDAGNMLKPALARGELHCIGATTLDEYRKYIEKDAALERRFQKVLVDEPSVEATIAILRGLQEKYELHHGVEITDPAIVAAAELSHRYITDRFLPDKAIDLIDEAAARIKMEIDSKPEAMDKLERRTIQLKIEREAVKKETDEASLKRLDLIEQEITRLEKEYADLDEIWKAEKGAAQGTAALKEEIEKVKLEIAKLQREGKLDKVAELQYGKLPGLEGKLKAATDAEASEQKQPNKLLRTQVGAEEIAEVVSRATGIPVSKMMQGEREKLLKMEDRLHNRVVGQDEAVRLVSDAIRRSRAGLADENKPYGSFLFLGPTGVGKTELCKALAEFLFDSEEHLIRIDMSEFMEKHSVSRLIGAPPGYVGYEEGGYLTEAVRRKPYSVVLLDEVEKAHPDVFNVLLQVLDDGRLTDGQGRTVDFKNTVIVMTSNLGSQIIQSMVGEPQEAVKGAVWQEVRTHFRPEFLNRIDEVVVFHALDQKNIESIARIQLQRLQGRLARMDMTLEVSELALEKIASAGYDPVFGARPLKRAIQQQIENPVARAILEGKFAAKDVVPVDYADGAFVIGGVAQ

SEQ ID NO: 32691 - protein, 427 aa, Ralstonia eutropha JMP134
MFAAADAAVFASADIAVKPIQKSNKLNNVCYDIRGPVLEKAKQMEEEGHKIIKLNIGNLAVFGFDAPEEIQQDMMRNLPNSAGYSDSKGIFAARKAIMHYTQQKNIQGVGLEDIYVGNGASELIVMAVNALLNSGDEVLVPAPDYPLWTAAVSLSGGTPVHYICDESNEWMPDPADIRARITPHTKAIVIINPNNPTGALYSDELLLEIVAIAREHGLIIFADEIYDKVLYDGNVHTSIASLSTDVLTVTFNGLSKNYRSCGYRAGWMVVSGDKRPALDYIEGLNMLSSMRLCANVPGQWAIQTALGGYQSINDLVAEGGRLRRQRDLAYELITAIPGVSCVKPKAALYLFPKLDLSMYPVQDDQEFIYELLQESKVLLVQGSGFNWDKPDHFRIVFLPHEEDLREAINRIARFLEAYRKRHGKVAA

SEQ ID NO: 32692 - protein, 627 aa, Ralstonia eutropha JMP134
MNNNLFQKAAIWLVIALVLFTVFKQFDKPRAQDGVTYSQFMDDAKNGKVSRVDVQGRNLVVSPKEGAKYTIISPGDIWMVGDLMKYGVQVTGKADDEPNVLVQALYYLGPTLLIIVFWFYMMRQMQGGGKGGAFSFGKSRARLIDENQNAVTFQDVAGCDESKEEVVELVDFLKDPQKFQKLGGRIPRGVLLVGPPGTGKTLLARAIAGEAKVPFFSISGSDFVEMFVGVGAARVRDMFENAKKQAPCIVFIDEIDAVGRHRGAGMGGGNDEREQTLNQMLVEMDGFEANSGVIVIAATNRSDVLDKALLRPGRFDRQVYVGLPDIRGREQILKVHMRKVPIGNDVDASVIARGTPGFSGADLANLVNEAALFAARRSKRVVDMQDFEDAKDKIYMGPERKSTVMREEERKATAYHESGHAVVAKLLPKADPVHKVTIMPRGWALGVTWQLPEHDKYSKYKDNMLEEIAILFGGRAAEEVFLNAMSTGASNDFERATKIARDMVTRFGMSDELGAMVYVDTEQDGMFGKLSSKTVSEATQQKVDAEIRRIIDEQYGLAKRLLEENRDKVEAMTSALMEWETIDADQVNDIMAGKPPRPPRGVSGPNGGGNAPSGGSPVAPTNAPATA

SEQ ID NO: 32693 - protein, 311 aa, Ralstonia eutropha JMP134
MTESHDSQQPAADTQAKAFRCGTVAIVGRPNVGKSTLMNALVGQKISITSRKAQTTRHRLVGIQTTDDAQYVFVDTPGFQTRHASALNRSLNRAVTSTLSSVDLVLFVVEAGYYGADDEKVLALLPKNTPVLLVTNKLDRVTDDRAGVMMPFLEKMGQLFPFREVVPMSAKTRDHIARLFEIIRPYLPEGEPMYDADAMTDRSERFLASEIIREKVFRWTGDELPYTSTVIIDKFETEGRLRRVFATILVERDAHKAMIIGNKGSKLKQISTEARLDMEKLFDGKVYLEMWIKVKSGWADNEAGLRAYGYE

SEQ ID NO: 32694 - protein, 331 aa, Ralstonia eutropha JMP134
MKPSILVTRAIFPDVIDHLAQYFEVDDNQQDVVLDAAALKARLAGKAGVLTNAGDRIDGGVVAALPDLRAVCNMAVGYNNLDIPALTAAGIVATNTPDVLTETTADFGWALLMATARRVTESEHYLRDGRWQRWSYDMLVGMDVYGSTLGILGMGRIGQALARRAAGFGMTVLYHNRSQLPEATERALNARYVSKAELLQQSDHLVLVLPYGPESHHAIGATELTQMKPTATLVNLARGGIVDDEALAHALKTRRIFAAGLDVFEGEPDVHPDLLTVSNVVLTPHIASASEKTRRAMAMLAADNLIAALDAGPNAGHPPSVIDPAVMGHRR

SEQ ID NO: 32695 - protein, 425 aa, Ralstonia eutropha JMP134
MTNRTSAMPANRASALPAGQSLKNAVVAAVMTAILTIPVLGLQLKLDGYKVVLESHWRPVWIAVAAVFLFQLFKPLLSRAGSAVRMPAMPQLGVGQQRAAVWVLLAVGLVWPFFGSRGAVDVATLALIYVILGLGLNIVVGFAGLLDLGYVGFYAVGGYTYAMLNQYFGLGFWECLPIAAAMSATFGFLLGFPVLRLRGDYLAIVTLGFGEIIRLLARNLTEYTGGPDGISGIPKPTVFGFEMARSATVEGARTFHELIGLDYKGEHMVIFLYLLALLLVGFTLFVTSRLIRMPMGRAWEALREDEIACRSLGMNPTRIKLSAFTLGAAFAGIGGAFFAARQGLVNPESFTFIESALVLAVVVLGGMGSQLGVILAAILLTVLPEVARGFAEYRMLIFGLVMVLMMMWRPQGLLPASRPHVELPR

SEQ ID NO: 32696 - protein, 311 aa, Ralstonia eutropha JMP134
MIETGLPRRVSCPNAVLVLSSLSCAAMLATGAASAGAATAPVLNHIQQTGVIRIAHRESSVPFSFVADGKPVGYAVDLCLKIADAVRTSLHLPGLRVEWVPVTPANRIPAIVEGKADLECGSTTNNRERREQVAFTIPHYIAGSRMIVKTDSGISKWADLRGKTVVSTSGTTPLAMLRKMDEGKVMQWRLVEAKDHAQAFAMVEAGKADAFVMDDVLLYGLRANASRPGDFKVTGEMLTIEPYAIMLSKSDPEFKKLVDKTLIAAVYDQETPRLYKKWFQAPIPPHGITLDIPMSYLLRDSFKFPSDKVAD

SEQ ID NO: 32697 - protein, 777 aa, Ralstonia eutropha JMP134
MSSKTSGDAPQHAPNSPEAQLRLAALEYHRSPTKGKIQVTATKALSNQRDLSLAYSPGVAYACEEIAKDPSTAAEYTSRANLVAVITNGTAVLGLGDIGPLAGKPVMEGKGCLFKKFAGIDVFDIELDARDPDKIVEIVAALEPTLGGVNLEDIKAPECFYIEQKLRERMNIPVFHDDQHGTAIISAAALLNGLKVVGKDIAKVKLAVSGAGAAAIACLDTMVSLGVKRENVSVVDSKGVIYVGRDANMEANKARYAQDTSARTLADIVNGADVFLGCSTAGVLTGDMVKTMADKPIILALANPEPEIRPEVAKAARPDCIIATGRSDYPNQVNNVLCFPYIFRGALDCGATKITEAMKLACVKAIAELAEAELNDAVAAAYGGRELKFGPDYIIPTPFDQRLIEKIAPAVAKAAEESGVATRPIQDLDAYRQQLSTYVYHTGMIMKPVFSAAKASPKRVAYAEGEEERVLRAVQSVVDEGLARPILIGRPHVIQMRIEKAGLRLKAGVDFELINPEDDPRYRAYHEAYHALRGRDGVTPDMAKVALRRSNTLIGTMLMHMGDADALLCGTVGRFEAHLEHVSDVIGLAPGAKVFAALNALMLEKHTLFITDAFVNDDPNAEELAAITQLAAEEIRRFGLHPKVALMSHSMFGSSTRPSARKMREAAEILAKVAPHLEVEGEMQGDAALDEDVRRHFLPSTKLAGSANLLVMPTLDAANIAFNLLKMTGGQGVTVGPILLGAAKPVHILNPQATTRRIVNMTAVAVAEANANASVQQ

SEQ ID NO: 32698 - protein, 590 aa, Ralstonia eutropha JMP134
MSNPAKSEQSAGHDVKVGKRLMGYLRPELRIFIAAILAMAVVAASEGVIPKVVNDLLDKGFGGEYAGKLWHVPAILTGVALIRGVAQFASGYLLSLISNRVLLKMRMQMFDRMLHAPAHFYHRNTAASLINAVIFEVNQVLSILTSVFITLVRDSLTVVALLIYLFYTNWRLTLIVSVILPVIGYLMSKINRRLRRLNRDHQTLTNSAAYVVEEAAGGYKVVKLHGGEAYEMNRFRNMADRLKNYSMRMAVAGGLNQPVTAFLAALALSVIITIAMIQAQGNQTTIGGFTGFVMAMLLLISPLKHLTDINQPLTRGLTAAELIFRLIDEPVEPQDGGVRLERAKGDLVFERVGFRYGEGTRPALEGIDIRVPAGEVVALVGPSGSGKTTLVNLVPRFFDPTDGRILLDGHAIGDIALRELRNQIAFVSQDVVLFNDTVAANVAYGARSEEEIDMARVERALQAAYLTEVVKNLPEGVNTNIGDNGMKLSGGQRQRLAIARAIYKDAPILILDEATSALDSESERQVQAALEALMVGRTTLVIAHRLSTIENADRIVVLDHGRVAEHGTHEELLAANGLYAGLHRIQFATH

SEQ ID NO: 32699 - protein, 226 aa, Ralstonia eutropha JMP134
MRPAFDPESLPVVDTDTQRPALSAPRLQSEFIRHRLQVPPAWAPELTDESRVYDRSRGLRDAAVLVPIVERRDGLTILLTERNANLSAHAGQISFPGGRQESYDVNRIDTALRETEEEVGLARDYVEVLGALPDYITGTGFHVSPVVGLVRDGFTLRPDASEVADVFEVPLAFLMNPSHHERRLFRWVDGERMFYAMPFPREGGGHRFIWGATAGMLRNLYHLLAA

SEQ ID NO: 32700 - protein, 768 aa, Ralstonia eutropha JMP134
MTQSSLPVSQSLAPDEPWRAEAGATLRPGETVLAGLELDLDARLHFTQGWLVVTDRRLLARAPGEKSVREWAIEPGLRLTHTDHAGVGTLELCDAAGRLGSWRYTLGYNPAALRLVDQFEARRDTAPSMVPEDDGEVLCPTCKAPLPPGEEECPQCSRELETPSSTWALLRLWRFARPYRWELLTGFMLTLLSTAATLVPPYLTMPLMDKVLIPFQNGVPINYDLVRLYLAGLLGAALVAWSLGWARTYLLARVSERIGADLRTTTYEHLLKLSLEYFGGKRTGDLMARIGSESDRICVFLSLHLLDFATDVLMIVMTALILVSINPWLALVTLVPLPFIAWMIHLVRDKLRHGFEKIDRIWSEITNVLADTIPGIRVVKAFAQEKREVARFREANKHNLAINDRVNAVWSLFTPTVTLLTEIGLLVVWVFGIWQVSHSAITVGVLVAFLTYISRFYTRLDSMSRIVSVTQKAAAGAKRIFDILDHVSSVPEPVRPAKLDKVEGAIEMRDLGFRYGNRAVIRGLDLSIAPGEMIGLVGHSGSGKSTLVNLICRFYDVSEGAIRVDGIDIRSLPVSEYRRHIGLVLQEPFLFFGTIAENIAYGKPDATREEIVAAARAAHAHEFILRLPHGYDSLVGERGQALSGGERQRISIARALLINPRILIMDEATSSVDTQTEKEIQKALDNLVQGRTTIAIAHRLSTLRKADRLVVMDRGKIVEVGGHDELLAKEGAYYKLYQAQARNVDTEDDDTESESEVLAREAEAANAQ

SEQ ID NO: 32701 - protein, 329 aa, Ralstonia eutropha JMP134
MTIAANPAAAAPTQRSSVQHLPVNLFGAVMGLSGLSLAWRAASNVFGTSPAIADAVGVVAVLTFLALAAGYLAKWRLYPAAVKAEFNHPIAGNFFGTITIAILLLSSVVGVYSEALGQVVWTIGAALTIALTYVIASRLFLGKGDPTHVTPAWLIPGVATLDIAVAGGTMPMAWAPELNLFAVAVGTVMALVFFTMIFARLVHHDPLPAGMVPSLIILIAPFEVGFLAYVNVTQHVDMFAALLFYFGLFLFVVLAAKVFRRSVPFAASWWAISFPMAALSNAALKYAHHAETGVLRIVAAVILALLTVAIAVLFVRTLYRLSTHRLLVG

SEQ ID NO: 32702 - protein, 123 aa, Ralstonia eutropha JMP134
MTTINKILIVDDSPTEALFMSDLLGKQGFKVSVAGNSDQAFARLEAEAFDLILMDVVMPGQNGYQATRAIKRDDRFKDIPVIMCTSKGLDTDRIWGMRQGASDYIVKPVDSKELLTKIAALSH

SEQ ID NO: 32703 - protein, 560 aa, Ralstonia eutropha JMP134
MYQYDQYDQRIVNERVAQFRDQVRRRLSDELTEEEFLPLRLQNGLYMQRHAYMLRVAIPYGLLASKQLRKLAHIAREYDRGYGHFSTRQNIQYNWMELERVPDVLAELASVEMHGIQTSGNCVRNITTDHFAGVAPDESVDPRVLAELLRQWSTFQPEFAFLPRKFKIAISASKDDRAVVQMHDIGIYVYKNDAGETRIRVLAGGGLGRTPILGTIIKDDLPWQHMLTYVESAIRVYNRYGRRDNKYKARIKILVKAIGAEKFAEEVEEEWQYSKDGPGTLTQDEFDRVAQYFTPPAYEKLADTDASYEKHLLEDKAFARWVSRSVHGHKVPGYAAVTLSTKPGPVSPPGDATAEQMEAVADLADQFGFGELRVAHEQNLVLPDVKKHDLYDLWQLAKKAGLATANIGLLTDIIACPGGDFCSLANAKSIPIALAIQERFDNLDFVHDLGEVSLNISGCINACGHHHVGNIGILGVDKDGSEWYQVTLGGAQGNSTALGKVIGPSFSAEEMPDVISRIIETFVANRIEDERFIETVNRIGIAPFKERVYADKQPRERAEA

SEQ ID NO: 32704 - protein, 69 aa, Ralstonia eutropha JMP134
MASGIVKWFNDAKGFGFIKPDEGEEELFAHFSAIQMAGFKTLKEGQRVSFEVVQGPKGKQATNIQDASA

SEQ ID NO: 32705 - protein, 647 aa, Ralstonia eutropha JMP134
MGKIIGIDLGTTNSCVSILEGNTPKVIENSEGTRTTPSIIAYMEDGEILVGAPAKRQAVTNPRNTLYAVKRLIGRKFEEKEVQKDIGLMPYSIVKADNGDAWVGVRDQKLAPPQVSAEVLRKMKKTAEDYLGEPVTEAVITVPAYFNDSQRQATKDAGRIAGLDVKRIINEPTAAALAFGMDKNEKGDRKIAVYDLGGGTFDISIIEIADVDGEKQFEVLSTNGDTFLGGEDFDQRIIDYIIGEFKKDQGVDLSKDVLALQRLKEAAEKAKIELSSSQQTEINLPYITADASGPKHLNLKITRAKLEALVEDLITRTIEPCRTAIKDAGVKVSEIDDVILVGGMTRMPKVQEQVKEFFGKEARKDVNPDEAVAVGAAIQGSVLSGDRKDVLLLDVTPLSLGIETLGGVMTKMITKNTTIPTKHAQVFSTADDNQPAVTIKVYQGEREMATGNKLLGEFNLEGIPPSPRGTPQIEVSFDIDANGILHVGAKDKATGKENRITIKANSGLSEDEIQRMVKDAEANAEEDKKARELADARNQADALVHSTKKAVTEYGDKLEAGEKEKIEAAIKELEDAARGGDKAEIDAKVTALSEVSQKLGEKVYADMQAKAGEQGAAGAAGAGAQQQAQPQDDNVVDAEFKEVNDKK

SEQ ID NO: 32706 - protein, 373 aa, Ralstonia eutropha JMP134
MYIGIPQETRAGETRVAATPETVKKYVAQGHKVVVQAGAGVRASQPDSAYEAVGATIGTAADAFGADLVLKVRAPEAAELALMRPGSALVGMLNPFDAENNARMAAASVTAFALEAAPRTTRAQSMDVLSSQANIAGYKAVLVAAHHYQRFMPMLMTAAGTVKAARVLILGAGVAGLQAIATAKRLGAVIEASDVRPAVKEQIESLGGKFLDVPFVTDEEREIAQGVGGYARPMPPDWMRRQAELVHERAKQADIIITTALIPGRKAPVLLQEETVQQMKPGSVVVDLAAAQGGNCPLTVADEVVERHGVIFVGHTNLASMVAADASALYARNVLDFLKLVIDKDGNFTLNLEDDIVAACLMCNGGEVVRKAA

SEQ ID NO: 32707 - protein, 774 aa, Ralstonia eutropha JMP134
MTSPQQSPSQDDLKQQQREALRKAALEYHEFPTPGKISVTPTKPLSNQRDLALAYSPGVAAACEEIVADPANSFRYTARGNLVAVITNGTAVLGLGDIGAAASKPVMEGKAGLFKKFAGIDVFDIEIDEKDPEKLVQVIAALEPTFGGINLEDIKAPECFYVERKLREKMKIPVFHDDQHGTAIVVAAAVINGLKVVGKDIKSVKLVASGAGAAALACLDLLVDLGLPIENIWVTDLAGVVYEGRTELMDPEKARFCQKTDKRKLGEVIDGADIFLGLSAAGVLKQDMVQRMGEKPLVLALANPNPEIAPELVKEVRPDAIMATGRTDYPNQVNNVLCFPFIFRGALDCGATTITREMEIAAANAIAELARQEQSDIVATAYGIQDLAFGPEYLIPKPFDPRLIVWVAPAVAEAAMKSGVASRPIEDMDAYRLQLQQFVYHSGTLMKPIYAAARKVEMAKKRIVFAEGEEERVLRAVQVVVDEKLANPILIGRPAVLQHRIERFGLRLRPGVDFAVVNPEHDERFRDYSDAYYRMMAREGVTPQYAKLELRRRTTLIGAMLVKRGEADGMICGTVSNTAAHLRYIDQVLGGTSKVYAAMNGLVLPGRQIFLVDTHVNVDPTADELAEITLMAAEELKRFGIEPKVGLLSHSNFGSSEAPSARKMRDTLAILRERAPELEVDGEMHGDSALDEKLRNTLVPDGTLKGEANLLVCPNIDAANISYNLLKVAAGNNVAIGPILLGVKAPVHILTPSATVRRIVNMTSLVVVDAAAKR

SEQ ID NO: 32708 - protein, 365 aa, Ralstonia eutropha JMP134
MKFIDEARIEAIAGNGGNGSASFRREKFVPFGGPDGGDGGRGGSVFAVADRNINTLIDFRYAKKHVARNGENGRGSDCYGAAGDDVTLRMPVGTLITDMDTGELIADLTEHGQKVCLAEGGMGGWGNLHFKSSTNRAPRQQVDGKPGERRMLKLELKVLADVGLLGMPNAGKSTFISHISNARPKVADYPFTTLHPNLGVVRVDHEQSFVVADIPGLIEGAAEGAGLGHQFLRHLQRTGLLLHIVDLAPFDEAVDPVAEAKAIVNELKKYDETLYDKPRWLVLNKLDVVPEEERATRVKDFIKRYKWKGPVFQISALTGDGCRELIYAIKDHLAALKAEEAAALAEPDIRLDERLHNVDHDGHEQ

SEQ ID NO: 32709 - protein, 103 aa, Ralstonia eutropha JMP134
MYAVVKTGGKQYKVAAGEKLKVEQIPADIGAEITLDQVLAVGAGDQIKFGTPLVSGASVKATVISQGRHDKVKIFKMRRRKHYQKRQGHRQNYTELRIEAINA

SEQ ID NO: 32710 - protein, 103 aa, Ralstonia eutropha JMP134
MSDVQQKIDQIVKGNPVVLFMKGTAQFPMCGFSGRAIQILKACGVDSPATVNVLDDEGIRQGIKEYANWPTIPQLYVNGEFIGGSDIMMEMYQNGELQTLLKG

SEQ ID NO: 32711 - protein, 362 aa, Ralstonia eutropha JMP134
MTPQFHPLRVAQVRPETADTISIAFEVPETLRDAYRFTQGQFLTLKAPVDGQDLRRSYSICCGVQDYAERGELRVAVKLVEDGVFSSHLHDTLAPGQLIDVMTPDGRFHVPLDAGAARHYVAFAAGSGITPVLSLIRTALAAEPQSRFTLVYGNRNVDSIIFSEALEDLKNQYLSRFTLYHVLSRQPQEVDLLHGRLDHARVTAFLQTLIPVDGIDAAFVCGPASMIDEVETALRDAGLDPHRIHAERFGVPVDRQKRAPAHAHADDAGTAELVVVLDGKQHTMRLPMEDGKVLDTALAAGLDLPYACKGGVCCTCRAKVLEGQVEMEKNYTLEPWEMEKGFVLTCQARALTPRVVVSYDER

SEQ ID NO: 32712 - protein, 406 aa, Ralstonia eutropha JMP134
MLSAASRPYIDASVPVLREHGLAITTHFYREMFAARPELTQLFNMGNQANGSQQQSLASAVFAYAANIDNANALAPVVERIVHKHAAVGLKPAHYPIVGRHLLGAISAVLGEAATPDLIAAWDEAYWLLAGELIAAEARLYQSTGMAAGERIAVRVDRREVQSDTVVALTLSAVDGQPLRDFRPGQYVSVEVTLDDGNRQQRQYSLSAERGLPTWQISVKREDGDHATPAGAVSNWLHANAQPGTELSVSAPFGDFAPRLDNHRPIVLLSAGIGITPMLSVLRTLAAQGSRREILFAHAARDGRHHAHRADVAWARERLPQLRTHISYEQPQAADVAGRDYDHAGTMPVAALLDAPDNRLFIDGDFHLCGPLGFMQAQRHALISAGVPVGHIHREVFGPDLLDDLL

SEQ ID NO: 32713 - protein, 306 aa, Ralstonia eutropha JMP134
MANQRNVGFIGLGIMGAPMAGHLRAAGHTLFVHDVNPAPQALVDAGVTVCTSAEEVAKRADIIVIMVPDTPHVEAVLFADKGVAAALKAAGKEASYSKIVVDMSSISPIATKDFAARINKLGASYLDAPVSGGEVGAKAASLTIMVGGPEEAFDQVKPLFELMGKNITLVGGNGDGQTTKVANQIIVALNIQAVSEALLFASKAGADPARVRQALMGGFAASRILEVHGERMVKRTFDPGFRIELHQKDLNLALQGAKALGVALPNTATAQELFNTCAANGFGKADHSALCRAIEIMSNHDIASAK

SEQ ID NO: 32714 - protein, 172 aa, Ralstonia eutropha JMP134
MADKAKRKDSDKEKKAVKSASDRIEVRQSGVHGKGVYAIAPIAEGERVIEYKGEHISWKKALDRHPHDPNDPNHTFYFSLDDGSVIDAKFGGNRARWINHACTPNCEAREKKGRVFIHALRDIATGEELFYDYGLVIDARYTKKLKKEFECRCGSPDCRGTMLAPKGKTSSK

SEQ ID NO: 32715 - protein, 555 aa, Ralstonia eutropha JMP134
MDIKRTILWVIFSMSLVLLYDNWQRANGHASMFFPSATQQQAASAPAASAAQGDVPKANATAGAAAPAAPGGAPQAAAQPTGEKIIVTTDEVRAEIDTAGGILSRLELLNEHEKDGKPVVLFERDTTRTYMARSGLIGGDLPNHTTVFTATPGPRTLDGADKLEVTLTADKNGVKFVKTYVFHKGSYVVDARFAVTNDGTAPVSPTLYMELARDGSKVEQSQFYSTFTGPAIYTDADKYHKITFDDIAKGKASTPAATTSGWVAMVQHYFASAWIPQAGKEHSFYVQQIDPNLYRVGIQQPLGQIAPGATVTTDARLFAGPQEERMLEKITPGLELVKDYGWLTILAKPLFWLLEKLHGFLNNWGWSIIALTVLIKLVFFPLSAASYKSMGKMKDLQPRMTSIRERHKGDPQKMNAEMMALYKTEKVNPLGGCLPIVIQIPVFIALYWVLLSSVEMRGAPWLGWIHDLSVPDPFYILPIVMAVSMFVQTRLNPTPPDPVQAKVMMIMPLVFSFMFFFFPAGLVLYWVVNNILSIAQQWQINRMLGKGKTAAVAKS

SEQ ID NO: 32716 - protein, 255 aa, Chlamydomonas reinhardtii
KIPFWEGQSYGVIPPGTKINSKGKEVPHGTRLYSIASSRYGDDFDGQTASLCVRRAVYVDPETGKEDPAKKGLCSNFLCDATPGTEISMTGPTGKVLLLPADANAPLICVATGTGIAPFRSFWRRCFIENVPSYKFTGLFWLFMGVANSDAKLYDEELQAIAKAYPGQFRLDYALSREQNNRKGGKMYIQDKVEEYADEIFDLLDNGAHMYFCGLKGMMPGIQDMLERVAKEKGLNYEEWVEGLKHKNQWHVEVY

SEQ ID NO: 32717 - protein, 599 aa, Methanococcus aeolicus
MNGAEAMIKALEAEKVEILFGYPGGALLPFYDALHHSDLIHLLTRHEQAAAHAADGYARASGKVGVCIGTSGPGATNLVTGVATAHSDSSPMVALTGQVPTKLIGNDAFQEIDALGLFMPIVKHNFQIQKTCQIPEIFRSAFEIAQTGRPGPVHIDLPKDVQELELDIDKHPIPSKVKLIGYNPTTIGHPRQIKKAIKLIASAKRPIILAGGGVLLSGANEELLKLVELLNIPVCTTLMGKGCISENHPLALGMVGMHGTKPANYCLSESDVLISIGCRFSDRITGDIKSFATNAKIIHIDIDPAEIGKNVNVDVPIVGDAKLILKEVIKQLDYIINKDSKENNDKENISQWIENVNSLKKSSIPVMDYDDIPIKPQKIVKELMAVIDDLNINKNTIITTDVGQNQMWMAHYFKTQTPRSFLSSGGLGTMGFGFPSAIGAKVAKPDSKVICITGDGGFMMNCQELGTIAEYNIPVVICIFDNRTLGMVYQWQNLFYGKRQCSVNFGGAPDFIKLAESYGIKARRIESPNEINEALKEAINCDEPYLLDFAIDPSSALSMVPPGAKLTNIIDAVQEHPNEKIVCFDEIKRRYMENKRNRK

SEQ ID NO: 32718 - protein, 612 aa, Streptomyces rimosus
MCGIAGWIDFERNLAQERATAWAMTDTMACRGPDDAGLWTGGHAALGHRRLAVIDPAHGRQPMHSTLPDGTSHVITFSGEIYNFRELRVELESQGHRFRTHCDTEVVLHGYTRWGRELVDRLNGMYAFAVWDEARQELLLVRDRMGVKPLYYHPTATGVLFGSEPKAVLAHPSLRRRVTAEGLCEVLDMVKTPGRTVFSGMREVLPGEMVTVGRSGVARRRYWTLQAREHTDDLETTIATVRGLLTDRVRRQLVSDVPLCTLLSGGLDSSAVTALAARAGDGPVRTFSVDFSGAGTRFQPDAVRGNTDAPYVQEMVRHVAADHTEVVLDSADLAAPEVRAAVLGATDLPPAFWGDMWPSLYLFFRQVRQHCTVALSGEAADELFGGYRWFHRTAAIDAGTFPWLTAGSARYFGGRGLFDRKLLDKLDLPGYQRDRYAEARKEVPVLPGEDAREAELRRVTYLNLTRFVQTLLDRKDRMSMATGLEVRVPFCDHRLVDYVFNVPWAMKSFDGREKSLLRAAVRDLLPESVVTRVKTPYPATQDPVYERLLRDELAALLADSQAPVRELLDLGRARDLLRRPVGAVSQPYDRGSLELVLWMNTWLAEYGVSLEL

SEQ ID NO: 32719 - protein, 506 aa, Phalaenopsis hybrid cultivar
MSIFLIATLFLSLSLHLLLRRFRRRRRILPLPPGPLNFPIVGALPFIGSMPHSGLALLSRRYGPIMFLKMGIRQVVVASSSSAARSFLKTHDSRFSDRPLDIISKQVSYNGQNMVFADYGPKWKLLRKVSNLHLFGPKAMSRWADVRRDEAFSMSHFLKKQSDSKNPVLLSNLLVCSMANVIGRISMSKRVFDEEGKEAKEFKEIIKELLVGQGASNIGDLVPAMRWLDPQGARKKLLGLNQRFVRMISKFLAEHGESRGEREGNPDLLDLIVADKIAGDDGEGLSEENIKGFISDLFVAGTDTSAMVIEWAMAEMLKNPAILRRVQEETDRIVGRDRLLEESDIPNLPYLQAICKEALRKHPPTPLSIPHYASEPCEVEGYHIPGKTWLLVNIWAIGRDPEVWEKPLEFDPERFMEGKMARIDPMGNDFELIPFGAGRRICAGKLMGMVMVQYFLGVLVQGFDWSLPEGVVELDMEEGPGLVLPKAVPLLVTARPRLPAAAYGVV

SEQ ID NO: 32720 - protein, 763 aa, Ehrlichia canis str. Jake
MLDLENSSFDGKKKEALEFHCKDSKPGKVSLLPTKPLLTQRDLSLAYSPGVAVPCLEIAKNPDLIYEYTARGNYVAVISNGTAVLGLGNIGPLASKPVMEGKAVLFKRFADIDAVDIEVDTSDVDEFINAVKYLGLSWGGINLEDIKAPECFIIEKKLSEIMDIPVFHDDQHGTAIIVSAGLINALDITGKNFKNVKIVINGAGAAGIACLEMIKLIGVPADNITLCDQNGVIYKGRQLGMNEWKEKHAIETKDRSLKDALVMADVFLGLSVKDVLSKDMLLSMNKDPVIFALANPDPEINPDIAREVRPDAIIATGRSDYNNQINNVMGFPYIFRGALDVRAKSVNNEMKVAAANAIAMLAREYVSDEVSDAYGGRKMNYGKDYIIPTPFDPRLITIVSPAVARAAIESGVARKKIEDWDEYTKQLASRLSSTSNILNMMYSAVKRDPKRVIFSEGEEEKVIKAAVQWRNQGYGLPILVGRIDKVQEAFERLGIKNIQGIEIANAAVSKRNDEYTDYLYKKLQREGYLYRSCVRDVKTDRNVFAACMLACGDGDVLITGLTRSYSASISDVQKVIGSQGVVFGLSVIVMKERTIFVADTAIHESPTPEQIAQIAIQASIQARKMGHEPRVGFVSSSNFGSHCQEDARKMRKAVEILDSCNVDFEYDGEMSVDTALSSELLTLYPFCRLTGAANILVMPTLHSANISSKLLQQAVGVSVIGPVLIGMEKPVQIVQMSSSVSEILNLAVLAPSVNSNVQSCDSI

SEQ ID NO: 32721 - protein, 579 aa, Ehrlichia canis str. Jake
MVEVRNLILAVILSVLIMTGWRFIYDKFFTTQHIIEDNTNSDTMIPEIDDSFTHKTRAEIIGSNTDIRLNLSNKKIHGSISLKGAQFDDLIFKNYHVTPDSNSDGIILLSPEETEGVYFIEFGWIDPQHKITLPNHSSIWNSDQPTLSPNNPATLTWDNKEGIIFKIRITLDNDYMFKIEQMVTNNTNSIVNLIPYGRINRSKHTTEKSYWISHEGAVGSFSNTLKEWTYKTITKEKNIRIQSQDRNDDQNQWIGIGDKYWFTALIPNVLQKSKVNFHVKHAKHNSEDRFQVDFSHDNYIAHPNKTVTSTSYLFAGAKELKLLDKYKDNLNIALFDKAVDFGVLYFITKPVFLLLEYFYDAIGNFGLAILLLTVVIKLIMFPLSYKAYVSMLKLKYLQPDILKIKELHKNDNDKMSKEISAIFKKNNVNPMSGFVPILIQIPVFFALYKVLFVTIEMRHAPFYLWIKDLSSFDTANVLTMFGLLKFNVPICIGILPVILGITMVIQQKLNNSNSLNQDKVQANFMKFLPYIFIFIFSSFPAGLIIYWICSNSITIIQQLIIKQYASKKFNFQKVVKQES

SEQ ID NO: 32722 - protein, 398 aa, Ehrlichia canis str. Jake
MSLIAGRMDCIKPSPTLEIASQAQKLKMSGVDVISLSAGEPDFDTPQHVKQAAIDAINAGKTKYTAVDGIIELKKAIVDRFKQDHDLTYDVNQVSVGNGAKQCIYNLLMATINDGDEVIIPAPYWVSYPDVVKISGGNPVIVDCSETFKLTPDLLESVITEKTKWLIINSPNNPTGLMYTYEELQCIAEVLLKYPNIYIMTDDIYSKIVYDGFKFFTIAQVEPRLYDRVFTVNGVSKAYAMTGWRIGYVAGDSKVISAISVIQSQSTTNPNSIAQFASVHALTGDQEFLKERNKIFAERRDMMMNMVNNTSVLSVKKPQGAFYVFISCKELIGKSAKNGLVINSGIDFTRYLLEDYNVAAVPGEAFGVQGFFRISYATSTEQLSKACDRILDACNKLL

SEQ ID NO: 32723 - protein, 393 aa, Ehrlichia canis str. Jake
MKKIVLAYSGGLDTSVILKWLQENYNCEVVVFTADLGQDDDMSVIRQKATALNVKEIFIEDLKEEFVKDFVFPMFRANTVYEGYYLLGTSIARPLIAKRQIEIAKLTGADTVAHGATGKGNDQIRFEFGYYCCNPNIKVIAPWRQWKLTSRNSLIEYAKKHGINVPLDKSSEPPYSIDANLLHTSYEGKSLEDPYVEPDYTILSKSVTPELASDTPEYIEISFEKGDPCAINNIPLSPANLLKQLNTIGGKHGIGIIDIVENRYVGIKSRGIYETPGGTILLHAHRAIESITLDREAAHLKDEIMPKYAKLIYNGYWWTTERKMLQALIDRSQEKVNGVVRLKLYKGSVIVVGRKSENSLYSHNLASFDLSEDYNHTDAEGFIKINSLRLRNC

SEQ ID NO: 32724 - protein, 422 aa, Ehrlichia canis str. Jake
MSLTLSVIGNKMGREGQIHINLPVFLDYQSTTKTDDRVLEAMIPYFQQFSNPHSRSHSFGWKAESAVELARERVASLINAEPKEVIFTSGATESNNLAVKGVANFYKNKGNHIITVRTEHKCVLDSCRHLETEGFNVTYLDVQKNGIINLDLLKSYITDKTILVSVMMVNNEIGVIQPVEEIGKICHEHGIFFHTDAAQAFGKIPIDVNKMNIDLLSISGHKIYGPMGIGALYIRKRQPRVRLTPLINGGGQERGMRSGTIPTPLAVGLGEAARIAQEVMEEENIRIKELRDILYNEIKKHLSYVVLNGDYEQRISGNLNLSFPYVEGESIIMAINNLAVSSGSACTSASLEPSYVLRALNIEKDLEHSSIRFGIGRFTTKEEILYAAELIVSSIKKLREMSPLWEMVQEGIDLNNIKWDTH

SEQ ID NO: 32725 - protein, 533 aa, Ehrlichia canis str. Jake
MLITTRLRYAVMFMVSLAQEYYILKGSNQPKKMSHIADSQSLSEGYLEQIIAKLKKQGLVNSTKGPGGGYFLNKSPNIITLNLILESIGENIKITRCKNNNVIRCLPNNAKCITHNLWDNIGNYIKKYLNSISLEDIINNNFKHSIKHSIKHSNILNNDENKYIYADYNSTSTILPVIKQQLDNLSSLNIYNPSSTHKLGQNTRSIIEKTREIAINILNARNYDVIFTSSGTEANNLVINSTTEYKHLISSIEHVSIMNCTTDAELIPVNSNGVICLDRFSETLNKFKDKKVLVSIMTANNETGVIQPIKEIVEISHKFGALVHTDAVQACGKIHIDIENLGVDLLTISSHKLGSIAGTGVLFFNSKKIKIKPMILGGNQEKGLRAGTENIISIYLLSISLNNLKDSIKKMSTVEKLRDKLEYEILNLVPEAQIFGKNTQRLPNTTCISMPNVSSEIQTISFDIENIAVGNGSACSSGTLTRSHVLSAMGIDDDIAKNSIRISLSPDITEHQIKKIVNCWYKTYQNNKLLKLK

SEQ ID NO: 32726 - protein, 220 aa, Ehrlichia canis str. Jake
MKLFLDTVDIDFLKEFSITGLIDGVTTNPSLMSKSNLECQDLILKICSLIPGPVSIEVISTSYKDMIKEGLDISKIADNIVVKLPLTYDGLIACKVLSHEHNVKVNVTLCFSVPQAILSAKSGAYFISPFVGRIDDIGQSGMQLIKDIRDVYTSYNTFNTEILVASVRNITHVIEAAKIGADIVTIPPSIFKQMFTHPLTDKGLESFLQSWNASGKKIFS

SEQ ID NO: 32727 - protein, 102 aa, Ehrlichia canis str. Jake
MFAVVETGGKQYKVKEQDVIRIEKLNASVGEEVTLSNVIALTDVNNNIVFTQSATVTASVLEQCRNDKIIIFKKKRRKNYRRKNGHRQYMTVLRVIKINNME

SEQ ID NO: 32728 - protein, 340 aa, Ehrlichia canis str. Jake
MSFIDEAKIYLKAGNGGDGCSSFRREKFIEFGGPDGGNGGNGGNIIFYTSHHINTLLYFRYKQHIKAENGNPGSSKKKSGSSGKDVIIKVPIGTQLYDEDGMLITDLNEENQKFIAAHGGKGGIGNANYKTSTNRAPRHFTFGKRGEEKHIILKLKIISDVGIIGLPNAGKSSFLASCTNSKTKIADYPFTTLEPHLGVAFIDNTELVLADIPGLIPGAHLGHGIGDKFLKHIERCSILLHIIDCTLDNIIESYECIRKELSFYNKELSNKTEFIVLNKSDLLDKKEINQKKQILSNHTKKEIFISSIKNNRYPILSTLIKQIHKKYTNTKPHIYDPFNI

SEQ ID NO: 32729 - protein, 296 aa, Ehrlichia canis str. Jake
MDHIDKKCSMNAIVGTTNAGKSTLINMLVGRKVAAVTPKVQTTRVRMHAVLNNENVQLIFIDTPGIFSPKTKLEKFIVKHAWMSLKGIENVILLLDVKNYLNKHIEKIISRIKQSNINAILVVNKIDMVSQALVDKAIEYMYSLHNFSKTFTISALHDIGLNRLINYLCEISPSGPWLYPEGQISDAPLKFFIAEITREKLFLSLHHELPYSLSVVTEALEEKVDGSLIVKQVIYVTKDNHKTIILGKKGEMIKKISIESRSELEKILDLKIHLFLFVKVRELWQDHLNECVGYVE

SEQ ID NO: 32730 - protein, 634 aa, Ehrlichia canis str. Jake
MAVIGIDLGTTNSCVAVMEGGDAKAIENSEGARTTPSIVAFTDSERLVGDPAKRQATTNAKNTIYASKRLIGRRYQDVKDIKSSYEVVSAKNGDAWIKVLGKEYSPSQIGAFVLEKMKETAERHLGHKVEKAVITVPAYFNDAQRQATKDAGKIAGLDVIRIINEPTAAALAYGLNKSDKQKVIAVYDLGGGTFDVSILEIADGVFEVKATNGDTMLGGEDFDHAIMDYLMDDFKKTTGIDLHNDAMAVQRIKEASEKAKIELSNRMETDINLPFISSDSTGPKHLSLKLTRAKFENLVDDLIQRTIEPCKKALKDAGISADKIDEVVLVGGMTRVPKVIQKVKEFFGREPHKGVNPDEVVAIGAAIQGSILAGDVRDVLLLDVTPLSLGIETLGGVFTPLIERNTTIPTKKSQVFSTAEDGQTAVTIKVYQGERKMAADNKLLGQFSLEGIPSAPRGMPQIEVTFDIDANGIVHVSAKDKASGKEQAIKIQSSGGLSDDEIQRMIKEAEQKAGEDEKRKKFIELKNNGENLVHSTEKSLNEYGDKIPNSDRLEIENAIRDVRDALGNSDVESVDILQQKVDHLMKVSMKLGEALYGNANNTSSTESTTTNNNNEEDSKVVDSDYQEIDKKDGK

SEQ ID NO: 32731 - protein, 857 aa, Ehrlichia canis str. Jake
MDLNKFTDVSKNLIMQSQTAAVALGHQSLVPEHLLKVMLDEKDELVELLLTSCGCDIDKIYNDVKLSLNKLPVVSGSGSGHIHLSREMAQVLEEAVSLAKRNQDTYVTVERLLQALAIVKDSNVCKILSAHGVTPVKLESLILNMRNGTKADSVNSEQKFNALKKYAKDITEAAMAGKLDPVIGRDEEIRRTMQVLSRRTKNNPVLIGDPGVGKTAIIEGLAQRVVIGDVPVGLRNTKIMALDLGMLVAGTKYRGEFEERLKAVINEIVASNGAVILFIDELHTLVGAGATDGAMDASNLLKPALARGEIHCIGATTLDEYRQHIEKDAALARRFQPVFISEPTVNDTISILRGLKEKYEIHHGIRIMDSAIIAASTLSNRYITDRFLPDKAIDLIDEAASRARIEIDSKPEVIDELDRKIIQLKIEAGVLEKENTESSKQRLVKLNEELDKLNIQAAELNSKWQAEKIKILKMQECAEKLDNARSDLEKAQRSGNLAKAGELMYGIIPELEKELKKCEKPSSNMLKREVTEDDIANIVSRWTGIPIENMMSSEREKLLRMEEEIGKTVIGQESAIKAVSDAVRRSRAGVQDANKPLGSFLFLGPTGVGKTELVKTLAEFLFCDRSALLRFDMSEFMEKHAVSRLIGAPPGYVGYDQGGMLTEAVRRRPYQVILFDEIEKAHGDIFNILLQVLDEGRLTDNHGKLVDFRNTILVLTSNLGQEILINTEEDVDEDSIKQSMTSVLQHHFRPEFLNRLDEIIIFHKLTKAHIEKIIDVQFSILQKIVAQKKLEISLSLRAKSWLIDNGYDSLYGARPLKRLIQQRIQNSLAKLILANQVNEGNKLEVDVSGDDLVINKL

SEQ ID NO: 32732 - protein, 581 aa, Ehrlichia canis str. Jake
MKALFQFVKPHLLYFIFAYLVVAVSSVTILAFGYGLHNLVDSWVATSDVSSINNSLLFLLAIVLIVALTSFLRLWLTGYGSERVILGIRLKLYNKIIHFSPRFFENNSISSLITRLMADTSTLQVILSASMSTILRNVTTLLGSIVMLIHTNFKLTMYTIVVIPVILLILTFLGKKVKLLSGKVRLGIDNITSFVEETYRGVYVIQSFSKEDLTKQKFENLLANVLNITNRYILLRALLVTLIITSAMISIGFVLFLGIREVLNSNITVGSLFSFIFYAAIAAGSVNNMGDNFNDIQKAIRIAEDISKILSMSSDIVEVAHPQEIKEIKNRISINDVTFNYPSKPDTPALKNVSFTIDRGQVVALVGPSGSGKSTIVNILLRFYDVSTGSITIDGIDIKELSIKNLRSLFSIIPQSPIMFSGTIWDNITYGVADATYEEVRSAAETACILDFIEGLPEKFDAFVGERGLCLSEGQKQRIVIARAILKDSGVLILDEATSSLDSKNEQLIHDALDNLRSNKTMLVIAHRLSTIIKADKIIVFNNGCIDDIGTHKSLISKQDGLYTKLAKLQLSSDYFSDNHQ

SEQ ID NO: 32733 - protein, 110 aa, Ehrlichia canis str. Jake
MKNDIMDKIKHDIENNDVVLYMKGDADFPQCGFSSVVVSILKKMKVNFKSINVLEDLELREAIKEFTNWPTIPQLYVKGEFIGGCDIVKEMYHSGELQELFSKNNLISTQ

SEQ ID NO: 32734 - protein, 417 aa, Ehrlichia canis str. Jake
MERILVKKFGGTSLQDIKCINKVVEIIKQDINNNYKVVVIVSAMGKFTDNIISQIKQISDVKSPSERSEYDLIISSGEQISCGLLSLALQKVGINAQSWLGWQLPIVTTEDHTKARIIDINVNSLQDSLANNDVAIVAGFQGMHKNNRVTTLGRGGSDTSAVAIAVALGVDLCYIYTDVDGIYTADPNLVPKAHKLDYITYDEMIEMSSLGAKVLQVRSVEIAMKYNIKLCILSTFNPGKGTMLCKKGESHMESQLITGVTCNNKTASITLKQVKTLSGITTVFNAIAEKNINVDMIIQNMNDNNANDITFTISEEDLPTTKKFLTEIQSELMYQDLIINSEVAKVSIIGVGMISHSGIAYKMFDTLTSNNIKILAVTTSEIKISVLIYRKDSQLATVALHSAFELDSTESNLYTIS

SEQ ID NO: 32735 - protein, 318 aa, Ehrlichia canis str. Jake
MLISSGTSSINLARCISKTTGIKLINTCITRFSDQELNVEVQENQDDKNKHVIVINSLCFPAHDNLIELLLLIDATNRALCPSKITLIVPYLCYTRQDRVMYRNLDSSSLMVSALSAKVIINTLETANINNIIFIDLHSNQLTGFFDTSITNLSSHAIFIEDIAGKYDMDNLVIVSPDYGALNRTRVFANALSRQYKLNNEIQVAVIDKYRAKPGVSEVMNIAGNVENKDCIIIDDIVDSAGTLCNAASALKDKGALKVSAYVTHGILSGNAIEKVTNSKLDNLTTTNTINHSSFNTPKIQILSIDKFLSNYILYNLV

SEQ ID NO: 32736 - protein, 588 aa, Methanosarcina barkeri str. Fusaro
MTTGSTEKVNGARALIKCLEEEGVDTIFGYPGGQIIPFYNEIYDSNLRHILVRHEQAAAHAADGYARATGKTGVCVSTSGPGATNLVTGIATAYMDSVPIVALTGQVPTFLIGNDAFQEADIKGITQPITKHNYLVQDANELPRIVKEAFHIASTGRPGPVLIDLPKDVQNAEIDFYYPDKVELRGYKPTYKGNTQQIKRAAEEIANSCMPIIYAGGGVISSNASAELVELAETINAPVTTTLLGIGAIPTEHPLHVGMLGMHGTKSANYAIQESDLIIAVGARFDDRVTGKLESFAPNARVIHIDVDPAEISKNVNVQIPIVGDAKQVLKSLNKYIKCCKSEAWLEKIKQWKKEYPLTYKQMSSDVIMPQFVIEQISEACKDAIIVTEVGQHQMWAAQFFKYKKPRTFITSGGLGTMGYGFPAAIGAKVGKPDKTVINIAGDGSFQMNSQELATVVQNDIPVVSVIINNGYLGMVRQWQELFYDKRYSQTFIKGSVDFVKLAEAYGALGLRAERPSEVRPAIEEAVNSGRPAVVEVIVECEANVYPMVPAGAAINEILDIEEHADTPCAMPNLRTAKTDRVLDLEEQ

SEQ ID NO: 32737 - protein, 356 aa, Methanosarcina barkeri str. Fusaro
MKLTINKNSAKWMQLPRDVLVGHGVLEEIGDVCRDLKMKGNALIVTGSTTNNIAGKRVSNLLESAGCSAEMVLTCKATKEEVEKVMEKALEVETNFLIGVGSGRSIDLAKLASTRLELPFISVPTAASHDGIASSRASIVDNGRSTSAQAQAPIAVIADTEIISAAPFRFLAAGCGDIISNYTAVLDWELASRLRNEYFGAYAAALSRMAARVIIECADSIKPEHETSARLVVKALVSNGVAMSIAGSSRPASGSEHMFSHALDKIAPKPALHGEQCGVGTIMMMYLHGGNWQEIREALKKIGAPVTAEELGIEDRYIIEALLHAHSIRPERYTILGSGLNPSAAEKVARITKVIN

SEQ ID NO: 32738 - protein, 753 aa, Methanosarcina barkeri str. Fusaro
MASVETTERLGCSLGFFSTFAIGTGTMIGAGIFVLPGIALADAGSGAIISFLLGGLISIATAISMSELATGMPLAGGSYYYISRTMGAALGAIIGLGSWLALIFKGTFALIGLAEYAQIFYPLPLYFVAAATGVILLVINYRGAKSSGSLQNFIVIFLLVILALFIARVSFMVNPANLSPATSYGGTSIITTAGVIFISYLGLAEAAAVSEEVKNPSKTLPLAFIASAVVVTLFYVSTMAVVVGFSDPQVTGKSITPLADIAGLLAGESGRIAISLSALLATLSTANGAILSSSRFPFAMSRDALMPEWFVLIHQKFETPHNAILVTGIVMVLLLFLFDIEELARLGGAFNILIFILLNMAVIILRKRNLPGYEPTFRDPFFPYTQIFGIVGSIVLLPLLGGLPLLFTIMMIFAGIGWYSFYGRGKAVPEYNLFDLLENTVEKKEIEPVPLVKVLVPISNQKHERDLLKLADFMGSEIICLHVIEVPDQTNLKLAQEAYHEKKIEMDCRFKEEFENYPAILGHKREYIAAFDHNISNSILEQAEIEHADMIIMGWHEPKRFEYSHGVTNQVLLSSKSPIALLKGHLPDSINKILVGYNGKENSIYGLSLAEKLAVNTGAGIEIISIISPDEAQENRQKITDELESLVKKISSIPVSFRVLEKYSIEDALLEASNNNDLTIIGDSSERFKISLLGTLSQRIAKHSKKPIVVVKKSKPISKESFNYLVKKHARKIYARLRGKEVKLNSDKSAVLA

SEQ ID NO: 32739 - protein, 436 aa, Methanosarcina barkeri str. Fusaro
MKISAEQKSNNGSGNGNRVILVKRTIPNSDPEREEYLLQELRELAKAAGYLPVGELKQTRYPDSKYQLGRGKIEELAELVRSTGVEKVIFYNRLSTTQLFNISEICRCQIIDKFQLILEIFAKRATTHRSKLQVELARLRYEVPRARAVVSLLKKEERAGFMGLGDYEDSYEQDLKKRITRIRNELESAEKDDESLRALRHRKGFSLISLAGYTNAGKSTLFNAIVDESVEAKNMLFTTLVPMTRALDLGGRKALLTDTVGFIEDLPHWLVDAFKSTLDEIFLSDLILLVVDASEKPETILQKLSTSHDTLWDRIQGVPIITVLNKADLVDESKLDAIMEQIGYMAPNPVFVSAKKGTGMAALKAEIIKHLPPWCFCSLSLPNSEKGMSILSWLYEEGIVHRVEFGERIFLDYEARTEIINRAHSLLEPQEAQINE

SEQ ID NO: 32740 - protein, 283 aa, Methanosarcina barkeri str. Fusaro
MKIIGGPASQLLASRTARALGIEPVLSEFNRFPDGELYLRIAEETENEHVTLIQSTPTDSDLVSLLQLIDACEGAKELDVVIPYMGYARQDKKFKPGEPISARAIARCIRADRVFTINIHEKSVLEHFHGPAENLDAAKLVGEYIAGLNLENPLLLAPDSGAEGLIKHVSSGLGFDYDHLEKTRLSGDTVVIKTKNLDVTGRNVVLVDDMIATGGTMAESIKMLRSQGAADVYIACVHPVLARNAVLRLFNAGVKDILGTDTLERAESRLSVAPLIADAIKGL

SEQ ID NO: 32741 - protein, 413 aa, Methanosarcina barkeri str. Fusaro
MSEDSSIGSSLEDIKTRVEFQLESGKINAEDVKSLLTEIEIMRVQNENMKARLLEASVATGRHLQEINKLKAHLEQLTEPPLFIATILEVNGEIALIRQHGNNQEVLTQIPEECIGKIEPGMRVAVNGAYSIISVVSRAADVRAQVMELINSPGVDYSMIGGLDDVLQEVRESVELPLTEPQLFEEIGIEPPSGVLLHGAPGTGKTLIAKAIASHAKATFIRMSGSDLVQKFVGEGSRLVKDIFQLARDKSPSILFIDEIDAVGSMRTYDGTSGSAEVNRTMLQLLAEMDGFDPKGNVKIVAATNRIDLLDPALLRPGRFDRSIEVPLPDEKGRAEILKIHTRKMNLADDVDFEKLARVMTGMSGAEISVIVKEAGIFVLRRRGKQITMADFLKAHEKVVSTEEPKIPQAMFV

SEQ ID NO: 32742 - protein, 570 aa, Methanosarcina barkeri str. Fusaro
MKEMNGAEVLVKCLEDLGVKHIFGYTGAAILPVFHALGHSDIEIIVNSNEQSAAFSAAGYSRSSNRVGVAIVTSGPAITNTLTSVADAYEDSIPLLVFAGQVPEYKIGTDSFQHINVKGIFKDATKKVIQLSNGDDIETIVKDAYYFAKSGKPGPVVIDFPLDKQKKKHEYRGMDVTKFEESYHDDRHLTEEQCRAFFKLLLNSKRPLLYLGGGLNSEPGSQAVRELNELFGIPSVNTLMAKGVVDERDELNLGMLGMFGTPYANMLIQENDFFFSIGVRWDDRVAEKIGFAIGTDIAYIDINPEKMHQIKIERSPKFTFMGDAATALRDLLNYAVKHNIHLDIREWQMRARDLKRSWPLDYNRKSEYIQAAEVISMLVNYIDENKKITTGVGNHQMLAAQYLPMYCPKSFMTSGSFGTMGFSMPTAIGVHYANPHSGVIAIDGDGSLRMNLGELHTIASLDLPIKILMLNNRSDGMVQNLQDADYEGTRIGTQRPKDVNFAEIARSFGFSYAERISSRNDLKVKMEAFMNAEGPCFLEACTDREEILYPKVPAGGSYKDMILGPYIKSI

SEQ ID NO: 32743 - protein, 431 aa, Methanosarcina barkeri str. Fusaro
MTESTKSKDESMRSHLGKPGPVYDGIEPGELGEVTESVQDRMRQLESRNSYLEEQCSQIESEKRYLENQKIKYEREIRKLQSELDRMKTSPLIIGTVIDVIKNDRIIVRSSNGPQFLVNVSQYIDEKKLLPGAKVALNQHTLAIAEVIPSTEEPFVAAMEVLESVEVDYDQIGGLDEQIQELQEAVELPLIEPERFARIGIDPPKGVLLYGLPGTGKTLLAKAVAHRTNATFIRVVGSELVQKYIGDGSKLVREIFEMARKKAPSIIFIDELDSIAARRLNETTGADREVQRTLMQLLAEMDGFDKRKNIRIIAATNRPDVLDPAILRPGRFDRLVHVPMPGVEARGKILKIHCGKMTLAGDIDFKRLAKATEGMSGADLKAIATEAGMFAVRKNKELIEMEDFLEAVDKVSMAADTQKMMPTSLPETMFV

SEQ ID NO: 32744 - protein, 503 aa, Methanosarcina barkeri str. Fusaro
MTLGSVPSKFKVSIDRDQCMDCGRCIENCSYGVYRREGDKILIESRKCTGCLRCVAMCPRDAITLTEKPIDYRSHPLWTREVREDIIKQARSGKIILSGMGNARDLPVVYDRLLLDACQVTNPSIDPLREPMELRTYIGKKPSKLNFRKTESGDVELETKLAPNLKLNTPIMIGHMSFGAISLNAQLSMAKAVTELGTYMGTGEGGLHRDLYPYQDHMVVQVASGRFGVNIDYLERGAAIEIKIGQGAKPGIGGHLPGEKVNEEVSRTRMIPVGSDAISPAPHHDIYSIEDLVQLIRSLKEATEWKKPVFVKIAAVHNVAPIAAGIARSSADAVVIDGFRGGTGAAPKVFRDNVGIPIEVAIASVDQKLREQGVRNEISIIASGGIRSSADLAKSIALGADAVNIGTAALVALGCRVCGNCYRNLCPWGIATQRPELVSRLDPERGAVQVSNLIKGWTYELSELMGAAGINSIESLRGNRDRLRGYMLDEEMLKILDVLPAGA

SEQ ID NO: 32745 - protein, 291 aa, Methanosarcina barkeri str. Fusaro
MFLPNSFIDALADYESARYVIFGVPFDNTSSYRAGSRWAPDAMRQASANFESYNPTFDIDLVDLPIYDAGNLETSALVDETLQNLYEATKDLLNDGKLPIMLGGEHSLTFAMVKACAELAGEDFGVLVLDAHFDLREEYRGFKYNHACVSRNILSEVTKNLVSIGIRSGPEEEWVFARENNLQYYTADDVESTGMVEILKEALEWLDCSQIYLSLDMDAIDPSYAPGLGTPEPFGLSARDVRTAIRTLAPFSMAFDVVEIAPEYDSGQTAMLGAKLMREFIASHAKSCRKA

SEQ ID NO: 32746 - protein, 164 aa, Methanosarcina barkeri str. Fusaro
MEGNIEIKSRPRRQILIATDGSETANEAADFGIEMVGCSGAKIYAVYVIDTTPYRSVPLDKIWSDKVLEEFEKEGQEATSYIEKIGKEAGVEVESRVLKGHPAEKIVTFSEDNNIDMIIMGSLGKSGYERVLLGSVSEKVIRHAKIPVLVVREKHKSEKKLIQE

SEQ ID NO: 32747 - protein, 472 aa, Methanosarcina barkeri str. Fusaro
MKIVMKFGGTSVGDGKKIRHVAQLLKRYREEGNQIVVVTSALGGVTDELLENALFASTKGKVSLVKEFKTEITNKHHKAVKDAIDDPTVAKEVIQTLDLRIDELEKALVGICYLGELTSRSIDYICSYGERLAAPIVSGAIRSLGIESTEFTGGEAGIITSSDYGNARPLEKTYELVNKRLGCRLETQILVVTGFIGENEEGIITTLGRSGSDFTASILGAALKADEIWLWKEVNGIMTTDPRIVPEAKTIPQISYAEAMELSYFGANILHPRTIEPAMREHIPVRVKNTFEPKLPGTLVVAEKFQCKNVVKAVSLIKNVALINISGAEMVGAIGTVARLFAVLAKSGVNVIMISQGSSESNISFVISEAHVKTALKALHEEFNRGIVKEITSDKNVCVVAVVGAGMAGTPGVAKRVFGALGNSLINIIMISQGSSQYNISFVVRENDAFAAVKTLHDEFELYNGNGIEKQL

SEQ ID NO: 32748 - protein, 754 aa, Methanosarcina barkeri str. Fusaro
MIEEINLRVAEAYHKDVGRGIARIDTRLMQQMGLVSGDIIEISGRAKTYAIVWPNVEREQENRIRIDGNLRSNAKVGIDDRVTIQKVQAKNAQRVTLAPSQPVRLVGGAHYILRIIEGRPLNKGQQIRVETVNNPLTFVVASTRPAGPVVVTKDTDIVIKEKSAEEIRVPEGISYEDIGGLRREIQLVREMIELPLRHPELFQKLGIEPPKGVLLHGPPGTGKTLIAKAVASETDANFITISGPEIVSKYYGESEQKLREIFEEAEKEAPSIIFIDEIDSIAPKRGEVTGELERRVVAQLLSLMDGLNSRGEVVVIAATNRPNSIDEALRRGGRFDREIEIGIPDRNGRKQILLIHTRGMPIQDVSLSEIADVTHGFVGADLSSLCKEAAMHALRRITPEIDIEEDEIPQEILDKLVVTKDDFKEALKNIEPSAMREVYVEVPHVGWEDIGGLENAKQELIEAVEWPLKYPELFSSINIKPPRGVLLFGPPGTGKTLLAKAVASESEANFISIKGPELLSKYVGESERAVRETFRKAKQAAPTVVFFDEIDSIAPQRSSVSDTHVSERVVSQILTELDGVEELKDVIIVAATNRPDMVDPALLRPGRFDRLIYIKPPDNISREKIFEIHTQGKPLAEDVNLSELADMTEGYVGADIEGICREAAMLALREIVTPGASRKDIEKRAGEVIISKKHFERAIRRVKPTTSRESLAAYERSAELFAKYATEFEEEAPEAEEQEKELEHENVPDFFQAQ

SEQ ID NO: 32749 - protein, 247 aa, Methanosarcina barkeri str. Fusaro
MLKIEDLTVEVNGKILLHDVNLEVKKGYTNVLFGPNGAGKSALMRTIMGFSEYRVVKGRILFNGKDITGMSVDERARLGLGIMMQRPPDMTGIKLRDLVKVLSKGKKNPENLAENLNMKRFMDRDVNVGFSGGEIKRSELLQLSAQNPSLYLLDEPESGVDLVSIEQVGMTIKELLEEGLKCPGESCKKGKSALIITHTGQILDYVNADRGYILCNGTVMCSGNPMKMLNEIKNRGYEECIKCRLMK

SEQ ID NO: 32750 - protein, 542 aa, Methanosarcina barkeri str. Fusaro
MLTVIQYLLDRLKQLGIRDIFGVPGDFAFPINNAICDDKELRWIGCCNELNAAYAADGYARVKGMSALSTTFGVGELSTLCGIAGSYAEYNLVFHIVGMPKMQAQKTHAIVHHSLGAGKSSIFMEMATPVVCASTMLTPENCVQEVERVIETALENHRPVYIAIPHDYVNADISSFNSPARKPVKSDPVALEEVVSIIAGKLLNAKQACVIPGFLVDRFGLKDLSMAVITASGLPYVTMALDKSVLDETNPSYLGLYMGQLINPEIRKFVESCDCILAMGTILSDVNTGKFTANLDKSRIINIMPSSVHIGYTDYINVKMLDVLEELTRRLNKRTDISGPVARRPAVPEVNAEDPITADYLYAKYAEFFKPDDIIIADSSSSFYGLIPLLLPKGAKFESQMLWGAIGWATPASFGTALAAPDRRVILITGEGSHQMTAQEISQFYRHGLKPIIFVLNNHGYLIERMLSEKVDYCYNDLVEWQYYKLPDVFGCNDWITSKVTTCGDLDKVMRELDNAKVGAYIEIITPKLSAPQLMETIHKNL

SEQ ID NO: 32751 - protein, 523 aa, Methanosarcina barkeri str. Fusaro
MKVLVSDSLSNEGLEILKEHFKVDVSTGLSEDELVKKIKDYDALVIRSGTHVTQKIIEAADNLKIIGRAGVGIDNVDVDAATKKGIIVANSPEGNMISAAEHTIAMMMAMSRNIPQANASLKGKEWKRSKFTGVEVKGKTLGIIGLGRIGSEVAKRASGLEMNLMGYDPFVSEKRAIELGVKLATVNEIAKEADYITVHTPLIKETRNILDEEQFALMKPTTRILNCARGGIINEEALAKALESGKIAGAAIDVFIEEPPFNSPLLSFDNVVVTPHLGASTKEAQVNVAVDIAKEVASVLTGGPAKNAINIPSVKPEAMAVLAPYIRLSEIMGKIAGQLVDGNYEKVEIGYNGEISGKDTRPLTVSALKGLLEMALGSGVNYVNAPTLAKSRMIAVVESKSESSEEYSSTISIKLSSNGKEKLVAGTVVGDDPKIVAVDDDRVDIFPAGRMIFAKHINRPNVIGPCCMVLGKNNINISGMQVGRSEIGGVTMMVLNIDSEVSDPILEEVRKVDGILDAKLVTL

SEQ ID NO: 32752 - protein, 571 aa, Methanosarcina barkeri str. Fusaro
MTLSPEDLKTIEKYAYQNAVKYGKAPQPKAVMGKVMGECPQLRSDPNAVSEALKVIIPEIAKGNPETWETKLSEIAPELIEALSVKKEPDKGLKPLEGAENGKVVMRFAPNPNGPATLGSARGMVVNSEYVKMYGGKFVLRFDDTDPDIKRPLLQAYDWYLDDFKWLGVVPDQVVYASDHFPMYYDYARKLIEMGKAYVCFCKGGDFKRFKDAKQSCPHRDTSPEENLMHWEKMLAGEYEDQQAVLRIKTDIKHKDPALRDWGAFRIRKMSHPRPEIGNKYVVWPLLDFAGAIEDHELGMTHIIRGKDLIDSEKRQGYIYKYFGWKYPRTTNWGRVKIHEFGKFSTSTLRKAIEAGEYSGWDDPRLPTIRAIRRRGIQAEALKKFMIEMGVGMTDVSISMESLYAENRKIVDPIANRYFFVWNPVELEITDAEPTVAKLPLHPTDHKRGFREIAVGNKVLVCTEDVEKLEVGSIIRLKDFCNIEITSLSPLQAKLSDVSLEALKKAKAKIIHWAPLDGINVKVRGPEGDLNGIGEQGIAAELDKIVQFERFGFCRIDAVSEDEIVAYFAHK

SEQ ID NO: 32753 - protein, 398 aa, Methanosarcina barkeri str. Fusaro
MFSINSECVLSKKSEDIPPFYVMEVLESAQALEAEGRHIIHLEVGEPDFPTAPHICDAACAAIGRGATKYTHSQGLPSLREAIVESYQQKFGVELSPDQVIVTSGTSPALLIVFMALLEKMDEVIMSNPHYACYPNFVKYLGGTPVFVYTSETNGFALEPKTVRQCLSPNTKAILINSPSNPGGHVMSPENLQGLAKIADEKRIPIVSDEIYQGLIYGGDEHTILEYTKNAFVLNGFSKLYAMTGWRLGYIICPPECVRAIQKIHQNFFICANSFVQEAGIAALKGPQDHVDEMVHTYNKRRQYMLKRLIGMGLEVRKEPMGAFYVLADARRYGPDSLEMSRRILNEAGVAVTPGIDFGNGAEGYLRFSYANSIENIKEGMDRLEAFLEKELEGLEIL

SEQ ID NO: 32754 - protein, 350 aa, Methanosarcina barkeri str. Fusaro
MRVTNRSLKGREGEIAVTAETLDDLWHLKYIIEKGDLVFSVTKRKADSASDKIRPEKVEKVKVRLGIRVDDLEFHKFANRLRLHGMIERGMDVGSYHTLNIEIGTNLSVIKEHWKNDQLQRIKDAEEASKRPKVVMVAIEEGDADIGFVHHYGIEIYSHIRQSSGKRETGLRNEFFREVVEQLRHAVPEEASIVIAGPGFTKEDFIKYFQETEPAMASKALIEDTSMIGMSGFQEVLRRGAVDRIMQESRIARESALMEDLIREISMDGKAAYGLGDVKNALNFGAVETLLVADETLREGREKGEDIDKLLREVEQAQGKVVVFSTAFEPGEKLHKLGGIAALLRFKVRG

SEQ ID NO: 32755 - protein, 225 aa, Methanosarcina barkeri str. Fusaro
MVSREYVKGDLPEKAAILQRDGETYAIAPHIPGGIVYPETLRKIADIAEKYGAAALKITSAQRIAIVGLKEEDLDAAWGELNLKPGAAIGLCVRSVKICPGTTFCKRGKQDSVGLGLKLDEKYHGMQLPSKFKMGVSGCQNSCSEPMIKDIGLMGTAKGFTLSVGGSAGPRPRLGSVVAKDLTEEQALDLVERIIDFYKKYPKPRRLGEVIDEIGLEKFKEEVGL

SEQ ID NO: 32756 - protein, 373 aa, Methanosarcina barkeri str. Fusaro
MDERVLEIMKPYFFDTYAVATSEFGYSMGIDAKEALERSRESIASKLDANSEELIFTSGSTESSNTALKGVALALKEKKGKHVVVSKIEDFPVLNTAKALERQGFSATFLDVDAEGFVDLEGLKNAITKETVLVSIQQGNQEIGTVQDLKAISEICEEKDVLLHTDATHSFTRLPLNVKELPVDLITMSAHTIHGPRGIGALYIRKDTPIIKLMDGGFQEFNLRAGVENIPSAVGFAKAVELVTEEENRRLKAMRDRVIDKALSKIPDVTLNGSREKRLPQNANLTFHYVEGESVTLHMDMRGFAVSTGSACFSRSLEASHVIRGIGGDHERAHGSVRFTFGRYNNIEDADAAIEAMSEIVARLREISPLARK

SEQ ID NO: 32757 - protein, 243 aa, Methanosarcina barkeri str. Fusaro
MKDREIYAEMRCIPPVVVRADGRNFKNTLRDLGFGKPYDQTFARAMADTAELFIKKSGLSPLFAYTFSDEVSFLFMELPFEGRVEKMDSVTASFLGSALTINLQFEKPVAFDSRIVVLQKDEIPAYFHWRQLEAWRNFVAAWGYYTLLNEGISKIEASKYLRGKKEWEIHEMLFERGINLAKIPAWQRRGVIISKEEYEISGFNPVLDKETKSLRRRIIQNWEIPNFKSEEGMEFLQKLINRN

SEQ ID NO: 32758 - protein, 408 aa, Methanosarcina barkeri str. Fusaro
MKVLVINAGSSSLKYQLIDMINESPLAVGLCERVGIDNSIITQKRFDGKKLEKQVDLPTHRVALEEVVKALTDPEFGVITDMGEINAVGHRVVHGGEKFTTSALFDAGVEEAIRDCFDLAPLHNPPNMMGISACAEIMPGTPMVIVFDTAFHQTMPAYAYMYALPYDLYEKYGVRKYGFHGTSHKYVAGRAALMLGKPIEDTKIITCHLGNGSSIAAVKGGKSIDTSMGFTPLEGVAMGTRCGSIDPAVVPFVMDKESLSSREVDTLMNKKSGVLGVSGISNDFRDLDEAASHGNERAELALEIFAYSVKRVIGEYLAVLNGADAIVFTAGIGENSASIRKRILTGLEGLGIKIDEEKNKIRGQEIDISTPDSSIRVFVIPTNEELAIARETKEIVETEAKLRKSVPV

SEQ ID NO: 32759 - protein, 333 aa, Methanosarcina barkeri str. Fusaro
MVTFLEKISERAKKLNKTIALPETTDIRTLQAAAKALERGVANIVLIGDEANIKELAGDLDLSKAKIVNPETYEKKDEYIQAFYELRKHKGITLESAAEIMKDYVYFAVMAAKLNEVDGVVSGAVHSSSDTLRPAVQIVKTAPDAALASAFFIIAVPDCEYGSEGTFLFADSGMVEMPSPEDVANIAIISAKTFELLVQDDPYVAMLSYSTKGSAHSKLTEATIAATKLAQELAPDIPIDGELQVDAAIVPKVAASKAPGSPVAGKANVFIFPDLNAGNIAYKIAQRLAKAEAYGPITQGLAKPINDLSRGCSDEDIVGAIAITCVQAAAQDK

SEQ ID NO: 32760 - protein, 331 aa, Methanosarcina barkeri str. Fusaro
MKTVCCSILGFGAIGQGVAEVFLMKKEYLESIGLEVKVVAVVDSKGATVNPEGVDLADCLVRKRRDRTVALENISGVEVIQSVAHDLVIETTPTNILTGGAGMQNMFAAFKTGKDVITSNKGPLTLKYRELMEAAKAAGSHFRFEATVGGSMPIINLVNEVLAGNKVKSIKGILNGTCNYILTRMLEERASYNDILAESMQLGIAETDPTYDVEGIDTACKLVILANAIFGIDATYNNVEVTGITKVTPEALEMAYEKGHVIKLIGEVSRERIHVAPRLVPINHPLAVGGTLNVASVETELAGEITVTGKGAGPIETASAILSDLIAIYGD

SEQ ID NO: 32761 - protein, 763 aa, Methanosarcina barkeri str. Fusaro
MTDSKTTIKLKVAEADQRDVGKGIVRIGESFREKLGLEPFDVIEIKGGKSTSALIGRPYPSDSGLEIIRMDGFIRTNAKTSIGEYVAICKADWKEAKSVIFAPVARGMQIYAPSETLKAVFMNRTVSKGDFISTTSLRKSRESETFGKGVMFEDFFQDFFGQGFEPSFGLGEIKLQVVSTSPSGIVKITDLTQVELLSEATEVIPEQNIPTVMYEDLGGLKEAIGKVREMIELPLNHPELFDRLGIDAPKGVLLHGPPGTGKTLLAKAVANESDAYFISINGPEIMSKYYGESERAIREIFEDAEKNAPAIIFLDEIDSIAPKRAEVTGEVERRVVAQLLSLMDGLKARKNVIVIGSTNRPEALDVALRRPGRFDREIELRVPDTDGRLEIFQIHTRGMPLAENVNLMDFAQITYGFVGADIAALCREAAMSALRRVLPKINLNEPEIPAEILDSLQVIREDFENALKDVQPSAIREILIEVPTVGWDDVGGLEEVKRLLKEVVEWPLKNPESYRDIGVEAPKGVLLYGPPGTGKTLLAKAIAHESDANFITAKGSDLLSKWYGESEKRIAEVFTRARQVAPSIIFLDELDSLAPIRGASISEPQVTARILNQLLSEMDGLEELRAVVVIGATNRPDVIDPALIRPGRFDELILVPIPDEGARREIFKVHTEKMELAEDIDIEKLVSITDQYTGADIAAVCKKAGRLALREDIHAKNVKQRHFLKAITETGPSVTPDTMKYYEAIKGELRTRKSKEIENPSYI

SEQ ID NO: 32762 - protein, 380 aa, Methanosarcina barkeri str. Fusaro
MSSARLKRVEESATIKISNIATRMIKEGTDVINFSLGEPDFNTPKNICDAAAKAMYEGKTHYAPSGGIPELRAAIAEKLRTENNLDVTESGVLVTPGAKQGIFEVMMSVLDDGDQALLFNPAWVTYDACIRFAGAETVWVPTVPEKGFIPDNFEEYITDKTKLIVVNSPGNPTGGVFGKKTLQCIADLAIDHDLIVVSDEIYEKIIYDREHISIGSLDGMQERTITVNGFSKAYAMTGWRLGYLTAPPEILKLLLKIQSHSVSSATTFVQYGGLEALQGPQDSVKAMVDRFKVRRDVLIDGLNKMGFECKKPDGAFYAFANVSEYGNGTQVAERLLKEAQVAVTPGIAFGSSGEDFVRISYATSIDRIREALERLEKVFS

SEQ ID NO: 32763 - protein, 422 aa, Methanosarcina barkeri str. Fusaro
MKRESELKKELNLLEVTLVGIGDILGAGIYVLMGKAAGLAGNMVWFSFLFAGATATLSAFSYMELASMFPKAGAEYGFVRRAFGERIGLFIGLLVIYFVAITSSAVALGFGRYFSNLFGNGYLTGTLGLFILLSLIMVYGIKESARLAIFISFIEVSGLLIVIYTGLPYLGTVNYFETPDLAGIFKASTLIFFAFLGFEDIVRLSQETKEAEKTTPKALLIAIFFTVFLYMCVAITAVSMLDFRVLGLSGAPLADVVAISLGNKAFVLMSWIALFSTMNTVLVVMLGGSRIVYGMADSGALPRFLSRVHPGYRTPWVAILGVSFLSALFVLFRDVAIVANISNFMIFIIFFMVNLSLIKLRYTDPGRNRPFKVPLNIGRFPLLPFLGALSTVFLFFQLSLEVITYGLVFIGIGILIVLFRTR

SEQ ID NO: 32764 - protein, 323 aa, Methanosarcina barkeri str. Fusaro
MKIVVSDSIFLPEEYRKKLDALGDLKVFESMPSSIEEFISRVRDADIVLVGRYGFSGKAFNASRNLQMLSVWQTGYDHIDLKAATEKGVIVSNVPDYAFDSVAEMVFALALNLLRKVHVADIRLREGNFDWRHYFGSQIMGKTMGVIGTGSIGSRVIQIAHGFNMNVISVTGHPSEEKARSLGVKFVDLDTLLAEADIVTLHVPLTPSTEKMIGAKELAKMKKSAILINTARGKVVDEAALIEALKEKKIRGAGLDVFEKEPLPANDPLKALENVVLTPHIAFLTEESLEECTYVCVQNVERFIEGKPQNIVNPEVLTILRLP

SEQ ID NO: 32765 - protein, 488 aa, Methanosarcina barkeri str. Fusaro
MCGIAGAAGTPDTNEEVKRMLAALGHRGPDACGTYQAKGLSIGNTLLKITGDMLQPLVGKGALVLNGEIFNFRELAAEQGIKTNSDTEVLFALIETKIKEGETPTNAIFSVLSRVNGDYALAYVLGNKLVLARDPVGVKPLFYSLEKEGKKPKLAFASEKKAFSSQKDQIKSFPPGRVMAFDIRNGRLEEKSLTIDPPQERISEEHEASSRLKAALEKAVEIRLTKTSGIAFSGGIDSTFLAALAKNIDPSISLYAVGLPDSHDLVQAQRAAEVAGMSDSLKTHTLSPEEIEAAIPNVIYSTESTDPMKIAIGLPLYFVAKTAKEDGKRVLLTGQGADELFGGYNRHKALLEHGPKVLDRAIYTDLKNISTINLERDDMVTMANSVELRVPFLDKEVIKTGLAISPELKVLKRDSLYIRKYILRKAADGLLPSELLWKEKKAIQYGTGVQKVLDRLAREAGFSKREGNHIEKYLKKVAENQGFDFIFR

SEQ ID NO: 32766 - protein, 775 aa, Methanosarcina barkeri str. Fusaro
MEEIQLKVEKAYPIDLGRGIIRLDPTTLLKLQLSPGDIVEIRGKKKTTAKVWRADRQDWDQGLVRIDNFIRQNAGVSIGEKVTIKKVEAPEAKKLVLALPESMMQGGPELQFGEHANEIIKRHILKRPVFRGDIIPIINSMSQPMTESLTTSQVIPLVAVETEPSNTIVLVTEETLIELRKKPVQGYEKATRGVTTYEDIGGLGAEIMRVREMIELPMKHPELFGHLNIEPPKGVILYGPPGTGKTLIAKAVANESGASFHYIAGPEIVGKFYGESEERLRKIFEEATQDAPSVIFIDEIDSIAPKRENVTGEVERRVVAQLLTLLDGMVERGQVVVIGATNRVDAIDPALRRPGRFDREIHIGVPDTKDRYEILQIHTRGMPIERDEETEEIGKVETEADEAALERERKEKADKYLMYLAERTQGFVGADLLALVQEAAMRCLRENLPDLDLEKEAIPPERLEKIVVTKRNFEDALMEAEPSALREIYVEMPTVSWNDVGGLDEAKQSITEAVEWPIKNPEKFSHMGIKAPRGILLYGPPGTGKTLIAKAVAKESNANFISVKGPEIFSKWLGESEKAIRETFRKARQVAPCVIFFDEIDSIASMPGMESTDSHTSERVLNQLLTEMDGLESLRDVVVIAATNRPNLLDPAILRPGRFDRLVYIGSPDRKGRLKIFRIHTKDTPLAENVNLETLADETEGYVGADIESVCREAVMIALRENFDTEYVEMRHFREALKKVKPTITENIAQFYEKIEAQFKGGQRLTETAGYIGYR

SEQ ID NO: 32767 - protein, 395 aa, Methanosarcina barkeri str. Fusaro
MAKKVALAYSGGLDTSVCIPILKEKYGYDEVVTISVDVGQPEEEIKRADAKAEKISNKHYTIDAKEEFVKDYVFPLIKANGSYEGYVMGTSIARPLIAKKVVEAARKEGAVALAHGCTGKGNDQLRFEAVFRQTDMDVIAPMREMNLTREWEIDYAKEHGIPVEVTKSKPWSVDENIWSRSIEGGRLEDPSFVPPEEIFEWTTSPEKTPEQPRIVDIGFEAGVPVSLDGEKMSGYALVKKMNEIAGENGVGRTDMIEDRVLGLKARENYEHPAATVLLAAHADLEKLVLTRSELKFKKIVDDQWSELAYYGLVDEPLYADLNAFIDKSQERVTGTVKVRLYKGALTILSRSSPNALYSEDLVSFDSQTIDQKDSEGFAKYHGFQARMYRKVMDKQ

SEQ ID NO: 32768 - protein, 404 aa, Methanosarcina barkeri str. Fusaro
MYIHNCEGASVTIEDKTIYMDNSATTPIRKEVVEEMLPYMTENFGNPSSIYEIGKISKHAIDKARVKVANALGAEENEIYFTSGGTESDNWAIKGIAFANRNKGKHIITSSIEHHAVLHTCAWLEGQGFEVTYLPVDKYGMVSPEEVKKAIRDDTILISIMLANNEIGTIQPVEEIGKITKENRIYFHTDAVQAIGHIPIDVKKMNIDLLSLSGHKFEGPKGCGALYIRKGTKIDTLLHGGAQERKRRAGTENVPAIVGLGKAIELATAKIEESNKNLLELREHFIRGLLKIPKTHLNGHPTQRLANNVNVTFEYIEGESLLLLLNANGIFASTGSACNSSSLEPSHVLTACGVPHEIVHGSLRLSLGRTNSKKDVDRVLEVLPEIVQKLRNMSPLTPKEYRTI

SEQ ID NO: 32769 - protein, 566 aa, Methanosarcina barkeri str. Fusaro
MKPAQNSRRSFHYSLFQGILPLKSKQIPLEIAAGITFAAFAIPEVMGYTKIAGMPVVTGIYTILFPMLAFAIFGSSRHLVVGADSATAAIIASGLTTIAVPGSSQYVAYASAIALLVAILLFLGGLLQLGFLADFLSYTILIGFLTGVGIYISISQISGMLGIPSEPDGTSVQILSLVRNLSLTNTSTLLVSLSVIGVIVLGEKLSHKFPGSLIAIIGAIAASRILDLSSYGISILGAVPQGLPQISLPQIPLSNLPEIFNISISCFIIILAQSAATSRAYAIKFSDTFNENTDLIGLSLANAAAGISGTFVVNGSPTKTEMIKNAGGRTQLTQLTTVFTVILVLLFFTRPFAYLPTAVLSSMVFLIGLHLIDIKGMTSLHRQRPVEFAVALITAITVVVIGVEQGILIAIVLSIIAHLRHSYRPLNLLLVPKAGGAMKTFPLESGQQAVEGLLIYRFGSNLYFANEGRFAEEIIDLAIKNGSLKWFCISATNIGDIDFTSAETLKKVYTELQKLDITLVLSEVVQPVMNELDRDGITQMIGKDHIFESVQDVIEEYKRSTDSSLR

SEQ ID NO: 32770 - protein, 285 aa, Methanosarcina barkeri str. Fusaro
MNEKKIDESLLKSKGFLPQRQENMFSMRLKVVSGNLDVEKLRAIAAAAEKYGSGYVHITSRQQIEVPFVKLEDAEAANNELEKQGISGGSIGKRVRAVVACQGDRVCRNGLINCESLASRIDEKYFGEAVPKKLKIAVTGCPAACVRPQENDFGIMGTVMPKIVEENCVGCKLCEKACKVGAIKVLEDKASIDTEKCILCGACIAACRKDALKAEKTGCTIFVGGKAGRQPMQGIKLLELADEDQLFSVLEKTFEYYKREGLDGERLGELIERLGIDKYKEEVLS

SEQ ID NO: 32771 - protein, 764 aa, Methanosarcina barkeri str. Fusaro
MADREKITAKLKVAEADQRDVGKGIVRVDDSFREKLGLKPFDVVEIRGGKSTSALLGRPYPSDSGLDIIRMDGLIRTNAKTSIGEYVDIRKADWKEARSVTLAPVAKGMQIYAPSETLKAIFMNRTVSKGDFISTTSLRRSRERETLGKGIMFEDFFQDFFGPGMGQSFGLGEIKLQVVSTSPSGIVKITDMTEVELLPEAAEITPEQNVPTVMYEDLGGVKEAITKIREMIELPLKHPELFDRLGIDAPKGVLLYGPPGTGKTMLAKAVANETDAYFISVNGPEIMSKYYGESEKGIRDVFEDAEKNAPAIIFLDEIDSIAPKRAEVTGEVERRVVAQLLSLMDGLKARKNVIVIGSTNRPEAIDMALRRPGRFDREIELRVPDTEGRLEIFQIHTRGMPLAENVNLMDFAQITYGFVGADIAALCREAAMSSLRRILPKINLNEPEIPSEILDTLRVTREDFENALKDVQPSAIREILIEIPNVSWEDVGGLEGVKQLLKEAVEWPLKSPESYRDIGVEAPKGVLLYGPPGTGKTLLAKAIAHESEANFITAKGSDLLSKWYGESEKRIAEVFSRARQVAPSIIFLDELDSLAPIRGAAIGEPQVTARILNQLLSEMDGLEELRAVVVIGATNRPDIIDPALLRPGRFDELILVPVPDAGARKEIFRVHTAKMSLAEDVDIDKLVSMTDQYTGADIAAVCKKAGRDALREDLHAKEVKQKHFLQAIAETGPSVTPDTMKYYQAVQSGLRKRQSKEIETPFYT

SEQ ID NO: 32772 - protein, 370 aa, Methanosarcina barkeri str. Fusaro
MKEIKFSENVARIDTSGIRKIFEAAGSDAINLGLGQPDFDTPEHIKAAAIKAINEGFTGYTVGPGIPELREALSSKFKEENGFSVSPEEIIVTSGASEALAIALAALLNHGDEVLISNPGFVSYNALTEILSGKAVGVPLAEDLTMKPEAVLEKITPKTRAIVFNSPSNPTGTVASRADIKALAEIADDYNITIISDEVYEYFVYEGEHVSPASYSDNVITVNATSKSYAMTGWRLGYVAARKDYIGQMLKVHQYFQACANSIAQKAAYAAVAGPKDSIKAMREEFRKRRDVLVKGLNDLGMECALPKGAFYAFPKVPNSTEVASKFISNGVIVTPGTAFGSEGDGHIRISYAASMKDIEKALGIMEKVL

SEQ ID NO: 32773 - protein, 469 aa, Methanosarcina barkeri str. Fusaro
MVKKMERLKKLSIVTFILLIALVSPALAATSDQNAASIEEIKTTLTFMWLLLASGLVFFMHAGFSLVETGLTRSKNTANILMKNFMTVVLGILVYWAVGWGIMYGADAAGLIGTNQFFLAGADNATWNSWFFQMVFAATGATIVSGAMAERTNFKAYLVYCIMMVAVIYPIYGHWVWSGADMALLSGADSPIVKAIGVASHDFAGSGVVHSIGGYSALAGVILVGARIGRFKNGKPIPIPGHNLTITFLGTLILALGWLGFNGGSTLNANDPYMNLVVVNTFLAAAAGALMVMIITWVKTGKPDPSLTANGLLGGLVAVTAPCGSISNWAALVIGLVAGIIIYVGVMFNENKLKLDDPVGAIAVHGYCGSWGLISVGLFSIGMGNGILADATYAAAVPGLFYGGGISLLLIQLVSVLVTMVWGFGISYIIFKILDAVIGLRVSEEEEIMGLDISEHGIRAYPEYLMREE

SEQ ID NO: 32774 - protein, 396 aa, Methanosarcina barkeri str. Fusaro
MGEKRFVYMDHAATTFTKPEVFEAMLPFLKEHFGNPSSLYSIGREGKEAVETAREQLAKALGASPEEIYFTSGGTESDNWAIKGTAFARRKKGKHIITTPIEHHAVLYPCKYLETQGFDVTYLPVDSYGLVDPAEVEAAIRDDTILLSVMYANNEIGTIEPIHEIGEIAREHEIPFHTDAVQVIGKIPLEMEKKEKNVDMLALSSHKFYGPKGIGALYLREGIEIDNYMHGGSQERKKRAGTENVAGIVGLGKAIELATGNLEKHNEKMKRLRDRLLKGVLKISDCRLNGHPEKCLSNNLNFSFEYIEGESLLLMLDEMGICSSTGSACSSGSPEPSHVLRAIGLPPEIAQGSLRLTLGDDNSEEDIDYVLEVLPETVEKLRVMSPFYKPENACKK

SEQ ID NO: 32775 - protein, 236 aa, Methanosarcina barkeri str. Fusaro
MLSRDGKKILRGVNLEVGDREIHSIIGANGAGKSTLAYTLMGLQGYEHEEGSLIFNGEDISKLSITERARKGITLAWQEPARFEGLKVRDYLAIGAKGNGGVTEEELKEALRKVDLKPEKYLYREVGEALSGGERKRIELASIITMRPKLAILDEPDSGIDVVSLKEIVNLIQTFKENGSSVLVITHRKEIAAASDKASLMCEGVILRSGDPLEISEFFKNRCIPCDSRISPQKAA

SEQ ID NO: 32776 - protein, 393 aa, Methanosarcina barkeri str. Fusaro
MRPSCDPSKFVADVVKEIPPSGIRRFFDLVSGLEDVISLGVGEPDFITPWHIREMCIHSLEKGQTSYTSNYGLPELRDELTRTYYRRYGLDYDPSSEILITTGVSEALDIAVRTVVNPGDEVIIVQPSYVAYLPSVVLAGGKPVIVSTHRDDEFSLTAEALKPAITDKTKAIILNFPNNPTGAIMSKEGLEDIADLVVENDLFVISDEVYECLTYEGKHVPLSSLDGMKERTVMLNGFSKAYAMTGLRLGFAMGSPEIIHSMMMIHQYSMLCAPITAQIGAIEALRHGKDEMERMVREYDRRRHFIVRGFNRIGLECCNPKGAFYAFPYVGNTGLSSSEFAERLLDEKKVVAIPGDAFGEAGEGFLRCAYAASINDIRKALDRMEDFVDRLKQ

SEQ ID NO: 32777 - protein, 151 aa, Methanosarcina barkeri str. Fusaro
MTNSFYRKIMVATDGSESVRKAVETAVEIAKISGAKLYAVYVIASGGLSIIYPKDMGWEKAILEYFKAEGKEATNYVENSGKTENVEVESVILQGSPANELVDFAEQSDIDLIVMGTLGKTGIERFLLGSVAENVVRNSKKPVLVVRGETV

SEQ ID NO: 32778 - protein, 219 aa, Methanosarcina barkeri str. Fusaro
MKDNLPEKGAIVQRDRETYAIAPHIPGGIADPNTLRKIADVAEKYGAAALKMTSAQRIAIVGLKEEDLDNAWADLDMKPGAAVGLCVRSVKFCPGTTFCKQGKQDAVGLGLKLDEKYHGMSMPSKFKMAVSGCPNSCSEPAIKDIGVMGTAKGYTLMVGGAAAASPRLAEVVAKNLSEEEVLDAIDRIVNFYKNSGTKKRLGKFIDGVGLEEFKAQVGL

SEQ ID NO: 32779 - protein, 216 aa, Listeria seeligeri
LVFWGAAEPLSHYAVQAPGGEVGTQAAMKDALRYSFFHWGISAWAIYAIVALALAYFKFRKNAPGLISATLYPILGKHAKGPIGQLIDIIAVFATVIGVATTLGLGAQQINGGLTYLFGVPNNFSVQLTIIIVVTILFLLSAMSGLDKGIQLLSNVNIYVAGVLLVLTLILGPTLFIMNNFTNSFGDYLQNIIQMSFQTAPDAPSARAWIDSWTIF

SEQ ID NO: 32780 - protein, 216 aa, Listeria seeligeri
LVFWGAAEPLSHYAVQAPGGEVGTQAAMKDALRYSFFHWGISAWAIYAIVALALAYFKFRKNAPGLISATLYPILGKHAKGPIGQLIDIIAVFATVIGVATTLGLGAQQINGGLTYLFGVPNNFSVQLTIIVIVTILFLLSAMSGLDKGIQLLSNVNIYVAGVLLVLTLILGPTLFIMNNFTNSFGDYLQNIIQMSFQTAPDAPSARAWIDSWTIF

SEQ ID NO: 32781 - protein, 216 aa, Listeria seeligeri
LVFWGAAEPLSHYAVQAPGGEVGTQAAMKDALRYSFFHWGISAWAIYAIVALALAYFKFRKNAPGLISATLYPILGKHAKGPIGQLIDIIAVFATVIGVATTLGLGAQQINGGLTYLFGVPNNFSVQLTIIVIVTILFLLSAMSGLDKGIQLLSNVNIYVAGVLLVLTLILGPTLFIMNNFTNSFGDYLQNIIQMSFQTAPDAPSARSWIDSWTIF

SEQ ID NO: 32782 - protein, 343 aa, Methylosinus trichosporium
MYQIVIETEDGETCSFECGPSEDVISAGLRQSVILLASCRAGGCATCKGDCTDGDYELIDVKVQALPPDEEENGKVLLCRTFPRSDLHILVPYTFDRISFQAIQTNWLAEIVACDKVSSNVARLVLQCLTADGSTPIALDFVPGQFVDIEIPGTHTRRSYSMASVAEDGRLEFFIRLLPDGAFSNYLQTGAKVGQRVALRGPAGSFSLHKSERARFFVAGGTGLSPVLSMIRQLKKESASQPATLFFGVTNHEELFYVDELKALQEAMPSLDVRVAVVNAAEGNGVAKGTVIDLMRAELAKSGEKPDIYLCGPPGMIEAAFAAAATAGVPKEQVYLEKFLASG

SEQ ID NO: 32783 - protein, 424 aa, Dehalococcoides sp. CBDB1
MFDRVEINIKAGDGGSGKVSFRREKFVPYGGPDGGDGGDGGNVYLEADSGLYSLLNFKHKRVHKASNGEGGMGSRCTGHNGADLVIKVPVGTVATILEENGQKRVLADLAADGDRTLVAHGGQGGLGNTHFVSSTNQAPMLAQKGQPGGEYDLILELKLIADVAIIGYPNVGKSSLLSLLTAAKPKVANYPFTTLSPVMGVIERPEGVFVMAEVPGLIENAHLGKGLGHDFLRHISRTRMVIHLLDGTSENPIDDMIKVNSELYLYDASLSERPQVVAINKIDDELVQLRREELKETFKEAGLEVFFISALTGEGVDVLLAKVAEKLDILKAADISETAPDHEVKIFRPAPKGKMGFRITRLEDGWQVEAPEIERIIEHSDIEDPEVRRQVMVLLKHRSVQQSLIKSGAVIGQKIITGRMEWYL

SEQ ID NO: 32784 - protein, 561 aa, Dehalococcoides sp. CBDB1
MSFESFNFDPAVMAGVRACGYKEPTPIQAQAIPPIMAGHDVIGLAQTGTGKTAAYALPIIQKMLSTPRGRVRTLVIAPTRELACQISDSFRSLGQRARIRECSIYGGVNMDQQIRRLRSGVDVVVACPGRLLDHIWRGTIDVCGVETLIIDEADRMFDMGFQPDIQSILKCLVQPHQTLLFSATMPPEVRKLTLETQTNPVTVQVGTQSPVSSVSHSVYPVKSHQKTPLLLEILKTVETKSVLIFARTKYGAENLADEISKAGFTTASLQGNLSQNRRHAVMEGFRRGNFKILVATDIAARGLDIDHISHVINYDMPDSPEDYTHRIGRTGRFDRTGQAFSLVTGRDGDMVRDIQRLLSSPIQRLRVDGFDYATTRNDGQNQSQRRDFAPRRGYSHGGYNRPEMAVNETSQTDTPSEMPVSPARPFNPGFRPSRPANSAPRFHREGNFAPRMQSHSSFEGTSAPAARPAARYNDRPAFRKENSFQTTEASRPSFRKETGFTPREHTQADFENSEQPSGRRPARFNGKASFADRPARSGNKVGKPPFFRRSKPAVSEKNETY

SEQ ID NO: 32785 - protein, 383 aa, Dehalococcoides sp. CBDB1
MENIIYLDNAASTSVDPRVVEAMLPYFSQYYGNPSAIHPMGRLADEALETAREQVARLINCQPEEIIFTSGGTESDNLAITGVASACRGNHIITSEIEHHAVLEACHALVKKGFEITYLPVDRSGQVSAQDLQAAITPQTALVSIMAANNVIGTLQPIAEIGAICRKRGVFFHTDAVQMAGHLSVDVKRDNIDLLSLSGHKFNGPKGVGILFARSEIPLSPLILGGGQEAGLRSGTENVPGIAGLGVASEIAMAEMESEAKRLCKLRDDLINRILADIPGTCLNGHPGKRLPNNVNISFEGIEGEYFTKELSKQGICVSTGSACSSESHEAPYVLLAIGRERELANCSIRLSLGKMTTAEDVNKTVAAICSVAAKIRKQTRVW

SEQ ID NO: 32786 - protein, 247 aa, Dehalococcoides sp. CBDB1
MEYLNCMMDLWLFESLSKSEKTEISHLFRRPEYLKNEHLFSEGEPASAVFVVTKGRIKLFKTSENGREIVLGYLTPNQLFGEEILFNDAIRTIAAVAVEDTKLCACYKNDFENLLSQNSQIAVKVIKALSDKINHITETLADMAIYDTQVRLARTLARLAKEHGEDVCDGRRLNFRLTHDDLGSLVGASRVMVTNVMKSLKKSGIIKDDIDHKLVVSQWFLKDYSDEKPTFIRNNSTSCECFPKSDA

SEQ ID NO: 32787 - protein, 324 aa, Dehalococcoides sp. CBDB1
MLVNGNLTEELKIFTGNANPDLAKAVAEYLKVQMGKCEVFQFSNENIFVRIQESVRQKDVYVIQPTCSPVNQSIMELLIMMDALKRASSERITAVLPYYGYGRTDKKDQPRVPITARLVADLLTTAGASRILTVDLHAPQIQGFFNMPVDELTAENLLANYFKKKNIKDLVVVATDVGISKKARDFAAKLDAPLAIIEKRRMGNNDITRTINIIGDVEGKNALTFDDEIDTAGSLVGNVNILISKGVKEVYSCATHPVLSGPAIQRIATSPIKELVVTDSIPLTPQKKIDKITVLSIAPLIGEAIYRIHTGNSIGEMYDQMQME

SEQ ID NO: 32788 - protein, 526 aa, Dehalococcoides sp. CBDB1
MKKVLVSDALSATGLAPLKEIAQVDVKTGLKPEELISIIGEYDALLVRSQTQVTADIINAGKKLQVIGRAGVGVDNIDLKTATGNGIIVVNAPTGNTISATEHTLALMLAMARHIPRANASLKSGQWKRNEFVGSELKGKTLGIVGLGNIGSEIAKRALALEMRVIGYDPFISMERAKKLQVELLPFEDLLKRADFITLHVPMTGQTKGLIGPKELEMMKPTVRLINTSRGGIIDEEALAKAVKEKRIGGAAIDVFSKEPCTESCLFECDNIIVTPHLGASTAEAQELATSDVVKQVIDVFEGRPARYAVNAPYISAESLPVVGPFMPVARTVGSLVSQLTDGHMKNVTIKYCGELAAYDTTALKALVLGGILEHISEERVNVVNADIVASQRGLGVTEQKESTCQNFSSLITVTIDTDNGKSNTVAGSLVRGDVHIVKLNDYWIDIVPTGGYFLFADHIDRPGLIGSAGKITGDADINISYMHLSRQKARGQALMILALDEPLPEKQRQQLLSLPDVQMVQVVKI

SEQ ID NO: 32789 - protein, 388 aa, Dehalococcoides sp. CBDB1
MKLSKRIENLPPYLFVQISKKIAEKRAKGEEVISFAIGDPDLPTPKHILAELCKAAEDPSNHRYPETEGLPVLRKAMAEWYQKRFGVKLNPDTEVLPLIGSKEGIGHAAWCFLDPGDIALVPNPAYPVYAISSQLAGAEVFNLPLNKGNNFLPNLEAIPQNILSKAKVLWINYPNNPTGAVAGLSFFQEVANFAAKHNLAVCHDGPYSEIAFDGYKPVSFLEADGAKDVGIEFHSLSKSYNMTGWRIGMAVGNAKMIDALRRFKSNLDSGIPQAIQLMAIAALNGSQEIINQNCAIYQRRRDRLVESLRNIGMEVTAPKASLYIWAPVPESYTSASFATELLDKTGVVVTPGTGYGTAGEGYIRLSLTVPDEQIEKGIAKLAGYKKSS

SEQ ID NO: 32790 - protein, 124 aa, Dehalococcoides sp. CBDB1
MLKSKIHRATITDACIDYEGSITIDKNLMQAANLLPYEQVHVVNVNNGTRLETYVIEGSAGSGQICLNGAAARMGMKGDKIIILGYSLITEEDTLIHQPNLVYVDALNRITKVKNGVANQGLEV

SEQ ID NO: 32791 - protein, 251 aa, Dehalococcoides sp. CBDB1
MDSEILLEVKDLHVEVDGREILHGVDLVLPAGETHVIFGPNGSGKTTLLMTLMGFPRYKITKGQLIFNGKDITHVPLDERARLGIGISFQRPPVVRGVKLREMVRSSLRAKDDKGLINELAKKANMTDFLERDVNHGFSGGEIKRSELLQLLAQGPDMVLLDEPESGVDLENIALIGSLINELLEKKHPIRERKRGGLVITHTGHILDYVNARTGYVLCHGRINCTGDPRDMLETIKHNGYQECVECPRKI

SEQ ID NO: 32792 - protein, 569 aa, Dehalococcoides sp. CBDB1
MKLTGAQIVCESLLKEGAGIIFGYPGGVLLPLYDTFTQYPALRHILTRHEQGAAHAADGFARVTGKVGVCLATSGPGATNLITGIANAYMDSIPMVAITGQVTRNLIGKDAFQEIDITGITLPITKQNYLVTKASSLADTIKEAFYLARTGRPGPVLIDIPKDVFIEQAEFEYPDEPDLPGYKPVIKGNLMQIQKAARLIETAEKPVIIAGHGVNISGANEELKTLAENCQLPVITTLLGVSSFPEDHVLSYGMLGMHGMAYANMAVAATDLIIAIGMRFDDRVTGKLSSFAPHASVIHIDIDPAEIGKNVRVDVPIVGDVKNVLKSLNKQVECVQHPDWLRQLENWRREHPPLSIRHTDLILPQYIVQQISEATRGNAIVVTGVGQHQMWAAQHYTYIRPNSLVTSGGLGTMGFDLPAALGAKVGCPDETVWCIAGDGGFQMNMQELGTVVQEKAAVKIAVFNNGYLGMVRQWQDLFYNKNYVATPLGCPDFIKIAEAYGIPALNVKRKEDVRPAIEQAMSTEGPFLLNFVIEPEENVYPMVPPGAALHEVLEEPKKEVSACPRRSIP

SEQ ID NO: 32793 - protein, 350 aa, Dehalococcoides sp. CBDB1
MDLPCGTRNFSYKTDMAIFRTKTHWAMLIGFLILLFSLPFNINSYWLGILNLIGITVIAAAGLNILMGYCGQLSVGHAGFIAVGAYTTAILANKLGVPFPFDMIASGIMAGLVGVLFGLPSLRVKGFYLAISTIAAQFIIIWVINHWSGLTGGFNGIVIPPINLFNFDFTTQGSQFFIIMLVAVLAIFFMKNIARTRIGRAFVAIRDNDLAAEVMGINVFRYKLLAFFIGCFLAGVAGSLMAHWIGYLTAENFTLSDSILYVGIVIIGGLGTGVGPILGTLFIRLLQQGVQYVSPLMGSAFPQLPSGFAAGLGPMVFGLAIVLFLVLEPRGLAHRWQLFKSSYRYWPFSY

SEQ ID NO: 32794 - protein, 315 aa, Dehalococcoides sp. CBDB1
MDIGAIWDLIILSPMINGMVWLSHNLWGSFGLTVIVLTVVIRLALWPLNRKQLTATKKMQEITVHMDALKKKHGNDRQKLAEEQMKLYKESGVSTTGCLVPMLIQFPIWIALYQAIVRVLAVTPEDFMNLSNHLYSWPVVYETLPLSNNFLWMDLSRSDFVLALLVGLGMFVQQKMSTPKAINQQQAAQSQMLSFMMPFMFFFFSLSFPSGLAFYWFVSAVVGIIMQYFITGWGQLEPIAEKVISYFRGGRQVRSGSIYKTEKKAATPAGQLSDSSTKGKQMEGSIDEKGRDERQDSGGSYKTGSKSTKRKPKRS

SEQ ID NO: 32795 - protein, 500 aa, Dehalococcoides sp. CBDB1
MKTFLPSKFIVDRIEDRCIKCKVCITQCSFDTHYYDADDDQIKVRNQNCVGCHRCVTFCPTGALVVRNNPLEYRQNANWTPEMIEDIFKQAETGGVLLTGMGMDKAKPIYWDKLLINASQVTNPSIDPLREPMELTTYLGRKPEKATFDKYGNIEVNVAPQVKIDVPLMFSAMSYGAISLNVHRSLAQAAKNMGTMWNTGEGGLHSSLMEFKDNTIVQVASGRYGVQNDYLNSGRIVEIKIGQGAKPGIGGHLPGEKVSADVSLTRMIPMGTDAISPAPQHDIYSIEDLSQLIYGLKEATRYRVPISVKIAAVHNVAAIASGIVRAGADIVTIDGMRGATGAAPKVIRDNVGIPIELALAAVDSRLREEGIRNQASLVISGGIRNSGDVFKAIALGADAVNIGTAALVALGCHLCQQCHTGKCSWGICTSDLALTKRINPEIGAKRLSNLLRGWSLEIKDMLGGLGVNAIESLRGNRLHLRGVGLSAEELKILGVRAAGE

SEQ ID NO: 32796 - protein, 636 aa, Dehalococcoides sp. CBDB1
MSQNRNNPQSRMPVSGGPMGGGMHMGGGPMGGMRMAHSGEKARNFKDTMTSLLKYLTPYRFTLIIALVLAIFGTVFTIIGPKLLGNATTKLFEGLVSKVMNAPGAGIDFTYIGNIVLILIGLYAVSAICSYIMGYIMTGVSIKVTYDLRKQIAEKINRLPMKFFDNKTYGEVLSHVTNDVDLISNTLTQSMSQMVTSVVTILGVLVMMFTINWIMALASLIIVPVSIGLISLIVGRSQKYFRKQQDYLGHINGHVEEMYSAHNVMKAFNGEEKSITKFEGLNEELYGASWKSQFLSSIMMPMMNFIGNLSYVVVCILGGFLAIQKTIQVGDILAFVQYVRSFTQPLAQTANIVNILQSTAAAAERIFEFLGEGEEVPEPANPVSLKDISGAVSFKDVSFGYSPTKVIIKNFNADIKPGQRVAIVGPTGAGKTTMVKLLMRFYDVNSGAILVDGINIQDIKRQEYRSAFGMVLQDTWLFNGSIMDNIRFGKLDATDDEVYTAAKTAYVDHFIHTLPNGYEMVMNEESSNISQGQKQLLTIARAVLANPKILILDEATSSVDTRTEMLIQQAMENLMQGRTAFIIAHRLSTIRNADIILVMKDGAIVEQGNHKELLEANGFYASLYNSQFESGLIENN

SEQ ID NO: 32797 - protein, 406 aa, Dehalococcoides sp. CBDB1
MSEKVVLAYSGGLDTSAAVKWLQEKYGMDVIAVTIDVGNEKDFTLIKEKALKVGAKKAYVRDVRKEFAEDYIWKAIKANSMYEGVYPLATALARPLIAKVMVDIALEEGATAIAHGCTGKGNDQVRFDVGINTLAPHLKIIAPARQWGMTREQTMEYAQKWGIPVPISVKNPFSIDENLWGRSIECGLLEDPWNEPIPEVFAWTRPVEETPDEPEYLEVEFEQGVPVAVNGEKLSPLALIQKVHDIASLHGVGRIDHVENRLVGIKSREIYEAPAAVVLIAAHQALEAMTLSKSQLRFKQMVEATYSDIIYNGLWFSALRQDLDAFIDSSQRFVSGTVRLKLSKGSFRVVGRKSPYSLYHKGMATYDKGDQFDPSSAVGFITLWGLQAKLQAQLQPILEEEKGNKS

SEQ ID NO: 32798 - protein, 398 aa, Dehalococcoides sp. CBDB1
MTSQVGTDKGFISDRAKELKPSGIRKFFDLAAKMGSGAISLGVGEPDFTTPWHIRESAIYALEKGYTMYTSNAGLLELRQEISKYLYQTYGLEYNPETEVLITVGSSEALDLVMRATLNPGDEVLMTDPAYVAYPSCVFMSYGNPVQIPTFEANNFEISAADIAPRITPKTRSILLGYPSNPTGAVMPKNKLAEIAKLACDKNLLVVSDEIYDKIIYSGFEHTCFATLPGMRERSVIINGFSKTYAMTGWRIGYAVGPAAIIQAMTKIHQHTMLCAPIAAQKAALEALRNGQDDVRLMVEEYDRRRRFIVKNFNDMGLSCFEPKGAFYTFPSVRKTGLSSNEFAEKLLMEEKVAAVPGTAFGESGEGYLRCCYATSLKDIEEAMKRFRHFLKHNCPQM

SEQ ID NO: 32799 - protein, 636 aa, Dehalococcoides sp. CBDB1
MGKVVGIDLGTTNSEVAVMQGGEPVVIPSAEGSTLIPSVVAINKNGERIVGRQAKNQAILNPENTVYSIKRFMGRKWGEPAGRELPVEADAKRKPYKVIQGNNNEVRVVMGDKDFSPPEVSAMILQKLKSDAEAYLGEKVTEAVITVPAYFNDAQRQATKDAGAIAGLKVLRIINEPTAAALAYGLDKKKDETIAVYDLGGGTFDISILELGEGTFQVKSTAGDTHLGGDDFDQKIIDWLIAEYKKDQGIDLSKDKTALQRLKEAAEKAKIELSTVQQTEINLPFITADASGPKHLNIILTRSKLEQMVMDLVEKSLEPCRQALKDSGKTSAEINEVILVGGQTRMPLVQQKVKDFFGKEPNKGVNPDEVVAIGAAIQAGVLKGEVSDVLLLDVIPLTLGIETLGGVSTALITRNTTIPTSKSQVFSTAADNQPSVEIHVLQGERPMAADNRTLGRFMLDGILPAPRGVPQIEVTFDIDANGMLSVKAKDKGTGREQKITITASSGLSKEEVEKMTREAEAHAVEDTKRKEEIEARNVADNLAYNAEKTLRDNKDKIPAELNTELESKIAAVRTALQGNDVEAIKKTTQELSTALQSVGSAVYGKQQEGAPAQEEPSAEGKKADDEGTVEGEFREV

SEQ ID NO: 32800 - protein, 216 aa, Dehalococcoides sp. CBDB1
MRIFLDTANIEEIKKGLKLGVVSGVTTNPTLVAKEGISDYKSVVQQICALLPEGDVSAEITAEDPAEMLKQAREIAKWAPNVVVKIPATTEGLEIISKLSKEGVRFNMTLCFSVNQALLGALAGAAFVSPFVGRLDDAGHDGMMLINDIVNIYKEYGFETRVIAASIRHPLHCTQAAQTGASIATVPYKVLMQMMNHPLTDSGVARFMADWKSVQK

SEQ ID NO: 32801 - protein, 405 aa, Dehalococcoides sp. CBDB1
MAVVVHKYGGTSVGDAERIKHVAKRIIAARQKGNDVVAVVSAMGDTTDDLIELAHKLNDCPEPREMDVLLSTGEIVSSTLLAMALKNMGQDAISLSGQQAGIRTDSVHSKARITGIDPKRIHDELDKGRVVIVAGFQGISDCQDVTTLGRGGSDTTAVALAASLGASICERYTDVDGVYTADPRLIPDARRLSEISYEEMLELSSYGAKIMHPRAVEIGQVYNIPILVASSFNENPGTLIHGGEKMEIRNKVSGIAHDFEVAKITILGVPDKPGIAAGLFAPLAKAGVSVDTIVQNSSQDHITDLTFTVTKSDLGKALEVIGPIAKELQAREVLSDSKIGKVSIIGTGMLNAPGYAARMFKALSDAGINILLISTSEIRITCIIEEDKVKDAVRAIHKAFEMEKD

SEQ ID NO: 32802 - protein, 1124 aa, Mougeotia scalaris
MSSSKRSQSSGRSSTQTRIQNRVTQASADAKLSTAFEVSSSSGGDSFDYTKSVTASLNPTEPLAAKSVTAYLQRMQRGSIIQSFGCMMAVEPGTFRIIAYSENVSEMLGVTPQSVPTGDQQNAIGIGTDVRSLLSPSSVSVVEKAVAANDVSMMNPITVYSLATQKPFFAILHMNDVGLVIDLEPISSSSDSAMFSAGAVQSHKLAAKAISRLQSLPGGDICGLCDVVVEEVRELTGYDRVMAYKFHDDEHGEVVAEIRRSDLEPYLGLHYPATDIPQASRFLFIKNRIRMICDCTSPQVKVVQDSRIPQEMSLAGSTMRGVHGCHTQYMMNMGSTASLVMSVTINDTNEIAGGPGMKGRKLWGLIVCHHSTPRHIPFPIRSACEFLMQVFGLQLNMEVELAAQHREKHILRTQTLLCDMLLRDAPMGIVSQSPNVMDLVKCDGAALLFGGRCWLLGISPTQEQVKDIATWLISSHTDTTGLSTDSLVDAGYPKARELGVDVCGMAAARITENDFLFWFRGHAQKEVKWAGAKDGGSEEDGSRMHPRSSFKAFLEVVKQRSLPWEDVEMDAIHSLQLILRGSFQDIEDKEDRKIVHARLKEMHLQGMEELSSVASEMVRLIETATAPILAVDTAGCVNGWNFKISELTGLSIPEVMGKSLVKDLTHPSSKDTVEKLLYMALNGEEEQNVEIRLKTWGMQQGKGPVILMVNACASRDVSEKVVGVCFVAQDVTGEKIVQDKFTRIQGDYTTIVRSHNSLIPPIFGSDESGFCVEWNPAMERLSGVKREEAIGKMLTRELFGGILRLKNVDGLTKFMIVLNAAMSSHDTDKFPFTFYDRSGKIVEVLLTTSKRCNSEGVVTGVFCFLHTASSELQQALTVQKAAERVAEVKAKELAYIRQEIQNPLDGIHFARSFMEHTVLSEDQKQLIETSATCEKQLRRILADMDLASIEKGYLELETGEFSMATVMNSVVSQGMIQSTQKNLQLYCDTPPDFKSLSVFGDQVRLQQVLADFLLNAVQFTPPSGWVEIKVEPVVKKLPGGVSVAKLDFRVSHPGEGLPEDLIDQMFDRADARVKSQEGLGLSICRKLVRLMNGEVQYRREGERNFFLLQLELPLAQRDDQASMK

SEQ ID NO: 32803 - protein, 225 aa, Gossypium hirsutum
MRKGRGATAAADAAMKPAVEANGSVKELRYRGVRKRPWGRFAAEIRDPLKKTRVWLGTFDSAEEAARAYDAAAITFRGNKAKTNFPFNSSDFPAFGIDRHHRRNNEGFIADGHRFHQTGGDYEDPEVNPQRPARSSMSSTVESFSGPRPTQPPRKPSDFEAVSTRKYHPKMPRMAPEDCRSDCDSSSSVVDDGDDDNVSSSRRKILPFDLNFPPLDEVDDLTLSL

SEQ ID NO: 32804 - protein, 177 aa, uncultured bacterium
QTMPKEAYLYGLGYDMYTKYGVRRYGFHGTSHRYVSGRAAEILGRPAEELCMVTCHLGNGSSLAAVKHGKSIDTSMGFTPLEGLVMGTRSGDIDPAIVSFLCEKLSRSASEVVLGYLNKNSGVLGLSGGLSNDFRDLEEAADRGHELAKLALDVFAYRVVKYIGAYAAAMGQLDVIV

SEQ ID NO: 32805 - protein, 177 aa, uncultured bacterium
QTMPREAYLYGVGYDMYAKYGVRRYGFHGTSHRYVSARAAEILGRPVEKLCMVTCHLGNGSSLAAVKHGKSIDTSMGFTPLEGLVMGTRSGDIDPAIVSFLCEKLGRSASEVVLGYLNKNSGVLGLSGGLSNDFRDLEEAAGRGHELAQLALDVFAYRVVKYIGAYAAAMGQLDAIV

SEQ ID NO: 32806 - protein, 175 aa, uncultured bacterium
QTMPAKAFTYGLPYHYYEENRLRRYGFHGTSHFYVANRAAEILGRPIEELKIVTCHMGNGSSITAVDRGRSVDTSLGFSTVPGILMGTRAGDLDPVMILHLMEQEGITPKAMSHILHKESGVLGISGISSDLRDIEEAAATGNERAALALDMLCYGVRKYIGAYAAAMGGIDAVV

SEQ ID NO: 32807 - protein, 177 aa, uncultured bacterium
QTMPREAYLYGLGYDMYTKHGVRRYGFHGTSHRYVSGRAAEIVGRPVEELCMVTCHLGNGSSLAAVKHGKSIDTSMGFTPLEGLVMGTRSGDIDPAIVSFLCEKLGRSASEVVLGYLNKNSGVLGLSGGLSNDFRDLEEAADRGHELAKLALDVFAYRVVKYIGAYAAAMGQLDVIV

SEQ ID NO: 32808 - protein, 174 aa, uncultured bacterium
QSMPPRAFHYALPNELYGMHHVRRYGFHGTSHHYVAKEASRYLGIPEEHLNLVTLHLGNGASATAVEGGKSVDTSMGLTPLEGLIMGTRCGDLDPAIHFYLSRKIGRPFEEIESVLNKESGLKGICGLNDMREIQRRAEEGDDRAQLAIEMFCYRIKKYIGAYCAVLGRVDAVV

SEQ ID NO: 32809 - protein, 177 aa, uncultured bacterium
QTMPKEAYLYGLGYDMYTKYGVRRYGFHGTSHRYVSARAAEILGRPVEELCMVTCHLGNGSSLAAVKHGKSIDTSMGFTPLEGLVMGTRSGDIDPAIVSFLCEKLGRSASEVVLGYLNKNSGVLGLSGGLSNDFRDLEEAADRGHELAKLALDVFAYRAVKYIGAYAAAMGQLDVIV

SEQ ID NO: 32810 - protein, 177 aa, uncultured bacterium
QTMPREAYLYGVGYDMYAKYGVRRYGFHGTSHRYVSARAAEILGRPVEKLCMVTCHLGNGSSLAAVKHGKSIDTSMGFTPLEGLVMGTRSGDIDPAIVSFLCEKLGRSASEVVLGYLNKNSGVLGLSGGLSNDFRDLEEAAGRGHELAKLALDVFAYRVVKYIGAYAAAMGQLDAIV

SEQ ID NO: 32811 - protein, 175 aa, uncultured bacterium
QTMPPHAYMFGLPYRYYKEYKVRRYGFHGTSHYYVANRAAEMLGRPLEDLKIVTCHLGNGSSLTAVDGGKSIDTSLGFGTVQGVIMGTRSGDLDPTAILHLMEQEGLDPKAMSHILHKESGLLGLTGISSDLRDVEAAAESKNERAILAIEMLAYGVRKYIGAYAAAMGGLDAIV

SEQ ID NO: 32812 - protein, 175 aa, uncultured bacterium
QTMPPHAYMFGLPYRYYKEHKVRRYGFHGTSHYYVANRAAEMLGRPLEDLKIVTCHLGNGSSLTAVDGGKSIDTSLGFGTVPGVIMGTRSGDLDPTAILHLMEQEGLDPKAMSHILHKESGLLGLTGISSDLRDVEAAAESKNERAILAIEMLAYGVRKYIGAYAAAMGGLDAIV

SEQ ID NO: 32813 - protein, 175 aa, uncultured bacterium
QTMPDYAYFYALPYELYEKYGIRKYGFHGISHKYVTERASVILNRALEDLKLISCHLGNGASICAVKNGKSVDTSMGFTPLEGLAMGTRCGSIDPAIVLFLMEKEKMTPEELDDYLNKKSGVLGISGVSSDFRDIQAAADAGDKRAKLAIDVFCYRVSKYIGGYAAALGGVDAVI

SEQ ID NO: 32814 - protein, 177 aa, uncultured bacterium
QTMPREAYLYGVGYDMYAKYGVRRYGFHGTSHRYVSARAAEILGRPVEKLCMVTCHLGNGSSLAAAKHGKSIDTSMGFTPLEGLVMGTRSGDIDPAIVSFLCEKLGRSASEVVLGYLNKNSGVLGLSGGLSNDFRDLEEAAGRGHELAQLALDVFAYRVVKYIGAYTAAMGQLDAIV

SEQ ID NO: 32815 - protein, 175 aa, uncultured bacterium
QSMPDYAYIYGIPYEYYENFEIRRYGFHGTSHKFVAEKAANMIGKNINDLKIISCHLGNGASITAIDRGVSIDNSMGFTPVEGLIMGTRCGDLDVGALLYIMEKENLDTKQANDLVNKKSGVLGISGISSDMRDLENAAMQGNKRAKLALDVYAYKVKKYIGSYIAAMNGLDLLI

SEQ ID NO: 32816 - protein, 174 aa, uncultured bacterium
QTMPSHAYLYGLPRKFYEEFKIRRYGFHGTSHRYVSARAVELCRRHPSNTNVISCHLGNGGSVTAIARGKSIDTSMGFTPLEGMIMGTRSGDLDPAILGFLMDRGYSSKDLIKMLNKESGLLGLSGISNDMRDLEKAAEEGNHRAKEAIDCYAYRVRKYIGAYAANLIKVDILV

SEQ ID NO: 32817 - protein, 174 aa, uncultured bacterium
ATLPEVAYRYALPFELYERYHIRRYGFHGTSHRYVARRAATLMAMDKYRLNAITCHLGNGCSMAAVRHGRSVGTSMGFTPLEGLVMGTRTGDFDPAILFYLADKGYDLTALNSLCNKKSGLLGISGASNDMRTLEQLAREGNVRAGLAVEIFCYRVRKYIGAYMTLLNPPHAIV

SEQ ID NO: 32818 - protein, 175 aa, uncultured bacterium
QTMPPKAFLYGIPYALYEKYKVRRYGFHGTSHKYVSKRACEILGLDIEKQKIITCHLGNGASMAAICNGKSVDTTMGMTPIEGLIMGTRAGDLDVGALLYIADKEETSIQFTSTLVNKFSGMLGISGVSSDMRDIGAAADAGNERAKVAMEMYPYRVKKYIGAFAAAMGGLDVIV

SEQ ID NO: 32819 - protein, 176 aa, uncultured bacterium
QSMTETAYLYAIPYSLYRKYKIRRYGFHGTSHRYVANRVANILGKPIKELKIITAHIGNGASVAAVKYGRSVDTSMGFTPLEGLVMGTRSGDVDPAIVPFLQEQEGSTAGEVNNLLNKESGMFGLTDHLFVDMRDIEERAAKKDPLCMRAHNIYEYRLAKYIGAYAAAMNGVDAIA

SEQ ID NO: 32820 - protein, 175 aa, uncultured bacterium
QTMPSHAYMYGVPYHYYEKYRVRRYGFHGTSHYYVSQRTAELLGKPVDHLKIVTCHLGNGSSVTAVKNGHSIDTSMGFSPLPGVIMGTRCGDVDPTLLFYLAEQEGLDTKALAHILNKESGIQGISGVSSDLRDVEEAASSGNSRAKLAEEMLYYGIRKYIGAYAAAMGGIDALV

SEQ ID NO: 32821 - protein, 177 aa, uncultured bacterium
QTMPKEAYLYGLGYDMYTKYGVRRYGFHGTSHRYVSGRAAEILGRPAEELCMVTCHLGNGSSLAAVKHGKSIDTSMGFTPLEGLVMGTRSGDIDPAIVSFLCERLSRSASEVVLGYLNKNSGVLGLSGGLSNDFRDLEEAADRGHELAKLALDVFAYRVVKYIGAYAAAMGQLDVIV

SEQ ID NO: 32822 - protein, 176 aa, uncultured bacterium
QSMTETAYLYAIPYSLYRKYKIRRYGFHGTSHRYVANRVANILGKPIKELKIITAHIGNGASVAAVKYGRSVDTSMGFTPLEGLVMGTRSGDVDPAIVPFLQEQEGFTAGEVNNLLNKESGMFGLTDHLFVDMRDIEERAAKKDPLCMRAHNIYEYRLAKYIGAYAAAMNGVDAIA

SEQ ID NO: 32823 - protein, 314 aa, Solanum ochranthum
KINFNKVPLYYRNVSGGSRLVSIRAQVTTEAPAKVEKISKKQDEGVIVNKFRPKEPYVGRCLLNTKITGDDAPGETWHMVFSTEGEVPYREGQSIGVIADGVDANGKPHKLRLYSIASSALGDFGDSKTVSLCVKRLVYTNDKGEEVKGVCSNFLCDLKPGAEVKITGPVGKEMLMPKDPNATVIMLATGTGIAPFRSFLWKMFFEKHEDYKFNGTAWLFLGVPTSSSLLYKEEFEKMKEKAPENFRLDFAVSREQTNEKGEKMYIQTRMAQYAEELWTLLQKDNTFIYMCGLKGMEQGIDEIMSSLAERDGIV

SEQ ID NO: 32824 - protein, 314 aa, Solanum pimpinellifolium
KINFNKVPLYYRNVSGASRLVSIRAQVTTEAPAKVEKISKKQEEGVIVNKFRPKEPYVGRCLLNTKITGDDAPGETWHMVFSTEGEVPYREGQSIGVIADGVDANGKPHKLRLYSIASSALGDFGDSKTVSLCVKRLVYTNDKGEEVKGVCSNFLCDLKPGAEVKITGPVGKEMLMPKDPNATVIMLATGTGIAPFRSFLWKMFFEKHEDYKFNGTAWLFLGVPTSSSLLYKEEFEKMKEKAPENFRLDFAVSREQTNEKGEKMYIQTRMAQYAEELWTLLQKDNTFIYMCGLKGMEQGIDEIMSSLAERDGIV

SEQ ID NO: 32825 - protein, 202 aa, Lolium perenne
MAASLGLNPESLFSSAYAYSSSSPFLANHYAPPAGDGDICAQSFNLHDDHQQHYPRFDDQFENSPPTAPPPITFTGAGEDEHRSSEKTMEERMSAGRIGFRTRSEAVEILDDGFKWRKYGKKAVKNSANPRNYYRCSSEGCGVKKRVQRDQEDPRYVVTTYDGVHNHATPGAAVAEYYCYSPARGSSGSPPAAYSAAGPLYF

SEQ ID NO: 32826 - protein, 209 aa, Elaeis guineensis
  misc_feature (136)..(136): Xaa can be any naturally occurring amino acid
  misc_feature (190)..(190): Xaa can be any naturally occurring amino acid
  unsure (1)..(209): unsure at all Xaa locations
MVRGKTQVRRIENATSRQVTFSKRRNGLLKKAFELSVLCDAEVALIVFSPRGKLYEFSSSSSSMEKTIDRYIMHAKDVNINKKSREHNAQQLKSDAASLMKKIERLEASKRKLLGENLESCAIEELHDLELQLEQXLSSIRNRKYQMLEEQICRLKEKEKILTASIQEKLNAEPRLQLCAPAVSDDYDSXNTDVETELVIGRPGTCKVK

SEQ ID NO: 32827 - protein, 721 aa, Aphanothece halophytica
MGKVIGIDLGTTNSCFAVLEGGKPLVIENVEGGRTTPSIVAFTKEKERLVGQLAKRQAVTNAENTIYSIKRFIGRRWEDTEQERNRVSYHCVPGRDKTVDVKCWGKQYTPQELSAMILQTLKAGAEAYLNETVTEAVITVPAYFTDAQRQATKDAGTIAGLNVMRIINEPTAAALAFGLDKQEQREQVLVYDLGGGTLDVSILQLGDGVFEVKATAGNNHLGGDDFDNVIVEWMLSEFQAQEGINLNEDKMAMQRLREAAERAKIELSTRPTTSINLPFITAFSKGGGEVGPKHLKLNLSRAKFNELSRPLVEKTIDPLKQAIEDSGLSVDQIDRILLVGGSTRIPEVQEALKKFFNGKEPDRSINPDEAVALGAAIQGGVLGQEQEVEDLLLLVVIPLSLGIETLGEVFTKVIERNTTIPTSKSQVFSTASDGQTSVEIHVLQGERAMANDNKTLGKFLLTGIPAAPRGVPQIEVSFDIDVNGILKVSAEDKGTGREQGIVIKETGGLSQQEIERMQQEAEQYADEDRKRMQRIELSNQADSLFYSHEATLKDNQGLIPQKVKATANKKKEELMAILEDPNVELGVIQTRLEDYRQAVLSMGSEVYSQGSSKSSARDYETVGEEEMTRETGNSQESNAAFSTQPEGTVNNDNLELEAVFSTYNDHTQGSDVATSSHDEIDLGDASDNSQTNFDLDDEDFNPFEDFDEEEEASTDDYEAVE

SEQ ID NO: 32828 - protein, 655 aa, Chlamydia muridarum
MSEKRKSNKIIGIDLGTTNSCVSVMEGGQPKVIASSEGTRTTPSIVAFKGSETLVGIPAKRQAVTNPEKTLASTKRFIGRKFSEVESEIKTVPYKVAPNSKGDAVFEVENKLYTPEEIGAQILMKMKETAEAYLGETVTEAVITVPAYFNDSQRASTKDAGRIAGLDVKRIIPEPTAAALAYGIDKEGDKKIAVFDLGGGTFDISILEIGDGVFEVLSTNGDTHLGGDDFDEVIINWMLGEFKKQEGIDLSKDNMALQRLKDAAEKAKIELSGVSSTEINQPFITIDANGPKHLALTLTRAQFEHLASSLIERTKQPCAQALKDAKLSASDIDDVLLVGGMSRMPAVQAVVKEIFGKEPNKGVNPDEVVAIGAAIQGGVLGGEVKDVLLLDVIPLSLGIETLGGVMTPLVERNTTIPTQKKQIFSTAADNQPAVTIVVLQGERPMAKDNKEIGRFDLTDIPPAPRGHPQIEVTFDIDANGILHVSAKDAASGREQKIRIEASSGLKEEEIQQMIRDAELNKEEDKKRREASDIKNEADGMIFRAEKAIKDYQDKIPADLVKEIEEQIEKVRQAVKEDASTTAIKAASDELSARMQKIGEAMQAQSASAANAQGGPNINSEDLKKHSFSTRPPAGDNSSSTDNIEDADVEIVDKPE

SEQ ID NO: 32829 - protein, 157 aa, Candida albicans
MAEEDTFETADAGAALTFPMQCSALRKNGHVVIKNRPCKIVDMSTSKTGKHGHAKVHLVAIDIFTGKKLEDLSPSTHNMEVPNVSRQEFQLLDIDDGYLSLMTADGDTKDDVKVPEGELGDKLQSEFDEGKDLIVTIISAMGEEAAISYKEAPKGSA

SEQ ID NO: 32830 - protein, 568 aa, Aspergillus terreus
MANSPHGGVLKDLLAGDAPRHDELAAEAETLPAIVLSERQLCDLELIMNGGFSPLEGFMTQKDFDGVCENCRLADGHLFSMPITLDASQQVISDSNLKPGSRVTLRDFRDDRNLAILTIEEKEAKLVFGGDPEHPAIKYFNTKVEDFYIGGKIEAVNKLNHYDYVALRYSPAELRVHFDKLGWTRVVAFQTRNPMHRAHRELTVRAARARQANVLIHPVVGLTKPGDIDHFTRVRAYQALLPRYPNGMAVLGLLPLAMRMGGPREAIWHAIIRKNHGATHFIVGRDHAGPGKNSKGEEFYGPYDAQHAVEKYREELGIEVVEFQQVTYLPDTDEYKPKDEVPAGIKTLDISGTELRNRLRTGAHIPEWFSYPEVVKILLRESSPPRATQGFTIFLTGYMNSGKDAIARALQVTLNQQGGRSVTLLLGDTVRHELSSELGFSAEDRHTNVQRIAFVAGELTRAGAAVIAAPIAPYERSRKAAREAVSGLGGSFFLVHVNTPLEYCEKTDKRGIYAKARRGEIKGFTGVDDPYEAPENADLVVDVSKQSVRSIVHEIILMLESEGYFDRL

SEQ ID NO: 32831 - protein, 456 aa, Archaeoglobus fulgidus
MPLIKTPPPHGGKLVERVVKKRDIAEKMIAGCPTYELKPTTLPDGTPIRHVYREIMSVCYGFFSPVEGSMVQNELERVLNERRLLSEWIFPYPILFDISEEDYKALDVKEGDRLLLMLKGQPFATLDIEEVYKIDPVDVATRTFGTPEKNPEVVREPFDDKHPGYVIYKMHNPIILAGKYTIVNEPKFKEPYDRFWFPPSKCREVIKNEKKWRTVIAHQTRNVPHVGHEMLMKCAAYTGDIEPCHGILVNAIIGAKRRGDYPDEAILEGHEAVNKYGYIKPERHMVTFTLWDMRYGNPIESLLHGVIRQNMGCTHHMFGRDHAAVGEYYDMYATQILWSQGIPSFGFEAPPNEVDYGLKIIPQNMAEFWYCPICQEIAYSENCGHTDAKQKFSGSFLRGMVAEGVFPPRVVMRPEVYKQIVKWWKVYNYPFVNRKYLELKNKELEIDLPAMEVPKA

SEQ ID NO: 32832 - protein, 437 aa, Sulfur-oxidizing endosymbiont of Riftia pachyptila
MIKPVGSDELKPLFVYDPEEHHKLSHEAESLPSVVISSQGPRVSSMMGAGYFSPAGFMNVADAMGAAEKMTLSDGSSSCSVLCLLENTDAIGDAKRIALRDPNVEGNPVLAVMDIEAIEEVSDEQMAVMTDKVYRTTDMDHIGVKTFNSQGRVAVSGPIQVLNFSYFQADFPDTFRTAVEIRNEIKEHGWSKVVAFQTRNPMHRAHEELCRMPMESLDADGVVVHMLLGKLKKGDIPAPVRDAAIRTMAEVYFPPNTVMVTGYGFDMLYAGPREAVLHAYFRQNMGATHFIIGREPPAWVTTTVPSTPRPSSMTKCQRAPWRSRSSCRPHGLLQEAEQDCDDARRAGSHQGRLRTALRHQGREMLGQGIAPPPEFSRPEVAKILMDLLPVHQQLILIWFSGKTRPGVGRWRVFLCAAGALWPEAVAVANMEKRSSTG

SEQ ID NO: 32833 - protein, 179 aa, uncultured cyanobacterium
PAERVYLLKRGAVRLSRVYESGDEITVALLREDSIFGVLSLLTGQRSDRFYHAIAFTRVDLISAPATSARQAIEKDARVGLLLLQGLSSRILQTETMIETLTHRDMSSRLVSFLLVSCRDFGMPGTRGITIDLKLSHQAIAEAIGSTRVTITRLLGDLRNAGLVEIDRKRITVFDPIAL

SEQ ID NO: 32834 - protein, 179 aa, uncultured cyanobacterium
PAERVYLLKRGAVRLSRVYESGDEITVALLRENSIFGVLSLLTGQRSDRFYHAIAFTRVDLISAPATSVRQAIEKDARVGLLLLQGLSSRILQTETMIETLTHRDMSSRLVSFLLVLCRDFGMPGTRGITIDLKLSHQAIAEAIGSTRVTITRLLGDLRNAGLVEIDRKRITVFDPIAL

SEQ ID NO: 32835 - protein, 179 aa, uncultured cyanobacterium
PAERVYLLKRGAVRLSRVYESGDEITVALLRENSIFGVLSLLTGQRSDRFYHAIAFTRVDLISAPATSVRQAIEKDARVGLLLLQGLSSRILQTETMIETLTHRDMSSRLVSFLLVLCRDFGMPGTRGITIDLKLSHQAIAEATGSTRVTITRLLGDLRNAGLVEIDRKRIAVFDPIAL

SEQ ID NO: 32836 - protein, 179 aa, uncultured cyanobacterium
PAERVYLLKRCAVRLSRVYESGDEITVALLRENSIFGVLSLLTGQRSDRFYHAVAFTRVDLISAPATSVRQAIEKDARVGLLLLQGLSSRILQTETMIETLTHRDMSSRLVSFLLVLCRDFGIPGTRGITIDLKLPHQAIAEAIGSTRVTITRLLGDLRNAGLVEIDRKRITVFDPIAL

SEQ ID NO: 32837 - protein, 179 aa, uncultured cyanobacterium
PAERVYLLKRGAVRLSRVYESGDEITVALLRENSIFGVLSLLTGQRSDCFYHAIAFTRVDLISAPASSVRQAIEKDARVGLLLLQGLFFRILQTETMIETLTHRDMSSRLVSFLLVLCRDFGMPGTRGITIDLKLSHQAIAEAIGSTRVTITRLLGDLRNAGLVEIDRKRITVFDPIAL

SEQ ID NO: 32838 - protein, 179 aa, uncultured cyanobacterium
PAERVYLLKRGAVRLSRVYESGDEITVALLRENSIFGVLSLLTGQRSDRFYHAIAFTRVDLISAPATSVRQAIEKDARVGLLLLQGLSSRILQTETMIETLTHRDMSSRLVSFLLVLCRDFGMPGTRGITIDLKLSHQAIAEAIGSTRVTITRLLGDLRDAGLVEIDRKRITVFDPIAL

SEQ ID NO: 32839 - protein, 179 aa, uncultured cyanobacterium
PAERVYLLKRGAVRLSRVYESGDEITVALLRENSIFGVLSLLTGQRSDRFYHAIAFTRVDLISAPATSVRQAIEKDARVGLLLLQGLSSRILQTETMIETLTHRDMSSRLVSFLLVLCRDFGMPGTRGITIDLKLSHQVIAEAIGSTRVTITRLLGDLRNAGLVEIDRKRITVFDPIAL

SEQ ID NO: 32840 - protein, 179 aa, uncultured cyanobacterium
PAERVYLLKRGAVRLSRVYESGDEITVALLRETSIFGVLSLLTGQRSDRFYHAVAFTRVDLISAPATSVRQAIEKDARVGLLLLQGLSSRILQTETMIETLTHRDMSSRLVSFLLVLCRDFGIPGTRGITIDLKLSHQAIAEAIGSTRVTITRLLGDLRNAGLVEIDRKRITVFDPIAL

SEQ ID NO: 32841 - protein, 179 aa, Prochlorococcus marinus subsp. pastoris str. CCMP1986
PAERVYLIRRGAVRLSRVYESGEEITVALLRENSLFGVLSLLTGHRSDRFYHAIAFTRVEMITAPANSVLRAIEADASVGLLLLQGLSSRILQTETMIETLTHRDMSSRLVSFLMVLCRDFGVASEKGITIDLRLSHQAIAEAIGSTRVTITRLLGDLKDSGLLTIERKKITVFDPIAL

SEQ ID NO: 32842 - protein, 67 aa, Streptococcus pyogenes serotype M6
MAQGTVKWFNAEKGFGFISTENGQDVFAHFSAIQTSGFKTLEEGQKVAFDVEEGQRGPQAVNITKLA

SEQ ID NO: 32843 - protein, 780 aa, Sulfolobus acidocaldarius
MRINILRVEYHSKTAHSILLQLDLFKKVKVICHMSQSIKFRVTEARQRDVGKKVARISETSMRKLNVEAGDYIEIIGQDGNSALAQVMPAYDISDDEIRIDGYIRKSIKVGIGDDVTVRKTNVSPASKVVLAPTQPIRFDNSFVEYVKDTLMDKPLAKGETLPIPIYTGTLELTVVNTQPSNYVYVTGSTNIEIREEPVKESSLAYPKVSWEDIGDLEEAKQKIREIVEWPMRHPELFQRLGIDPPKGILLYGPPGTGKTLLARALANEIGAYFITVNGPEIMSKFYGESEQRIREIFKEAEENAPSIIFIDEIDAIAPKREDVTGEVEKRVVAQLLTLMDGIKGRGRVIVIGATNRPDAIDPALRRPGRFDREIEIRPPDTKGRKDILQVHTRNMPITDDVDLDKLAEMTYGYTGADLAALAKEAAIYALRRFVDEKKLNLDQPTIPAEIIKELKVSMNDFLNALKSIQPSLLREVYVEVPKVNWNDIGGLDNVKQQLREAVEWPLRFPELFTKSGVTPPKGILLFGPPGTGKTMLAKAVATESGANFIAVRGPEILSKWVGESEKAIREIFRKARQAAPTVIFFDEIDSIAPIRGLSTDSGVTERIVNQLLAEMDGIVPLNKVVIIAATNRPDILDPALLRPGRFDRLIYVPPPDKTARFEILKVHTKNVPLAEDVSLEDIAEKAEGYTGADLEALVREATINAMRSIYSMCDKQSRDECKGNMECYQKHIKECMNKTSFKVSKEDFEKALNVVKASLTQADIQRYERFSKELKRAIA

SEQ ID NO: 32844 - protein, 986 aa, Neurospora crassa
MFGFHGQELNIRCAGVDAKDGWTFAAAKNHIKAASPVSASGSSIHEVVVWDPVPFRKIYLEHERRLAESHGQEALKHAIAAAEIYMRAAEKAANPKDRNRLQRKCSDLIALGERLKANAKSAATSARSPVPESTRTLTIAEKTLLLKSSKLHGNIFPPWEKTPASDEFAASKAADGCFTDHSPFTLSPEQQDIFAGWKRPHEIFMDVPERGVDVFMTATESIDLGQDLATDCSVVASLCAAVRQFGPRTGSLLSSLMYPYDDDVKRPAVSQNGKYIFRMYFNGCWRKVLIDDRLPTSSSERTLYVVDRRNPYLIWPALIEKAYLKIRGGYDFPGSNSGTDLHALTGWIPEQIFLQTDDIELNETWSRIKTAYEQGNALVTLGTGKFSREEERTLGLVREHDYAVLDLRNDGNNRLFLVKNPWRDSLVWTGVGSTATSSTDRSGSPEESMSNTFWMTFEDVLQHFDSLYVNWSPSLFRFRQDHHFTWTIPPKAEELVFTQNPQYSILSHTGSPVWILLNRHWQDSELDILRERKQEHDFHQPLKSLGYMSLSLFASHPPGTRIPLSEGSHHALHQGPFVDSPNTLLRYSPTPGVAQTLVIAQSDLPLPSYSFTLSFFSNSPLTISPASDPLPYNETITGAWTRRTAGGSTVYPSYVTNPQYALTLTRPSPLSLVLSTERADNLPVHIAVLYSNGGQRVTAVVGRDLICSSAEYQRGCTFASTLPSSNTSNVTSSVASNNHGHTSSSLIDPGTYTIVLSTYEPGQTGRYSLRVSAACPFTIEPILSDAAGRLRTPAPSPATFRQGEGRVRARVDVARLTRASVLARSVKTGSTTQKTAMVRVALELGTIEGRKRVLASTASGGGGELAASLSNLSLSERLGGIGGIGGGHIHGGQGTTEGDGYSAKGEFADASLGLRTREVDLDPDVIRVYGGLWLVVEQIGGGGQGHVTEGSDDDGGGGGGGGGGVHVEISSDGVVSIGEWEVADED

SEQ ID NO: 32845 - protein, 113 aa, Brassica rapa
LVDKLTADNRVYHKACFRCHHCKGTLKLSNYNSFEGVLYCRPHFDQNFKRTGSLEKSFEGTPKIGKPDRPLEGERPAGTKVSNMFGGTREKCVGCDKTVYPIEKVSVNGTLYP

SEQ ID NO: 32846 - protein, 161 aa, Triticum aestivum
MSDTDEHHFESKADSGASKTYPQQAGAIRKGGHIVIKARPCKVVEVSTSKTGKHGHAKCHFVAIDIFNGKKLEDIVPSSHNCDVPHVDRQDYQLIDITDDGYVSLLTESGNPKDDLKLPTDDVLLGQIKTGFADGKDLILSVMSAMGEEQICAVKEIGGGK

SEQ ID NO: 32847 - protein, 161 aa, Triticum aestivum
MSDTDERHFESKADSGASKTYPQQAGAIRKGGHIVIKARPCKVVEVSTSKTGKHGHAKCHFVAIDIFNGKKLEDIVPSSHNCDVPHVDRQDYQLIDITDDGYVSLLTESGNTKDDLKLPTDDVLLGQIKTGFADGKDLILSVMSAMGEEQICAVKEIGGGK

SEQ ID NO: 32848 - protein, 668 aa, Isatis tinctoria
MARSFGANGTVVLAIIFFGCLFALCTAKEEATKLGTVIGIDLGTTYSCVGVYKNGHVEIIANDQGNRITPSWVGFTDSERLIGEAAKNQAAVNPERTIFDVKRLIGRKFEDKEVQKDRKLVPYQIVNKDGKPYIQVKIKDGETKVFSPEEISAMILTKMKETAEAYLGKKIKDAVVTVPAYFNDAQRQATKDAGVIAGLNVARIINEPTAAAIAYGLDKKGGEKNILVFDLGGGTFDVSVLTIDNGVFEVLSTNGDTHLGGEDFDHRIMEYFIKLIKKKHQKDISKDNKALGKLRRECERAKRALSSQHQVRVEIESLFDGVDFSEPLTRARFEELNNDLFRKTMGPVKKAMDDAGLQKSQIDEIVLVGGSTRIPKVQQLLKDFFEGKEPNKGVNPDEAVAYGAAVQGGILSGEGGDETKDILLLDVAPLTLGIETVGGVMTKLIPRNTVIPTKKSQVFTTYQDQQTTVSIQVFEGERSLTKDCRLLGKFDLNGIPPAPRGTPQIEVTFEVDANGILNVKAEDKASGKSEKITITNEKGRLSQEEIDRMVKEAEEFAEEDKKVKERIDARNSLETYVYNMKNQVSDKDKLADKLEADEKEKIEAATKEALEWLDENQNSEKEDYEEKLKEVEAVCNPIITAVYQRSGGAPGAGGESAPEEEDESHDEL

SEQ ID NO: 32849 - protein, 363 aa, Isatis tinctoria
MGSTVDPPTPVQITDEETSLFAMKLASSSVLPMALQSALELDLLEIMAKNASQMSPAEIGSHLPTKNPEAPVMLDRILRLLSAYSILTCSIRKVPGGDTIERLYGLGPVCKYLTKNVDGVSIAALCLMNQDKVFIESWYHLKDAILVGGSAFNKAYGMSVLEYQRTDTRFNKVVNNGMSNHSTIAMKKILETYKGFDGLISVVDVGGGNGATLKMIVSKYPNLKGINFDLPHVIKDAPSYPGIEHVGGDMFVSVPKGDAMIMKWICHARSDKQCLKFLKNCYDALPENGKVIVAECILPENLDSSLLTKQALHVDCIMLAHSGGGKERTAKELEALAKGSGFHGIKVVCNAFGIHFIEMLKKF

SEQ ID NO: 32850 - protein, 223 aa, Dendrobium crumenatum
MGRGKIEIKRIENTTNRQVTFCKRRNGLLKKAYELSVLCDAEVALIVFSSRGRLYEYSNSSTNSTIERYKKAITNSSNSVVEVNSQQYYQQEAAKLRHQIQILHNTNRHPMGEGLTSLSIKELKQLESRLERGITRIRSKKHEMLFAEIEFMQKREEDLQNENMYLRAKITENERQTNIDTTASALDTLSTFDSRNYYPVNMLEAAAHYHNQDQTALHLGYDN

SEQ ID NO: 32851 - protein, 456 aa, Thiobacillus denitrificans ATCC 25259
MAASSASKSKRRARPPISTFSRSAASRARSRSSTRTLPAPPINPATPMSDIKKVVLAYSGGLDTSVILKWLQDTYQCEVVTFTADLGQGEELEPARQKALQFGIKPEQIYIDDLREEFVRDFVFPMFRANTVYEGEYLLGTSIARPLIAKRLIEIVNATGADAICHGATGKGNDQVRFELGAYALKPDVKVIAPWREWDLLSREKLLAYAESHGIPIDMKHRQGGSPYSMDANLLHISYEGRHLEDPSAEAEEDMWRWTVSPEKAPDAAEYIELTYAKGDVVAIDGQQMPAHEVLAKLNELGGKHGIGRLDLVENRYVGMKSRGCYETPGGTILLKAHRAIESITLDREVAHLKDDLMPRYASLIYNGYWWAPERRALQVLIDHTQAHVNGTVRLKLYKGNVIVVGRDSKNDSLFDSTIATFEDDAGAYDQKDAGGFIKLNALRMRIAAKLDARRK

SEQ ID NO: 32852 - protein, 1117 aa, Adiantum capillus-veneris
MSSTRHSYSSGGSGKSKHGRRIAQTSANAKLYAAYEESSESGSFDYSQSVSAGKEGISSQLVTAYLQRMQRGGLVQQFGCLIAVEEETFRVLHMCEAPEMLDVATQAVPTMGQYSRLCIGADVRTLLSPASASALDRVIGVVDVSMFNPITVQSRSSGKPFYAILHRNDVGLVIDLEPIRPDDASITGGALQSHKLAAKAIARLQSLPGGDIGLLCDSVVEEVHELTGFDRVMAYKFHEDEHGEVVAEIRRTDLEPYIGLHYPATDIPQAARFLFMKNRVRMICDCRLPPVKLIQDKTLSQPMSLTGSTLRAPHGCHTQYMANMNSISSLVMAVIVNDSDDDSAGHSSQGIKLWGLVVCHHTSPRYVPFPVRSACEFLMQVFSLQLNMEVGMAAQVREKHILRTQTLLCDMLLRDAPIGIVSQSPNIMDLVTCDGAALYYGKKCWLLGTTPTEAQIVDIAAWLLDCHKDSTGLSTDSLAKTGYPEASCLGDAVCGLAAAKITATDFLFWFRSHTAKEVRWGGARHDPEERDDGRRMHPRSSFKAFLEVVKQQSLPWEDVEMDAIHSLQLILRGSFQDIDDSNTKTMIHARLNDLKLQGLDELSTVASEMVRLIETATAPILAVDGQGLINGWNGKVAELTGLSFETAMGKSLAKELVHEESKTIVERVLHLALEGEEEQDIEIHLRTYDQHKQKGVVILIVNTCCSRDVSNNVVGVCFVGQDVTGQKLVLDRFIRIQGDYKAIVQSLNPLIPPIFGADEYGFCSEWNAAMEKLSNWRREEVLGKMLVGEIFGLQMVCCRLQGQDVVTKLMIVLNDAVNGQESEKFPLVFYDRNGRRVEALLIASKRTDADGRITGVFCFLHTASPELLQALIIKRAKEKVDKELSYVKEELKKPLEGLAFTRTVLEGTNLTIEQRQLIKTNAWCERQLRKILEDDLNNIEEGYMDLEMSEFFMGSVIDAVISQGMAASRGKGVQILTEIPNDVKLMCLFGDQARLQQVLADLLFCAINHATTTNEDEKDWVTIKVSRTKTRLDDGVHLMHFESRISHSGQGISEALVEEMTNKSQKWTPEGLAISISCTLIRLMNGDVKYTTDAGNKCFLVTIQFPLAHRDDATSVR

SEQ ID NO: 32853 - protein, 275 aa, Arabidopsis thaliana
VQNLIERCLQLYMNQKEVVDTLLEQAKIEPGFTELVWQKLEEENREFFKAYYLRLMVKHQIMEYNELLEQQINHMRQMHPTAGASVRNRNGSHVPPMNQQQLLYERKEPDQSSPNLSSPYLNGGSAINTNIPSYVDFSSHSRRVDPSPNSLSLQATNMPLMQGMIKSETAYQNCAPYMYGGEAQSTVGDVTIASFSNDSSNQSLNDPLVDPDAPTFGSLGQIPQNFSLSDLTADFSQSSDILESYEGSPFLLADAENFLDSSERVEHQGEHLKLC

SEQ ID NO: 32854 - protein, 918 aa, Enterobacter sakazakii
MAQSRNQAAVLFGNYVKRKHKVAISRKNLFSKLGDTLFRSIESATTLCKLRGNPYVELVHWINQLWHQEDNDLKHVVRYFNVDCESLERELARSLNHLPDGATAVADFSYLIELAIERAWMYTSLEHSESKIRSGHLLIALLTSVELRRALLAIAAPLEKIVLEQFNRDFNYITRNSPEVKESESTVFLSSQNAMPGEASGAIKLQGSGSLAQYATDLTALAREGKIDPVLGRDREISTMIDILLRRRQNNPLLTGDAGVGKTAVVEGLALAISAGEVPPSLAEVRLMSLDIVALSAGASMKGEFEARLKAVLEEAASSEQPVILFIDEVHNLVGAGNTAGTGDAANLLKPALARGQLRTIGATTWSEFKRHIEKDPALTRRFQMLQVEEPDEDNATEMLRGQVPVLEAHHNVWVLEEALRAAVKLSHRYIPARQLPDKAISLLDTACARVAVGQYAPPQMLQDLKYQTESAKRQLSLAVKASTLGKGNEASVNALKRVITQKIKEADSFESRWQQEKNIVSEINVLRATLQNHCQQENVDDEQQAALKKALLQAESHLNRVRGEQAMIHTEVSANVVAAIVSEWTGVPIGQMLQDEMNIVRELPLHLAERVTGQPFALKQISERILMARAGLADPGRPTGVFMLTGPSGTGKTETALAIAEKMYGGEHNLITINMSEYQEAHTVSALKGSPPGYIGYGEGGVLTEAVRRKPYSVILLDEIEKAHPDVHELFFQVFDKGRMEDGEGRLIDFRNTIILLTSNVGSENLISLSRDENTLPEEKMLAELLHTELLKFFPAAFLGRLTVIPYLPLRREALGFIINAQLKRVAKRLYENHKVTLEYSDEVINYIIDQCHVSDTGARVLIRYIEQNILPQIGGILMNNAQKAKLSGVTISTGTECLLVAPYCEDDIAEKSTTVQ

SEQ ID NO: 32855 - protein, 386 aa, Enterobacter sakazakii
MSQTPLTPESKLPALGTTIFTRMSALAQQHQAINLSQGFPDFDGPRYLQERLAHHVAAGANQYAPMTGVQALREAIADKTEALYGHRPDANSDITVTAGATEALYAAITALVRPGDEVICFDPSYDSYAPAVALSGGVLKRIALTPPHFRVDWAQFAALLSERTRLVILNTPHNPSATVWRNADFAALWQAIAEREIYVLSDEVYEHICFAKEGHASVLAHPQLRERAIAVSSFGKTYHMTGWKVGYCVAPAALSAEVRKVHQYLTFSVNTPAQLALADMLRAEPAHYLDLPDFYRARRDRFIQALGDSRFKILPCEGTYFLLADYSAISTLDDVSFCEWLTTEAGVAAIPLSVFCDAPFPHKLIRLCFAKQEATLLAAAERLARL

SEQ ID NO: 32856 - protein, 263 aa, Physcomitrella patens
MHVRNDSSGSSLVAMLASCSPAAAVQAQPGGGGMEDTVSCGQKRPYYSTIEASGEDPGEEDVGDDCIQQSKKRRLTFDQVRSHEKNFEIENKLEPERKMQLANELGLQPRQVAVWFQNRRARWKTKQLERDYEVLTLDYNRLKSEFEAVLQEKQELQDEMECLTEKIQTAIPNSADPILEKRKRIISMSQPSSLKTFEGPVKSERIAAEANGRNDALTPCKEEGSKEEGSKETSSDSISQVKYLTRTAFVLWIAARFSHCPIV

SEQ ID NO: 32857 - protein, 345 aa, Physcomitrella patens
MAITSMGGYPCQSAMQQLIRNESSSDSLAAILTPCSPHVGLQAPPHVGGSLEDAVLVASEGSRQKRPFFATYDAPTVEDGSVEDDEGADDSQGASQLEKKRRLTFDQVRSLERNFEMENKLEPERKMQLAKELGLRPRQVAVWFQNRRARWKTKQLERDYEALAADYKSLKHDYDLVLAEKNNLKAEVQRLSGKAPTSPCADGNQIVAGESAQTPEVDVETSELVARQHTSRSTPTVDVSLACVKDKDFETSGCTDGNSSDVLDADSPRTTDSSSLSAMSDHDQLIYSHEIPPPESFMGLSGMLHDVTVKLEEGSGHGFHDDNSSNYFLLHLEDQAGVLPWWDWP

SEQ ID NO: 32858 - protein, 396 aa, Nicotiana benthamiana
MSCTVAISNLPAFWPVARVPLTKSLLCKSASFSSSSSPNSSKTLTKFPSFTSSSSSSSSPSLQFHILRFQKPLPVPAPAPINLIRNSTECSTSTPNSTSPTVLKRKRPAKLDIPIVSTTFGNFPALPAAAAADFVEVEGDGYYVCCKRGRRGPMEDRFSALVNLQGGSKEGIFGIFDGHGGAKAAKFAAENLNKNIMDEVVTRKDENVMEAVKNGYLKTDSEFLNQEFRGGSCCVTALIRNGDLVVSNAGDCRAVVSRDGIAEALTSDHKPSRKDEKDRIETLGGYVDYCNGVWRIQGYLAVSRGIGDRYLKQWIIAEPETMVLRLNPELEFLVLASDGLWDKVSNQEAVDAARPLCARISKPQLLSASKSLVDLAVSRGSVDDISVMIIQLQQFC

SEQ ID NO: 32859 - protein, 308 aa, Chlamydomonas incerta
MAKEEKNFMVDFLAGGLSAAVSKTAAAPIERVKLLIQNQDEMIKQGRLASPYKGIGECFVRTVREEGFGSLWRGNTANVIRYFPTQALNFAFKDKFKRMFGFNKDKEYWMWFAGNMASGGAAGAVSLSFVYSLDYARTRLANDAKSAKKGGGDRQFNGLVDVYRKTIASDGIAGLYRGFNISCVGIVVYRGLYFGMYDSLKPVVLVGNLANNFLAAFLLGWGITIGAGLASYPIDTIRRRMMMTSGSAVKYNSSFHCFQEIVKNEGMKSLFKGAGANILRAVAGAGVLAGYDQLQVILLGKKYGSGEA

SEQ ID NO: 32860 - protein, 226 aa, Chlamydomonas incerta
MGEQLRQQGTVKWFNATKGFGFITPGGGGEDLFVHQTNINSEGFRSLREGEAVEFEVEAGPDGRSKAVNVTGPAGAAPEGAPRNFRGGGRGRGRARGARGGYAAAYGYPQMAPVYPGYYFFPADPTGRGRGRGGRGGAMPGMQGVMPGVAYPGMPMGGVGMEATGDPSGLQVVVHNLPWSCQWQQLKDHFKEWRVERADVVYDAWGRSRGFGTVRFTTKEDAAMAC

SEQ ID NO: 32861 - protein, 497 aa, Gossypium hirsutum
MTQQAILLSLRFRPRRKLNFPPGPKPWPVIGNLDLIGSLPHRSIHALSQKYGPLMQLKFGSFPVVVASSVEMAKAFLKTHDVIFAGRPKIAAGEYTTYNYSDITWSPYGPYWRQARKMCMTELFSAKRLESYEYIRREEMKLLLKGLYESSGVPIVLKDRLSDLSLNVISRMVFGKKYTEGTGENEIVTPKEFKEMLDELFLLNGVLDIGDSIPWLRFLDLQGNIKRMKALSKKFDKFLEHVLDEHNARRRDVKDYAAKDMVDVLLQLADDPNLDVKLERHGVKAFSQDLIAGGTESSAVTVEWAISEMLKKPEIFAKATGELDRVIGRERWVEERDTVNLPYIDSIAKETMRLHPVAPMLVPRMTREDCQVDGYDILKGTRALVNVWTIGRDPTVWDNPNEFCPERFIDKTIDVKGHDFQLLPFGAGRRMCPGYPLGIKVIQASLANLLHGFTWKLPGNMTKENLDMEEIFGLSTPKKCPLQAVAVPKLPLHLYSH

SEQ ID NO: 32862 - protein, 651 aa, Raphanus sativus
MCKRTLQHPQVETPPPQPFLISLKNTLNEIIFADDPFRKIRNESKTSKKIELGLRHVFPILEWARGYNLEYLKSDVISGITIASLAIPQGISYAQLANLPPILGLYSSFVPPMVYAVMGSSRDLAVGTVAVASLLTAAMLGKEVNAVENPKLYLHLAFTATFFAGLMQTCLGLLRLGFLVEILSHAASIGFMAGAATVVCLQQLKGLLGLSHFTHSTDVISVLGSILSQSHMWRWESGLLGCCFLFFLLTTKYISNKRPKLFWISAMAPLVSVIFGSLFVYFLHAQFHGIQIIGELKKGINPPSITHLVFTSPYVTLALKTGIITGVIALAEGIAVGRSFAMYKNYNIDGNKEMIAFGMMNILGSFSSCYLTTGPFSRSAVNYNAGCKTAVSNVVMAVAAAVTLLFLTPLFYYTSLVVLSSIIIAAMLGVIDYEAVMHLWRLDKFDFFVCLSAFFGVVFGTIEIGLILSVGMSVMRLLLFVGRPEIHVMGNIQNAEIYRNIEQYSQATTLSGLIILHIDGPIYFANSSYLRDRVGRWIDEEDERLRKRDENSLQYIILDMSAVGNIDTSGISTLEEVNKILRRRDLKLVIANPGAELMRKLSKSKFIDTIGKDWIHLTVAEAVSACDLMLHTAKPDSPEKISGGVPEFNNV

SEQ ID NO: 32863 - protein, 588 aa, Thiobacillus denitrificans ATCC 25259
MCGIAGELRFDDRAPDAATMTRMLARLARRGPDAEGQHAAGPLRLGHRRLAIIDLSPRSAQPMVDAATGTALVFNGTIYNYPELRAELIALGHAFHSDGDTEVILRAYLEWGERCVERLHGMFAFAIWHRDELFLARDRLGIKPLYYSENAGSLRFASTPQALLAAGEVDTGLDAVALHHLFTLHAVVPAPRTILNGVRKLAPGTTLTVNLRGELRHRSYWSLHAQRPAETRSEAEWTDAIHDALRRAVQKRIEIADVKVGVLLSGGLDSSLLVALLAELGVSDLMTFSVGFEDHPEERGNEFEYSDPVAAMYGTRHHKYLIPNSEVLRRLPEAVGEMSEPMFAQDAVAFYLLAEQVSRTVKVVQSGQGADEVFGGYFWYPRMAAEAEGSALDRFRRHYFDRDHAEFLELADPRYHGPDYTGELIAARLAEPFADEFIDQVLRTDTTMLITDDPVKRVDNMTMAWGLEARVPFLDHTLVELAATMPPAMKLASEGKHVLKRIARGRVPDAVIDRKKGYFPMPALKYVRGEFLDFMRDILDSQACRQRGLYRRAYVEHLLDAPEQHHTRIQGSKLWHLALLEYWLQTHV

SEQ ID NO: 32864 - protein, 301 aa, Thiobacillus denitrificans ATCC 25259
MSEPKPERSIIVIGAASCAGAPDPGCAAGPDALHHYEVFHDTPLQRVAWDAILRVPRMPPQAALIAVSALNRKLAEKVHGVLDEGNFPLVVGGDHSCAIGTWSGAQRALADRGALGLIWIDAHMDSHTFDTTQSGQLHGMPVASLLGRGHAALRAFGPPLPDLRPGDLCLIGVRSYEAGEAALLHQLGVRVYTMDEVRARGLRAVFDEALARVRARTAGFGVSVDLDALDPEEEPGVGSPVPGGIRCAELAAALARLRGDPDFIAMEIVEYNPYRDRDRATADAAGAFVEAVTPLASKPAR

SEQ ID NO: 32865 - protein, 225 aa, Thiobacillus denitrificans ATCC 25259
MNLDPADIEVLKEGYLLAALSPPEFDQVLAHASVRKLAPNECLFDQGDPCTHFFFVLSGIVKLCRVAPSGEEKVMDLVRPGHYFAEAVMFMGGRYPVYARALDGTRLVALDNRHFLGLLGSNRDLCMRLLSTMSQRIHSLINEIDHLTLHSGAQRVIGYLLEQLPDGDAPGSVRLRVPKHVIASRLGIQPETLSRVLAKLRTGHLIDVHDDMIVLNDVEALRRLS

SEQ ID NO: 32866 - protein, 292 aa, Thiobacillus denitrificans ATCC 25259
MKIGFIGSGIMGRPMAENLLRAGHQLYVYGRRFDRIEPMLVMGALGKGTPAEVAAESDITFTVVSDTTDVEQIILGDRGIVHGARPGHTVIDMSTVSPAATRRIAAALAERGIHMLDAPVSGGETGAREGTLSIMVGGEAPIFEKIRPLFETLGKSIVHVGGHGAGQVVKCCNQIVVGLTFEGVAEAILLARRNGVDPVKMREALLGGFAGSRILEVHGQRMLDSNYKPGFKVKLHHKDMAIVMDNAQETATPLPGAALIAQQMNALMGAGDSELDSSALMRALERLTADSR

SEQ ID NO: 32867 - protein, 738 aa, Thiobacillus denitrificans ATCC 25259
MHKENAPVSDDPLHPHPQRSTVSSFPARPRILVVDDEILILEGMRRLLAARDYDVTTANGGCEALIAIGKQQFDVILLDLGMPDLSGAEVLRFVADRSADTPVIVVSGDSTIDAAIRALRGGAADFVRKPYEPEELLRRVDNTLTRRRLERENNHILQRLQQSEKWHRFLVNSSPDFIYTLDCDGRFTFVNDRVESLLGYTREDLLGQHYSTIIHEEDLARAEHVFNERRAGDRSARNIEIRLKCNPGMRRPRLMNGRCKAVELTATGMYDEDATLFERRFIGSYGVAKDVTERKQAEETVHYQAYHDLLTGLPNRALFRDHLALMLAQAKRSHKTLAVLSLDLDHFKVINDSLGHTIGDELLLAVGARLRQCLREGDTLARLGGDEFAVLLPTLLSRGDVEQICRKIIQVLSRPVYVKGHEIYISVSIGACVAPDDGEMIDSLIRQAEIAMYQAKAQGRSRLQFWEAGMQAPYSERMQIEADLRRALARNEFVLFYQPQVDTVSGEVRGFEALLRWWHPQRGFLSPAEFIPVAEESGVIVPIGDWVLREASAQMAEWRRAGLPQVRLSVNISARQLESPDFVESVMRAVQVHALDGQQIELEITESLLMRDFEANAIKLGRLSASGIRLAIDDFGTGYSSFKYLSRFPIHTLKIDQSFIQELEREENLSIVNAMVAMGRGMNLNVVAEGVETQSQLACLQQMQCHEMQGHYYSVPMSGHDATALLGRHTRGFVEAAG

SEQ ID NO: 32868 - protein, 468 aa, Thiobacillus denitrificans ATCC 25259
MKKLFASFGLILALLAPGLAAAQDAAVPMDGAAAVETAPAAVAPAAAVPAETAATPVPDKGDTTWMMVSTLLVVLMIVPGVALFYGGLVRAKNMLSVLTQVMAIFCLISVLWAVYGYSLAFGDGGGMNWAIGDLSKLFLAGITPDSTAATFSDGVVIPEFTFVAFQLTFAAITVALIVGGLAERVKFSALLVFAVLWFTFSYLPIAHMVWATGGYLFEKGDLDFAGGTVVHINAGVAALVGAIVLGKRIGYGRDAMPPHNLPMTMIGASLLWVGWFGFNAGSNLEATGGAALAFINTILATAAAGLAWMFAEWMVRGKPSLLGVASGVVAGLVAITPAAGLVGPMGGIVLGAVAGVVCLWGVSGLKSALGYDDSLDVFGIHGIGGIIGAIGTGIFVSPTLGGVGVDGYTLAGQVMTQASGVLITIVWSAVVSFVAFKLIDVTLGLRVAEEQEREGLDTASHGERAYSV

SEQ ID NO: 32869 - protein, 639 aa, Thiobacillus denitrificans ATCC 25259
MCGITGIFDTSGVNAISRDLLQRMNETQHHRGPDEGGLHLEPGLGLGHRRLSIIDLSSGQQPLANEDGSVVVVFNGEIYNFQELVPELEALGHVFRTHSDTEVIVHAWEAWGEACVARFRGMFAFVLWDRNQETLFVVRDRFGVKPLYYAFLDTGEFIFGSELKSLMVHPSLGREVDPLAVEDYFAYGYVPEPRTIFKRVHKLPPGFTLTLKRGAPRALPKQYWDMPFAPVAVKDEAGAMDELVERMKESIRLRMIADVPLGAFLSGGVDSSAVVAMMATQSSTPVNTCSIGFDDPAFNEIEYAQQVADRYHTRHHVETVAADDFSLVGKLAQVYDEPYADSSALPTYRVCELARKHVKVALSGDGGDEHFAGYRRYRWFRYEERMRSIIPLGLRRPLFGTLGLLYPKADWAPKMFRAKTTFEALARDTVEGYFHGVSLLSNAQRAQLFSPAFRRELQGYQAVDVLRRHAAVAPTDDPLSLVQYLDMKTYLVGDILTKVDRASMAHALEVREPLLDHELMGWVSGLPVDLKLRGSEGKYLLKKAMEPYLPHDVLYRKKMGFSVPLAAWFRGPLAATIRTVVLGERLAGTGMFNCEFLREVVEAHQSGRRDFSVILWTVLMFDAFLGQVLGLDDTAREAA

SEQ ID NO: 32870 - protein, 316 aa, Thiobacillus denitrificans ATCC 25259
MSIDNLMVFSGNANPRLASDVVRHLNIHLGRATVSRFSDGEVMVEILENVRGKDVFVLQSTCQPTNDTLMEVMVMVDALKRASAARITAAIPYYGYARQDRRTRSARVAITAKVVANMLQGAGVDRLLTMDLHSDQIQGFFDIPVDNIYSSPILLGDIWKRNHPNLMVVSPDVGGVVRARAIAKRLECDLAIIDKRRPKPNVAKVMHIIGDVKDRTCIIMDDMVDTANTLCEAASALKEHGAQKVMAYCTHAVLSGSAAERVTNSALDELVVTDTIPLRDDARACKKIRQLSVAELLAETIRRISNEDSVSSLFIE

SEQ ID NO: 32871 - protein, 328 aa, Thiobacillus denitrificans ATCC 25259
MQVQSLSAEHSLALARQVLEIEADALHTVSTRLDHGFADAVRLILACTGRVVVSGMGKSGHVGSKIAATLASTGTPAFFMHPGEASHGDLGMIAHDDVVLALSNSGESSEIVCIVPLIKRRGAKLVAMTGNPASTLAREADAHLNAKVDKEACPLNLAPTASTTAALALGDALAVALLDARGFSADDFARTHPGGSLGRRLLVHVADVMHGGDALPKVGRDATLKAALFEMTKKGLGMTAVVDADDRVVGLFTDGDLRRTLEHALDIQHAKIADLMTPNPKTIRADELAAAAVEKMETLKINGLLVVDADNRLVGALNMHDLLKAGVV

SEQ ID NO: 32872 - protein, 360 aa, Thiobacillus denitrificans ATCC 25259
MHIGIPKEIKDHEYRVALTPEGARSLVDAGHAVSVESHAGAAVGFGDDAYRAAGATVVPDAAGVWAAELVVKVKEPQPQETQRLRAGQLLFCYLHLAAAPSLARELMTRGVSAIAYETVVGPAGGLPLLQPMSDIAGRLAPQMGALGLHSSHGGNGKLISGLPGVAPAHVLVIGAGVVGMAAVRTAIGLGARVTLIDRLRDKLAQAETLFGARVETRFSSPDAIAECVEQADIVIGAAQIPGRHAPRLISLDLLRRMGAGSVLVDVAIDQGGIAETSRPTTHSDPFFTAEGVVHYCVTNMPGAVARTATEALTHATLPYVEALAAQGLEALAADPGLHAGLHVHAGKIMHAGLALDLNFD

SEQ ID NO: 32873 - protein, 68 aa, Thiobacillus denitrificans ATCC 25259
METGTVKWFNDAKGFGFITPDNGGEDLFAHFSAINANGFKSLQENQRVSFEVTTGPKGKQASNIQVVS

SEQ ID NO: 32874 - protein, 193 aa, Thiobacillus denitrificans ATCC 25259
MTRAVFLDKDGTLVDDVPYNADPTKIRLAAGAGRALAALLAGGFRLFVVSNQPGVGLGYFPLAALQPLSQRIRQLVRADGADLHGFYYCPHAPARGQPACGCRKPAPGLVLQAAAEHGIALENSWFIGDILDDVEAGHRAGCRSILIDNGNETEWLRSPIREPDHVVRNLHDAAAHILSAAQRETGRARALAS

SEQ ID NO: 32875 - protein, 389 aa, Thiobacillus denitrificans ATCC 25259
MTARRPRTATRADAIAPFHVMDILARAQALEAAGRDIIHLEIGEPDFATPGPIVEAGIAALRAGHTRYTGALGLPALRRAIAEFHRTYWGTPVEAERVVVTPGASGALLLVLGLLAGPGDEVLMADPGYPCNRNFAQFCDARAVEIPVDAASGFQLTREAIERHATPATRAVLIANPSNPTGTTIDPEALADIHAWCAARGIALIVDEIYLALTYDGDTHSAARWDDVFVINSFSKCFLMTGWRLGWLVAPAWALAALERLAQNLFLAPPTPAQHAALAGFEPATLAILETHKAELRARRDFLLPALRARGFAIPVIPHGAFYLYADCSALAADSQVLAGLLLEQAGVATTPGVDFGRHDPARYLRIAYTQPKPRLDEALARIDRFLRP

SEQ ID NO: 32876 - protein, 859 aa, Thiobacillus denitrificans ATCC 25259
MRFDKLTTQFQQALSDAQSLAVGGDHAYIEPQHLLLALLNQEGGGAGSILGRAGVQVPALKAALTQALTRLPKVQGQGGEVSISRDLNNLLNLTDKEAMKRNDAYIASELFLLAALDDKGETGRLLKQHGAQKTALEQAIQAVRGGENVQSQEAEGQREALAKYTLDLTQRARDGKLDPVIGRDDEIRRSIQILQRRTKNNPVLIGEPGVGKTAIVEGLAQRIVNDEVPETLKGKKVLVLDLAALLAGAKYRGEFEERLKAVLKELAMDPGRYIVFLDEIHTLVGAGKAEGAIDAGNMLKPALARGELHLIGATTLDEYRKYIEKDAALERRFQKVMVDEPSVESTIAILRGLQERYELHHGVDITDPAIVAAAELSHRYITDRFLPDKAIDLIDEAAARIKMEIDSKPEVMDKLDRRIIQLKIEREAVKKETDEASKKRLGLLEDEIDKLGREYADLEEVWKSEKAQVQGSAHLKEEIDKLRGEMADLQRQGKLDKVAEIQYGKLPQLEAQLKHAEASGEKPVFKLLRTEVGAEEIAEVVSRATGIPVSKMMQGERDKLMHMEDHLHGRVVGQDEAVAVVSDAIRRSRAGLSDPNRPLGSFLFLGPTGVGKTELCKTLAEYLFDSAEHMVRIDMSEFMEKHSVARLIGAPPGYVGYEEGGYLTEAVRRKPYSVILMDEIEKAHPDVFNVLLQVLDDGRLTDGQGRTVDFRNTVIVMTSNLGSQMIQQMSGDDYQVVKLAVLGEVKSYFRPEFINRIDEVVVFHALSESNIASIARIQLKALEARLAAMEMKLDVTDAALAEIAKAGFDPVYGARPLKRAIQSELENALAKEILSGRFAAKDTIRVDAVDGKFSFEKAA

SEQ ID NO: 32877 - protein, 363 aa, Thiobacillus denitrificans ATCC 25259
MGALTRSVLTLNSGSSSLKVSLFRADGTRSNWHYRARSGADDEAFAGLLRDLDGEAPDAVGHRFVHGGEIAEAARLLDDAELARLGQLVPLAPLHLPGNLHGVEWCRAHFDLPQVACFDTAFHHTLPELARRLPIPRELGLRRYGFHGLNYSYVAARLPALLGAAAHGRVVVAHLGSGASLCLLENLRSADTTMGWSPAGGIPMATRSGDLDPGVMLELAGRFDGEALRELVYRRMGLLALSDGESAEMSALLASESAAAAFAVDYFCRQVRAAIGAFAAKSGGIDALVFTGGIGEHAPEVRARVCAPLGFLGFALDAAANEAGREALRAPGSKPVLKIAAGEEDVIRDEVERVLDGAPCPEP

SEQ ID NO: 32878 - protein, 426 aa, Thiobacillus denitrificans ATCC 25259
MFCLEFTHWEIAVTADKKPRLRTIQKSTKLDNVCYDIRGPVMARARQMEEEGQRIIKLNIGNPAPFGFEAPEEIVQDVILNLPNASGYSDSKGLFAARKAIMHETQRKGIAGVTIDDIIVGNGVSELIVMAMQALLNNGDEVLVPAPDYPLWTAAVSLGGGKPRHYLCDEGAGWLPDLDDIRAKITPSTRAIVIINPNNPTGALYPTELLREILEIARQHQLIVYADEIYDKVLFDGVVHTSIASLADDLLIVTFNGLSKNYRACGYRSGWLVVSGDKRHAKDYLEGLNMLASMRLCSNVPGQHAIQTALGGYQSINDLVAPSGRLTRQRDLAHELLTLIPGVSCVKPKAAMYLFPRLDPKLYPIHDDQKFILNLLEEERVLVVQGTGFNWPRPDHLRVVFLPHEEDLTEAIGRMSRFLDRQRAHR

SEQ ID NO: 32879 - protein, 565 aa, Thiobacillus denitrificans ATCC 25259
MSHDNAPAPAANFIRNIIDEQNAEGKWGGRVETRFPPEPNGYLHLGHAKSIFLNFGLARDYGGVCHLRFDDTNPEKEEQEYVDAITESVKWLGFDWGEHLYYASNYFDTMYACAEHLITAGHAYVDSLTAEEMREYRGTLTEKGKDSPYRSRSIEENLDLFRKMRAGEFPDGAHVLRAKIDMASPNINLRDPAIYRIKRAHHHNTGDKWCIYPMYTYAHPIEDAIEHITHSICTLEFEDQRPFYDWLLDKLAIGGFFSRPLPQQIEFARLNLTYVMLSKRKLIQLVEEKHVSGWDDPRMPTLVGARRRGYTPEGLRRFTDQIGVSKSDGWIDYSVFEACQRDVLNDSAPRRVAVLDPVKLVIDNYPEGQSEDCFAPNHPQQPELGKRAIPFSKELWIEREDFEETPPKGYFRLFPGNSVRLRYGYVVKCTGFDRDADGNIAAVHCEYLPDTKSGTPGADSVKVKGNIHWVSAAHAHDAEVRLYDRLFKTAQPGAETGNFLDDLNADSVKVIRAQLEPALKDAAPEASFQFERHGYFVADRVDTQPGAPVFNRTVTLKDSWVKVGS

SEQ ID NO: 32880 - protein, 68 aa, Thiobacillus denitrificans ATCC 25259
MATGTVKWFSDAKGFGFITPDDGGEDVFAHFSAIQTNGFKTLKEGQKVSFEVSQGPKGKQASNIQPQG

SEQ ID NO: 32881 - protein, 103 aa, Thiobacillus denitrificans ATCC 25259
MYAVIKTGGKQYRVSAGDKLKIEKLEAEVGSEITFDQVLMVGDGADIKMGAPLLRGATVSATVLNQARGDKIKIFKMRRRKHYRKSQGHRQYFTEVQIGGITA

SEQ ID NO: 32882 - protein, 350 aa, Thiobacillus denitrificans ATCC 25259
MKFIDEAKITVLAGKGGDGSASFRREKYIPKGGPDGGDGGRGGSVYAVADRNVNTLVEFRYTRIFKAQKGENGRGAQCYGKAGDDLTIRVPVGTVFSDVNSGEVVADLAEDGETVCLAKGGKGGLGNIHFKSSTNRAPRQHTLGEPGEEWELALELKVLADVGLLGMPNAGKSTFIRAVSAARPKVADYPFTTLAPNLGVVRVDSERSFVIADIPGLIEGAAEGAGLGHQFLRHLQRTRLLLHLVDISPRWEAGDPVHEARAIVEELRKYDQALYEKPRWLVLNKLDMVDEGEREAVVAKFVEDYGWNGPVFAISALDGSGCSALTYAVMDYLGMLAPRHEAEDPAPPAS

SEQ ID NO: 32883 - protein, 409 aa, Thiobacillus denitrificans ATCC 25259
MALIVQKYGGTSVANVERIRAVAERVAKFKMLGHQVVVVLSAMSGETNRLIGLAKQIQAEPDPRELDMMVSTGEQVTIALLAMALKDLGLKAKSYTGAQVRILTDDAFTKARILSIDEAKMRRDLDSGHVVVVAGFQGVDEGGNITTLGRGGSDTTGVALAAALKADECQIYTDVDGVYTTDPRIVPEARRLKTVTFEEMLEMASLGSKVLQIRSVEFAGKYKVKLRVLSSFQDEGDGTLITFEENDNMEQAIISGIAFSRDEAKITVVGVPDHPGIAYQILGPVADANVDVDMIVQNVGHANTTDFTFTVHRNDFAKAMSLVKATAATVGAREVTGDDKIAKVSIVGVGMRSHVGIAKKMFETLSKENINLQMISTSEIKISVVVEDKYLELAVRALHQAFELDKATA

SEQ ID NO: 32884 - protein, 460 aa, Thiobacillus denitrificans ATCC 25259
MTTFAELGLAPDILRALDEMGYVSPTPIQAQVIPRALQGGDILGAAQTGTGKTAAFALPLIQRLLPFANTSTSPAKHPIRALILTPTRELAIQVEEAIQAYTKHVPLRSLVVYGGVNINTQIPILKTGVEILVATPGRLLDHVQNKTLMLTQVNTLVLDEADRMLDMGFMPDLRRIVALLPAQRVNMMFSATFPEEIRKLADSILSTPTFIEVARNETAVTVTQVVHPVHHERKRQLLAHLIKSRDLRQVLVFTGTKLGCNRLANELNKAGIHADAIHGDKTQQERIKALDAFKAGTIRVLVATDVAARGIDIEALPFVVNYDLPHNAEDYVHRIGRTGRAGAKGEAISLVSEAETRYLKDIERLIGTPLEPVIVPGFEPGAADVPAFESRPARAPRSSDRGRERAPAKPQPSRDALFDAPYVPREPGQGDAAHAPARPAPTKQVAALFRSPVKRNVPDQ

SEQ ID NO: 32885 - protein, 234 aa, Thiobacillus denitrificans ATCC 25259
MHVFEAEIAAVVAATPQIRVLRLAVADPGFRFLPGQWVDLSVDVDGARHTSGYSITTSPLHPGTIELAVKASARHPLARWVHDEAAPGDRVRVSQGQGPFVYLPEMSDNVVLIGGGVGITPMLSIFRHVRDAGLGTQAHLVYSVSDSREILFRDELEAAVRNHRNLHLSITVTQPDPAWHGLTGRIDPVKLHALDVPDDTLYYLCGPRGMVEDMSTLLHDLGVPMNRIIFEKWW

SEQ ID NO: 32886 - protein, 402 aa, Thiobacillus denitrificans ATCC 25259
MKTIYFDYSATTPVDPRVADKMIPYLTEHFGNPASRSHPFGWEAEAAVEAARGHIAALVGADPKEIVFTSGATESNNLAIKGAGHFYSGTKGKHIITVRTEHKAVLDTVREMERQGFEATYLNVKENGLLDLDEFRAAIRPDTVLASVMAVNNEIGVIQDIDALGKICREKGVVFHVDAAQATGKMPIDLKTLPVDLMSFSAHKTYGPKGIGALYVRRKPRIRLEAQMHGGGHERGMRSGTLATHQIVGMGEAFRIAREEMATENERIRMLRDRLYAGLKDIEEVHLNGDLDRRVPHNLNVSFNFVEGESLIMAIKDLAVSSGSACTSASLEPSYVLRALGRSDELAHSSIRFSIGRFTTEQEVDYAIKLLHEKIGKLRELSPLWEMFKEGIDLNTVQWAAH

SEQ ID NO: 32887 - protein, 327 aa, Thiobacillus denitrificans ATCC 25259
MGREELCLFSLNASRGLGERIAARLGQPLAEHEEREFEDGEHKARPLESVRGRDVYVVQSLHGEPGSSANDKLIRLLFFIATLKDASAARVTAVVPYLAYARKDRRSKPRDPVGSRYVAQLFESLGTDRIVSLDVHNLAAYQNAFRIPVEHLEARPLFVAHFAPAFANDDVVVVSPDVGGAKRAEALRASLSRRIGRPAGMAFIEKYRSGGIVSGEAVVGDVDGKHVLIVDDLVSSGTTLARAAAACRSRGATRVLAVATHGVFGGDAVRTLGDSALDALVVTDSIPTSHLPPPLGERVEILDIAPLFAEAIRRLHEARSLGDLLGD

SEQ ID NO: 32888 - protein, 639 aa, Thiobacillus denitrificans ATCC 25259
MGRIIGIDLGTTNSCVAVMENGSPKVIENAEGARTTPSIVAYAEDGEILVGAPAKRQAVTNPKNTIFAVKRLIGRRFEEKEVQKDIGLMPYKIVKADNGDAWVEVRDKKMAAQQVSAEILRKMKKTAEDYLGEEVTEAVITVPAYFNDSQRQATKDAGRIAGLEVKRIINEPTAAALAFGMDKKEGDRKIAVYDLGGGTFDISIIEIAEMDGEHQFEVLSTNGDTFLGGEDFDQRLIDYIAEEFKKEQGVDLKKDVLALQRLKEAAEKAKIELSSGQQTEVNLPYITADASGPKHLAVKITRAKFESLVEELITRTIEPCKLALKDAGLTTSQIDDVILVGGQTRMPKVMDAVKDFFGKEPRRDVNPDEAVAVGAAIQGGVLQGEVKDVLLLDVTPLSLGIETLGGVMTKLIPKNTTIPTKASQVFSTADDNQSAVTVHVLQGEREMASGNKSLGQFNLSDIPPAPRGMPQIEVTFDIDANGILHVSAKDKATGKENKIRIQASSGLSEEEIQRMVKDAEANAAEDHKAFELAGARNAADAMIHSVKKSLAEYGDKVSADEKATIESALKEAEDAVREGDKETIETKTNALATASHKLAEQMYQAEQAKAQPAGETGNQSTGPGNDDVVDAEFEEVKDK

SEQ ID NO: 32889 - protein, 398 aa, Thiobacillus denitrificans ATCC 25259
MELSRRVQAIKPSPTLAVTARAAALKATGRDIIGLGAGEPDFDTPQHIKDAAIKAIDGGFTKYTAVDGTPSLKAAIIAKFKRDNGLDYTPKQILVSCGGKQSFFNLVQAVIDPDDEVIIPAPYWVSYPDIVILADGKPVIVEAGIEQGFKITPAQLEAAITPKTRLFVINSPSNPTGAVYSKDELAALGDVLRRHPRVLIASDDMYEHIRLDGAPFVNILNACPDLYDRTLVLNGVSKAYSMTGWRIGYAAGPEAILRAMTNVQSQSTSNPTSISQVAAEAALNGDQGCITPMLDAFKARHRFVVDALNAIPGFKCVDSGGAFYAFPDVRPAIQALLARDVIEQGTDIAFSEYLLESADVAVVPGSAFGAEGYIRLSFATSQANLDKALKRIAQAIAG

SEQ ID NO: 32890 - protein, 281 aa, Thiobacillus denitrificans ATCC 25259
MAYLVPSEFVTKMVDAGEAKVFMATRDTLIRAYMAGAILALAAVFAVSMTVQTGSPLVGALLFPVGFVMLYLMGFDLLTGVFVLTPLALIDKRPGVTVKGILRNWGLVFAGNFAGALTVAVMMAIVFTYGFSVEPNDVGQKIAGIGEARTLGYKDYGAAGMLTLFIRGMLCNWMVSMGVVGAMISTTVTGKVISMWMPIMLFFAMAFEHSVVNMFLFPSGLILGGNFSVMDYLIWNEIPTVLGNLVGGLAFTGLTLYTTHLRTAPKRVSYPVKADAERAYN

SEQ ID NO: 32891 - protein, 613 aa, Thiobacillus denitrificans ATCC 25259
MPSPAFFSIPTAGNAPREGVFLTETRQNDYPHGFTNELIFCQFMEATGAEIVVRCLAEEGVEFVFGYPGGAVLNIYDEIFKQNRFKHVLVRHEQAAVHAADAYARSTGRVGVALVTSGPGVTNAVTGIATAYMDSVPIVVVTGQVPTPAIGLDAFQEVDTVGITRPCVKHNFLVKDVKDLAATMKKAFIIAATGRPGPVVVDVPKDVTYHVTEFEYPATVEMRSYNPVVKGHSGQLKRAVQMLLEAKRPMIYAGGGVVLGDASAQLTELARLLGFPCTNTLMGLGGYPATDRQNLGMLGMHGTYEANMAMQHCDVLLAVGARFDDRVIGNPAHFAKEQRRIIHIDIDPSSISKRVKVDVPIVGDVRNVLRDMLSLLKQAKEVPDAAALNAWWTQIELWRSKNCLKYNRNSPIIKPQYVVEKLWEVTKGDAFITSDVGQHQMWAAQYYKFDKPRRWINSGGLGTMGVGLPYAMGVQLAHPEAQVACITGESSIQMNIQELSTCKQYRIPVKVVTLNNRYMGMVRQWQEFFYGSRYAESYMESLPDFVKLAEAYGHVGMRIDKPEDVEAALKEAFSPVLKERMVFMDFQTDQTENVFPMVEGGKGLSEMILAEEL

SEQ ID NO: 32892 - protein, 620 aa, Thiobacillus denitrificans ATCC 25259
MIDLKACPLWLYRLLPFLRWWPNVTAHTFKADSVAALTGALIVLPQAVAFATIAGLPPEYGLYAAMVPAVVAALWGSSWHLVSGPTTAISIVVFAAISPLAEPGSPQFVTLVLTLTFLAGAIQLAMGLARLGGLVNFISHTVIIGFTAGAAILIAASQIKNFFGLDMPRGAHFHEVLIHFGSHLTDIQPWVATVGAATLAAGILARRYLPKLPYMIVAMVVGSVTAAVLNARLGQEATGILTVGALAASFPPLSMPDFSLTAIKQTIFPATIIAVLALTEAVAIARSVATRSDQRIDSNQEFVGQGLSNLAGSFFSGYASSGSFNRSGVNYASGAKTPLAAAMSALFLLLIVLLVAPLAAYLPVPSMAAILFIVAWSLIDFHHIGEIVKRHKRERVVLALTFVGTLVDLEKGIFLGILVSLLFYLYRTSQPSIRELVPDPAELRNPRRKFVAKTPDTATCPQMPILRVEGSIFFGAVEHVQRHFRNVDEADPDKKNLLITARAIGFIDLAGAEMLAKESNRRRKLGGNLYLVGVQPDFCEMLRRSGQVDTVGEDQIFRHKGEALQAIYPRLDNEICRRCTARIFDECHVALPDGTPRAVADQREAEAALARLHAQGATAS

SEQ ID NO: 32893 - protein, 126 aa, Thiobacillus denitrificans ATCC 25259
MQRTMLKSKLHRATVTHSELHYEGSCAIDESLLEAANIHEYEQIQIYNVSNGERFTTYAIRAARGSGVISVNGAAAHKANPGDLVIIATYATYNELEMARYAPELVYVDAANAIVDTRQTIPVQAA

SEQ ID NO: 32894 - protein, 297 aa, Thiobacillus denitrificans ATCC 25259
MNVSTEYRCGLVAIVGRPNVGKSTLLNRLVGQKVSITSRKAQTTRHRVMGIHTTDRAQFVFVDTPGFQTRHTSTMNRAMNKRVRETLSDTDVVMMLVEAGRLTREDRQVMELLPKDRPLLLVVNKVDQAKDRAALMAYLQQVAAAHAFTEIVPVSAKQGSNLDELLKTLEKHLPENPPLFGEDHVTDQTERQLAAELIREKVFRLCGEEIPYAVAVVIDKFEEEGNLRRIFATILVDRDSHKAIVIGKGGEKLKTISTQARLDMEHAFDGRVYLEVWVKVKGGWADDLRTLKSLGLD

SEQ ID NO: 32895 - protein, 423 aa, Thiobacillus denitrificans ATCC 25259
MTDSQDKSRIQDPSKRDFIKQGARLSAAAALMALVPPGVRSGAWAAGSDAPEKAALKIGFIPLTDCASVVVAAVKGFDKKYGLTITPSKEASWAAVRDKLVNGELDAAHVLYGLIYGVQLGIGGPKKDMAVLATINNNGQAITLSNQLRAKGVSGGASLAKLVKAEPREYTFAQTFPTGTHAMWLYYWLAAYGIDPFRDVKNIVVPPPQMVANMRVGNMDGFCVGEPWGARAIRDRIGFTAVTTQEIWKDHPEKVLGTTAEFVERYPNTARAMVAAILDASKYIDDLKNRAEVAKLIAAKSYVNTDVASIEGRMRGQYDNGIGRKWVDANSMKFFAGGQVGFPYLSDGMWFLTQHKRWGLLKTHPDYLAVARTVNRIDVYKDAAALTKTPLPSSDMRASKLIDGVVWDGSNPQAYADGFRIKA

SEQ ID NO: 32896 - protein, 395 aa, Thiobacillus denitrificans ATCC 25259
MLSAETLATIKSTAPLLAEQGRAITDLFYSKLFSEHPELQHIFNMANQAQGEQSRALAESVFMYATHIDALQKLGPMVSRIAHKHASLQVAPEHYPIVGKYLLEAIRDHLGLEDGHPVLGAWSEAYAQLADIFITTEEGIYAANADKPGGWRGFRAFVIDEIRDEAQGIKSIYLVPEDGQAIADFEPGQYLGVKVQVPGHAYDEIRQYSLSDAPGKRTYRITVKAEGDAPAGKVSHHLHGAEPGDRVWVQPPTGDFTVEREDRRLAFIAGGVGITPLLSMLHARAERGADLSDVVFVHCCRDKAHHAMADELRQLARAHGFSYRVAYERGEGGDHQGYLDRDVLTRWLGEPDADVYFCGPRPFMAALNTALGEMGYREERLHYEVFGPSIRLQPH

SEQ ID NO: 32897 - protein, 180 aa, Thiobacillus denitrificans ATCC 25259
MKLIILDRDGVINFDSDHFIKSPDEWKPIPGSLEAIGRLTREGWRVVVATNQSGLARGLFEMATLNAIHAKMHRAVAQAGGRIEAVFYCPHAADMNCGCRKPKPGLFTEIAARYSRDLNDVPAVGDSLRDLLAAATVGARPLLVRTGKGERTLAAGGMPDNTPVYSDLSEAVDHLLKAVA

SEQ ID NO: 32898 - protein, 106 aa, Thiobacillus denitrificans ATCC 25259
MTPLDRIREQVTNNAIVLYMKGTPQFPQCGFSSRAAQVLQACGVKDFLAVNVLADPEIFENLKYYANWPTFPQLYVKGELIGGSDIMIEMYQKGEIQKLLEEAQTA

SEQ ID NO: 32899 - protein, 579 aa, Thiobacillus denitrificans ATCC 25259
MSAPTSRHLYGRLLGYVKPHWRMFALSIVGLILTAATEPMLPALFKPLLDEGFVAKDQDFIRWVPLLLLGLFVLRGVASFISTYSMAWVGSRLVMDLRAAMFDKLMALPTRYFDQNPSGQLIAQLAFNVTQVTQSATSSLTTLVRDTVTVLGLLGYLVWLNWRLTLIVFALVPLTLWVVRVASKRLRGLSRKAQENIGDLTQVVDEAVGGHRVVKLYGGETYEQARFHRAANLARQFEMKRVAANAVYEPVIQFIAAIALAIIVFIAAGQASANTTTVGGFVAFFMAMLLLFAPLKRLTAVNDQLQRGLAASETIFALLDQDAERDTGTREPAHIEGRLAFRDVGLTYPGKQTPALARISLDIAPGETVALVGASGSGKTTLANLVPRFYDPDAGRIELDGVDIRDVKLQSLRGHIALVSQDVVLFNDTLAHNIAYGSKREASPDEIRAACVAAHAWDFIQAMPDGLDTLIGENGMRLSGGQRQRIAIARAILKNAPILILDEATSALDSESERHVQAALETLMQNRTTLVIAHRLSTIERANRIVVLEGGRIVETGAHADLLAKQGRYAQLHALQFSQ

SEQ ID NO: 32900 - protein, 121 aa, Thiobacillus denitrificans ATCC 25259
MAISRILVVDDSPTERFFLSELLVKNGYLVSMAESGEEAVAQAKQTLPDLIVMDVVMPGMNGYQATRMISKEEATKHIPVIMCTTKGQETDKVWGMRQGAKAYLVKPVKPEDLLSQIKALG

SEQ ID NO: 32901 - protein, 254 aa, Thiobacillus denitrificans ATCC 25259
MASPASPLSLLHDAPLFAGVDAGHLATLAQAARSRDARAGQLLFAEGDEARAFYLVAQGEVHLYRFSPQGEEKVFQMLGDGDLLAEAAMFLSPAVYPMTARAVRDSTLFAVPRQALLSLCAASPPLMLTLLSALARRLYQAMNRIDHLTLNNAGQRLVAYLLDLRRQQHGNWISIPVNFAVLAAQLGMTPETLSRLLQKFRQDGLLSGKGRTLVLLDADMLCEKVALPRQAMRPPSHIGGNPSMTGCCNLAGKR

SEQ ID NO: 32902 - protein, 603 aa, Thiobacillus denitrificans ATCC 25259
MSLPAARSFPSWLKPFTSFRLWWPRVNRETTRADLMAGLTGALVALPQGVAFATIAGMPPEYGLYAGMIPAIIAALFGSSWHLVSGPTTAASIVLFSVLSPHAEPGTAQYVSLALTLTFMVGVIQIVMGLAKLGTLVNFISHSVVTGFTAGAAILIATNQVKHFTGQAIPRGASFSDTWSHAFTHVDEIQVAIAATGLVTLLLGIAVKRWLPRLPYMIVAMLGGAVFGNAIARVLGVELPTVGALPASLPPLSAPAFDAESVRAVASGVIAVTLLALTEAVSIARALAARSGQHVDGNQEFVGQGMSNLAGAFFSGYVATGSFNRSGVNFAAGAKTPLAAILAGVFLLILVLFVAPWAQYLPNAAMAGILFLVAWGLIDFDEIAHTFKTSRQETAIMAATFAATLFLTLEEAIIIGVLLSLAIYLSRTSKPQLRVRAPNPHHKKRHFTDAENAPQCPQLRFVRIDGSLFFGATSHIRETLAAQDQTAPDQKHVAIVAQGINFIDLAGAHYLAEEAERRRSQGGGLYFIRVKDTVQEQLAENGALKTIGGANLFDSKTEAIAALYKRLDPAVCSICRARIFRECQGRPAEQAVTPDLVMPVSHA

SEQ ID NO: 32903 - protein, 551 aa, Thiobacillus denitrificans ATCC 25259
MIAVLESWRAGLFHRRHFTRNLGAGLVVGVVALPLAMAFAIASGARPEQGIYTGIVAGLLAALFGSSHVSISGPTGAFIVILAGITAEYGFEGLQLATLMAGLILLAMGLVKLGGIIRFIPTPVITGFTAGIAVIIWVGQWKDFFGLQPAASGAHFHEKLGALLAALPELHLPTTLLAVGALAIVVLLPRFLRRIPSPLVAMLAVTAAQAYWQFDGVATIGSAFGGIPSGLPAIHLPQASFARVLELIGPAFTIAMLGAIESLLCAVVADGMTGSRHNPNQELVGQGIANIAAPIFGGFAATGAIARTATNIRNGGDSPLAGIVHALFLLAVIVSLAPLAAHIPLAALAAILFVVAWNMSEARHFSDLLRHAPINDKALLLITFLLTVFADLVIAVNVGVLLAALLFMKRMSETVRIEGETPDSLAALCPVAVPSGVQIYTIDGPLFFGAAATFERTLAGLHDQAEAVIFRLGRVPFADATAMHALDDVVRHFRQRHIEVRVCEANPRVAHKLREFGLLARIGQQDASISVLDALAELAPQPGTQVQAEAS

SEQ ID NO: 32904 - protein, 518 aa, Thiobacillus denitrificans ATCC 25259
MAASLVIVYHRQPYEEHVEGGKTVFRENASPNGIVPALKGFIGQTERASWIAWKKSPAGKPVRFERRITVEDSYGSYEVVRLPLSAEQISQFYHVTSKEALWPILNSFPSLYSTENCDWAAFREVNRLFAEAACEEAAPGAVVWVHDYNLWLVPKFVRALRPDVRIAFFHHTPFPAADVFNILPWRDEIVDSLLDCDLVGFHVPRYARNFVSVVQSLRPVDALVERDVPPDLRATGTALSEPVTPVVLHSGKRRVQIDAFPIGTHASLIRETVQQPERLAQVAQIRHDIPQEKIIVSIGRVDYAKGTREMLLAYERLLQRRPELHGRIKLLVTAVAAADGMRVYKRAQQSIEQLAGRINGRIGTLAWQPILLSTTPMPFAETLCYYRAADICWITPLRDGLNLVAKEFIAAHVNESGVLVLSEFAGAAVELQDAVLVNPYSLVQMDAAIDRALDMPAAEQRARMQRMDALMDRYDIGHWTRHVLELFAQLPARAQADADPAPQRARRAGRAPAAVPVH

SEQ ID NO: 32905 - protein, 703 aa, Thiobacillus denitrificans ATCC 25259
MTTRPNPLLRFLPFLAWFPMTRESLRADLLAGITVSLILVPQSMAYAQLAGLPVVYGLYAGFLPVIVASLWGSLRQLHTGPTAMLSLMSAAALIPYAATGSETFIALSLMLALMVGILRLALGLFRLGVVVNFLSHPVIIGFTNAAALIIGLSQLNKLVNVPMPRSDWFLGDLWVVLQQLGSTHWPTLGFGLGAFALILVLQKRLPRLPGVLIAIVVTTLASYAIDFERTAKAGVDAIEDPGVRAQVMQLDQATAELQRHNETAARLQSELARAEDDGAPLDTLLDLKGDIARSQAAAYALGDRMMTLRIQLHRVDFTQQSGADGAPRFAVAGEMPKSEPLGTGHWRFGGIAGGEVTFTGGGEVVGAIPAGVPGFQVPHVDWALVLPLLPAALVMALLGFMEATSISKAISAKTGQRIDTNRELVGQGLANIVGSFFHAYVVSGSFSRSAVAAREGARTGLFAIVSALGVLAVMLFLTPLLYHLPQAVLAAVIMLAVFGLVRVAPLFHAWKVNRPDAVIGIATFVATVAMAPALANGILLGVGLTVALYLFRNMRPRAEILGRHPDGVLGGIDTHNLPAVSEHYVALRFDGSLNFVNVAYFEDVVLQALERFPHAKAVLVIGSGINDLDVSGEEKLRALVEQLRARNVNLYFSSLKRQVLAAFERSGLSSVIPGDHIFKTKEVALKTLDACYGSGRIGPAVPA

SEQ ID NO: 32906 - protein, 1494 aa, Thiobacillus denitrificans ATCC 25259
MERQAWLDGTLYSPDFEQDSCGFGLIAQIDNQPSHTLVQNAIGSLACMTHRGAIAADGLSGDGCGLLFKKPDAFLRAVAGDAGFTLGELYAAGLVFLSRDAGPQAHARATLKSALEAQGLVVAGFRLVPTDPSVCGESALESLPHFEQVFVNAPTGLSEDDFERKLYIARRQAEKALDAVDPVFYLPTLSCRVISYKGLVMPANLPVFYPDLNDARFASALVVFHQRFSTNTWPQWRLAQPFRYLAHNGEINTVQGNRNWSRAREQKFETPLIPDMDAIRPIVGTKGSDSMSLDNMVEGLVMGGAGLFRALRLVIPPAWQNVEAMDADIRAFYEYNSMHMEPWDGPAGIVLTDGRYAVCTLDRNGLRPARWVLTKDRILTIASEVGVWQVDPANVEMKGRVKPGQMVAADLETGRLLMPEDIDNELKGAQPYREWLKASAVKLDLSIGQDADLAIMDAASLLTHQKLFNVSFEERDQIIRVLAEDGAEAIGSMGDDTPMAVLSQKVRSPFDYLRQQFAQVTNPPIDPIREAIVMSLDTAFGPERNLFKESPAHAHRVEVHSPLLSKEAFDKLLNLNDPAFAATTLDLHYDPASTTLEAGLQALTARAIEAVKGGKVILVLSDRNIAKNRLPIHALFATGAVHHALINAGLRCDANIVVETGTVRDPHHYACLIGYGATAVYPYLAYQVIGEFVKSGEIKPGLEKALANFRKGIDKGLYKVLSKMGISLVASYRGAQLFEAIGLHESVVALCLKGTVSRISGANFEDFESDQKLLHKTAFNPLRPLSAGGLLKFMFGEEFHAYNPDVVQQLQKAVKTGDYAEFKKYSEIVNTRPVAMVRDLMKLKTGSTPIPLEEVEPLETILKRFDSAGMSLGALSPEAHEALAEGMNRIGGRSNSGEGGEDPRRYGTVKTSKIKQVASGRFGVTATYLVNAEVLQIKIAQGAKPGEGGQLPGDKVSPMIASLRHCKPGTTLISPPPHHDIYSIEDLAQLIFDLKQVNPDALVSVKLVAEPGVGTIAAGVAKAYADLITISGYDGGTGASPLTSVKYAGTPWELGLSEAQQVLRANGLRGRVRVQTDGGLKTGLDVIKAAILGAESFGFGTGPMVALGCKYLRICHLNNCATGIATQNDTLRKEHFIGLPGMVVNYFKFVAEETRELMAQLGVRSLTDLIGRTDLLELSPGETPRQGRLKLDVLLSQGDIPADAPRFAQQERNPSFDKGELAEKMVADAIGAIKAGTRIELDYAIRNINRSIGARLSGEIAKAHGAKGLPDDTIRIGLAGSAGQSFGVWNHKGLTLTLEGDANDYVGKGMGGGRLVIYPPCTATFEAHRNTLIGNTCLYGATGGELYAAGMGGERFGVRNSGALAVVEGIGDHGCEYMTGGTVIVLGDTGLNFGAGMSGGMAFVIDEAGDFMSKANKEMIELTRITSVETEPYRIFLRGQVERHLALTGSARAREILADFDAALAKAWLVKPKRISIEDLVEDLPGQQREVLEA

SEQ ID NO: 32907 - protein, 546 aa, Thiobacillus denitrificans ATCC 25259
MDNQRLILFIVFSFSLLLLWEAWQDKQAPAPATRPVAGAPAGSAAPTPSTALNAPAAAPAQTGFAKGARAVVETDVLRATIDANGGDLRELQLLGYRETEDKNRVFTLFEDSRTRPYLAQSGFVGGGLPTHRSTFELTPGTYRLTGGAARLEVPLVWNDAARGVRVEKTFIFTRGSHEVAVRTRVVNRGKEPLDLTPYYQFTRHGEAPRGESFFLYTYTGPAFYTDAKKFQKVPFTDIQDGSAEFEKTATNGWVGLVQHHFVAAWLPEESVKREYYARSLGEGLYSAGVILAEGQLAPGQQKTFTVPLYAGPQSQAVLEKAAPGLDLARDYGWLTPLAYPIFWSLEKIERLVGNWGWAIIILTILIKLALYPLSAAGYKSMAKMKKLTPRLQQLKETYGDDRAKLHQAMAEMYKTEKINPLGGCLPILIQIPVFIALYWVLLAAVEMRGAPWLGWITDLTAPDPWYILPIIMGVTSILQVKLNPQPMDPMQAKIMMIMPVAFTVMFVFFPAGLVLYWVVNNILSIAQQWAINKQVEGSGKPAPAKT

SEQ ID NO: 32908 - protein, 294 aa, Helicobacter pylori
KSGFTRERKDERILKAAHRLNLMGAVGLILLGDKEAINSKNLNLNLENVEIIDPNTSHYREEFAKSLYELRKSKGLSEQEAKQLVLDKTYFATMLVHSGYVHAMVSGVNHSDHTRFTNHQNTRREPGFKRVFNVFRHSSASLWGLRDYPPPRISRDRYHFRTNRQAIQYCASGLAFLCDRRFRSRRNDRQNQRSFNNRSKVGSPIRNWPLTIRFHKRSQEKMPNSQVAGQASVFIFPDLNAGNIAYKAVQRSAKAVAIGPILQGLNKPINDLSRGALVEDIINTVLISALQAQD

SEQ ID NO: 32909 - protein, 388 aa, Helicobacter pylori
MEILVLNLGSSSIKFKLFDMKENKPLASGLAEKIGEEIGQLKIKSHLHHNDQELKEKFVIKDHASGLLMIRENLTKMGIIKDFNQIDAIGHRVVQGGDKFHAPVLVNEKVMQEIGNLSILAPLHNPANLAGIEFVQKAHPHIPQIAVFDTAFHATMPSYAYMYALPYELYEKYQIRHYGFHRTSHHYVAKEAAKFLNTAYEEFNAISLHLGNGSSAAAIQKGKSVDTSMGLTPLEGLIMGTRCGDIDPTVVEYTAQCANKSLEEVMKMLNHESGLKGICGDNEKHRSQKRKRRSQARFNVRLSHKAHWGLHGSLKKSRCDHLYRGIRKLLGFKRERVRLRKFRDRFMAHQRQSGQWVSEFKPTRNPNFTHPYRIRNRFANQKGFGKNR

SEQ ID NO: 32910 - protein, 340 aa, Pseudomonas fluorescens
MTYAIALNFEDGVTRFIDCKVGEKVLDAAFRQRINLPMDCSDGVCGTCKCRCETGAYDLGDDFIDDALSADEAQARRVLTCQMVPQSDCVIAVPVPSSACKTGTTHFAATLAGITRHADAALEVSFELDQAPVFLPGQYVNISVPDSGQTRAYSFSSPPGDPRASFLIKHVPGGLMSGWLERAQPGDSVAITGPLGSFYLREVARPLLLLAGGTGLAPFLSMLEVLAQRQETRPIRLIYGVTRDQDLVMIEALQAFTARLPDFNLVTCVADPHTTHPRQGYVTQHMADEALNGGDVDVYLCGPPPMVDAVREHFKQQSVTPASFHYEKFTPNAVATCDAA

SEQ ID NO: 32911 - protein, 335 aa, Pseudomonas fluorescens
MNHKVAFSFADGKTLFFPVGAHEILLDAALRNGIKIPLDCREGVCGTCQGRCESGEYTQDYVDEEALSSLDLQQRKMLSCQTRVKSDATFYFDFDSSLCNAPGPVQVRGTVSAVQQVSTSTAILQVQLDQPLDFLPGQYARLSVPGTDSWRSYSFANRPGNQLQFLVRLLPDGVMSNYLRERCQVGDEMLMEAPLGAFYLRHVTQPLVLVAGGTGLSALLGMLDELVVNGCTQPVHLYYGVRGAEDLCEAARIHAYATKIPNFRYTEVLSDASVEWTGKRGYLTEHFDLAELRDRSADMYVCGPPPMVESIQQWLADQTLDGVQLYYEKFTQSNI

SEQ ID NO: 32912 - protein, 392 aa, Solanum tuberosum
MSCTVAIPNSPAFSPATRIPVTNSLLCKSASFSSSSPSRKSSESLTLTKFPSFTFSSLSSSSQLKILLIEKSSPETISLNRNSSECSTSAPISTSPTVSKRKRPARLDIPVVSTNFGNFPGTPTAAADFVEVEGDEYSVCCKRGRRGAMEDRYSALVNLQGNSKQGIFGVFDGHGGPKAAEFAAEHLNKNIMDELVRRNDEDVVEALKNGYLKTDTEFLSEEFGGGSCCVTALIRNGNLVVSNAGDCRAVVSRGGIAEALTSDHKPSRKDEKDRIETSGGYVDCSNGVWRIQGSLAVSRGIGDRYLKQWVIAEPETTVVELNPELEFLVLASDGLWDKVSNQEVVDAARPLCCTGMSKPQPLLASKKLIDLAVSRGSVDDICVMIIQLQQFW

SEQ ID NO: 32913 - protein, 329 aa, Spinacia oleracea
MANKSLFLSLLILAISPLCFSEKSQGGNLYPQFYDHSCPKLEDIVWSVLAKVVAKEPRMAASLLRLHFHDCFVKGCDGGVLLDSSGSIVSEKRSNPNRNSARGFEVIDEIKAAVEKACPETVSCADILALTARDSTLLVGGPNWEVPLGRRDSLDASLSGSNYNIPAPNNTFQTILTKFKLKGLDLVDLVALSGSHTIGDARCTSFSKGYTTRAETTTRQTLNPAMAAVLRKRCPRSGGDQNLFNLDHVTPFKFDNSYYKNLLANKGLLSSDEILVSQNADSMKLVKQYAENNHLFFQHFAQSMVKMGNIAPLTGSRGEIRRVCRRVNH

SEQ ID NO: 32914 - protein, 337 aa, Spinacia oleracea
MVKSMGYFVLVALLALAPLCLSHKIHGGGGRGGYLHPQFYDHSCPQLHQIIKSVVAQAVSRDRRMAASLLRLHFHDCFVKGCDASLLLDNGGGIVSEKGSNPNRNSVRGFEVIDAIKAAVEKACPHTVSCADIFAVVARDSTVIAGGPNWEVPLGRRDSRGATLSGSNNDIPAPNNTFNTILTKFKRQGLDLIDLVALSGAHTIGNARCVSFRQRLYNQNRNGQPDFTLDQVYAFKLRNQCPRSGGDQNLFFLDYVSPFSFDNSYYRNILANKGLLNSDQVLLTKNHASMQLVKQYAENMELFFDHFSKSIVKMGNISPLTGMQGEIRQNCRRINAY

SEQ ID NO: 32915 - protein, 334 aa, Spinacia oleracea
MVKSMSYCIVLVVLLALSPLCFCHKVVQGGYLYPQFYDHSCPQAQQIVKSVVAQAVSRDRRMAASLLRLHFHDCFVKGCDASVLLDNSGSIVSEKGSKPNKNSIRGFEVIDEIKAELERACPHTVSCADILAIAARDSTVISGGPNWEVPLGRKDSRGASLSGSNNDIPAPNNTFNTILTKFKRQGLNLVDLVALSGAHTIGNARCVSFKQRLYNQNQNGQPDPTLNALYASQLRNQCPRSGGDQNLFFLDHESPFNFDNSYYRNILANKGLLNSDQVLLTKNHKSMKLVKQYAENVELFFDHFAKSVVKMGNISPLTGMKGEIRANCRRINAY

SEQ ID NO: 32916 - protein, 602 aa, Thermoplasma acidophilum
MQKSYGVALESPTGSGKTIMALKSALQYSSERKLKVLYLVRTNSQEEQVIKELRSLSSTMKIRAIPMQGRVNMCILYRMVDDLHEINAESLAKFCNMKKREVMAGNEAACPYFNFKIRSDETKRFLFDELPTAEEFYDYGERNNVCPYESMKAALPDADIVIAPYAYFLNRSVAEKFLSHWGVSRNQIVIILDEAHNLPDIGRSIGSFRISVESLNRADREAQAYGDPELSQKIHVSDLIEMIRSALQSMVSERCGKGDVRIRFQEFMEYMRIMNKRSEREIRSLLNYLYLFGEYVENEKEKVGKVPFSYCSSVASRIIAFSDQDEEKYAAILSPEDGGYMQAACLDPSGILEVLKESKTIHMSGTLDPFDFYSDITGFEIPFKKIGEIFPPENRYIAYYDGVSSKYDTLDEKELDRMATVIEDIILKVKKNTIVYFPSYSLMDRVENRVSFEHMKEYRGIDQKELYSMLKKFRRDHGTIFAVSGGRLSEGINFPGNELEMIILAGLPFPRPDAINRSLFDYYERKYGKGWEYSVVYPTAIKIRQEIGRLIRSAEDTGACVILDKRAGQFRKFIPDMKKTSDPASDIYNFFISAQAREKYGA

SEQ ID NO: 32917 - protein, 293 aa, Neurospora crassa
MANSKFEYVKQFEQPDSLLPNTWIVVRLDGRGFTKFSTKYAFEKPNDKRALDLMNAAARSVMSELPDITIAYGVSDEYSFVFHKSCTLFERRASKLVSTIVSTFTAYYIHHWPTYFVDGPPLSPPLPSFDGRAVCYPSVQNLRDYMSWRQVDCHINNLYNTTFWALINQGGMDGTAAELMLKGTFSADKNEILFKKFGINYNNEPEMFKKGSVVFRNYELVEPGTKKVSEEEAEEMSSSAVPEVKSKSQVEKDKKVRTKAKIVVEHLDIIRDEFWERRPWLLSGTPGKVPKEP

SEQ ID NO: 32918 - protein, 574 aa, Aspergillus niger
MANTPHGGVLKDLLARDAPRHDQLAAEAEILPALTLTERQLCDLELIMNGGFSPLEGFMNQKDFDGVCENCRLADGNVFSMPITLDASQKTISELKLQAGSRLTLRDFRDDRNLAILTIDDIYRADKQKEAKLVFGGDPEHPAIKYLNNTVQEFYIGGKIEAVNKLNHYDYVALRYTPAELRVHFDKLGWSRVVAFQTRNPMHRAHRELTVRAARARQANVLIHPVVGLTKPGDIDHFTRVRAYQALLPRYPNGMAVLGLLGLAMRMGGPREAIWHAIIRKNHGATHFIVGRDHAGPGKNSKGEEFYGPYDAQHAVEKYKDELGIEVVEFQQVTYLPDTDEYRPKDEVPAGVKTLDISGTELRKRLRTGAHIPEWFSYPEVVKILRESNPPRASQGFTIFLTGYMNSGKDAIARALQVTLNQQGGRSVTLLLGDTVRHELSSELGFSREDRHTNIQRIAFVAGELTRAGAAVIAAPIAPYEESRKAAREAVAGSGGNFFLVHVATPLEHCEKTDKRGIYAKARRGEIKGFTGVDDPYEAPANADLTVDVSKQSVRSIVHEIILMLESEGYFERL

SEQ ID NO: 32919 - protein, 92 aa, Candida albicans
MAPGERKKSSRKKKDPDAPKRSLSAYMFFANENRDIVRAENPGISFGQVGKLLGEKWKALNSEDKLPYENKAEADKKRYEKEKAEYAKKNSA

SEQ ID NO: 32920 - protein, 143 aa, Lachancea kluyveri
MFGRISTRALLRPAFTHRIPSVSLSRFLSTETKQAIESAIESAPVVLFMKGTPEFPQCGFSKATINMLGQQGVDPMKFAAYNVLEDAELREGVKEFSEWPTIPQLYVNKEFVGGCDIVMNMAQTGELAKLLEDADALVPEEEE

SEQ ID NO: 32921 - protein, 251 aa, Methanothermobacter thermautotrophicus
MLLEITDLAVEVSGRQVLKDIDLYIDEGETHVLLGPNGSGKSTLFMTILGFPKYRVTGGQIIFKGEDITELSTTERVRMGIGVSFQNPPAIRGVKLMDLLKVESGLTTEDELTPELIELARKMKFDESFLERDVNLGFSGGEVKRSEILQLLAQKPDFIMFDEPDSGVDIENVELLAEEINVLLDKDKKPGLRRKSGLLITHLGYILNFVNADTAHVLMDGRIACSGNPDEIIADIRKDGFKGCVECCGIH

SEQ ID NO: 32922 - protein, 388 aa, Cyanidium caldarium
YSIEGLSQLIFDLHQINPKAKVSVKLVASVGIGTIAAGVAKANADIIQISGHDGGTGASPLSSIKHAGVPWELGLTEVHKTLLSNNLRNRVLLRVDGGLKTGLDIIIASLMGAEEYGFGTVAMIATGCIMATICHTNNCPVGVASQREDLRARYPGVPESLVNFCMFVAEEVRSILAYMGYKSLNDIIGRYDLLSTNYINTLSKTKNLNLYDLLNMPIDYINNRSWLEHEDVHSNGPVLDDILVKSSDIEDTIKSQRNIDKHLKISNINRSVGGRLSGYIAKQYGNNNFKGKINLHFYGSAGQSFGLFNIEGLNLRLIGEANDYVGKGMNGGEIVVIPNNQFDNSNYLTNNVIIGNTCLYGATGGYLFVKGQAGERFAVRNSQAQAVV

SEQ ID NO: 32923 - protein, 638 aa, Zea mays
MATAAAASTALTGATTAAPKARRRAHLLATRRALAAPIRCSAASPAMPMAPPATPLRPWGPTDPRKGADILVESLERCGVRDVFAYPGGASMEIHQALTRSPVIANHLFRHEQGEAFAASGYARSSGRVGVCIATSGPGATNLVSALADALLDSVPMVAITGQVPRRMIGTDAFQETPIVEVTRSITKHNYLVLDVDDIPRVVQEAFFLASSGRPGPVLVDIPKDIQQQMAVPVWDKPMSLPGYIARLPKPPATELLEQVLRLVGESRRPVLYVGGGCAASGEELRRFVELTGIPVTTTLMGLGNFPSDDPLSLRMLGMHGTVYANYAVDKADLLLALGVRFDDRVTGKIEAFASRAKIVHVDIDPAEIGKNKQPHVSICADVKLALQGMNALLEGSTSKKSFDFGSWNDELDQQKREFPLGYKTSNEEIQPQYAIQVLDELTKGEAIIGTGVGQHQMWAAQYYTYKRPRQWLSSAGLGAMGFGLPAAAGASVANPGVTVVDIDGDGSFLMNVQELAMIRIENLPVKVFVLNNQHLGMVVQWEDRFYKANRAHTYLGNPENESEIYPDFVTIAKGFNIPAVRVTKKNEVRAAIKKMLETPGPYLLDIIVPHQEHVLPMIPSGGAFKDMILDGDGRTVY

SEQ ID NO: 32924 - protein, 638 aa, Zea mays
MATAATAAAALTGATTATPKSRRRAHHLATRRALAAPIRCSALSRATPTAPPATPLRPWGPNEPRKGSDILVEALERCGVRDVFAYPGGASMEIHQALTRSPVIANHLFRHEQGEAFAASAYARSSGRVGVCIATSGPGATNLVSALADALLDSVPMVAITGQVPRRMIGTDAFQETPIVEVTRSITKHNYLVLDVDDIPRVVQEAFFLASSGRPGPVLVDIPKDIQQQMAVPAWDTPMSLPGYIARLPKPPATEFLEQVLRLVGESRRPVLYVGGGCAASGEELCRFVELTGIPVTTTLMGLGNFPSDDPLSLRMLGMHGTVYANYAVDKADLLLAFGVRFDDRVTGKIEAFAGRAKIVHIDIDPAEIGKNKQPHVSICADVKLALQGMNTLLEGSTSKKSFDFGSWHDELDQQKREFPLGYKIFNEEIQPQYAIQVLDELTKGEAIIATGVGQHQMWAAQYYTYKRPRQWLSSAGLGAMGFGLPAAAGAAVANPGVTVVDIDGDGSFLMNIQELAMIRIENLPVKVFVLNNQHLGMVVQWEDRFYKANRAHTFLGNPENESEIYPDFVAIAKGFNIPAVRVTKKSEVHAAIKKMLEAPGPYLLDIIVPHQEHVLPMIPSGGAFKDMILDGDGRTVY

SEQ ID NO: 32925 - protein, 205 aa, Antirrhinum majus
MDKKPCNSQDVEVRKGPWTMEEDLILINYIANHGEGVWNSLARSAGLKRTGKSCRLRWLNYLRPDVRRGNITPEEQLLIMELHAKWGNRWSKIAKTLPGRTDNEIKNYWRTRIQKHMEQGDQSSSTTFNNGQMNLDHSCNDQASSSQMSACGPVVDHTAVDQSSYSPHSFNGNDHTFQAPFPTDQSNDNMWSMEDFWSMQLLNGD

SEQ ID NO: 32926 - protein, 198 aa, Antirrhinum majus
MDKKPCNSHDVEVRKGPWTMEEDLILINFISNHGEGVWNTIARSAGLKRTGKSCRLRWLNYLRPDVRRGNITPEEQLLIMELHAKWGNRWSKIAKHLPGRTDNEIKNYWNRTRIQKHIKQAEASFIGHINPEHSNEQASTSLLSSSCHADHAVESYSSSFNGNMGNNVQYPNHFPTESNDYFWSMEDLWSMQLPNNGG

SEQ ID NO: 32927 - protein, 362 aa, Oryza sativa Japonica Group
MELGLSLGEAMADAGRELVLGLGMGRREEAAEAGRRDHEVRRELEFGSMSSRCGGSSPEPTVRLTLLPMVPGLGLPWPPPPPPSSESRHLEASTRGFDVNRPPSSGGGGGGGGAEEEQDDVAGAALSSSPNNSAGSFPMDDFSGHGLGGNDAAPGGGGGDRSCSRASDEDDGGSARKKLRLSKEQSAFLEESFKEHSTLNPKQKLALAKQLNLRPRQVEVWFQNRRARTKLKQTEVDCEYLKRCCETLTEENRRLQKELAELRALKTVHPFYMHLPATTLSMCPSCERVASNSAPATASSAATSSTAAPPAAPSSGGIAATSSSAAAAAAPDHRPSSFAALFSSPRGFPLSVAPQAQPPTSS

SEQ ID NO: 32928 - protein, 248 aa, Oryza sativa Japonica Group
MSSSSLTTTSSMDSVVDGGLDTRLSLAVGCCPPRRRPVLLFGEVLPSPEKKVAAAAVVAAGKRGREQRGEAEAEATTTRQRRSCKKGRRGRGDDDDDDGDRRSPSGGGGDEEGASRKKLRLTGEQATLLEDSFRAHNILSHAEKQELAGKLGLSARQVEVWFQNRRARTKLKQTEADCDLLRRWCDHLAADNARLRRDLAELRRSSSSPPVSGLAVATPVVCPSCAHDDKRRLAFATAAAAAGDMASN

SEQ ID NO: 32929 - protein, 281 aa, Oryza sativa Indica Group
MRSYMDGGGAAAYEEEEEEVEDDDGGGGGGGGGGGGGLGEKKRRLAAEQVRALERSFEADNKLDPERKARIARDLRLHPRQVAVWFQNRRARWKTKQIERDFAALRSRHDALRLECDALRRDKDALAAEIADLRDRVDGQMSVKLEAVAADEHQPPPPPPPPPLAYNSKVVDGSTDSDSSAVFNEEASPYSGAAIDHHHHQTPASYDTAGFTSFFAPSTTLTSSLSFPSMFHASSHFDGHQELLVGGGGAGAVADADLGGAGFFAGDEHAGGLSWYGAEGW

SEQ ID NO: 32930 - protein, 247 aa, Oryza sativa Japonica Group
MAQDDEDVGLALGLSLGSGGHRRQRESRDEAPSSAAASLLTLRLPAESGGQPQVVVKREVVRAEEEEYEYEYERALYSSSAAAADDDEGCNSRKKLRLSKEQSALLEDRFKEHSTLNPKQKVALAKQLNLRPRQVEVWFQNRRARTKLKQTEVDCELLKRCCETLTEENRRLHRELQQLRALTHSTAAGFFMATTLPVPAATLSICPSCERLATAAAAGASPTAAADRTNKPTAPHLFSPFAKSAAC

SEQ ID NO: 32931 - protein, 663 aa, Oryza sativa Japonica Group
MAAAAAAASLSVSDAAAKLPKPGGQVQRRRDRDRPRVDAAACTRDSRRPTRERCSTTVSLAATATATTATPVRAPVRTRAPMGQRKGADIVVEALERCGVRDVFEYPGGASMEIHQALTRSPVIRNHLLRHEQGEAFAASGYARSSGRPGVCVATSGPGATNLVSALADAHLDSVPLVAITGQAPRRMIGTDAFQETPIVEFTRSITKHNYLILDVDDIPRVINEAFFLASTGRPGPVLVDIPKDIQQQMAVPSWDAPMRLPGYISRLPKPPAANLLDEVIRLVGDAERPVLYVGGGCSASGYELRRFVELTGIPVTTTLMGIGNFPSDDPLSLRMLGMHGTVYANYAVDNADLLLALGVRFDDRVTGKVEAFASRAKIVHVDIDPSELGKNKQPHVSICADVKLALQGMNAMLEEQSAAAARKNLDFSAWRSELEKKKVEFPLGYRTFGEEIPPQYAIQVLDEVTNGEAIVATGVGQHQMWATQHYTYRRPRQWLSSAGLGAMGFGLPAAAGAAVANPGATVVDIDGDGSLLMNIQELAMVRVEDLPVKVMVLNNQHLGMVVQWEDRFYDANRAHTYLGNPAANGGGEVYPDFVTIAGGFGIPAARVTRKGEVRAAVEEMMAAPGPYLLDVVVPHQEHVLPMIPSNGAFKDIIVDGDGRSSY

SEQ ID NO: 32932 - protein, 456 aa, Arabidopsis thaliana
MDQEEEEIEIPNYFICPISLEIMKDPVTTVSGITYDRQNIVKWLEKVPSCPVTKQPLPLDSDLTPNHMLRRLIQHWCVENETRGVVRISTPRVPPGKLNVVEEIKNLKKFGQEALGREETLQKLEVLAMDGNNRRLMCECGVHKSLILFVVKCTSEDEDGRRRIKGLDESLRLLHLIGIPSNDAKTILMENDRVMESLTWVLHQEDFLSKAYTIVLLRNLTEYTSSHIVERLNPEIFKGIIGFLKDVVNSVNRTSPTVRETVQSSSRPSLGKTEPSKLDHSLVIKQAVTAALMILLETSSWSRNRSLLVDLGAVSELIELEISYTGEKRITELMLGVLSRLCCCANGRAEILAHRGGIAVVTKRLLRVSPAADDRAISILTTVSKFSPENMVVEEMVNVGTVEKLCSVLGMDCGLNLKEKAKEILKDHFDEWKKFPCIDITLLTKLLSISPKGPKI

SEQ ID NO: 32933 - protein, 600 aa, Brassica oleracea
MLRSLLLRRSNARSLRPPFPPLRTLCTSGQTLTPAPPPPPPPPPPISSSASEKEFRKYAGYAALALFSGAATYFSFPFPENAKHKKAQIFRYAPLPEDLHTVSNWSGTHEVQTRNFNQPETLADLEALVKEAHEKKNRIRPVGSGLSPNGIGLSRSGMVNLALMDKVLEVDKEKKRVRVQAGIRVQQLVDAIQEYGLTLQNFASIREQQIGGIIQVGAHGTGARLPPIDEQVIGMKLVTPAKGTIELSKDNDPELFHLARCGLGGLGVVAEVTLQCVERQELLEHTYVSTLEEIKKNHKKLLSTNKHVKYLYIPYTDTVVVVTCNPVSKWSGAPKDKPKYTTEEALKHVRDLYRESIVKYRVQDSSKKTPDSREPDINELSFTELRDKLIALDPLNDVHVGKVNQAEAEFWKKSEGYRVGWSDEILGFDCGGQQWVSETCFPAGTLAKPSMKDLEYIEQLKELIQKEAIPAPSPIEQRWTGRSKSPMSPAFSTAEEDIFSWVGIIMYLPTADPRQRKDITDEFFHYRHLTQAKLWDQYSAYEHWAKIEIPKDKEELEALQERLRKRFPVDAYNKARRELDPNRILSNNMVEKLFPVSKTA

SEQ ID NO: 32934 - protein, 155 aa, Solanum peruvianum
MDLRLLGIDNTPLFHTLHHMMEAAGEDSVNAPSKIYVRDAKAMAATPADVKEYPNSYVFVVDMPGLKSGDIKVQVEEDNVLLISGERKREEEKEGAKFIRMERRVGKFMRKFSLPENANTDAISAVCQDGVLTVTVQKLPPPEPKKPKTIEVKVA

SEQ ID NO: 32935 - protein, 282 aa, Mesembryanthemum crystallinum
MSLIANFESDFAVLESIRRHLLEDWDPRAGAPAITTGSGPVYHRNSSFSSLYPCLTDNWGELPLKEDDSEDMVLFGVLRDAVHTGWSPQSGSESGSGSPAPVTVKPEPVDSPVSSPAPVRVAGGEAPVAAAPARGKHYRGVRRRPWGKFAAEIRDPAKNGARVWLGTFETAEDAALAYDRAAFRMRGSKALLNFPLRVNSGEPDPVRITSKRSSPERSVSSSSSESASPKRRKKEEVVVGPVAGQARPGLQQVGNVVEGMQVGVGCQVGVGTMPLGDQLLVT

SEQ ID NO: 32936 - protein, 161 aa, Solanum lycopersicum
MVPTPQSDLPLNENDSQEMVLYEVLNEANALNIPYLPQRNQLLPRNNILRPLQCIGKKYRGVRRRPWGKYAAEIRDSARHGARVWLGTFETAEEAALAYDRAAFRMRGAKALLNFPSEIVNASVSVDKLSLCSNSYTTNNNSDSSLNEVSSGTNDVFESRC

SEQ ID NO: 32937 - protein, 350 aa, Oryza sativa Indica Group
MDPGRVVFDSGVARRACPGGAQMLLFGGGGSANSGGFFRGVPAAVLGMDESRSSSSAAGAGAKRPFFTTHEELLEEEYYDEQAPEKKRRLTAEQVQMLERSFEEENKLEPERKTELARRLGMAPRQVAVWFQNRRARWKTKQLEHDFDRLKAAYDALAADHHALLSDNDRLRAQVISLTEKLQDKETSPSSATITTAAQEVDQPDEHTEAASTTGFATVDGALAAPPPGHQQPPHKDDLVSSGGTNDDGDGGGAAVVVFDVTEGANDRLSCESAYFADAAEAYERDCAGHYALSSEEEDGGAVSDEGCSFDLPDAAAAAAAMFGAAGVVHHDAADDEEAQLGSWTAWFWS

SEQ ID NO: 32938 - protein, 392 aa, Clostridium pasteurianum
MKEVVIASAVRTAVGSFGGSLKNVSAVDLGATVIKEAVKRAGINPELVEEVVMGNVLQAGLGQNTARQASVKAGLPFEVSSLTINKVCGSGLRAVSLARQMILAGDADVIVAGGMESMSRAPYLVNNARWGAKMGDTKFVDEMITDGLWDAFNNYHMGITAENIAEKWELTREDQDKFALASQQKAEAAIKAGGFKEEIVPVEIPQRKGDPKIFDTDEFPRFGTTLEGLAKLRPAFKKGGTVTAGNASGINDGAAAFVIMSAEKAEELGVKPLARIAAFGSKGLDPAIMGYGPVGATKVALERADLKVGDLDLIEANEAFAAQSLAVAKDLNFDMDKVNVNGGAIAIGHPVGASGARILVTLLYEMQRRDAKTGLATLCIGGGQGTALIVKR

SEQ ID NO: 32939 - protein, 685 aa, Spinacia oleracea
MPSISMMSDAITPETLKKEKKMKSETLDSDDTVVKKEKSSSKKKEKSSSSGKKDKEEKEKKKKRKAVDLDDSSDKSDNSSELVQADDLKPKKAKVMEEAVVEAEDPNSLSNFRISKPLKDVLISKGIKALFPIQAMTFDNVIDGCDLVGRARTGQGKTLAFVLPIVESLVNGRTKDLRRSGHGRLPSVLVLLPTRELATQVLADFQVYGGAVGLTACSVYGGAPFHSQISSLTRGVDIVVGTPGRVKDLLEKGVLKLGSLLFRVLDEADEMLKMGFVDDVELILGKVDHVSKVQTLLFSATLPSWVKQISTRFLKSAKKTVDLVSDQKMKASISVRHIVIPCSASARPDLIPDIIRCYGSGGRSIIFTETKESASQLAGLLTGARPLHGDIQQTQREVTLKGFRTGKFMTLVATNVAARGLDINDVQLIIQCEPPRDVEDYIHRSGRTGRAGNTGVAVMLYDPKRSSVTKIERESGVKFEHLSAPQPVDVAKAVGIEAAAAILQISDSVIPAFKDAAEELLSTSGLSAVDILSKALAKAAGYSDIKERSLLTGMEGYVTLLLDAGRPFYGQSFAYTVLKRFLPATKADSIMGVALTADKSGAVFDVPVDDLETFLVGAENAAGVNLDVVKALPPLEEKVQISRRFGGGGRGGRGGGYGGRGGGYGGGGYGGGGGYGGRGGGYGRR

SEQ ID NO: 32940 - protein, 525 aa, Pinus taeda
MSFDKLLQALPPPLPLPAILIATFIFFFSCWILHQSQRNERLPPGPYPWPIIGNFHQVRLPLHRTLKNLAEKYGPILFLRFGSVPTVVVSSSEKAKHFLKTHDLIFASRPPTSVGKYFFYNFKDIAFSPYGDHWRKMRKICVLELLTSKRIESFKHVRQEELSAMIHSIWEESESGRIAVNVSKAISTSLANILWRILARKKFSDNDLGADGKGFADLVVEVSIAVGSLNIGDFIPYLDCLDLQGIKRALKKANARFDAFAEKMIDEHINASTIRNGEADAGCHVKDIIDVLLEMAKNDNTGAKVTREIIKAITYELFSAGMETSANVLEWAMSELLRHPHAMKKLQQEIESVVGQQGTVKESDLASIVYLHCVVKETLRLYPSLPLALPHESLEAVTVGGYYIPKKTMVIMNLWAIGRDPSVWGADASEFKPERFMQMEENGIDLSGGQSDFRMLPFGAGRRTCPGSAMAILTVEFTLAQLLHTFDWRVEGDPSELDMKEACATKMPRQTPLLAYPRLRLPRCP

SEQ ID NO: 32941 - protein, 845 aa, Arabidopsis thaliana
MEGSSNSNSRGFNTSGVSDRNTEFLPVERLTTRSKPSSHVDEYVRSLFGSTSTHKSGEDDSLGIDPFVRSLEWGDVSLRQWLDKPERSVDVFECLHVFRQIVEIVNAAHSQGIVVHNVRPSCFVMSSFNHVSFIESASCSDSGSDSLEDGPISQKEIGSSRREEAVSKAIAIEEKGVYNKLLERKIEKLEEEKTQPFPMKHILAMETSWYTSPEEDFGSSSTCASDVYRLGVLLFELFCPVPSREEKSRTMSSLRHRVLPPQILLKCPKEASFCLWLLHPEPTCRPSMSDLLQSEFITEPRDNLEEREAAIELRDRIEEQESLLEFLLLIQQRKQESAYRLQDTVSLLSSDIEQVVKRQLILKKRGSSLSDFSKDDHQYTSGQPLMSFQANEEPSAFLASRKRVRQGILALENGVEVDEESQGSTLLESSRLMRNFKKLESVYFLTRRRQMKAAASGKSLTRHSPLSSENGRGSMIVSEKSSVSNPVAPKAFFNNDSRQGGWIDPFLEGLCRYLSFSQLRVKADLKQGDLLNSSNLVCALAFDREGELFATAGVNKKIKIFECNSIVNDNRDIHYPVVELAGRSKLSSLCWNSYIKSQIASSNFDGVVQIWDVARSQLVTEMKEHKKRVWSIDISSADPTLLASGSDDGTVKLWSINQGVSIGTIKTKANVCCVQFPSDSGRSLAFGSADHKVYYYDLRNPKIPLCTMIGHSKTVSYVKFVDSSTLVSSSTDNTLKLWDLSMSASGINESPLHSFTGHTNLKNFVGLSVSDGYIATGSETNEVFVYHKAFPMPVMSYMFNNTDSMSGLEVDDASQFISSICWRGQSSTLVAANSNGNIKILEMMT

SEQ ID NO: 32942 - protein, 474 aa, Pseudomonas savastanoi
MSRLVVVSNRIAPPDEHAASAGGLAVGILGALKAAGGLWFGWSGETGNEDQPLKKVKKGNITWASFNLSEQDLDEYYNQFSNAVLWPAFHYRLDLVQFQRPAWDGYLRVNALLADKLLPLLQDDDIIWIHDYHLLPFAHELRKRGVNNRIGFLLHIPFPTPEIFNALPTYDTLLEQLCDYDLLGFQTENDRLAFLDCLSNLTRVTTRSAKSHTAWGKAFRTEVYPIGIEPKEIAKQAAGPLPPKLAQLKAELKNVQNIFSVERLDYSKGLPERFLAYEALLEKYPQHHGKIRYTQIAPTSRGDVQAYQDIRHQLENEAGRINGKYGQLGWTPLYYLNQHFDRKLLMKIFRYSDVGLVTPLRDGMNLVAKEYVAAQDPANPGVLVLSQFAGAANELTSALIVNPYDRDEVAAALDRALTMSLAERISRHAEMLDVIVKNDINHWQECFISDLKQIVPRSAESQQRDKVATFPKLA

SEQ ID NO: 32943 - protein, 401 aa, Pseudomonas knackmussii
MSREVYICDAVRTPIGRFGGSLAAVRADDLAAVPVKALVERNPQVDWSQLDEVYLGCANQAGEDNRNVARMALLLAGLPDSVPGVTLNRLCASGMDAVGTAFRAIASGEAELVIAGGVESMSRAPYVMGKADSAFGRGQKIEDTTIGWRFINPLMKAQYGVDAMPETADNVADDYKVSRADQDAFALRSQQLAGRAQAAGYFAEEIVPVVIKGKKGETVVDADEHLRPDTTLEALAKLKPVNGPDKTVTAGNASGVNDGSVALILASAEAVKKHGLKARAKVLGMASAGVAPRVMGIGPVPAVRKLLERLNLSVADFDVIELNEAFAAQGLAVTRELGIADDDARVNPNGGAIALGHPLGASGARLVLTAVHQLEKSGGQRGLCTMCVGVGQGVALAVERV

SEQ ID NO: 32944 - protein, 414 aa, Azoarcus evansii
MNAPAEHANLARQHLIDPEICIRCNTCEEICPVDAITHDSRNYVVKFETCNGCLACISPCPTGAIDSWRNVDKATPHSLADQYSWDYLPDTTELDQFEATVMGAAELPAEVQQITEVATAGQGGPAMAPWSASHPYVNLYTPANPITATVTGNYRLTAEDASSDIHHIVLDFGTTPFPVLEGQSIGIIPPGVDEKGKPHLLRMYSVASPRDGERPHYNNLSLTVKRVVEDHEGNPTRGVASNYVCDLKKGDKVQVTGPYGSTYLMPNHPGSSIMMICTGTGSAPMRAMTERRRRRMDRKEGGELVLFFGARAPEELPYFGPLQKLPKEFIDINFAFSRVPGEPKRYVQDAIRERADKVFQMLQDDNCYIYICGLKGMEAGVLEAFRDICRAKGADWDALRPQLLSKARFHVETY

SEQ ID NO: 32945 - protein, 242 aa, Vibrio harveyi
LPANKNVGKISQVRGIPEGQSAISPPTFKDLHTAEDFKKFADRVREVTGGIPIGFKLSANHVEEDIQFALDASADYIILDGRGGGTGAAPAMFRDHISVPTIPALARARRYLDAQGVSDRVTLIVTGGLRVPMDFVKAMALGADGVAISNSAMQSIGCVAARMCNTNNCPAGIATQKADLRQRLNVDKASVQLKNFFEASVELMQVMARACGHDDLSKFNQHDLATWNRDMALLSGVKYAGV

SEQ ID NO: 32946 - protein, 336 aa, Pseudomonas putida
MSYQIALNFEDGVTRFIEATGHETVADAAYRQGINIPLDCRDGACGTCKCKAESGRYDLGDNFIEDALNEDEIAEGYVLTCQMRAESDCVIRIPASSQLCKTEQASFEAAISDVRQLSASTIALSIKGEALSRLAFLPGQYVNLKVPGSEQSRAYSFSSLQKGGEVSFLIRNVPGGLMSSFLTNLAKAGDSMSLAGPLGSFYLRPIQRPLLLLAGGTGLAPFTAMLEKIAEQGSEHPLHLIYGVTNDFDLVELDRLQALAARIPNFTYSACVANPDSQYPQKGYVTQHIEPRHLNDGDVDLYLCGPPPMVEAVSQYVREQGITPANFYYEKFAAAA

SEQ ID NO: 32947 - protein, 198 aa, Xanthomonas oryzae pv. oryzae
MLMSDSLNAAALDQLFRTARTQNAFADTPVSQEVLRELYELVKWGPTAANSGPARFVFVTSADGKAKLKPALSEGNAAKTLAAPVTVIVAHDEDFHEKLPYLFPHADAKSWFDGPREGRAESAFRNGSLQGAYLILAARALGLDAGPMSGFDNAKVDAAFFAGTPIKSNFLVNLGYGDPAGLFPRSPRLSFDEAARFE

SEQ ID NO: 32948 - protein, 391 aa, Pseudomonas oleovorans
MSLNPRDVVIVDFGRTPMGRSKGGMHRNTRAEDMSAHLISKLLERNDKVDPKEVEDVIWGCVNQTLEQGWNIARMASLMTQIPHTSAAQTVSRLCGSSMSALHTAAQAIMTGNGDVFVVGGVEHMGHVSMMHGVDPNPHLSLHAAKASGMMGLTAEMLGKMHGITREQQDLFGLRSHQLAHKATVEGKFKDEIIPMQGYDENGFLKVFDFDETIRPETTLEGLASLKPAFNPKGGTVTAGTSSQITDGASCMVVMSGQRAMDLGIQPLAVIRSMAVAGVDPAIMGYGPVPSTQKALKRAGLTMADIDFIELNEAFAAQALPVLKDLKVLDKMDEKVNLHGGAIALGHPFGCSGARISGTLLNVMKQNGGTLGVATMCVGLGQGITTVFERI

SEQ ID NO: 32949 - protein, 384 aa, Thermotoga maritima
  misc_feature (1)..(1): Xaa can be any naturally occurring amino acid
  misc_feature (21)..(21): Xaa can be any naturally occurring amino acid
  misc_feature (38)..(38): Xaa can be any naturally occurring amino acid
  misc_feature (46)..(46): Xaa can be any naturally occurring amino acid
  misc_feature (106)..(106): Xaa can be any naturally occurring amino acid
  misc_feature (111)..(111): Xaa can be any naturally occurring amino acid
  misc_feature (146)..(146): Xaa can be any naturally occurring amino acid
  misc_feature (251)..(251): Xaa can be any naturally occurring amino acid
  misc_feature (265)..(265): Xaa can be any naturally occurring amino acid
  misc_feature (277)..(277): Xaa can be any naturally occurring amino acid
  misc_feature (338)..(338): Xaa can be any naturally occurring amino acid
  unsure (1)..(384): unsure at all Xaa locations
XRVYFDNNATTRVDDRVLEEXIVFYREKYGNPNSAHGXGIEANLHXEKAREKVAKVLGVSPSEIFFTSCATESINWILKTVAETFEKRKRTIITTPIEHKAVLETXKYLSXKGFKVKYVPVDSRGVVKLEELEKLVDEDTFLVSIXAANNEVGTIQPVEDVTRIVKKKNKETLVHVDAVQTIGKIPFSLEKLEVDYASFSAHKFHGPKGVGITYIRKGVPIRPLIHGGGQERGLRSGTQNVPGIVGAARAXEIAVEELSEAAKHXEKLRSKLVSGLXNLGAHIITPLEISLPNTLSVSFPNIRGSTLQNLLSGYGIYVSTSSACTSKDERLRHVLDAXGVDRRIAQGAIRISLCKYNTEEEVDYFLKKIEEILSFLDLTGNNRR

SEQ ID NO: 32950 - protein, 384 aa, Thermotoga maritima
MRVYFDNNATTRVDDRVLEEMIVFYREKYGNPNSAHGMGIEANLHMEKAREKVAKVLGVSPSEIFFTSCATESINWILKTVAETFEKRKRTIITTPIEHKAVLETMKYLSMKGFKVKYVPVDSRGVVKLEELEKLVDEDTFLVSIMAANNEVGTIQPVEDVTRIVKKKNKETLVHVDAVQTIGKIPFSLEKLEVDYASFSAHKFHGPKGVGITYIRKGVPIRPLIHGGGQERGLRSGTQNVPGIVGAARAMEIAVEELSEAAKHMEKLRSKLVSGLMNLGAHIITPLEISLPNTLSVSFPNIRGSTLQNLLSGYGIYVSTSSACTSKDERLRHVLDAMGVDRRIAQGAIRISLCKYNTEEEVDYFLKKIEEILSFLDLTGNNRR

SEQ ID NO: 32951 - protein, 932 aa, Arabidopsis thaliana
MAIKASFSNVANMLLDWDDVHNHDFCSWRGVFCDNVSLNVVSLNLSNLNLGGEISSALGDLMNLQSIDLQGNKLGGQIPDEIGNCVSLAYVDFSTNLLFGDIPFSISKLKQLEFLNLKNNQLTGPIPATLTQIPNLKTLDLARNQLTGEIPRLLYWNEVLQYLGLRGNMLTGTLSPDMCQLTGLWYFDVRGNNLTGTIPESIGNCTSFEILDVSYNQITGVIPYNIGFLQVATLSLQGNKLTGRIPEVIGLMQALAVLDLSDNELTGPIPPILGNLSFTGKLYLHGNKLTGQIPPELGNMSRLSYLQLNDNELVGKIPPELGKLEQLFELNLANNNLVGLIPSNISSCAALNQFNVHGNFLSGAVPLEFRNLGSLTYLNLSSNSFKGKIPAELGHIINLDTLDLSGNNFSGSIPLTLGDLEHLLILNLSRNHLNGTLPAEFGNLRSIQIIDVSFNFLAGVIPTELGQLQNINSLILNNNKIHGKIPDQLTNCFSLANLNISFNNLSGIIPPMKNFTRFSPASFFGNPFLCGNWVGSICGPSLPKSQVFTRVAVICMVLGFITLICMIFIAVYKSKQQKPVLKGSSKQPEGSTKLVILHMDMAIHTFDDIMRVTENLDEKYIIGYGASSTVYKCTSKTSRPIAIKRIYNQYPSNFREFETELETIGSIRHRNIVSLHGYALSPFGNLLFYDYMENGSLWDLLHGPGKKVKLDWETRLKIAVGAAQGLAYLHHDCTPRIIHRDIKSSNILLDGNFEARLSDFGIAKSIPATKTYASTYVLGTIGYIDPEYARTSRLNEKSDIYSFGIVLLELLTGKKAVDNEANLHQMILSKADDNTVMEAVDAEVSVTCMDSGHIKKTFQLALLCTKRNPLERPTMQEVSRVLLSLVPSPPPKKLPSPAKVQEGEERRESHSSDTTTPQWFVQFREDISKSSL

SEQ ID NO: 32952 - protein, 391 aa, Pseudomonas putida
MSLNPRDVVIVDFGRTPMGRSKGGMHRNTRAEDMSAHLISKLLERNDKVDPKEVEDVIWGCVNQTLEQGWNIARMASLMTPIPHTSAAQTVSRLCGSSMSALHTAAQAIMTGNGDVFVIGGVEHMGHVSMMHGVDPNPHLSLHAAKASGMMGLTAEMLGKMHGITREQQDLFGVRSHQLAHKATVEGKFKDEIIPMQGYDENGFLKVFDFDETIRPETTLEGLASLKPAFNPKGGTVTAGTSSQITDGASCMIVMSGQRAMDLGIQPLAVIRSMAVAGVDPAIMGYGPVPSTQKALKRAGLTMADIDFIELNEAFAAQALPVLKDLKVLDKMDEKVNLHGGAIALGHPFGCSGARISGTLLNVMKQNGGTLGVATMCVGLGQGITTVFERV

SEQ ID NO: 32953 - protein, 102 aa, Staphylococcus aureus
  misc_feature (83)..(83): Xaa can be any naturally occurring amino acid
  unsure (1)..(102): unsure at all Xaa locations
MFAIIETGGKQIKVEEGQEIFVEKLDVNEGDTFTFDKVLFVGGDSVKVGAPTVEGATVTATVNKQGRGKKITVFTYKRRKNSXRKKGHRQPYTKLTIDKINA

SEQ ID NO: 32954 - protein, 387 aa, Enterobacter cloacae
MEKVVIVDAIRTPMGRSKGGAFRNVRAEDLSAHLMRSLLARNPALDPAALDDIYWGCLHQTLEQGFNLARNASLLAEIPHSVPAVTVNRLCGSSMQALHDAARMIMTGDAQACLVGGVEHMGHVPMSHGVHFHPGMSRNVAKAAGMMGLTAEMLSRLHGISREMQDAFAARSHARAWAATQSGAFKNEIIPTGGHDADGVLKQFSYDEVIRPETTVEALSTLRPAFDPVTGTVTAGTSSALSDGAAAMLVMSESRARELGLTPRARVRSMAVVGCDPSIMGYGPVPASKLALKKAGLTASDIDLFEMNEAFAAQILPCIKDLGLMGQIDEKINLNGGAIALGHPLGCSGARISTTLINLMEGKDAQFGLATMCIGLGQGIATVFERV

SEQ ID NO: 32955 - protein, 426 aa, Hordeum vulgare subsp. vulgare
AQAVVQAMQCQVGVRGRTAVPARQPAGRVWGVRRAARATSGFKVLALGPETTGVIQRMQQLLDMDTTPFTDKIIAEYIWVGGSGIDLRSKSRTISKPVEDPSELPKWNYDGSSTGQAPGEDSEVILYPQAIFKDPFRGGNNILVICDTYTPQGEPIPTNKRHMAAQIFSDPKVTSQVPWFGIEQEYTLMQRDVNWPLGWPVGGYPGPQGPYYCAVGSDKSFGRDISDAHYKACLYAGIEISGTNGEVMPGQWEYQVGPSVGIDAGDHIWASRYILERITEQAGVVLTLDPKPIQGDWNGAGCHTNYSTLSMREDGGFDVIKKAILNLSLRHDLHIAAYGEGNERRLTGLHETASISDFSWGVANRGCSIRVGRDTEAKGKGYLEDRRPASNMDPYTVTALLAETTILWEPTLEAEALAAKKLALKV

SEQ ID NO: 32956 - protein, 361 aa, Arabidopsis thaliana
MADSSDSVSIDMEALSLGGQEHLVETTYGPVCVAVCGDPDKPALITYPDIALNYMFCFQGLLFCPEASSLLLHNFCIYHISPLGHEVGNWTLIVYKLLYVSESLQLGAPMISVDAPLLSADDLADQIVEVLNYFGLGAVMCMGVTAGAYILTLFAMKYRQRVLGLILVSPLCQAPSWSEWLCNKVMSNLLYYYGTCGVVKEMLLKRYFSKEVRGNGHVPESDIVQECRRLLSERQSTNVWRFLEAINGRVDLSEGLRKLQCRTLIFIGENSAYHSEAVHMTTKLDRRYGALVEGSGSLVSEEQPQAMIIPMEYFLMGYGLYRPTQSVSPRSPLSPTRISPELLSPENMGLKLKPIKTRLAL

SEQ ID NO: 32957 - protein, 292 aa, Campylobacter jejuni
MKYLLPTAAAGLLLLAAQPAMAMASGGNSDSKTLNSLDKIKQNGVVRIGVFGDKPPFGYVDEKGNNQGYDIALAKRIAKELFGDENKVQFVLVEAANRVEFLKSNKVDIILANFTQTPQRAEQVDFCSPYMKVALGVAVPKDSNITSVEDLKDKTLLLNKGTTADAYFTQNYPNIKTLKYDQNTETFAALMDKRGDALSHDNTLLFAWVKDHPDFKMGIKELGNKDVIAPAVKKGDKELKEFIDNLIIKLGQEQFFHKAYDETLKAHFGDDVKADDVVIEGGKILEHHHHHH

SEQ ID NO: 32958 - protein, 411 aa, Candida albicans
  misc_feature (207)..(207): Xaa can be any naturally occurring amino acid
  unsure (1)..(411): unsure at all Xaa locations
MDNHQQQQQLQQYQQQFQQPQQQLYPGEQIVHPAAAQTGQNTTNVTAVSSSNITQSATSSLHSQQLQHVDVSKSAAEEAIRRSLLPERSTVSKGKYSLTDFSIMRTLGTGSFGRVHLVRSVHNGRYYAIKVLKKHQVVKMKQVEHTNDERRMLKLVEHPFLIRMWGTFQDSKNLFMVMDYIEGGELFSLLRKSQRFPNPVAKFYAAXVTLALEYLHSHDIIYRDLKPENILLDRNGHIKITDFGFAKEVSTVTWTLCGTPDYIAPEVITTKPYNKSVDWWSLGVLIFEMLAGYTPFYDSTPMKTYEKILAGKIHYPSFFQPDVIDLLTKLITADLTRRLGNLINGPADIRNHPWFSEVVWEKLLAKDIETPYEPPITAGVGDSSLFDHYPEEQLDYGSQGEDPYASYFLDF

SEQ ID NO: 32959 - protein, 464 aa, Solanum pennellii
MARVTLFLLLLLVYGVVSEHFIVETLPGFHGKLPFTLETGYISVGEEEKVQLFYFFVQSERDPRNDPLMIWLTGGPGCSGLSSFVYEIGPLTFDYANSSGNFPKLELNSYSWTKVANIIFIDQPAGTGYSYANTSEAYNCNDTLSVTLTYDFLRKWLMDHPEYLNNPLYVGGDSYSGIFVALLTRKIYDGIEVGDRPRVNIKGYIQGNALTDRSIDFNGRVKYANHMGLISDKIYQSAKANCNGNYIDVDPNNILCLNDLQKVTRCLKNIRRAQILEPYCDLPYLMGILQETPTNGQSVFPIAGPWCREKNYIYSYVWANDKAVQKALNVREGTTLEWVRCNESMHYRGKERTESYVYDVPSVIDDHQHLTSKSCRALIYSGDHDMVVPHLSTEEWIETLKLPIADDWEPWFVDDQVAGYKVKYLQNDYEMTYATVKGAGHTAPEYKPEQCLPMVDRWFSGDPL

SEQ ID NO: 32960 - protein, 395 aa, Anabaena variabilis ATCC 29413
MKKITSTNKLDCIYFDYHSTTPVDQRVAEMLLHYMTTEFGNASSIDHIYGDMAKEAVAQASVNVANLVGASSKEVIFTSGATESINLVIQSNVSNNNSTKIRPRIAVLPVEHKAVLDTCNMIAKKNLADIINLQIDSKGRLNLDFLNKICDSGISLICIMAANNEIGNIYPIQEIGQIARKYNIPFLCDASQAVGKIPINFEEWGITYLALSAHKLYGPKGSGALVVRKGHQLNPILFGGGHQKGLRSGTLNVPGIVGLGEACRLRILEMDEDEKAIANLRDKLQNLLLDKVPGLVINGDVNNRLSGNLHISIPDVSNSAIIARVRQKLAISTGAACSSGVQAPSHVLQAMDLPTDIIDGALRIGIGKFTKLEEIEQAAEILSLAVQQTRQVMYC

SEQ ID NO: 32961 - protein, 629 aa, Anabaena variabilis ATCC 29413
MAKIVGIDLGTTNSCIAVIEGGQPVVIPNTEGGRTTPSVVAYTKKGEKLVGQIAKRQGVMNPENTFYSVKRFIGRRYDEVTQEAKQVTYKVVRDSNGNVKLHCPALNKEFSPEEIAAEVVRKLIDDASTYLGEPVRQAVITTPAYFNDSQRQATKDAGRIAGIEVLRIINEPTAAALAYGLDKKTNETILVFDLGGGTFDVSILEVGDGVFEVKATSGDTHLGGDDFDKRIVDWLATEFQRNEGIDLRKDKQALQRLTEAAEKAKIELSGATQTNINLPFITATPEGPKHLDMTLTRVQFEQMCADLFDRSRIPVEQALRDAKLSPADIDEVILVGGATRMPAVQQLVRQIIGKDPHQGVNPDEVVAVGAAIQAGVLGGEVKDVLLLDVTPLSLGVETLGGVTTKIIPRNTTVPVKKSEVFSTAADAQTNVEIHVLQGEREMASDNKSLGTFRLDGIPPAPRGMPQIEVTFDIDANGILSATAREKATGKEQSISITGASTLDKSEVERMVKEADRNAEEDRRRREQIDTKNMADSVAYQAEKQLQDLGDKVPPADKSRVEGLIRDLRQAIEQNNIDRMKSLTNEIQQALMQIGTAVYSQAGASPNGGTSTDRQGGGEDVIDADFVEQK

SEQ ID NO: 32962 - protein, 305 aa, Pichia jadinii
MATEKKQSTFLIDFLMGGVSAAISKTAAAPIERVKLLIQNQDEMIKQGRLAKRYDGIADCFRRTAGEEGVVSFWRGNTANVIRYFPTQALNFAFKDKFKAMFGFKKEEGYWKWFAGNLASGGLAGGSLFGSVYSLDYARTRLANDAKSAKGTGERDSTGLLDVYKKTLASDGIAGLYRGFLPSVVGIVVYRGLYFGLYDSLKPVLLTGSLENNSWAAFLLGWVVTTGASTASYPLDTVRRRMMMTSGQAVKYDGAFDAFRKIVAAEGVKSLFKGCGANILRGVAGAGVISLYDQLQVILFGKKFK

SEQ ID NO: 32963 - protein, 305 aa, Pichia jadinii
MATEKKQSTFLIDFLMGGVSAAISKTAAAPIERVKLLIQNQDEMIKQGRLAKRYDGIADCFRRTAGDEGVVSFWRGNTANVIRYFPTQALNFAFKDKFKAMFGFKKEEGYWKWFAGNLASGGLAGGSLFGSVYSLDYARTRLANDAKSAKGTGERDSTGLLDVYKKTLASDGIAGLYRGFLPSVVGIVVYRGLYFGLYDSLKPVLLTGSLENNSWAAFLLGWVVTTGASTASYPLDTVRRRMMMTSGQAVKYDGAFDAFRKIVAAEGVKSLFKGCGANILRGVAGAGVISLYDQLQVILFGKKFK

SEQ ID NO: 32964 - protein, 797 aa, Aspergillus nidulans FGSC A4
MKFFIDDLPVLFPYPRIYPEQYAYMCDLKKTLDAGGHCVLEMPSGTGKTVTLLSLIVAYQQHYPEHRKLIYCSRTMSEIEKALAELRELMKFRSEQLGYTEDFRALGLTSRKNLCLHPSVKREKSGTVVDARCRSLTAGFVKEKKEKGEDVELCVYHENLDLLEPHNLVPPGVFTLDGLLNYGEQHKQCPYFSARRMPLTPVQMPYCNVIIYSYHYLLDPKIAERVSKEFSKDCIVVFDEAHNIDNVCIESLSIDITEDSLRKATRGANNLERKIQDVKSSDAEKLNNEYMKLVEGLREAEQARDEDQFISNPVLPDDLLKEAVPGNIRRAEHFVAFLKRFIEYLKTRMKVTHTISETPLSFLNHVKELTFIERKPLRFCAERLTSLVRTLELINIEDYQPLQEVATFATLVSTYDKGFLLILEPFESEAATVPNPVLHFTCLDAAIAIKPVFDRFSSVVITSGTLSPLEMYPKMLGFTTVMQESYSMTLARRSFLPMIVTRGSDQAQISSSFQIRNDPGVVRNYGNIVLEFSRITPDGVVVFFPSYLYMESIISMWQGMGILDSIWNYKLILVETPDAQESSLALETYRTACCNGRGALLFCVARGKVSEGIDFDHHYGRAVLCIGVPFQYTESRILKARLEFLRENYRIRENDFLSFDAMRHAAQCLGRVLRGKDDYGIMVLADRRFQKKRNQLPKWISQALLESETNLSTDMAVATAKNFLRTMAQPFKAKDQEGISTWSLADLERHRQKQIQEQERLQRETFAQGDRTNGSRNGAGDEFDEGIDEDLMMLDAQ

SEQ ID NO: 32965 - protein, 396 aa, Anabaena variabilis ATCC 29413
MPNQLSNQTLSTQTASSLITLAVAPAKVIRGSNILQVAATEIAKLGSRPLIVAGNSTVAISQESLQPILEAQNLHVAQASYGADCAEASLKALRKAAKEHKADAIIGIGGGKALDTAKLVAHQLDLPVATIPTSAATCAAWTALSNVYSEDGAFLYDVALSRCPDLLILDYDLIQTAPQHTLVAGIGDAIAKWYEASVSSGHLEQTLIISAVQQARVLRDILFQKSAIALQQPGSEAWREVVDATVLLAGVIGGLGGAQCRTVAAHAVHNGLTHIAGHSSIHGEKVAYGILVQLRLEEMVQGNQLATASRQQLLKFYAEIGLPQKLGDLGLGNITLGELQTAAEIALTPQSDIHRLPFKVALEQLMAAMVSTTAPTDSRDSVHRVSTRGISDEVEE

SEQ ID NO: 32966 - protein, 613 aa, Anabaena variabilis ATCC 29413
MSDLFKGFEQLIELVKTLEEKAEKGEIKTDFQINSRSMSSIPRTGNIPRPNNMANDIGTSRIRTQPSPNSDSGNGDTSDVVVPPDAPSGNSLKDVGGLGEVVKELKELIAIPLKRPDLLAKLGLEPTRGVLLVGPPGTGKTLTARGLAEELGVNYIALVGPEVISKYYGEAEQRLRGIFEKAAKNAPCIIFIDEIDSLAPDRSAVEGEVEKRLVAQLLSLMDGFSHSQGVIVLAATNRPDHLDPALRRPGRFDREVQFRVPDVKGRRDILQILTRAMPLEDTVDLDAIAERSVGFVGSDLKALCQKAAYTALRRQMPSVESAVPENMTVSQVDFLQALKEIKPAVLRSVEVEVPHIAWDDIGGLDTIKQTLRESVEGALLYPELYLQTKALAPKGILLWGPPGTGKTLLAKAVASQARANFIGVNGPELLSRWVGASEQAVRELFAKARQAEPCVVFIDEIDTLAPARGSFSGDSGVSDRVVGQLLTELDGIEVGSTILVIGATNRPDALDPALLRAGRLDLQMKVDLPDLASRLAILQVHSQGRPLEGVDFNYWAEMTKNWNGADLTLLCNQAAVEAIRRFRSQGLTDPSEIKITTDDFNYAYKVLTEQRPD

SEQ ID NO: 32967 - protein, 362 aa, Anabaena variabilis ATCC 29413
MEIGVPKETKDQEFRVGLSPSSVRVLKENGHSIFVQTQAGSGAGFTDDEYRSVGADIVPTAEAVWSRELVVKVKEPLTSEYNFLQKGQILFTYLHLAADRKLTEHLIDSGICAIAYETVEQPGANRLPLLTPMSIIAGRLAVQFGARYLERQQGGRGVLLGGVPGVKPGKVVILGGGVVGTEAARIAVGMGAAVQILDVNVERLSYLETLFGSRVELLYSSSAHIEAAVKEADLLVGAVLVLGRRAPILVSRELVKQMHPGSVIVDVAVDQGGCVETLHATSHTNPIYIEEGVVHYGVPNMPGAVPWTATQALNNSTLPYVVQLANQGLKALEVNQALAKGLNVQNHRLVHPAVQEVFPDLT

SEQ ID NO: 32968 - protein, 633 aa, Anabaena variabilis ATCC 29413
MAKVVGIDLGTTNSCVAVMEGGKPTVIANAEGFRTTPSVVAFAKNGDTLVGQIAKRQAVMNPENTFYSVKRFIGRRYDEVTNEATEVSYKVLSSGGNVKVDSPGAGKQFAPEEISAKVLRKLVEDASKYLGETVTQAVITVPAYFNDSQRQATKDAGKIAGIEVMRIINEPTAASLAYGFDKKSNETILVFDLGGGTFDVSVLEVGDGVFEVLATSGDTHLGGDDFDKKIVDFLAEQFRKDEGIDLRKDKQALQRLTEAAEKAKIELSSVTQAEINLPFITATQDGPKHLDMTLTRAKFEELCADLIDRCRIPVEQALRDAKLKKDNIDEVVLVGGSTRIPAVQQLVKNLLGKEPNQTVNPDEVVAVGAAIQAGVLGGEVTGILLLDVTPLSLGVETLGGVMTKIIPRNTTIPTKKSEVFSTAVDGQTNVEIHVLQGEREFANDNKSLGTFRLDGIPPAPRGVPQIEVVFDIDANGILNVTAKDKGTGKEQSISITGASTLDKTDIDRMVREAEQNASSDKERREKIERKNQADSLAYQAEKQLQELGDKVPEADKTKVEGLVKDLREAVAKEDDEQIKKLTPELQQALFAVGSNIYQQAGGGAAPGAAPQDGGTTSSDGGDDVIDADFTETK

SEQ ID NO: 32969 - protein, 653 aa, Anabaena variabilis ATCC 29413
MGKVIGIDLGTTNSCVAVLEGGQPIVIANSEGGRTTPSIVGFGKSGDRLVGQLAKRQAVTNAENTIFSIKRFIGRRWEDTEIERDRVPYGCVKGRDDTVDVQIRGRNYTPQEISAMVLQKLKQDAENFLGEAVTQAVITVPAYFTDAQRQATKDAGTIAGLEVLRIINEPTAAALAFGLEKQDQEQLILVFDLGGGTFDVSILQLGDGVFEVKATGGNNQLGGDDFDGCVVCWMIERFQQQEKIDLAQDKMALQRLREAAEKAKIELSSMASTSINLPFITADETGPKHLEMELSRSKFEELVGQLIEATIQPMIQALKDADLKPQDIDKIILVGGSTRIPAVQNALIKFFNGKAPDRSVNPDEAVALGAAIQAGVLGGEVDNLLLLDVTPLSLGIETLGEVFTKIIERNTTIPTSKSQIFSTAVDGQTSVEIHILQGERTMARDNKSLGKFLLAGIPPAPRGVPQIEVSFEIDVNGILKVAAQDKGTGREQSIRITNTGGLSTNEVERMRQEAEVFAEEDRRRKELVELKNQADNLLIIYESTLKDNGELIGEQIKVLANEKVAQIQSVMTNPAISLKEFQQCLDDFQQTLFSIGANVYQRANTQTDDEVEVISDSSSPLDIEHPISGTLIPQFNFDFDDESTAQADYEAID

SEQ ID NO: 32970 - protein, 262 aa, Anabaena variabilis ATCC 29413
MIIENSEVVLSVKNLTAEVDGTPILKGVNLEVRSGEIHAIMGPNGSGKSTFSKVLAGHPAYTVTGGEVIFQGQNLLELEPEERARTGVFLAFQYPLEIPGVSNLDFLRVAYNSRRKAQGLEEIDTFDFDDLIEEKLEVVKMNPAFLNRSVNEGFSGGEKKRNEILQMALLEPKLAILDETDSGLDIDALKIVAHGVNQLASPENATIMITHYQRLLDYIVPDFVHVMARGQIITSGGKELALELESRGYDWLLEDAAVEVGV

SEQ ID NO: 32971 - protein, 388 aa, Anabaena variabilis ATCC 29413
MSNRPIYLDCHATTPLDEQVLAAMLPYFTEKFGNPASIGHIYGWEAEAAVKQAREILAAAINASPEEIVFTSGATEANNLAIKGVAEAYFQKGQHIITVATEHHAVLDPCEYLKTLGFEITILPVQADGLIDLAQLEKALRPETILVSVMAANNEIGVLQPLAEIGEICRSHNIIFHTDAAQAIGKIPLDVQAMNIDLMSLTAHKVYGPKGIGALYVRRRNPRVQLAPQQHGGGHERGMRSGTLYTPQIVGFAKAVEIALAEQTMENQRLTQLRDRLWSQLAQLEGIHLNGHPTQRLAGNLNISIEGVDGAALQLGLQPVVAVSSGSACSSTKTAPSHVLTALGSPEKLAYASIRFGIGRFNTAEEIDIVAKYAIATIQSLRKQASLV

SEQ ID NO: 32972 - protein, 197 aa, Anabaena variabilis ATCC 29413
MAVTLYSSIATPHNKNTHHYFTRRTFLPDQQNSLWKIEAGFVRTFTYLENGTTVALGLWGPGDILGRALSKLEPYQMECLTKVEATIVPIEEWKNPTDTLLAHIQQAEELMVIRSYKKVDTMLIKLLAWLSKKFGSEVDKGRLIDMRLTHEDLAEMLGSTRVTITRILGQFEEEGLINRLSLHRIVLKEEDIWYYEI

SEQ ID NO: 32973 - protein, 405 aa, Anabaena variabilis ATCC 29413
MKVLILNAGSSSQKSCLYEIPDDALLTEAPQPLWEGKVNWTQDRSVAEIEVKTAGGETLHESIYGDSRQAHVTYMLYTLSRGTTKVIGQLSEIDVVGHRVVHGGQNYRNSVIITEEVKQAIAKLSNLAPAHNPAALEGIEAIEKSLGDVPQVAVFDTGFHATLPDAAAIYPGPFEWVEQGIRRYGFHGISHQYCSARAAQILGRDLASLRIITCHLGNGCSLAAIKNGRSIDTTMGFTPLDGLMMGSRSGSIDPGIIVHLMRQSDYSAERLDYVLNKASGLRGISGVSSDLPQVIEAITQGNYRAQLAWDMYVHRLRSGIGSMLASLGGLDVLVFTAGVGEKSPGIRQAACEAFGFLGLKLDPEKNQNNPVDIDIATADSTVRVLVIHTQEDWAIAQQCWHLLNR

SEQ ID NO: 32974 - protein, 107 aa, Anabaena variabilis ATCC 29413
MTQETSEKISNLITQNKIMVFMKGTKLMPQCGFSNNVVQILNTLGVPFETINVLEDQEIRQGIKEYSNWPTIPQVYINGEFIGGSDILIELYQKGELQQLVEVALAS

SEQ ID NO: 32975 - protein, 513 aa, Anabaena variabilis ATCC 29413
MNLSFPELGISQERVEHLEKLGFTAPTNIQAQAIPQLLSGRDVVGQSQTGTGKTAAFSLPILERLDPQQKAVQAIVLTPTRELAIQVHDAMAQFIGNSGLRTLAIYGGQSIDRQMLQLKRGVHIVVGTPGRVIDLLERGNLKLDQVKWFVLDEADEMLSMGFIDDVEKILSQAPQERQTALFSATMPPSIRMLVNKFLRSPVTVTVEQPKATPNKINQVAYLIPRHWTKARALQPILEMEDPETALIFVRTRRTAAELTSQLQAAGHSVDEYHGDLSQQARERLLTRFRSRQVRWVVATDIAARGLDVDQLSHVINYDLPDSVETYVHRIGRTGRAGKEGTAITLVQPFERRKQQIFERHVRQNWQLLSIPTRAQIEARHILKLQEQVREALAGERLASFLPIVSELIEKYDAQAIAAAALQIAYDQTRPAWLSTDAEIPEEVASTPKPKLGGKRREFSGDRGRSNWNKSDNNNSDDERRGTPKPKLRTSRRETSATPSNPKLGSPAARESAS

SEQ ID NO: 32976 - protein, 303 aa, Anabaena variabilis ATCC 29413
MTMYKNLAIALFSLTLTTVIPDAAFGETVMQKVARTGVLTAGTSRDAMPFAYTNAQGQLTGYSVDMLSVIKQQLEKELGKKIQLKLVALTPAQRIPKIVNQQVDIVCDASSFTWERDKKVDFSVSYGATGTQLLVKSGSNLGSPESLIGKRIGVLAQTTNEQAIKRVQPQAKLVYLKSRSEGYTALQEGKIDAFSSDSILLESWLQKAKNPDDFAIVPDRPYSREGIACMVPENNSKFLDAVNYSLVKFMQGFVNGDTRYVTTFDRWFGAKGVVLLNRDLRDLMKETMQLFIEFREEIPQQEL

SEQ ID NO: 32977 - protein, 440 aa, Anabaena variabilis ATCC 29413
MSNQGAFEGAANVESGSRVFVYEVVGMRQNEETDQTNYPIRKSGSVFIRVPYNRMNQEMQRITRLGGKIVSIQTVSALQQLNGKTTIATVTDASSETAKSEGNGKATPVKTDSGAKGFAKPPAEEQLKKKDNKGNTMTQAKAKHADVPVNLYRPNAPFIGKVISNEPLVKEGGIGIVQHIKFDLTGGNLKYIEGQSIGIIPPGVDKNGKPEKLRLYSIASTRHGDDVDDKTISLCVRQLEYKHPETGETVYGVCSTYLTHIEPGSEVKITGPVGKEMLLPDDPEANVIMLATGTGIAPMRTYLWRMFKDAERAANPEYQFKGFSWLVFGVPTTPNILYKEELEEIQQKYPDNFRLTYAISREQKNPQGGRMYIQDRVAEHADELWQLIKNEKTHTYICGLRGMEEGIDAALSAAAAKEGVTWSDYQKDLKKAGRWHVETY

SEQ ID NO: 32978 - protein, 1562 aa, Anabaena variabilis ATCC 29413
MNDNSTHQNQQITANNDSGDTYQGQRWLVEERDACGVGFIAHRQNHGSHEIVAKALAALTCLEHRGGCSADQDSGDGAGILTAIPWELLQQDYPQGQIDFLSSKNIAVGMIFLPQDAEIAQKAKAIFEQIATEEKFTVLGWRVVPVQPDLLGIQAKENQPRIEQVILSADNSGDALERQLFITRKRLFKAVKSISEEFYICSLSSRTIVYKGMVRSAVLGAFYLDLQNPAYKSAFAVYHRRFSTNTMPKWPLAQPMRLLGHNGEINTLLGNINWMMAREANLSHPIWGDRFDELRPSVLMGNSDSATLDNVLELLVHSGRSPLEALMIMVPEAYQNQPSLRNYPEIVDFYEYYSGLQEAWDGPALLVFGDGKTVGATLDRNGLRPARYLITKDDYIVVASEAGVVDFPEADIIEKGRLGPGQMIAVDLVNHEVLKNWEIKQRIAKQQPYGEWLQKYRQELKQLTSQVNGNGNGNGNGHRVADNGHVSTTKVDKETLLRQQLAFGYTTEDVEMVIQPMAATGSEPTFCMGDDIPLAVLTDKPHLLYDYFKQRFAQVTNPAIDPLREKLVMSLKVELGERGNLLEPKPEYARRLKLESPVLTESELAAIKLSGFATAELSTLFAIANGPDGLKAAVLALQQQAAESVRAGAKILVLSDRAGAGISTEYSYIPPLLAVGAVHHYLIREGLRTKTSLIVDTAQCWSTHHFACLIGYGAGAICPYMTLDTVRNWWSDPATQQFMERGKITSLSLEQAIANYRKAVESGLLKILSKMGISLLSSYQAAQIFEAIGIGGDLLALGFQGTASRIGGLSVSELAQEVLSIHSKAFPELATHKLENLGFVNYRPTGEYHMNNPKLAKALHEAVDGKKYDHYEVYKQYLQGRPITALRDLLDFHSDRAPISLEEVESVSDIVKRFCTGGMSLGALSREAHEVLAIAMNRIGGKSNSGEGGEDPVRYKVLDDVDASGHSPTLPHLRGLRNGDTASSAIKQVASGRFGVTPEYLASAKQIEIKIAQGAKPGEGGQLPGPKVSPYIAMLRRSKPGVTLISPPPHHDIYSIEDLAQLIFDLHQINPKAQVSVKLVAEIGIGTIAAGVAKANADIIQISGHDGGTGASPLSSIKHAGSPWELGLSEVHRVLMENSLRDRVVLRVDGGLKSGWDVLIGALMGAEEFGFGSIAMIAEGCIMARICHTNNCPVGVASQKEELRKRFTGIPEHVVNFFYFVAEEVRHLLARLGYRSLSEIIGRADILTTRKDARLTKTQAINLNCLLQLPDTRENRSWLAHEEVHSNGPVVDDQLLADSDIQAAIRNQSSVTKTLPIVNTDRTLGARLAGAIASQYGDSGFEGQINLNFTGSVGQSFGAFNLPGIILTLEGEANDYVGKGMHGGEIIIKPPAEATYDPAQNVIVGNTCLYGATGGVLFANGLGGERFAVRNSKGVAVIEGTGDHCCEYMTGGTIVVLGKVGRNVAAGMTGGLAYFLDEDGSFPELVNREIVKIQRVLTTAGEKQLQDLIKAHVERTGSPKGQIILDNWQEYLPKFWQLVPPSEAESPEANPQSVVEKYLSSV

SEQ ID NO: 32979 - protein, 130 aa, Anabaena variabilis ATCC 29413
MAYAIIETGGKQVRVEPGRFYDIELLSAEPDEKVTIESVLLVQNDGEVTIGQPLVAGATVQGTVLRHLRGRKVLVYKMKPKKKTRKKRGHRQEITRLLIDSITFNGTVLTAPTASAETADATPDTETAAE

SEQ ID NO: 32980 - protein, 342 aa, Anabaena variabilis ATCC 29413
MQFIDQAQIEVEAGKGGDGIVAFRREKYVPAGGPSGGNGGRGGSVVFVAVENLQTLLDFRYKHIFKADDGGRGGPNNCTGASGKDLIVQVPCGTTIYDAETGDLLGDLTQPNQQLLIAAGGKGGLGNQYFLSNRNRAPEYSLPGLPGERKLLRLELKLLAEVGIIGLPNAGKSTLISSLSAARPKIADYPFTTLIPNLGVVRKPTGDGTVFADIPGLIEGAADGAGLGHDFLRHIERTRVLLHLIDATSDDVIRDYNTIEQELQAYGRGLSERMQIVALNKIDAVDRETVDLDALATQLNHLSHAPVFLISAVTRTGLEPMLQEVWGILDQVNALEEAEVFR

SEQ ID NO: 32981 - protein, 242 aa, Anabaena variabilis ATCC 29413
MESHKEKILVVDDEASIRRILETRLSMIGYDVVTAGDGEEALETFRKSDPDLVVLDVMMPKLDGYGVCQELRKESDVPIIMLTALGDVADRITGLELGADDYVVKPFSPKELEARIRSVLRRVDKTGASGIPSSGVIHVGNIKIDTNKRQVYKGDERIRLTGMEFSLLELLVSRSGEAFSRSEILQEVWGYTPERHVDTRVVDVHISRLRAKLEDDPSNPELILTARGTGYLFQRIIEPGEE

SEQ ID NO: 32982 - protein, 594 aa, Anabaena variabilis ATCC 29413
MRTPAPVIASEQQATKQLSTLRRFLQYLRPFRKEVPIALSLVLIGAVTQAIGPFLLGWSVDNLIAKGNLPGLLLLLVLLGLNYSFGIWAIRGQIIRVGWIMQRLLAQLRQDIFTKIQSLPLSFFDRSEAGDLMSRLLNDVNTVNQAFGQTVAQMLGNTFSLVGIVIAMLSINLQLGLLSNLVVPLMIFTTSLFARWARTKFRVTRQTIGELSAKLEEDIGSVREAQAFNRVHLNIAEFDVLNAANRDANVEAVAITAAFLPSIDFLNTLATAGVLAYGGYLAVTGAATVGVVTSFLLYVQQFFRPIQILSQFYTQAQSAFAGLERIFLLLDEPSQLNDAPNATQMPPIQGEVTFEDVKFGYNPEQLVLKGVNLHADAGQMVALVGATGSGKTTIINLILRFYDVSDGAVKIDGVDVRSVTQASLRHQIGIVLQDNILFSGTVAENIAFGAPYATQAEIEAAAQMANVHEFITSLPQGYTTKLGERGAPLSQGQRQLISIARAVLINPRILILDEATSSIDTRTEALVQDAIARLLQGRTSFVIAHRLSTVTQANQVLVIQQGQIVERGTHAELVRQQGIYANLYALQLGAATAQ

SEQ ID NO: 32983 - protein, 426 aa, Anabaena variabilis ATCC 29413
MSFSHLGLSNEIIRAVTELGYTKPTPIQMQSIPAVLSGRDLLAGAQTGTGKTASFTLPLLHLLSQDSLKSASSPSSPIRALILTPTRELAAQVESSVRDYGKYLNLNSMVMFGGVSINPQKQRLKGRVDILVATPGRLLDHVQQGTVNLSQIEILVLDEADRMLDMGFIRDIRRILSLLPKQRQNLLFFATFSDKIKELAAGLLNRPQMIEVARRNVTADTVTQKVYKIERDRKRDLLAHLIRKDNWYQVLVFTRTKYGADRLVKQLGHERIQALAIHGNKSQSARTHALAKFKNGSLQVLVATDIAARGLDISELPYVVNFDLPYVPEDYVHRIGRTGRAGASGEAVSLVSADEYHLLADIEKLIEKRLPFELVAGIGANSQTKPEPSQDERKQKPKDSKHQPRSAAQAVPKKSGKKRLTNSGKR

SEQ ID NO: 32984 - protein, 338 aa, Anabaena variabilis ATCC 29413
MNAHRGSAVLSSATFKMQPTATGLTENHRLRLFSGSSNVQLSQEVARYLGMDLGPMIRKRFADGELYVQIQESIRGCDVYLIQPCCQPVNDHLMELLIMVDACRRASARQVTAVIPYYGYARADRKTAGRESITAKLVANLITQAGANRVLAMDLHAAQIQGYFDIPFDHVYGSPVLLDYLTSKQLHDLVVVSPDVGGVARARAFAKKLNDAPLAIIDKRRQAHNVAEVLNVIGDVKGKTAVLVDDMIDTGGTIAAGAKLLREEGARQVYACATHAVFSPPAVERLSSGLFEEVIVTNTIPIPESDRFPQLVVLSVANLLGETIWRIHEDTSISSMFR

SEQ ID NO: 32985 - protein, 400 aa, Anabaena variabilis ATCC 29413
MGRAKKVVLAYSGGVDTSVCIPYLKQEWGVEEVITLAADLGQGDELEPIREKALKSGASESLVADVKESFIKDYAFPAIQANALYENRYPLGTALARPLIAKILVEAAEKYGADAIAHGCTGKGNDQVRFDVSCTALNPKLKILAPAREWGMSREATIAYGEKFGIPSPVKKSSPYSIDKNLLGRSIEAGALEDPKFEPPEEIYEMTKAIADTPNEPEYIEIGFTQGLPTTINGTPKDPVALIQELNQLVGSHGVGRIDMIENRLVGIKSREIYESPAMLVLIQAHRDLESLTLTADVSHYKRGIEETYSQIVYNGLWYSPLKAALDAFIQKTQERVSGIVRVKLFKGNATIVGRWSDSSLYTPDLATYGAEDQFDHKAAEGFIYVWGLPTRIWAQQDRG

SEQ ID NO: 32986 - protein, 388 aa, Anabaena variabilis ATCC 29413
MKLAARVSQVTPSITLAIAAKAKAMKAEGIDVCSFSAGEPDFDTPAHIKAAAAKALDEGKTKYGAAAGEPKLREAIAHKLQKDNHLDYKPENVIVTNGGKHSLYNLIVALIDPGDEVIIPAPYWLSYPEMVTLVGGKSVIVPTDASTGYKITPEQLRKAITPKTKLFVLNSPSNPTGMVYTPEEIKALAQVVVDADIYVVSDEIYEKILYDGAQHISIGSLGKEIFNRTLISNGFAKAYSMTGWRLGYLAGPVDIIKAASSIQGHSTSNVCTFAQYGAIAALEDSQDCVEEMRQAFAKRRQVMLDRLNAIPGLSTAKPDGAFYLFPDISKTGLKSLEFCDALIEEHKVAVIPGIAFGADDNIRLSYATDLATIEKGLDRLEKFVRSRI

SEQ ID NO: 32987 - protein, 488 aa, Anabaena variabilis ATCC 29413
MLDQNQTPLIDGIKACIARPHAAFYTPGHKRGRGIAQPLADLLGEAVFGADLTELANLDNLSAPQGVIQEAQRLAAAAFGAAQTWFLVNGSTCGVEAAIMATCRPGDKIILPRNVHSSAIAGLILSGAIPIFIHPEYDQVLDIAHSMTPEAVKAALQQHPDAKAVLAVYPTYYGVCGDLEAIAQITHQYNIPLLVDEAHGAHFTFHPELPTPALAAGADLTVQSIHKVLGAMTQASMLHIQGDRINAVRVSQALQLLQSTSPSYVLLASLDAARQQMALCGKQLMSRTLQLANEARERISQIPGLSVLQPPTMTPSSGFTTLDKTRLTITVSGLGLTGFAAEEILDEQLGVTAEFATFKHLTFIISLGNTTADIEQLVQGFTTLAETTPPAKALVNPRVNSNLEYFSEISPRDAFFADSETLSIEQARDRICAEIICPYPPGIPVIMPGEVITKPAIEYLQHIQSSGGFITGCADTSLSTLKVLVIGH

SEQ ID NO: 32988 - protein, 633 aa, Anabaena variabilis ATCC 29413
MKNFGKKALIKQQSPKRVAWTGALAASLIMLPTMFGGNPVLAQKAERESLSYGELIQKVNQEQVKRVELDETEQIAKVYLKGQKPDAPPIQVRLLEQNNELINRLKEKNVDFGEISSANSRAAVGLLINLMWILPLVALMLLFLRRSTNASSQAMNFGKSRARFQMEAKTGVKFDDVAGIEEAKEELQEVVTFLKQPERFTAVGARIPKGVLLVGPPGTGKTLLAKAIAGEAAVPFFSISGSEFVEMFVGVGASRVRDLFKKAKDNAPCLIFIDEIDAVGRQRGTGIGGGNDEREQTLNQLLTEMDGFEGNTGIIIIAATNRPDVLDSALLRPGRFDRQVIVDAPDLKGRLEILQVHSRNKKVDPSVSLEAIARRTPGFTGADLANLLNEAAILTARRRKEAITILEIDDAVDRVVAGMEGTPLVDSKSKRLIAYHEVGHGLVGTLLKDHDPVQKVTLIPRGQAQGLTWFTPNEEQGLISRSQLKARITSTLAGRAAEEIVFGKPEVTTGAGDDLQKVTSMARQMVTRFGMSELGPLSLENQSGEVFLGRDWMNKSDYSEEIAAKIDSQVREIINTCYQTSKELLQTNRVVMERLVDLLTEQETIEGDLFRKIVSESQNQVVDEQLSMVMGNG

SEQ ID NO: 32989 - protein, 393 aa, Anabaena variabilis ATCC 29413
MNIELFIQRAEALHKQLADLYQTASVLPWIPPDLLPQAFKELYSNSKLVQMAAEELYHQNEELIQTRSLLEAERQHYHDLFEFAPDGYLVTNAEGIIQEANLTAANLFNAPKHILVDRSIINFIRLEERESFRCELNQLFQTDKAKKLIVRLHQFHGESFDALLTISVVRSQNGKIKSLHWLLSHINENQQQNLGLVNHENYLSQNRSVYVYAKGENIPLNPLVIWYVRQGLVKLSTFCETGEEVLMGLVKTHMVFGSSMTSLPIYQATALSEVELVSINFAEIAVSQMLSHNLLPKINQQLQQKESFLVIAGRRKVEDRLYHLLQFLKQEIGEPIGEGTRLSVRFTHEDIASACCTTRVTITRLMGKLQQQGLISFDSKKHMIINKRLEDRA

SEQ ID NO: 32990 - protein, 277 aa, Anabaena variabilis ATCC 29413
MVSQIPKETCPRPFLKWAGGKSRLIPQYLSHLPKNYRTYHEPFLGGGALFFYLQPSKSILTDINSELITTYRCVRDRIEELISLLKEHKGQHNRDYYYSVRGKTVDNELEQAARFIYLNKTCYNGLYRVNSQGQFNVPFGKYNNPNICQEDLLRAASNVLATSEIKQADFTEVLNYATGSEDFVFFDPPYYPISSTSYFTGYSKNSFGEKDQLILRNTCVELASRGVKVAVCNSDSEFIKNIYQEIGFNIYFIEAKRSINSNIKKRGLVKELLITSY

SEQ ID NO: 32991 - protein, 632 aa, Anabaena variabilis ATCC 29413
MTVSLPSPTSPSQTEKHTQSVNSPSVVVTPQRVTGGFALLDSLLRHGVEYIFGYPGGAILPIYDDLYKVEATGSLKHILVRHEQGAAHAADGYARATGKVGVCFGTSGPGATNLVTGIATAYMDSIPMVIVTGQVPRKMIGTDAFQETDIYGITLPIVKHSYVVRDPQDMARIVAEAFHIASTGRPGPVLIDVPKDVAFEQFDYVPVEPGSIKLRGYRPTVKGNPRQINAAIELIRESRRPLLYVGGGAIASGAHAEIQELAELFNIPVTTTLMGIGAFDEHHPLSLGMLGMHGTAYANFAVTDCDLLICVGARFDDRVTGKLDEFASRAKVIHIDIDPAEVGKNRIPEVPIVGDVRKVLLDLLRRCKQTGAKNTPNQNQEWLNLINRWREDYPLVIPQHPDSIPPQEVIVEVGSQAPHAFYTTDVGQHQMWAAQFLKNGPRRWISSAGLGTMGFGLPAAIGAKVAFPDEQVICISGDASFQMCLQELGTASQYGINVKTVILNNGWQGMVRQWQQAFHGERYSCSNMEVGMPDVELLAKAYGIKGIVVTQREQLKDAIAQMLAYDGPVILDVRVTKDENCYPMVAPGKSNAQMIGLPKQPQRTSVEPVYCSHCGTSNLPNHNFCSECGTKL

SEQ ID NO: 32992 - protein, 732 aa, Anabaena variabilis ATCC 29413
MPIPRVSCLISASHREGVIVLLSGSTPCPGLFYATPAQDGILSRIRIPGGIINSKQCQAIADIADEYGGGYVDVTNRANIQIREIRADIDSPVLKRLQELGLGSRNTGVDQIRNIMTSPTAGIDPQELIDTRSFVRSWDSYITENSALSRLSAKFSVCFDGGGLVSVSDRLNDITFAATLVENRVYFRLCLSIGAKGKPPIDTGILLSPEECLPVLMALTEVYLAHTDAHNKRKPRLREVVNSLGLDNYLQEVEKLLTISFGGKNLTPLPPSLVGKGEKTKHFSPLLVGEGLGERSHTKYHHIGIHPQHQQNLYYIGLVLPLGRLETWQLKSLADLSAKYGNGTLRLTPWQNLLLTDIPQQWLTEVQSHILGLGLDFSAANIKSGLVACSGIQGCAAAATDTKSHALALADYLESHITLEHPVTIHFSGCDKSCAHHGDSDITLLGVNNETGEGYQVYVGDRDSREKFGREVHPYIAVAELPTTIEQILGMYKNEYAKPDESFGQCTNHHETPQLKQLFPQANPMSDYIHDANEIYRNSFAIIRSEANLDILPPDIAKVAVRLIHACGMTDIVTDLGYSATAAQSGRAALAVGAPILCDCRMVADGVTRRRLPADNQVICTLNEPEVPELAKKLGNTRSAAALELWIPHLEGAVVAIGNAPTALFRLLEMLDAGCPKPALILGFPVGFVGAAESKAALAADSRNIPYMTLHGRRGGSAIAAAAVNALATEEE

SEQ ID NO: 32993 - protein, 447 aa, Anabaena variabilis ATCC 29413
MRSLLMKNPVVIGVSWIAAYIVIILFPLLILLLYPPTPSDERSFLLEFSAALGFIGLAMMAMQFALTARINRVEASYGVDLILQFHRYTSIAAFFFILAHPIILFINNPETLQLLNFFTAPWRARAAVIATLALMAIIITSIWRKQLNIPYEPWRTAHGILAVIIVTFGLGHALGVGNYLGLFWKAVIWSGIAIAALWLLVYVRLVKPYFMQKKLYLVEAVIPQRGNVWNLVLRPRGHTGIHFQPGQFAWLTLGISPFRMREHPFSFASSAEHSDCVEFGIKALGDFTNTIKDVKPGTKAFLDGPYGVFTTDRYENTAGFVLIAGGIGITPIVSMLFTLAERQDERPLLLIYASKTWEDITYREEIEDLKNQLDLTVIHVLKEPLEDWSGERGYVDKKLLERYIPKRPATRNYFICAAPKMMDQVERALHELEVPVTHIHMEHYNLV

SEQ ID NO: 32994 - protein, 488 aa, Anabaena variabilis ATCC 29413
MNRHIQPWQRLLVLAIGSMVFAVFAPTIVQAANTPTLESLSETTIKLQISIDTTWVLLSGFLVFFMQTGFAMLEAGLVRQRSVVNTLLENFIDAAVTVLAWWAVGFGIAFGTSAGGLFGIDTFFLNQLPGADGSYPLGAPGSTAAINTYTLFFFQFAFAATASTITTGSMAGRTDFIGDLIYSAIMGAISYPIIVHWAWNSNGWLGKLSYHDFAGGSIVHTVGGWTALVGAYLLGPRPDRPPWGKLPPAHNLALATLGTMILWFGWYGFNPGSTLGTANPGLIGLVTINTTLAAGAGALTALIFLYVRTGKWDLVYCLNGSLAGLVAITAPCAYVAPWASVLIGFTGGISVVLGVSLIESLHIDDPVGAFSVHGISGMMGTLSIGFLGQAELTLNQKAGLFLGGGFDLLGIQMLGIVAITVFTVAFAFLMYGGLKAVGYLRVNAEADSIGIDAYEHGASVWPDIYPVEEVSKLQDQTKISENKTLEEQ

SEQ ID NO: 32995 - protein, 518 aa, Anabaena variabilis ATCC 29413
MYQQKSRTRNRRFSTRNYAKSRQSNSQIQIFNLVKKLSPSWQACIPLACLIVLGWSYVAVAQAPAAGPTTAELKVALDTLWVAIAAFLVFFMNAGFGMLETGFCRQKNAVNVLAKNLIVFALATVAFWAIGFGLMFGDGNDFIGFNGFFLSGEDNSPATGDAYKGVFSALSWAGVPLAAKFLFQLVFAGTAATIVSGAVAERIKFVDFLIFSLLLVGIAYPITGHWIWGAGWLADRGFWDFAGSTVVHSVGGWAALMGAAFLGPRIGKYQDKQVVALPGHNMSIATLGCLILWLGWFGFNPGSVMAADPNAITHIALTTNMAGAVGGIAATITAWLYLGKPDLSMIINGILAGLVGITASCAYVSIPSSAIIGFIAGVIVVFAVTFFDKLGIDDPVGATSVHLVCGVWGTLAVGLWSVGPGVYSWYGEGLGPAKGLFAGGGLGQLITQFLGAAAVGGMTVLVSSIFWLALKATLGIRVTREEELEGLDIGEHGMEAYSGFLKEASPGGFAEGKTSDGY

SEQ ID NO: 32996 - protein, 232 aa, Anabaena variabilis ATCC 29413
MEDRYSLQSPANPWMISAPFFQGLPETAVELALNHLVTRTHPANQVILLENDWGGSVYFIVEGWVKIRTYNLEGKEVTLNILGTGELFGEMAALDEVPRSTDVITLTTTMIGSMPSQDFVKLLHTEPLAGVRLSQLMARRLRQVNRRLRLRESDSQSRVADTLLFLAEGQGKRGQTGTELPNLPHRELSSLSGLARETVTRVLTRLEKKGLIKRDQDTICIPDLSALEKMLI

SEQ ID NO: 32997 - protein, 628 aa, Anabaena variabilis ATCC 29413
MKFSWRVLVLWTLPALVIGFFFWQGTFAGAPADMSKNAANTRMTYGRFLEYVDAGRVTSVDLYEGGRTAIVEAQDQDIENRVQRWRVDLPVSAPELISKLKEKKVSFDAHPARNDGAIWGLLGNLVFPILLITGLFFLFRRSNNLPGGPGQAMNFGKSRARFQMEAKTGVKFDDVAGIEEAKEELQEVVTFLKQPERFTAVGARIPKGVLLVGPPGTGKTLLAKAIAGEAGVPFFSISGSEFVEMFVGVGASRVRDLFKKAKDNAPCIIFIDEIDAVGRQRGAGIGGGNDEREQTLNQLLTEMDGFEGNTGIIIIAATNRPDVLDAALLRPGRFDRQVTVDAPDIKGRLEVLQVHARNKKLDPSVSLEAIARRTPGFTGADLANLLNEAAILTARRRKEGITLSEIDDAVDRVVAGMEGTPLVDSKSKRLIAYHEVGHALVGTLLKDHDPVQKVTLIPRGQAQGLTWFTPNEEQGLISRSQLKARITGALGGRAAEEIIFGSAEVTTGAGGDLQQVSGMARQMVTRFGMSDLGPLSLESQQGEVFLGRDWMTRSDYSESIAARIDSQVRLIVDECYENAKKIMRDHRTVTDRIVDLLIEKETIDGDEFRQIVAEYTDVPDKQQFVPQL

SEQ ID NO: 32998 - protein, 282 aa, Anabaena variabilis ATCC 29413
MGLPMAQRLLAANIEVVAYNRTPEKLAPLQAAGAEVVTHPRYAIREAECVILMLTNAAAIYHVLLSDTSWRTLQGRTIIQMGTITSTQSQEIRDSIVGGGGEYIEAPVLGSIPEAKAGTLTVMVGAEPKQYERCLDLLKNFGPDPLLIGPVGTASGLKLALNQLIASLTTSFALSLAFVQRQGIDVDKFMQVLRESALYAPTFDKKLQRMLDGNYSNPNFPTKHLLKDTDLFISEAQYLGLDLSSIETVQKLLQTTMKMSFANDDYSALFSVIRDWGEASGG

SEQ ID NO: 32999 - protein, 385 aa, Anabaena variabilis ATCC 29413
MRIAVAKEIEVCERRVALNPDTVARLVKQGLEVWVEAGAGERSFFDDAAYVAAGATIVGDAGKLWGETDVLLKVSPPQEREDGRLEIDLLREGAVLISFLNPLGNPVVAQQLVNRKVTALSMELIPRTTRAQSMDALSSQASLAGYKAVLIAAAALPKYFPMLTTAAGTIAPAKVFIMGAGVAGLQAIATARRLGAVVEAFDIRPAVKEEVQSLGAKFVEVKLEEETTAQGGYAKEISEASKQRTQEVVAEHVKNSDVVITTAQVPGRKAPVLVTAEMVAQMKPGSVIVDLAAEQGGNCACTEPGKDIVWNGVTIIGPINLPSSMPVHASQLYSKNLTSLLQLLIKDKALQVDFTDDIIDAACITHAGEIRNQRVKDALQAVVVR

SEQ ID NO: 33000 - protein, 271 aa, Anabaena variabilis ATCC 29413
MNNGCNRWQIISRLHLILSAIIICWMISATGLAASAAELPEIQRRGYITVAVKDNLPLLGFKDAQGNLQGLEIDLAKRLAADLLGKADAVKLQPVNNRDRLPVVFNHQVDLAIARVTATESRSRLVSFSVPYYMDGTYLITKDVSVQQINDLATRKIAVLNNSSTIAEVRYYIPSAELVGVNSYQEAQAAIENNSVAAFAADGSLLSGWVRDNPQYRLLPTKLSTAPLSVVMPKGLQYDELRREVNEAIASYIAQGWLKERISHWSIVNSQ

SEQ ID NO: 33001 - protein, 604 aa, Anabaena variabilis ATCC 29413
MALIVQKFGGSSVGSVERIQAVAQRVYKTVKAGNSLVVVVSAMGKTTDGLVKLANEISRNPNRREMDMLLSTGEQVTIALLSMALQELGQPAISMTGAQVGIVTEAEHTRARILHIETERVEGHIQEGKVVVVAGFQGISSNGSLEITTLGRGGSDTSAVALAAALQADFCEIYTDVPGILTTDPRIVPEAQLMGEITCNEMLELASLGAKVLHPRAVEIARNYGMPLVVKSSWTDDPGTWVTTPKPQGRSLINLELARPVDDVELDTDQAKVALLRVPDKPGVAAKLFGEISRQKVDVDLIIQSIHEGNSNDIAFTVTTPILKRAEAVAAAIAPSLRSPSHPKSDEAEVMVEQNIAKVSIAGAGMIGRPGVAAKMFTTLAEAGVNIQMISTSEVKVSCVIDAQDGDRAIIALRKAFEIETPLHSPTPPTLSTHNSPPVRGVALDLNQARLAIRQVPDRPGMAAQLFGILAQNNISVDMIIQSQRCRIVDGVPRRDIAFTVPRMDGETAQKLLCQVAPELGWGDVVLDSAIAKVSIVGAGMVGQPGVAAKMFEALAKHQINIQMIATSEIKISCVVSQEQGVQALQVIHTAFELAGTEKFVVPV

SEQ ID NO: 33002 - protein, 391 aa, Anabaena variabilis ATCC 29413
MTNFTSRMQAVQSPIIPVVGELIQNSPGTISLGQGVVSYSPPPEAIELLPKFLADPANNLYKAVEGIPPLLNALTDKLSTFNKMEITTDNCIVVTAGSNMAFMNAILAITSPGDEIILNTPYYFNHEMAIAMAGCRAVLVETDENYQLRPEAIAQAITPKTRAVVTISPNNPTGVVYCEDLLRNVNQICANCGIYHISDEAYEYFTYDGVKHVSPASFAGSSEYTISLYSLSKAYGFASWRIGYMVIPKHLLVAIKKVQDTILICPPVVSQYAALGALQAKPEYLQDHIQAIAQVRKIVFDYLNQLQGLCTITPADGAFYVFLKVHTQIDAFTLVKQLIQEYKVAVIPGTTFGMESGCYLRVAYGALQKDTVQEGIERLVQGLKTILYPEK

SEQ ID NO: 33003 - protein, 377 aa, Anabaena variabilis ATCC 29413
MIEYLIFLAISTATFALFSLGLNLQWGFTGLINFGHIAFMTLGAYTTVLLSLKGVPLFISAIFGAIFAALLGLVIGFATLRLREDYLAIVTIGTGELIRLVVNNQDLPVGNTWVSGAFGVQSYPIPLSTEPNLFFRLLMIGILTLLFAVTVFSLWRWIRNAQKLQLTNSTDKTSSKQEIASRFGVGIILGLLATAIYISGVITLYNYIPKAGLMLVSLLVLAFVFWRLEYLVRSPWGRVLKAIREDEEIPKAMGKNVFWYKLQSLMLGGAIAGVAGAFFAWQLSAIYPDNFQPQLTFDSWIMVILGGSGNNIGTILGAVIYFAYDAITREVLPKIIPLDEARLGAFRIMCIGLILMVLMIWRPQGILGKKEELTLGK

SEQ ID NO: 33004 - protein, 526 aa, Anabaena variabilis ATCC 29413
MSKVLVSDPIDQAGIDILSQVATVDVNTGLKPAELIEIIGQYDALMIRSGTRVTQEIIEAGTQLKIIGRAGVGVDNVDVPAATRRGIVVVNSPEGNTIAAAEHALAMMLSLSRHIPDANASVKRGEWDRKTFVGAEVYKKTLGVVGLGKIGSHVATVAKAMGMKLLAYDPFISTERAEQLGCQLVDLDLLMQQSDYITLHIPKTPETTHIINATTLAKMKPTARIINCARGGIIDEAALAAAVKEGKIAGAALDVFESEPLGESDLRAIGKDIILTPHLGASTTEAQVNVAIDVAEQIRDVLLGLPARSAVNIPGLGPDVLEELKPYMQLAETLGKLVGQLAGGRVELLTVRLQGELATNKSQPLVIASLKGLLHQALRERVNYVNANIEAKERGIRVIETRDASARDYAGSLRLEATGTLGTHSVTGALLGDKEIHLTDVDGFPINVPPSKYMLFTLHRDMPGIIGKLGSLLGSFNVNIASMQVGRKIVRGDAVMALSIDDPLPDGILAEITKVPGIRDAYTVTL

SEQ ID NO: 33005 - protein, 192 aa, Anabaena variabilis ATCC 29413
MFSSPFSEDNDNAPNGSITLTDEKGRSLECYVEHSLSVDGQEYVLLLPVDSPIEIFAWEGEDEDEEAVLVEFDDAIIDEIFATAQAVLAEQNLVLKQTAYALTVAGDLPPVEESELFTLEIEEEEAADLEPEQLQLLANFYHDEQEYAIYTPLDPLLFFAKITKTGQPVLLSPEEFRKVQPLLEEQLFNEVE

SEQ ID NO: 33006 - protein, 452 aa, Anabaena variabilis ATCC 29413
MSRHTDYSSLEQIQTTGAAAPKPLLTLSDAVALIVGIVIGAGIFQTPALVASQAGSDIAVLLLWLAGGLVSIVGALCYAELATTYPNVGGVYYYLKRAFGQKIAFLFAWARLTVIQTGSIALLAFVFGDYASEILRLGTFSSSVYATVVIVLLTILNIVGLQQGKWTQNLLTVAKVLGLLLVVVFGLGATANSVAPIESTPPGSWGLAMVFVLLSYGGWNEAAYISAEIQNRQRNIVRSLVWSIGIITAIYLLINLAYLRGLGLANMADSSAVAADLMRTIWGTPGALFISVLIAICTLGAINATIFTGARTNYALGQDFTLFGFMGSWRQLPSTPGTALLVQGAIALALVLLGTFTRKGFETMVDYTAPVFWFFFLLSGISLLILRRKEPHILRPFRVPFYPVTPLLFCAVCGYLLYSSVVYTNVGAVVGVLVVIAGIPILFWNRYRQGKA

SEQ ID NO: 33007 - protein, 400 aa, Anabaena variabilis ATCC 29413
MSVIYLDNNATTKVDPEVVEAIMPYLTDYYGNPSSMHTFGGQLGKAVRTAREQVAALLGADESEIVFTSCGTEGDNAAIRAALLAQPEKRHIITTQVEHPAVLNVCKQLETQGYTVTYLSVNGHGQLDLDELEASLTGNTALVTIMYANNETGTVFPIEEIGKRVKERGAIFHVDAVQAVGKIPLNMKTSTIDMLTISGHKIHAPKGIGALYVRRGVRFRPLLIGGHQERGRRAGTENVPGIVGLGKAAELELIHIETAIKKETRLRDRLEQTLLAKIPDCEVNGDVTQRLPNTTNIGFKYIEGEAILLSLNKYGICASSGSACTSGSLEPSHVLRAMGLPYTTLHGSIRFSLCRYTTEAQIDRVIEVMPEIVERLRALSPFKNDEAGWLQAQEQTLAHR

SEQ ID NO: 33008 - protein, 541 aa, Anabaena variabilis ATCC 29413
MPQLAPHIFDILYQKGVEHAFGIPGDFALTLFDALADSKIAPIVMTHEPCVGFAADAYSRMRGLGLAVVTYSVGGLNMVNAVAGAYAEKSPLVILSGGPGVREQKEHDLLHHKVKTFDTQRRVYEEVTLYATKLTDPKTADAKIHHALDYATTFKRPVYLEIPRDLVYAEITESEHLPPPIKRTDPDTLTEAIAETLEMLKRSHSPVILACVEVHRFGLQEQLLALAEKLGVPVCSTMLGKSVFPERHPQYIGIYNGEAGDLNVQKIVEESDCVLMLGVFMTDINLGMFTAHLNPGFTVYATSERLAIKHHEYPNVRFEDYITTLLDSPDLPHWDSSGIYTMKPRVTPSVGKISMSGLLYELNQFIDSNTLLVTDVGDALFAADDIQTQQGTSFLCPAFYASMGFGVPGVIGAQLADPSRRAIALVGDGAFHMTGMELLTAQRLRLNPIVIVINNGSFASLQAMGHQEAAFVQIPTMDYAQLANVLGGHGFVIHTSTQLQQALQTAQNSKTFSILDVHLSPDDVSPALQRLSALFTKSLKG

SEQ ID NO: 33009 - protein, 310 aa, Anabaena variabilis ATCC 29413
MDNFILFAGTANPDLAGTVAQKLDIPLGKSAVERFPDGEVNVRLLESVRQKSVFILQSTAPPVNDHLVELLAFADACRRAAASRITAIIPYFGYARADKRHGRREPITASMVAEVLQAVGVNHVVTLDLHTLQIEGFFRIPVDSLTAVPIFCEAIRHYLPPNFVVVSPDTGRVQMATQYAQKLDSSVVVLHKHRTSGTETEVTRVVGDVKGYACLIIDDMISTGGTLAKSIEALLKAEARPEIIIAATHGLFVKEARAKLSHPSVKAIFVTDSVTSKETDWQQLKIVSIAPLVATTIQRFKTDGSISDLF

SEQ ID NO: 33010 - protein, 398 aa, Anabaena variabilis ATCC 29413
MSVIYLDNNATTQVDAEVLAAMLPYLTEFYGNPSSMHTFGGQVGKAVQQARGQVAFLLGAEESEIIFTSCGTEGNNAAIKAALAAQPEKRHIITTQVEHAAIINVCKQLEKQGYKVTYLSVDSQGQIDLLELEAALTGDTALVSTMYANNETGVVFPIEQIGLRAKDAGAIFHVDAVQAVGKVPLNLKTSSIDMLTLSGHKLHAPKGIGALYIRRGVRFRPLLVGGHQERGRRAGTENVPGMIALGKAAELAQIHLKDVKREKALRDRLEQGLLSAIPNTEVNGHPTSRLSNTTNIGFKYIEGEAILLSLNKYGICASSGSACTSGSLESSHVLRAMGLPYTILHGSIRFSLSRYTTEAEIDKVLQLMPPIVERLRAISPFSNDQADWLQGREEALAH

SEQ ID NO: 33011 - protein, 337 aa, Anabaena variabilis ATCC 29413
MSKEKTKLSQLENMTAELKVASIDNHISSLSGEVSIPQAPPEFKSGFIGIIGRPNVGKSTLMNQLVGQKIAITSPVAQTTRNRLRGIVTTPEAQLIFVDTPGIHKPHHQLGEVLVKNAKLAIESVDVVLFVVDGTVACGAGDRFIADLLIHSKTPVILGINKVDQQPSDSQNIDDSYQQLASAYQWPTVKFSAKTGAELPQLQELLVEHLEHGPYYYPPDLVTDQPERFIMGELIREQILLLTREEVPHSVAIAIDLVEETPTITRVLATIHVERDSQKGILIGKGGSMLKSIGSAAREQIQKLIAGKVYLELFVKVQPKWRHSRVRLAELGYRVEE

SEQ ID NO: 33012 - protein, 536 aa, Anabaena variabilis ATCC 29413
MTDTATTPKASLNKFEKFKAEKDGLAIKSEIEKIASLGWEAMDETDRDHRLKWVGVFFRPVTPGKFMMRMRMPNGILTSDQMRVLAEVVQRYGDDGNADITTRQNIQLRGIRIEDLPHIFNKFHAVGLTSVQSGMDNIRNITGDPIAGLDADELYDTRELVQQIQDMLTNKGEGNREFSNLPRKFNIAIAGGRDNSVHAEINDLAFVPAFKEGIGDWVLGGGEESSTHQKVFGFNVLVGGFFSAKRCEAAIPLNAWVTAEEVVALCRAVLEVYRDNGLRANRLKSRLMWLIDEWGIDKFRAEVEQRLGKSLLYAAPKDEIDWEKRDHIGVYKQKQEGLNYVGLHIPVGRLYAEDMFELARIADVYGSGEIRMTVEQNIIIPNITDSRLKTLLTDPLLERFSLDPGALTRSLVSCTGAQFCNFALIETKNRALEMIKGLEAELTFTRPVRIHWTGCPNSCGQPQVADIGLMGTKARKNGKAVEGVDIYMGGKVGKDAHLGSCVQKGIPCEDLHLVLRDLLITNFGAKPRQEALVSSQ

SEQ ID NO: 33013 - protein, 440 aa, Anabaena variabilis ATCC 29413
MTHVSRRKFLFTTGAAAAASILAHGCTSNGSQSATTGEQAPSAAPAANVSAANAPKVETTKAKLGFIPLTDAAPLIIAKEKGFFAKYGMTDVEVIKQKSWPVTRDNLKIGSSGGGIDGAHILSPMPYLMTIKDKVPMYILARLNTNGQAISVAEKYKDLNINLESKNLKDVAAKAKADKKAWKAGITFPGGTHDLWMRYWLAAGGINPDQDVVLEPVPPPQMVANMKVGTVDSFCVGEPWNAQLVNQKLGYSALVTGELWKDHPEKAFTMRQDWVDQNPNAAQAILMAILEAQQWCDKAENKEEMCKICADRKYLNVAAADIVERAKGNIDYGDGRKEENFAYRMKFWADNASYPYKSHDIWFLTEDIRWGYLPKDTKVQDIVNQVNKEDLWKKAAKAIGVADAEIPASSSRGVETFFDGVKFDPEKPEEYLNSLKIKKV

SEQ ID NO: 33014 - protein, 447 aa, Anabaena variabilis ATCC 29413
MSEQKIDAQGVNVIQDQSLVSSVITDFGNLIKGNTLGIIQPHNIEEISSAIEFAKQQNSRLKARGKGYTQSGQSVAQDAFTLDLTRLNHISKVDTVTQAIATEAGATWQDIVTTTMKFGMLPCVLPLNLEQTVGGLLSTGGIGSTSKTYGPVVANVIDLHIITGNGEHIQCSRTQAPELYHAVLGGLGGCGIIASATLALRKTKKYIRTFHLLYDSLKAWMDDHVLLSRNHQIEHLEGFCWTSAKGIRQTTNGKSFFAHWLYGLQVGIEYDEAAPSVSDVLQNLNYWQLFHTEDEETVSHVFRYQPRFEVMRASGGWNQAHPWIECFISAEALTEILPEILDMLPLSLGDGHRAIMVASDNLPSLFMMPPAKNILCFAILPMAVPVGDTKTFDVLAKVSQILLSAGGKRYLSGWLGKSDFDWQQHYGTSYETWETMKQRYDPSHILG

SEQ ID NO: 33015 - protein, 389 aa, Anabaena variabilis ATCC 29413
MQIYLDYSATTPTCTEAIAVMQSVLTQQWGNPSSLHEWGQRATTIVEQARVQVAGLINAANPESIIFTSGGTEANNLAIMGVVRMQNVPQHIIISSVEHSAISEPANLLEKWGWEVTRLGVDNTGRVNPEDLKAALRHNTVLVSVIYGQSEIGTVQPIAELGKITQQHGALFHTDAVQAVGRLPIDVQQLPVDLLSLSSHKLYGPQGVGALYIRPGVELLPLLNGGGQERGLRSGTQAVPIIAGFGVAAEIAAEELSIEIPRLMKLRDRLFAQLADVPGLIPTGDRENRLPHHVSFYLEQADGEKLSGKTLVRHLNLAGIGISAGAACHSGKLSPSPILLAMGYSTKAALGGIRLTLGRETTAADVDWTAMVLKQILQRLVPGELVISH

SEQ ID NO: 33016 - protein, 396 aa, Terrabacter sp. DBF63
MNDAFVYDAVRTPFGRYGGALAAVRPDDLAALVIRTLVERTGLEGGQVDEVVFGNANGAGEDNRNVARMAGLLAGLPPSVPASTVNRLCGSSLDATIAGARQLTLGESDVVLVGGVESMSRAPWVLPKPERPYPAGNAELVSTALGWRLVNAAMPTEWTVSLGEATEQLREREGVAREDQDEFALRSHQAAAKAWDSGFYDPLVVAVPGVDLPRDESIRPDSTLDKLAGLKPVFRKDGTVTAGNASPLNDGASAALLGSANAARQIGTEPLARIAAWGAFANEPQFFGFAPVEAANIAVRRAGITWREVAAVELNEAFAAQSLACIRAWDVDPQIVNRHGGAISIGHPLGASGTRILGALARSLEFTGERWGVAAICIGVGQGLAVVLENTRGGGA

SEQ ID NO: 33017 - protein, 235 aa, Capsicum annuum
MGSPQENCSFDMIRQHLDDISLMEYYCPENTLYSQSCESLDQTSVSFETSSNLDDISSFFSSSKTDFGCFEFETKPITSAATSISSNSPKKRSFNERKPSLNIAVPVKPVVVQKVEVVREKKHYRGVRQRPWGKFAAEIRDPNRKGTRVWLGTFDTAVDAAKAYDRAAFKLRGSKAILNFPLEVANFKQQNSTVEVPQQVNSSGSKRAREKEELAINEKKKKKKKNLAAPRPSPI

SEQ ID NO: 33018 - protein, 241 aa, Theobroma cacao
MVYPNESCETSPQKKMGRGKIEIKRIENTTNRQVTFCKRRNGLLKKAYELSVLCDAEVALIVFSSRGRLYEYANNSVKATIERYKKTCADSSNTGSVSEANAQFYQQEAAKLRVQIGNLQNSNRHMLGESLSALPMKDLRSLENRLEKGISRIRSKKNELLFAEIEYMQKREIDLHNNNQLLRAKIAENERKQQNINLMPGGSNFEIMHSQPFDSRNYFQVNALQPANHYPHQDQMALQLV

SEQ ID NO: 33019 - protein, 352 aa, Solanum tuberosum
MDRGPGPCMDMPIMHDSDRYDFVRDIGSGNFGVARLMTDKQTKELVAVKYIERGDKIDENVQREIINHRSLRHPNIIRFKEVILTPTHLAIVMEYASGGELFERISNAGRFNEDEARFFFQQLISGVSYCHSMQVCHRDLKLENTLLDGSPAPRLKICDFGYSKSALLHSQPKSTVGTPAYIAPEVLLRKEYDGKIADVWSCGVTLYVMLMCAYPFEDPDEPKDFRKTINRILSVQYSVPENIQISEECRHLISRIFVGDPAQRITMPEIRNHVWFLKNLPADLIDDKMISDQFEEPEQPMQSIDTIMQIISEATVPPIGLYNLEMMDDDMDDLDSEPDLDIDSSGEIIYAM

SEQ ID NO: 33020 - protein, 510 aa, Camellia sinensis
MALDTVFLLRELSFATLVILITHIFMRSILSKPLRMLPPGPTGLPLIGAIPHLGSMPHVALAKMAKIYGPIVYLKMGTCGMVVASTPDSARAFLKTLDLNFSNRPPNAGATHLAYGAQDMVFADYGPRWKLLRKLSNLHMLGGKALENWAQVRSSELGHMLKAMYDLSCRGEPVVVAEMLCYAMANMIGQVILSRRVFETKGSESNEFKDMVVELMTTAGYFNIGDFIPSIAWMDLQGIERGMKRLHKKFDVLITKMIEEHKASAYQRKETPDFLDVFMAQQKNPGEEKAQHDTIMHYSGPYSLPGTDTSSSIIEWALAEMLKDPKILNRAHDEMDRVIGRNRRLQESDLPKLPYLQAICKETFRMHPSTPLNLPRVAAQTCRVNGYYIPKNTRLSVNIWAIGRDPDVWERPLEFIPDRFLSGKNAKTDPRGNDFELIPFGAGRRICAGTRMGIVLVEYILGSLVHSFDWKLADDGVELNMDESFGLALQKAAPLSAMVSPRLPPNAYAA

SEQ ID NO: 33021 - protein, 516 aa, Xanthobacter autotrophicus
MKLLALAIFVAILALTLAITWWAARRTRTASDFYTADGTLGPIQNGFALAGDWMSAAAFLGFSGLAALYGMDGSLYAAGALVAFLAILMLVAEPIRNTGRFTLGDVIAFRMQRPQARLAAVLGTVVVSLAYLVPQMAGGAALIKLLLGVPYAISIVVVGLGMLVYVVFGGMIATTWVQIIKAVMLLSAAAVLVALLLAHFGFDPFSVFAAAEDTYGAKILAPGNYLKHPLDQLSLGLSFAFGTAGLPHVMTRFYTVPDAQTARRSAVWLMFLAGSFFLVTTLIGLGSAVLVGQDAIRAADKGGNLALPLLAQHLGGGPDSIGGQVFLAVVVAVAFATILAVVAALTLSTSGAIAHDLYVNVLRGGHVSEQEQVKVARISTVIVSAFAILFGLLAQGINVAVLVILAISVAASANFPVIVLSLFWQRFNTAGVVTGMVAGLVSAVALALTGPAFMGADALFPVVNPAIASVPIGFLGAILGALLSPRDAVSEAQFDEVVFRANTGLRDDAQAGKSLH

SEQ ID NO: 33022 - protein, 411 aa, Cicer arietinum
MPLKNIVREFKGMKNGIGSKSKRGGDSKHWLCRSKSHVAPDVTPFEPIQQGQWASLPPELLLDIIRRVEESETSWPARAVVVFCASVCKSWRSVTKEIIKTPQQCGRITFPISLKQPGPRDCPIQCFIRRNRESSTFLLYLGLVPSEHESNKLLLVARKIRRATGTEIVISLAADDFSRASNNYVGKLRSNFWGTKFTIYDSQPPHDIIVQPNCRGGKFNSKQVSPRAPACSYLVSSISYELNTLWTRGPRRMHCVMNSIPVSAIEEGGNAPTPTLLPQIFDEPFSPSPALKGKSPMTDSYSGNLSELPELSQGSVEPLVLKNKAPRWHEQLQCWCLNFVGRVTVASVKNFQLVAAVDPSHNVSSEEQERVILQFGKIGKDIFTMDYSYPLSAFQAFAICLTSFDTKPACE

SEQ ID NO: 33023 - protein, 675 aa, Pseudotsuga menziesii
MGRKQKCAGFNNAGKDFNGFMFLAAFITAGFLFSSVIAAEEAAKLGTVIGIDLGTTYSCVGVYKNGHVEIIANDQGNRITPSWVAFTDTERLIGEAAKNQAAMNPERTVFDVKRLIGRKYEDKEVQKDIKLLPYKIVNKDGKPYIQVKIRDGEIKVFSPEEISAMILLKMKETAESYLGRKIKDAVVTVPAYFNDAQRQATKDAGVIAGLNVARIINEPTAAAIAYGLDKKGGEKNILVYDLGGGTFDVSILTIDNGVFEVLSTSGDTHLGGEDFDQRVMDYFIKLVKKKHNKDISKDNRALGKLRRECERAKRALSSQHQVRVEIESLFDGVDFSEPLTRARFEELNMDLFKKTLGPVKKALDDANLQKTEINELVLVGGSTRIPKVQQLLKDLFDGKEPNKGVNPDEAVAYGAAVQGGILSGEGGDETKDILLLDVAPLSLGIETVGGVMTKLIPRNTVIPTKKSQVFTTYQDQQTTVSIKVYEGERSLTKDCRELGKFDLSGIPPAPRGVPQIEVTFEVDANGILNVRAEDKGTKKTEKITITNDKGRLSQEEIERMVKEAEEFAEEDKKVKDKIDARNNLETYVYNMKSTINEKDKLADKIDSEDKEKIETAIKEALEWLDDNQSAEKEDFEEKLKEVEAVCSPIIKQVYEKTGGGSSGGDDEDEDSHEEL

SEQ ID NO: 33024 - protein, 391 aa, Sulfolobus solfataricus
MKIVLAYSGGLDTTVSIRWLKETFKAEIITVTVDVGQKDDFKKIEERAYIAGASKHYTIDAVRQFANNYIAYAIKLNGLYEGVYPLSTALARPLIAEKVVEVAKKEGAEAVAHGSTSKGNDQVRFDLAVKALYPDVKIIAPARIWNMTREDEIKYAKEKGIPIKVESDKYSIDENLWGRSIEGDIISDPSLEVPEDAFEWTKQIYNKKEIVSIEFSNGVPTAVNGEKMELNKLVDFLNLKFGSHGFGRVEHIENRVVGFKSREVYEVPAALGLIYAHIDLEKTIYTPMELRFKRHIDQLWSDLVYQGLWFEPLRETLHKVADEMNKWISGEAKVEVSNGSFRIVGRESEYSPYSEKIASYNKGWYPSDEMARGFIEIWGMHSLIARRVRGL

SEQ ID NO: 33025 - protein, 203 aa, Streptococcus pyogenes serotype M49
MFKSGFVAILGRPNVGKSTFLNHVMGQKIAIMSDKAQTTRNKIMGIYTTETEQIVFIDTPGIHKPKTALGDFMVESAYSTLREVETVLFMVPADEKRGKGDDMIIERLKAAKIPVILVINKIDKVHPDQLLEQIDDFRSQMDFKEVVPISALEGNNVPNLIKLLTDNLEEGFQYFPEDHPERFLVSEMVREKVLHLTQQEVPH

SEQ ID NO: 33026 - protein, 45 aa, Streptococcus pyogenes
EKGFGFISTENGQDVFAHFSAIQTNGFKTLEEGQKVAFDVEEGQR

SEQ ID NO: 33027 - protein, 454 aa, Asparagus officinalis
MGPPDVVPSEHVEFDFSDVFGPSPTPTSTGVNVFASDGSTPAASDDIVYTEPAVILARSHSLVGPTALVCQSPRLRKHILHEADLELVECPSGVEGEQDKPFSCVAEEHEVPSSENVERVGLEDFDFLKVVGQGAFGKVFQVMKKGTSEIYAMKVVRKDTILEKNHSEYMKAERDILTKIDHPFIVQLRYSFQTKYRLYLVLDFVNGGHLFYQLYHQGLFREDLARIYTAEIVSAVSHLHANGIMHRDLKPENILLDADGHVMLTDFGLAKEFEENTRSNSLCGTIEYMAPEIIQGKGHDKVADWWSVGILLFEMLTGKPPFIGGNRDKIQQKIVKDKLKLPAYLTSEAHSLLKGLLQKEASKRLGGGPAGSNEIKNHKWFKLINWRKLEAREIQPSFKPNVAGKICVANFEERWTSMPLTVSPVASPVAGSGNFSGFTYVKPSVFLQKPSPLG

SEQ ID NO: 33028 - protein, 159 aa, Solanum tuberosum
MSDEEHQFESKADAGASKTYPQQAGTIRKSGYIVIKGRPCKVVEVSTSKTGKHGHAKCHFVAIDIFTGKRLEDIVPSSHNCDVPHVNRTDYQLIDISEDGFVSLLTDNGNTKDDLRLPTDDSLLSQIKDGFAEGKDLVVSVMSAMGEEQINALKDIGPK

SEQ ID NO: 33029 - protein, 269 aa, Solanum tuberosum
MSGRFSRSIYVGNLPADIKELEVEDLFYKYGRILDIELKIPPRPPCYCFVEFESSRDAEDAIRGRDGYNFDGCRLRVELAHGGRGPSSSSDRRGSYGSSGGGGGGGGRHGISRHSDYRVIIRGLPSSASWQDLKDHMRKAGDVCFAEVSRDSEGTFGLVDYTNYEDMKYAIRKLDDTEFRNPWTRTYIRVREYKGSPSRSRSRSRSRSRTPRKSRRSPARSVSRSPPPKSRSASPVKSTRSRSLSRSMSRSRSRSRSPSRSRSASPQQA

SEQ ID NO: 33030 - protein, 1123 aa, Solanum tuberosum
MSSSRPSQSSATSSRSKHSARIIAQTSIDAKLHADFEESGDSFDYSSSVRVTSVAGDEERPKSDKVTTAYLHQIQKGKFIQPFGSLLALDEKTLKVIAFSENAPEMLTMVSHAVPSVGEHPVLGIGTDIRTIFTGPSGAALQKALGFGEVSLLNPVLVHCKNSGKPFYAIVHRVTGSLIIDFEPVKPYEVPMTAAGALQSYKLAAKAITRLQSLPSGSMERLCDTMVQEVFELTGYDRVMGYKFHDDDHGEVVSEITKPGLEPYLGLHYPATDIPQAARFLFMKNKVRMICDCRAKHVKVVQDEKLPFDLTLCGSTLRAPHYCHLQYMENMNSVASLVMAVVVNDGDEEGESSDSSQSQKRKRLWGLVVCHNTTPRFVPFPLRYACEFLAQVFAIHVNKELELENQFLEKNILRTQTLLCDMLMRDAPLGIVSQSPNIMDLVKCDGAALLYKNKIHRLGMNPSDFQLHDIVSWLCEYHTDSTGLSTDSLYDAGFPGALALGDAVCGMAAVRISDKDWLFWYRSHTAAEVRWGGAKHEPGEKDDGRKMHPRSSFKAFLEVVKTRSIPWKDYEMDAIHSLQLILRNAFKDADAVNSNTNSIHTKLNDLRIDGMQELEAVTAEMIRLIETASVPIFAVDVDGQVNGWNTKVAELTGLPVDEAIGKHLLTLVEDSSVDTVNKMLELALQGKEERNVEFEIKAHGPSRDSSPISLIVNACASKDVRDSVVGVCFIAQDITGQKSIMDKFTRIEGDYRAIIQNPHPLIPPIFGTDQFGWCSEWNSAMTKLTGWRRDDVMDKMLLGEVFGTQAACCRLKNQEAFVNFGVILNNAITGQESEKIPFGFFGRYGKYVECLLCVSKRLDKEGAVTGLFCFLQLASHELQQALHVQRLSEQTALKRLKVLAYIRRQIKNPLSGIIFSWKMLEGTSLGEEQKNILHTSAQCQRQLNKILDDTDLDSIIEGYLDLEMLEFKLHEVLVASISQVMMKSNGKNIMISNDMVEDLLNETLYGDSPRLQQVLANFLLVSVNSTPSGGQLSISGRLTKDRIGESVQLALLEFRIRHTGGGVPEELLSQMLGSEVDASEEGIFLLVSRKLVKLMNGEVQYLREAGRSTFIISVELAVATKSC

SEQ ID NO: 33031 - protein, 268 aa, Pseudomonas cichorii
MKKLTAITALSLAVLSGLAHADRLEDIKKSGVLRVAAFDSNPPFGFVDAKSKQIEGLDVDYAKAIADKLGVKLQLQPTNPANRVPLLMANKVDLVLANFTITPERAEQVNFSIPYFSSGQQFIVKKGTLKNQDDLNKWRVGVDKGTVNEGVLREKFPGAKVIAYDDTPFAFTALRNGNVQAITQDGPKLIGLLANVPDKDKYEVPPFTISNDLIGVGIPKGETALTEFVNQTLVELESKGQAQKIYDTWFGPNTPTPLARLFKIGDKS

SEQ ID NO: 33032 - protein, 156 aa, Picea glauca
MSEGKRSGKVKWFDSTKGYGFITPDDGSEDLFVHQTSIHSNGFRSLAEGEAVEYTVEHENGGRTKALDVTGPDGAFVQGNSGGGGGGRGGGRGGGGAGGGGGSCYKCGESGHFARDCTSGGGGGGNGGGGGGAGGGSCYQCGDFGHFARDCPNREG

SEQ ID NO: 33033 - protein, 309 aa, Picea glauca
MACDRSALYTSSVIMNTEDNSSAHAIAAMIASSCTPPATFQGTRSISVFETGNERKRPAGNSYSALELSDDIGDEDGSDDCIHLGEKKRRLTLEQVRALEKNFEMANKLEPEKKMQLAKALGLQPRQIAVWFQNRRARWKTKQLEKDFNVLKQDYDALKQDYDNLMEENNNLQAMIERMSSKSQSCNDQKFQANSSKLQKDDQDLQLLMMSATKVDCADKENNNEGPSSIGSEGSSVLDMDSPGTIDSQQNIDSIGFSNVKARDLRLECNFRPKVEENVSQADEPCNYLFYNNLETGPLLWDYNWSSGL

SEQ ID NO: 33034 - protein, 329 aa, Asparagus officinalis
MALSMNLLFLVLIISLSLAHLCFADGSLTPQFYDHSCPRAQQIVKGVVEKAVAKDRRMAASLLRLHFHDCFVKGCDGSVLLDSSGTIVSEKRSNPRRDSARGFEVIDEVKSALEKECPQTVSCADILAVVARDSTVITGGPSWEVPLGRRDSLGASLSGSNYNIPAPNNTLQTIITKFKLKGLDIVDLVTLLGSHTIGDARCTSFRQRLYNQSGNGLPDATLDKTYAAQLRQRCPQSGGDQNLFALDFNTQFKFDNFYYKNLVASEGLLSSDEILFTQSSTTMALVKKYAEDNGAFFEQFAKSMVKMGNVDPLTGKRGEIRKICRRINH

SEQ ID NO: 33035 - protein, 109 aa, Lactobacillus reuteri
MCGIVAFVDNEKPQIKDQLIKKMKDRIIHRGPDAEGQYVDDDVALGFRRLSFIDVKSGNQPIFNEDSSKAIEFNGEIYNFEELREELISKGHTFKTHADTEVIDHCQQV

SEQ ID NO: 33036 - protein, 102 aa, Candidatus Phytoplasma solani
MFAIIKTGGKQLRVYEGQEVFVEKLPVEAQQNYEFQEVLAIGGKKVILGQPFVPNAKVQAEVIKNDRAKKIIVFKFKKRKKYRSKQGHRQAYTKLLITKIIV

SEQ ID NO: 33037 - protein, 428 aa, uncultured sulfate-reducing bacterium
MVSDLYFNWHRFSPMTCYGSFMLDDSVVSHGGHRTMTIYFDHNATTPLHREVLQEVIAAMETRWHNASSTHAPGLRARSDVEIAREEIAALLGASLEEVILTGGGTEAGNLAVIGASMARRERGTHIVVSRVEHHAVLHAAAALERRGFDVTYADVDADGRVDPDAIVASLRPTTVLVSVMHANNETGAIQPIGELGRRLRKRDILFHTDAVQTVGKLHIDVNDLGVDLLSLSAHKFHGPKGAGALYVRDGVEVEPLMHGGAQEEGIRPGTYNVPAIVGLGVAARLARRSIDENAGYIVSLVERLERGLLRIAPEAKILVDKRHRLHNTLTVCFPGENRESLVTNLDLHGVAVSTGAACTAGASEPSHVLAAMGIGEATARGAVRFSLGCTNAAQEVDAALSALREVLGRKRGIIERLRDGFGILDSS

SEQ ID NO: 33038 - protein, 407 aa, uncultured sulfate-reducing bacterium
MAQSKLISPHGSESLKTLLLEGKEKEEELKKAESLPKLKLSSRETGDLIMLGIGGFTPLDGFMGHDDWKGVCENMKMTNGVFWPIPITLSHDEKLEPGTEVALVTEETGELMATMKVTESYKINKEFECKHVFTTADEAHPGVKMVTEQKDWNIAGPVKVLSESTFPTEFKGIYQRPAESRKIFAEKGWKTIAALQLRNPMHRSHEYLAKIAIEVGDGLYIHQLVGKLKPGDIPADVRVKCINTLVENYFDKERVVQGGYPLDMRYAGPREGLLHGVFRQNFGCTHMIIGRDHAGVGDYYGPFDAQDIYHNLWDGALACKMLPIDWTFYCYKCDGMASMKTCPHGKEDRVFLSGTALRKALSEGGEVIPEFSRKEVLEILREYYSGLTEKVEIKMHGHATGDAGKRK

SEQ ID NO: 33039 - protein, 402 aa, uncultured sulfate-reducing bacterium
MISPHGSKTLKTLLLEGKEKNEELKRAESLPQLQVSSRETGDLIMMGIGGFTPIDGFMGKDDWKGVCEEMKMTNGIFWPIPITLSQDEKLAAGTEVALVSEETSEVMATMKVTESYQIDKELECKNVFTTTDAEHPGVQMVQNQKAWNIAGPVKVLSESYFPTEFKGIYQRPAESRKIFEEKGWKTIAALQLRNPMHRSHEFLAKIAVEVSDGIYIHQLVGKLKAGDIPAEVRVKCIDTLVENYFVKERVVTGGYPLDMRYAGPREGLLHGVFRQNFGCTHMIIGRDHAGVGDYYGPFDAQDVYHQLWEGALECKMLPIDWTFYCHGCDGMASMKTCPHGKEDRVMLSGTALRKALSEGGDVPSEFSRKEVLDILREYYAGLEEKVEVKLHGHATGEAGAKK

SEQ ID NO: 33040 - protein, 379 aa, Arabidopsis thaliana
MNLFSLCFKPFGHVCDNSEAGSGGGGGVSGGTGGEGKDGLLWFRDLGKYCGGDFSMAVIQANQVLEDQSQVESGNFGTFVGVYDGHGGPEAARYVCDHLFNHFREISAETQGVVTRETIERAFHATEEGFASIVSELWQEIPNLATVGTCCLVGVIYQNTLFVASLGDSRVVLGKKGNCGGLSAIQLSTEHNANNEDIRWELKDLHPDDPQIVVFRHGVWRVKGIIQVSRSIGDMYMKRPEFNKEPISQKFRIAEPMKRPLMSATPTILSHPLHPNDSFLIFASDGLWEHLTNEKAVEIVHNHPRAGSAKRLIKAALHEAARKREMRYSDLRKIDKKVRRHFHDDITVIVVFLNHDLISRGHINSTQDTTVSIRSALEH

SEQ ID NO: 33041 - protein, 99 aa, Vibrio harveyi
MKFVDEAVVKVQAGDGGSGVVSFWREKFITKGGPDGGDGGDGGDVYIQADENLNTLIDYRFQRFYEAERGENGRGGNCTGKRGKDITLRVPVGTRAVDI

SEQ ID NO: 33042 - protein, 255 aa, Petunia x hybrida
MSTSNASTSGVRKGAWTEEEDLLLRECIDKYGEGKWHLVPVRAGLNRCRKSCRLRWLNYLRPHIKRGDFSLDEVDLILRLHKLLGNRWSLIAGRLPGRTANDVKNYWNTHLRKKLIAPHDQKQESKNKAVKITENNIIKPRPRTFSRPAMNNFPCWNGKSCNKNTIDKNEGDTEIIKFSDEKQKPEESIDDGLQWWANLLANNIEIEELVSCNSPTLLHEETAPSVNAESSLTQGGGSGLSDFSVDIDDIWDLVS

SEQ ID NO: 33043 - protein, 255 aa, Petunia integrifolia
MSTSNASTSGVRKGAWTEEEDLLLRECIEKYGEGKWHLVPVRAGLNRCRKSCRLRWLNYLRPHIKGGDFSLDEVDLILRLHKLLGNRWSLIAGRLPGRTANDVKNYWNTHLRKKLIAPHDQKQESKNKAMKITENSIIKPRPRTFSRPAMNHVSCWNGKSCNKNTIDKNEGDTEIIKFGDEKQKPEESIVDGLQWWANLLANNIEIEELVSYNSPTLLHEETAPSVNAESSLTQEGGSGLSDFSVDIDDIWDLLS

SEQ ID NO: 33044 - protein, 255 aa, Petunia integrifolia
MSTSNASTSGVRKGAWTEEEDLLLRECIEKYGEGKWHLVPVRAGLNRCRKSCRLRWLNYLRPHIKRGDFSLDEVDLILRLHKLLGNRWSLVAGRLPGRTANDVKNYWNTHLRKKLIAPHDQKQESKNKAMKITENNIIKPRPQTFSRPAMNHVSCWNGKSCSKNTIDKNEGDTEIIKFSDEKQKPEESIDDGLQWWANLLANNIEIEELVSCNSPTLLHEETAPSVNAESSLTQGGGSGLSDFSVDIDDIWDLVS

SEQ ID NO: 33045 - protein, 129 aa, Petunia x hybrida
MSTSNASTSGVRKGAWTEEEDLLLRECIEKYGEGKWHLVPVRAGLNRCRKSCRLRWLNYLRPHIKRGDFSLDEVELILRLHKLLGNRWSLIAGRLPGRTANDVKNYWNTHLRKKLIVPHDQKQESKTKP

SEQ ID NO: 33046 - protein, 127 aa, Petunia x hybrida
MSTSNASTSGVRKGAWTEEEDLLLRECIDKYGEGKWHLVPVRAGLNRCRKSCRLRWLNYLRPHIKRGDFSLDEVDLILRLHKLLGNRWSLIAGRLPGRTANDVKNYWNTHLRKKLIAPHDQKQESKS

SEQ ID NO: 33047 - protein, 127 aa, Petunia x hybrida
MSTSNASTSGVRKGAWTEEEDLLLRECIEKYGEGKWHLVPVRAGLNRCRKSCRLRWLNYLRPHIKRGDFSLDEVELILRLHKLLGNRWSLIAGRLPGRTANDVKNYWNTHLRKKLIAPHDQKQESKS

SEQ ID NO: 33048 - protein, 129 aa, Petunia axillaris
MSTSNASTSGVRKGAWTEEEDLLLRECIEKYGEGKWHLVPVRAGLNRCRKSCRLRWLNYVRPHIKRGDFSLDEVELILRLHKLLGNKWSLIAGRLPGRTANNVKNYWNTHLRKKLIVPHDQKQESKTKP

SEQ ID NO: 33049 - protein, 120 aa, Petunia axillaris
MSTSNASTSGVRKGAWTEEEDLLLRECIEKYGEGKWHLVPVRAGLNRCRKSCRLRRLNYLRPHIKRGDFSLDEVDLILRLHKLLGNRWSLIAGRLPGRTANDVKNYWNTDLRKKLIAPHD

SEQ ID NO: 33050 - protein, 562 aa, Neisseria meningitidis serogroup B
MLNKDQFADNHFIRTIIEEDLESGKHTAVQTRFPPEPNGYLHIGHAKSICLNFGLAYIYDGLCNLRFDDTNPEKENDEYVNAIKEDVEWLGFHWAGEPRFASNYFDQLYDYAVGLIKDGKAYVDDLTPEEMREYRGTLTEAGKNSPYRDRSVEENLDLFTRMKNGEFPDGSKTLRLKIDMASGNINMRDPVIYRIRRAHHHNTGDKWCIYPMYDYTHCISDAIEGITHSLCTLEFEAHRPLYDCVLDNIPAPHATRPRQYEFSRLELLYTITSKRKLNQLVVEKHVSGWDDPRMPTISGMRRRGYTPEGLRLFAKRAGISKSENIVDMSVLEGAIREELENSAPRLMAVLNPLKVTLTNFETGRTQSRRAAFHPNHEEMGEREVPISQTIYIEADDFAENPPKGFKRLIPGGEVRLRHGYVIKCDEVVKDEAGNVVELKCSIDHDTLGKNPEGRKVKGVIHWVSAEHAAEIKVRLYDRLFTVERPDAVRGEDGEYLPFTDFLNPESVKEITAYAEPAAKDLPAESRWQFERIGYFVTDRKDHGKDTPVFNRTVTLKDSWQPK

SEQ ID NO: 33051 - protein, 318 aa, Alcaligenes sp. O-1
MTTLTVRVLGRREEARDIASFRLARVDGGNLPPFSPDAHIDVHLPGGHVRQYSLCNGPDERDDYRIAVLRAPDSRGGSVAMRERIPVGDIVTISEPRNTFPLKHRQRSVLLAGGIGITPLLSMAKHLAAIDLDFSLHYCPRSPARTAFCEELGASQFAHRVHYHFDDGTPEQKFSLDAAIGVPGPGVVIFVCGPKGFIEHVHRGAECAGFTPDQVHAEHFGAQPHAAAADRPLTIQIASTGQQIGVAADRTAVQALAAAEIDIMTSCEQGFCGTCITRVLAGKCDHRDICLTGEEKERNDAFTPCCSRASTPLLVLDL

SEQ ID NO: 33052 - protein, 214 aa, Streptococcus agalactiae A909
MKFFLDTANVEAIKTINELGLVDGVTTNPTIISREGRDFETVIKEICDIIDGPVSAEVTGLTANEMVDEARALSKWHDNVIVKIPMTAEGLKATSILSKEGIKINVTLIFTVSQGLMAMKAGASYISPFIGRLEDIGTDPYQLIEALRDIIDIYGFGTEIISASIRSAAHVEAVAKLGSHIATIPETIFDKMVQHPLTKSGIDQFMNDWASFKK

SEQ ID NO: 33053 - protein, 371 aa, Streptococcus agalactiae A909
MIYLDNAATTALTSSVIEKMTNVMTSNYGNPSSIHTFGRQANQLLRECRQIIAEYLNVNSREIIFTSGGTESNNTAIKGYALANQLKGKHIITSEIEHHSVLHTMTYLSERFGFDITYLKPNHGQITAKDVQEALRDDTIMVSLMFANNETGDFLPIQEIGQLLRNHQAVFHVDAVQVFSKMELDPHSLGIDFLAASAHKFHGPKGVGILYCAPHHFDSLLHGGDQEEKRRASTENIIGIAGMSQALTDATTNTLKNWTHISQLRTTFLDAISDLDFYLNNGQDCLPHVLNIGFPGQNNGLLLTQLDLAGFAVSTGSACTAGTVEPSHVLTSLYGANSPRLNESIRISFSELNTQEEILELAKTLRKIIGD

SEQ ID NO: 33054 - protein, 330 aa, Streptococcus agalactiae A909
MRSLFGGLREKVASDYVKIVFPEGSDERVLRAAARLKFEGLVDPVILGKADEVHDSLARLGFVDQDYSVIDPEQYEKFEEMKEAFVEIRKGKATMEDADRLLKDVNYFGVMLVKLGLADGMVSGAIHSTADTVRPALQIIKTKPGISRTSGVFLMNRENTQERYIFADCAINIDPNAQELAEIAVNTADTAKIFDIDPKIAMLSFSTKGSAKAPQAEKVQEAAKIAKDLSPELAVDGELQFDAAFVPETAEIKAPNSDVAGKANVFIFPDLQSGNIGYKIAQRLGMFEAIGPILQGLNAPVNDLSRGSSAEDIYKLAIITAAQAIDEKSK

SEQ ID NO: 33055 - protein, 245 aa, Streptococcus agalactiae A909
MGPTVRIFDTLTESLGSYLQNFFGMSFRAAAFDNTKRSWIDNWTIFYWAWWISWSPFVGVFIARISKGRSIREFLTVVLLIPTLLSFVWFAAFGTLSTQVQQLGINLTKFATEEVLFATFNHYTLGWLLSTIAIILIFSFFITSADSATYVLAMLTEDGNLNPKNRTKVIWGLVLAVIAIVLLLSGGLLALQNVLIIVALPFSFVMILMMLALLVELFHEKKEMGLSISPDRYPRKNEPFKSYEE

SEQ ID NO: 33056 - protein, 324 aa, Streptococcus agalactiae A909
MAEQYADKQIKLFSLTANREIAEKISQASGIPLGKVSSRQFSDGEIMINIEETVRGDDIYIIQSTSFPVNDNLWELLIMIDACKRASANTVNIVVPYFGYSRQDRIAASREPITAKLVANMLVKAGVDRVLTLDLHAVQVQGFFDIPVDNLFTVPLFAEHYNQLGLSGEDVVVVSPKNSGIKRARSLAEYLDSPIAIIDYAQDDSEREEGYIIGEVEGKKAIIIDDILNTGKTFAEAAKILERGGATEIYAVASHGLFAGGAADILESAPIREIIVTDSVLSKERIPSNIKYLTASHLIADAIIRIHERKPLSPLFSYRSDKKD

SEQ ID NO: 33057 - protein, 339 aa, Streptococcus agalactiae A909
MFLLLCILSMWLMIFGVAFYYFGSLHQSLTSRIIYQFVLTVLITTIAWFMGAYFLGFEGHFKTVFQFQEADGKQIVNCLFQLCFALYAVVMLIGSIIDRVQTKRLLLAVVSWLFLVYTPLAYLIWNSEGVFAKMGVLDFSGGMVVHLSAGLSSYILAHVIGKSEHQHNKIKNDNLFLGMILITFGWFGFNMGPVGEWNSQAIMILLNTIFAIIGGGLAWTLAAKWNGEEEKTGSLLNGIIVGLVTSTAGVGYLLTWQLLAVTFFASLFTYFVTDYVAKAFAIDDVVSSFGMNGIGGLLGSLGVGLFKLSHMPVQLLALATTILLSIIMTYIISKAIFRK

SEQ ID NO: 33058 - protein, 396 aa, Streptococcus agalactiae A909
MGKEKLILAYSGGLDTSVAIAWLKKDYDVIAVCMDVGEGKDLDFIHDKALTIGAIESYILDVKDEFAEHFVLPALQAHAMYEQKYPLVSALSRPIIAQKLVEMAHQTGATTIAHGCTGKGNDQVRFEVAIAALDPELKVIAPVREWKWHREEEITFAKANGVPIPADLDNPYSIDQNLWGRANECGVLENPWNQAPEEAFGITKSPEEAPDCAEYIDITFQNGKPIAINNQEMTLSDLILSLNEIAGKHGIGRIDHVENRLVGIKSREIYECPAAMVLLAAHKEIEDLTLVREVSHFKPILENELSNLIYNALWFSPATKAIIAYVKETQKVVNGTTKVKLYKGSAQVVARHSSNSLYDENLATYTAADSFDQDAAVGFIKLWGLPTQVNAQVNKG

SEQ ID NO: 33059 - protein, 391 aa, Streptococcus agalactiae A909
MTLEKRFNKYLDRIEVSLIRQFDQSISDIPGMVKLTLGEPDFTTPDHVKEAAKSAIDANQSYYTGMSGLLALRQAAADFAKDKYNLTYNPDSEILVTIGATEALSASLIAILEAGDVVLLPAPAYPGYEPIVNLVGADIVEIDTRENDFRLTPEMLETAIIQQGEKLKAVLLNYPTNPTGITYSRQEIAALAEVLKKYDIFVISDEVYSELTYTGQQHVSIAEYLPNQTILINGLSKSHAMTGWRVGLVYAPEAFTAQIIKSHQYMVTAASTISQFAGVEALSVGKNDTLPMRQEYIKRRDYIIDKMSKLGFKIIKPSGAFYIFAKIPDSYPQDSFKFCQDFAYQQAVAIIPGVAFGKYGEGYIRLSYAASMEVIETAMARLKVFMESYEG

SEQ ID NO: 33060 - protein, 381 aa, Streptococcus agalactiae A909
MIYFDNSATTIPYPEVLRTYQEVASKIYGNPSSLHELGTTSSRILEASRKQIASLLELKVNEIFFTSGGTEADNWVIKGLAFEKQHFGNHIIVSDIEHPAVKESAKWLGEYGFEIDYAPVDDKGFVDVEALVKLIKPETILISIMAINNEIGSIQPIKAISDLLSDKPTISFHVDAVQAIGKIPTKDYLTERVDFASFSSHKFHGVRGVGFLYIKEGKRISPLLTGGGQESDLRSTTENVAGIAATAKALRMVMDKEVVAIPKISKMKTIIHDELAKYEDITLFSGKEDFSPNIITFGIKGVRGEVLVHAFEGHDIFISTTSACSSKAGKPAGTLIAMGISTKLAQTAVRISLDDDNDMGQVEQFLTIFKQVYEKTKKVRG

SEQ ID NO: 33061 - protein, 318 aa, Streptococcus agalactiae A909
MDKKKILVTGIVPKEGLRKLMDRFDVTYSEDRPFSRDYVLEHLSEYDGWLLMGQKGDKEMIDAGENLQIISLNAVGFDHVDTAYAKEKGIVVSNSPQAVRVPTAEMTFALILAASKRLAFYDSIVRSGEWIDPSEQRYQGLTLQGSTLGIYGMGRIGLTVANFAKAFGMTVVYNDVYRLPEDKEKELGVTYLEFDQLIETADVITIHAPALPSTIHKFNKDVFAKMKSRSYLINAARGPIVSEEALIEALKEGEIAGAGLDVFENEPQVSEGLRSLDNVIMSPHAGTGTIEGRRTLAEEAADNIIAFFDGKPQNIVNK

SEQ ID NO: 33062 - protein, 670 aa, Solanum tuberosum
MYSTVFYTSVHPSTSILSRKQLPLLISKDFPTELYHSLPCRSLENGHIKKVKGVKVKATIAEAPVTPTEKSDSGVNGDLKVPQKKLKVLVAGGGIGGLVFALAAKKKGFDVLVFERDLSAIRGEGQYRGPIQIQSNALAALEAIDMDVAEDIMNAGCITGQRINGLVDGISGNWYCKFDTFTPAVERGLPVTRVISRMTLQQILARAVGEDTIMNESNVVDFEDDGEKVSVVLENGQRFTGDLLVGADGIRSKVRTNLFGPSEVTYSGYTCYTGIADFVPADIDTVGYRVFLGHKQYFVSSDVGGGKMQWYAFYNEPAGGVDAPNGKKERLLKIFGGWCDNVIDLLIATDEDAILRRDIYDRPPTFSWGRGRATLLGDSVHAMQPNLGQGGCMAIEDSYQLALELDKACSRSAESGSPVDIISSLRSYESARKLRVGVIHGLARMAAIMASTYKAYLGVGLSPLSFLTQYRIPHPGRVGGRVFIDLGMPLMLSWVLGGNGDKLEGRIKHCRLSEKANDQLRKWFEDDDALERATDAEWLLLPAGNGTSGLEAIVLSRDEDVPCTIGSVSHTNIPGKSVVLPLPQVSEMHARISCKDGAFFVTDLQSEHGTWVTDNEGRRYRTSPNFPTRFHPSDVIEFGSDKAAFRVKAMKFPPKTTTERKEEREAVGAA

SEQ ID NO: 33063 - protein, 675 aa, Pisum sativum
MEEHSVGPLVPAVVKPEPSKNFSTDTTAAGDVSPVPTMSDLDKDFLCPICMQIIKDAFLTACGHSFCYMCIITHLRNKSDCPCCGHYLTNSNLFPNFLLDKLLKKTSDRQISKTASPVEHFRQAVQKLKQGCEVTMKELDTLLLLLTEKKRKMEQEEAERNMQILLDFLHCLRKQKVDELKKVQTDLQFIKEDIGAVEKHRMDLYRARDRYSVKLRMLDDSGGRKSRHSSMDLNSSGLASSPLNLRGGLSSGSHTKKNDGKSQISSHGHGIQRRDPITGSDSQYINQSGLALVRKKRVHTQFNDLQECYLQKRRQAADKPHGQQERDTNFISREGYSCGLDDFQSVLTTFTRYSRLRVIAEIRHGDIFHSANIVSSIEFDRDDDLFATAGVSRRIKVFDFSAVVNEPTDAHCPVVEMTTRSKLSCLSWNKYAKNQIASSDYEGIVTVWDVTTRKSLMEYEEHEKRAWSVDFSRTDPSMLVSGSDDCKVKVWCTNQEASVLNIDMKANICCVKYNPGSGNYIAVGSADHHIHYYDLRNISRPVHVFTGHKKAVSYVKFLSNDELASASTDSTLRLWDVKQNLPVRTFRGHANEKNFVGLTVSSEYIACGSETNEVFVYHKEISKPLTWHRFGTLDMEDAEDEAGSYFISAVCWKSDRPTILTANSQGTIKVLVLAA

SEQ ID NO: 33064 - protein, 968 aa, Pisum sativum
MEEHSVGPLVPAVVKPEPSKNFSTDTTAAGDVSPVPTMSDLDKDFLCPICMQIIKDAFLTACGHSFCYMCIITHLRNKSDCPCCGHYLTNSNLFPNFLLDKLLKKTSDRQISKTASPVEHFRQAVQKGCEVTMKELDTLLLLLTEKKRKMEQEEAERNMQILLDFLHCLRKQKVDELKEVQTDLQFIKEDIGAVEKHRMDLYRARDRYSVKLRMLDDSGGRKSRHSSMDLNSSGLASSPLNLRGGLSSGSHTKKNDGKSQISSHGHGIQRRDPITGSDSQYINQSGLALVRKKRVHTQFNDLQECYLQKRRQAADKPHGQQERDTNFISREGYSCGLDDFQSVLTTFTRYSRLRVIAEIRHGDIFHSANIVSSIEFDRDDDLFATAGVSRRIKVFDFSALLKKTSDRQISKTASPVEHFRQAVQKGCEVTMKELDTLLLLLTEKKRKMEQEEAERNMQILLDFLHCLRKQKVDELKEVQTDLQFIKEDIGAVEKHRMDLYRARDRYSVKLRMLDDSGGRKSRHSSMDLNSSGLASSPLNLRGGLSSGSHTKKNDGKSQISSHGHGIQRRDPITGSDSQYINQSGLALVRKKRVHTQFNDLQECYLQKRRQAADKPHGQQERDTNFISREGYSCGLDDFQSVLTTFTRYSRLRVIAEIRHGDIFHSANIVSSIEFDRDDDLFATAGVSRRIKVFDFSAVVNEPTDAHCPVVEMTTRSKLSCLSWNKYAKNQIASSDYEGIVTVWDVTTRKSLMEYEEHEKRAWSVDFSRTDPSMLVSGSDDCKQVKVWCTNQEASVLNIDMKANICCVKYNPGSGNYIAVGSADHHIHYYDLRNISRPVHVFTGHKKAVSYVKFLSNDELASASTDSTLRLWDVKQNLPVRTFRGHANEKNFVGLTVSSEYIACGSETNEVFVYHKEPLTWHRFGTLDMEDAEDEAGSYFISAVCWKSDRPTILTANSQGTIKVLVLAA

SEQ ID NO: 33065 - protein, 407 aa, Capsicum annuum
MEEIQVPPYFLCPISLEMMKDPVTISTGITYDRENIERWIFSAKNNTCPVTKQSLTSIELTPNVTLRRFIQSWCTLNASHGIERFPTPKPPVSKAQILKLMKEAKSREMQMKSLNTLRSIASVNDANKRCMESAGAAEFLASVVIDSSDVLGEEGFMSTKDEALSILYQLKLSEDGLRSLITSGNGEFIESLTRVMQRGSYESRAYAVMLMKDMFEASTLPTLFSSLKKEFFAQVVRVLRDEISQKATKASLQVLAHACPFGRNRVKAAEAGAVRVLVDLLLDSSEKRTCELMLILLDQICQSAEGRAELLNHPGGLAIVSKKILRVSKVGSERAIKILHSISKFSSTQSVVQEMLSLGVVAKLCLVLQVDCGSKAKDRARDILKIHAKAWRNSPCIPMNLLSSYPF

SEQ ID NO: 33066 - protein, 635 aa, Streptomyces caeruleus
MKSALSTWKPSDRPPDPTLPEPPAQLRRIFRLFRPYRGRLAVVGLLVGASSLVAVASPFMLREILDTAIPQGRTGLLSLLALGMILTAVLSSVFGVVQTLISTTVGQRVMHDLRTAVYAQLQRMPLAFFTRTRTGEVQSRIANDIGGMQATVTSTATSLVSNLTAVIATVVAMLALDWRLTVVSLLLLPVFVWISRRVGRERKRITLQRQKQMATMAATVTESLSVSGILLGRTMGRADSLTRSFAEESERLVDLEVRSNMAGRWRMSVIGIVMAAMPAVIYWAAGFVLQSGGTVVSIGTLVAFVSLQQGLFRPAVSLLPTGVQMQTSLALFQRIFEYLDLPVDITEPERPVALDKVRGEVRFDGVDFSYEEKDGNTLHGLDLTVPAGGSLAVVGPTGSGKSTLSYLVPRLYDVTGGRVLLDGVDVRDLAFDTLARAVGVVSQETYLFHASVADNLRFAKPDATDEEIEKAARAAQIHEHIVTLPDGYDTLVGERGYRFSGGEKQRLAIARTILRDPPVLVLDEATSALDTRTEHAVQQAIDSLSEGRTTITIAHRLSTVRDADQIVVLDAGRIAERGTHEELIDRDGRYAALVRRDGAPAPAPVPARDGKRRRRWCGCVRRASRRSGRDRRAGS

SEQ ID NO: 33067 - protein, 159 aa, Dactylis glomerata
MEGRVFGLETPLMTALQHLLDIPDGEAGNAGGEKQGPTRAYVRDARAMAATPADVKELPGAYAFVVDMPGLGSGDIKVQVEDERVLVISGERRREEKEDAKYLRMGAPDGKLMRKFVLPENADMEKISAVSRDGVLTVSVEKLPPPEPKKPKTIQVQVA

SEQ ID NO: 33068 - protein, 243 aa, Escherichia coli
MKKLVLAALLASFTFGASAAEKINFGVSATYPPFESIGANNEIVGFDIDLAKALCKQMQAECTFTNHAFDSLIPSLKFRKYDAVISGMDITPERSKQVSFTTPYYENSAVVIAKKDTYKTFADLKGKCIGMENGTTHQKYIQDQHPEVKTVSYDSYQNAFIDLKNGRIDGVFGDTAVVNEWLKTNPQLGVATEKVTDPQYFGTGLGIAVRPDNKALLEKLNNALAAIKADGTYQKISDQWFPQ

SEQ ID NO: 33069 - protein, 357 aa, Lagenidium giganteum
MSKFDRAVYDRYMDIEVDSNIVLAEYIWIGGSGEDLRSKTRTFNFIPKSPWELPIWNFDGSSTGQAPGEDSEVLLRPQAIFKDPFRGGNNILVICDCLKPDMTPIANNTRQDAARVMKAAEAHEPWFGIEQEYTLFEADKVTPYGWPKGGFPGPQGPYYCGAGAHSVFGRPIVDAHYRACLYAGIKVSGVNAEVMPGQWEFQVGPCVGIESGDHLWCARYILLRVCEDFGVNVSWDPKPIPGDWNGAGCHTNYSTKKMREDGGMAHIIEAIEKMKLKHKVHIAAYGSGNERRLTGRHETASIDQFSYGVANRGASIRIPRSAEADGKGYFEDRRPSSNMDPYTVTARIVKTTILDEP

SEQ ID NO: 33070 - protein, 356 aa, Leptolegnia chapmanii
MSKLDRAVYDKYMELDTGSFIQAEYVWVGGSGEDLRCKTRTLDKYPASVEELPIWNFDGSSTGQAPGADSEVMLKPAAIYKDPFRRGNHILVMCDCYKPDMTPIPSNTRFDAARVMKACEKEVPWFGIEQEYTLFEADKVTPYGWPKGGFPGSQGPYYCGAGAHSAFGRLIADAHYRACLYAGIRCSGINAEVMPGQWEYQVGPCTGIEAGDQMWISRYILLRVCEDFGVIVSFDPKPIPGDWNGAGCHTNVSTKAMREDGGMKHIIEALEKLKLKHKEHIAAYGTGNERRLTGRHETASIDQFSYGVANRGASVRIPRTAEADGKGYFEDRRPASNMDPYVVTGRIMKTISLNEA

SEQ ID NO: 33071 - protein, 493 aa, Candida albicans SC5314
MVALKREAEPRENGKSKKAKTSLATSSFVLHSYSKLPNINEYAKAKSTPLDVFVWGTGSMCELGLGPSAKNKEVKRPRLNPYLTEEKLGGTKIVDFAVGGMHTLALDGKNRIWSWGGNDSGVLGRDTSQAKEVLKDIDGKNGNDDDDDDDDEDGDLNEAESTPALVENLPEGEIVQLAATDNLSAALLSNGDVYAWGCFRCNEGLLGFLRDEIKLQKTPLKIKELKNIVQLAAGKDHLLALDSKGIVYAWGNGQQYQLGRRILERHRYRSLEPQQFGLYNIKYIASGDFHCFAIDHSDNVYAWGLNQYGQCALTGDNGELEDGSVLMKPTLIPELSHKGIKEIAAGEHHTLALTEDGQVYAWGRYDMKEIGIPKDKLPKSTFKDQHGNPRSVPVPTKLEFAVKIKTIGVGSHHSFAVTEDGVVYAWGFAETYGPGLGPSIDDVEKPTRIVNTATKNEDILLIGAGGQFSVSGGVKFEDEEKAEVRLDKYEDLE

SEQ ID NO: 33072 - protein, 174 aa, Solanum lycopersicum
FVVETNNLSPGKTIPEEGADYVKEYMVGPGYKMEIDRVSDEAGEYAKSVDLGDDGRDVWIFDVDETWLSNLPYYSDHRYGLEVFDDVEFDKWVENGTAPALGSSLKLYQEVLKLGFKVFLLTGRSERHRSVTVENLMNAGFHDWHKLILRGSDDHGKTATTYKSERRNAMVEEG

SEQ ID NO: 33073 - protein, 610 aa, Arabidopsis thaliana
MLRSLLLRRSVGHSLGTLSPSSSTIRSSFSPHRTLCTTGQTLTPPPPPPPRPPPPPPATASEAQFRKYAGYAALAIFSGVATYFSFPFPENAKHKKAQIFRYAPLPEDLHTVSNWSGTHEVQTRNFNQPENLADLEALVKESHEKKLRIRPVGSGLSPNGIGLSRSGMVNLALMDKVLEVDKEKKRVTVQAGIRVQQLVDAIKDYGLTLQNFASIREQQIGGIIQVGAHGTGARLPPIDEQVISMKLVTPAKGTIELSREKDPELFHLARCGLGGLGVVAEVTLQCVARHELVEHTYVSNLQEIKKNHKKLLSANKHVKYLYIPYTDTVVVVTCNPVSKWSGPPKGKPKYTTDEAVQHVRDLYRESIVKYRVQDSGKKSPDSSEPDIQELSFTELRDKLLALDPLNDVHVAKVNQAEAEFWKKSEGYRVGWSDEILGFDCGGQQWVSESCFPAGTLANPSMKDLEYIEELKKLIEKEAIPAPAPIEQRWTARSKSPISPAFSTSEDDIFSWVGIIMYLPTADPRQRKDITDEFFHYRHLTQKQLWDQFSAYEHWAKIEIPKDKEELEALQARIRKRFPVDAYNKARRELDPNRILSNNMVEKLFPVSTTA

SEQ ID NO: 33074 - protein, 922 aa, Salmonella enterica subsp. enterica serovar Typhimurium
  misc_feature (188)..(188): Xaa can be any naturally occurring amino acid
  unsure (1)..(922): unsure at all Xaa locations
LRAFFDFNSMHMEPWDGPAGIVMSDGRFAACNLDRNGLRPARYVITKDKLITCASEVGIWDYQPDEVVEKGRVGPGELMVIDTRGGRILHSAETDDDLKSRHPYKEWMEKNVRRLVPFEELPDEEVGSRELDDDLLASYQKQFNYSAEELDSVIRVLGENGQEPVGSMGDDTPFCVLSSQPRIIYDYXRQQFAQVTNPPIDPLREAHVMSLATSIGREMNVFCEAEGQAHRLSFKSPILLYSDFKQLTTMKEEHYRADMLDITLDVTKTRLEATVKELCDKAEKMRSGGPVLLVLSDRNIGKDRLPVPAPMAVGAVQTRLVEQSLRCDANIIVETGSARDPHHFAVLLGFGATAIYPYLAYETLGRLIDTQAIAKNYRTNMQNYRNGINKGLYKIMSKMGISTIASYRCSKLFEAVGLHDDVVNLCFQGVVSRIGGASFDDFQQDLLNLSKRAWLARKPISQGGLAKYVHGGEYHAYNNPDVVRTLQQAVQSGEYSDYQEYAKLRNERPATTLRHLLAITPGQNAVNEADVEPASELFKRFDTAAMSITALSPEAHELAEAMNSIGGNSNSGEGGEEPARYGTNKVSRIKQVASGRFGVTPAYLVNADVIQIKVAQGAKPGEGGQLPGDKVTPYIAKLRYSVPGVTLISPPPHHDIYSIEDLALIFDLKQVNPKAMISVKLVSEPGVGTIATSGVAKAYADLITIAGYDGGTGASPLSSVKYAGCPWELGLVETQQALVANGLRHKIRLQVDGGLKTGVDIIKAAILGAESFGFGTGPMVALGCKYLRICHLNNCATGVATQDDKLRKNHYHGLPFKVTNYFEFIAREVRELMASLGVTRLVDLIGRTDLLKELEGFTAKQQKLALSRLLETAEPHPGKALYCTENNPPFDNGVLNAQLLQQAKPFVDARQSKTFWFDIRNT

SEQ ID NO: 33075 - protein, 711 aa, Brassica napus
GGVGGSGSGGGDGGGGSGSQHHDGSETDKKKKRYHRHTAQQIQRLESSFKECPHPDDKQRNQLSRELGLAPRQIKFWFQNRRTQLKAQHERADNNALKAENDKIRCENIAIREAIKHAICPNCGSPPVNEDPYFDEHKLRIENAHLRDDLERMSTVASKYMGRPISSHLSTLHPLHISPLDLSMTGPSLDFDLLPGSSMHSQPNNLATISDMDKPLMNDIALTAMEELLRLFNTNEPLWTRGDGGREILDLGSYENLFPRSGNRGKNHNVRTEASRSSGIVFMNAMTLVDMFMDGVKWGELFPCIVASSKTLAVVSSGMGGTHEGALHLMYEEMAVLSPLVATREFCELRYCQMIEQGSWIVVNVSYHLPQFVSQSSHSYKFPSGCLIQDMPSGYSKVTWVEHVETEEKEQTHELYREVIHKGIAFGAERWVTTLQRMCERFASLLAPSTSSRDLGGVIPSPEGKRSMMRLAHRMVSNYCLSVSRSNNTHSTVVAELNEVGVRVTAHKSPEPNGTILCAATTFWLPNSPQSVFNFLKDERTRPQWDVLSNRNAVQEVAHIANGSHPGCCISVLRASNASQSQSNNMLILQETSIDSSGALVVYSPVDLPALNIAMSGDDTSYIPLLSSGFAISPDGNHSSSTTEQGGGASTSSGFGGGGSLITVGFQIMVSNLPSAKLNMESVETVNNLIGTTVHQIKTGLNNCPSGSTTA

SEQ ID NO: 33076 - protein, 332 aa, Rhodobacter sphaeroides 2.4.1
MKPLERILATARAHPRHILLPEGEDPRVAQAARRLTEEGLARVSLMNGPEIAGVTRICPAEASDLPELADRWHLMRAAKGMTGAQALIEMRDPIRQAAMRVRMGLADGTVAGAVATTADTVRAALQIIGRAEGAPLVSSFFLMLACEGGAPIRGGMIFADCGLVVDPDAEGLAAIARASAESSRTLLGEEPRVALLSFSTAGSADHPSLGKIREALRLIRATDPTLEVDGEIQFDAALDEAIRARKAPGSRLTGRPNVFIFPDLASGNIGYKIAQRLGGLGAVGPILQGLARPANDLSRGCTVEDIVHAAAITAVQAAPDPAAAPEGLAAAR

SEQ ID NO: 33077 - protein, 353 aa, Rhodobacter sphaeroides 2.4.1
MVRPRLNWAAEPWSDSEELECAMVIPETETCATFAFRAPSGAWFDYQPGQFLTLDLPVPGGRVQRTYTISSSPSRPLSLSVTVKAQPGSIGGRWMLDKLKPGMRIKAYGPAGQFTSLRHRSPKYLFISAGSGITPMMSMTTWAWDSGEMPDIVFVHAARSPAEIIFRRRLEQFARRVPGLQLRFTVKEEDPFSVWTGYRGRLSQIMLGLMAPDYLEREVFCCGPEPFMQAVREMLVSLGYDMDRYHEESFAAPALEELPVDIPEPAAVSELCFAASGVRVACDGTETVLAVARRAGLNIPSGCNFGLCGTCKVQKIEGEVAMVHNGGISDEEIAAGTILACCARPQGRVTLDL

SEQ ID NO: 33078 - protein, 280 aa, Rhodobacter sphaeroides 2.4.1
MPKIGTRLASLLLSGALVLSAASAAVAQDMPPLPEAIQKAGKIRIGVKCDSPPFGASGPDGKPRGIEVEMARKIGDYAFGSEEGAELSCVTSEARISSLNAGKLDLIIATLGRTAARQEVIDYSNIYFWGTSNVLVPADSPVQKLSDLQGRSVLVVKGATQIKWLEANIPDISIVQLNTTADGVQALMQGRADGFVGDGGLIYTLGGNYPKLRVIEEGLDLGVNGVGMRKGETELQTFVNAVLDELRKGDFYETVIPQFVEEPAVVDVMKRGFLEEPPQI

SEQ ID NO: 33079 - protein, 328 aa, Streptococcus pyogenes serotype M6
MLEDYYPSTTSYYHGGIDDDLYTAKWGMVMTFLDLNDSSLTPFEGTHFALIGFKSDKGVYINNGRVGAVESPAAIRTQLAKFPWHLGNQVMVYDVGNIDGPNRSLEQLQNSLSKAIKRMCDLNLKPIVLGGGHETAYGHYLGLRQSLSPSDDLAVINMDAHFDLRPYDQTGPNSGTGFRQMFDDAVADKRLFKYFVLGIQEHNNNLFLFDFVAKSKGIQFLTGQDIYQMGHQKICRAIDRFLEGQERVYLTIDMDCFSVGAAPGVSAIQSLGVDPNLAVLVLQHIAASGKLVGFDVVEVSPPHDIDNHTANLAATFIFYLVQIMAQHS

SEQ ID NO: 33080 - protein, 177 aa, Pseudomonas fluorescens PfO-1
MKLLILDRDGVINYDSDAYIKSVEEWIPLPGSIEAIAQLSKAGWTVAVATNQSGIARGYYDLATLDAMHARLRELVAEQGGEVGLIVYCPHGPDEGCDCRKPKPGMLRTIAQHYDVALTNVWFVGDSLGDLEAAKAVDSQPVLVKTGKGEKTQAKTLPVGTLIFDDLAAIAAELIHN

SEQ ID NO: 33081 - protein, 522 aa, Pseudomonas fluorescens PfO-1
MALPSRRSLFPFLTWLPRQTRASVGRDLVVGLSGAILALPQSIAYALIAGLPPEYGLYAAIVPVLIACLWGSSWHLICGPTAAISIVLFASVSPLAVPESQDYITLILLLTFLAGIFQWLLGLLRFGALVNFVSHSVVLGFTLGAAVVIAIGQLPNLLGLELPAKATALDSLMDLLRHLGAVDKPSLVLGVATVVVGALLKQWLPRWPTLLMTLVLGSLVVWLWPAMFGHVQLVSAFFGRLPPFSGLPLDMDLILRLLPSAVAVGMLGLVTSLSIARSISARSQQLLDANQEVRAQGLSNIVGAFFSGSLSAGSFTRSGLSYEAGACSPLAGVFSALWVALFAIFGAGLIAHIPIPAMAGSILLIAWGLVDHRGIRALLRVSRADFVVMSLTCVATLLLELQTAIYAGVLASLFFYLKRTSQPRVQHWRDGEDDVLRVGGSIFFGASHYLQVRLQRMQGARVVIEAQQINFIDYSGVEMLHQEARRLLRQDRSLTLRQARPQVVEELRKLEGPEKCPIRFED

SEQ ID NO: 33082 - protein, 373 aa, Pseudomonas fluorescens PfO-1
MHIGVPLETQTGETRVAATPETIKKLISQGHKVTVQTGAGVKASVVDSAYEAAGATIGSANDAFGAELILKVVAPSDAELTLIKRGTVLVGMLNPFNNDTIAKMAECGITAFALEAAPRTSRAQSLDVLSSQANIAGYKAVLLAAHYYPRFMPMLMTAAGTVKAARVLILGAGVAGLQAIATAKRLGAVIEASDVRPAVKEQIESLGAKFVDVPYETDEERECAVGVGGYARPMPASWMQRQAQAVHERAKQADIVITTALIPGRKAPTLLSADTVAQMKPGSVVIDLAAAQGGNCPLTVADQVVIENGVTIVGPTNLAGEVAADASALYARNLLDFLKLVFTKEGQFEVNLEDDIVAACLMCRDGQVIRKNA

SEQ ID NO: 33083 - protein, 292 aa, Pseudomonas fluorescens PfO-1
MKTAKALFALPLISLALLAGCNKTEEPAKPKVASESTAPAGYLDKIKARDKLIVGVFTDKPPFGFVNEAGRYVGFDTDIGRQFAKDLLGDENKVEFVAVEPASRIPFLQSDKVDLILANMTVTPERKEAVEFTNPNLKVAVQALVPQGSEVKKLDDLATRTTIVTTGTTADIWLTKNHPDWKLLKFEKNSESLQALANGRGDAYAQDNLVLFSWAKQNPGYRVLDEKLGAEAPIAPAVKKGNIELRDWVNAELAKLGEEKYLLKLYDQYVRKELSDDTKPESVIVEGGKWQG

SEQ ID NO: 33084 - protein, 666 aa, Pseudomonas fluorescens PfO-1
MSASSTPASGLVRMNPPVFWFAATVILLFGLTVIAMPEQAGAWLLEAQNWAANTVGWYYMLAMTLYLVFVVVTALSGYGKIKLGADHDEPEFSYLSWAGMLFAAGISITLFFFCVSEPLTHMLQPPQGEAGTPEAARQAMQILFLHWGLHGWGVFAFVGMALAYFAYRHNLPLALRSALYPLIGKRINGPIGYAVDGFGIIATVFGLGADMGFGVLHLNSGLDYLFGIAHTQWIQVGLITLMMGAAIIVAVSGVDKGVRVMSDINMLLACALLLFVLFAGPTQHLLNTLIQNLGDYLGALPMKSFDLYAYDKPSDWLGGWTVFYWAWWIAWSPFVGLFIARISRGRTIREFVFGVLLIPLGFTLAWMSIFGNSAIDQVLNHGMSALGMSALDNPSMTLYLLLETYPWSKTVIAVTVFISFVFFVTSADSGTVVLSTLSAKGGNPDEDGPKWLRVFWGAMTALVTSALLFSGSIDALKSAVVLTSLPFSLILLLMMWGLHKAFYLESQKQIAQLHSLAPVSGSRRGKGGWRQRLSQAVHFPSRDEVYRFMDTTVKPAIEEVTAVFAEKGLNVVTQPDPAHDSVSLEIGHGEQHPFIYQVQMRGYFTPSFARGGMGSKQLNNRRYYRAEVHLSEGSQDYDLVGYTKEQIINDILDQYERHMQFLHLVR

SEQ ID NO: 33085 - protein, 1481 aa, Pseudomonas fluorescens PfO-1
MKAGLYQPDEFKDNCGFGLIAHMQGEPSHTLLQTAIEALTCMTHRGGINADGKTGDGCGLLIQKPDAFLRAIAQETFSVELPKQYAVGMVFFNQDPAKAEAARENMNREILAEGLQLIGWRKVPIDTSVLGRLALERLPQIEQVYIGGEGLSDQDMAVKLFSARRRSSVANAADTDHYICSFSHKTIIYKGLMMPADLAAFYPDLGDQRLQTAICVFHQRFSTNTLPKWPLAQPFRFLAHNGEINTITGNRNWAQARRTKFTNDLMDLEELGPLVNRVGSDSSSMDNMLELMVTGGIDLFRGVRMIIPPAWQNVETMDPDLRAFYEYNSMHMEPWDGPAGVVMTDGRYAVCLLDRNGLRPARWVTTKNGFITLASEIGVWNYQPEDVLAKGRVGPGQIFAVDTETGQILDTDAIDNRLKSRHPYKQWLRKNALRIQATMEDNDHGSAFYDVDQLKQYMKMYQVTFEERDQVLRPLGEQGYEAVGSMGDDTPMAVLSQRVRTPYDYFRQQFAQVTNPPIDPLREAIVMSLEICLGAERNIFQESPEHASRVILSSPVISPAKWRSLMNLDRPGFERQIIDLNYDESVGLEAAIRNVADQAEEAVRAGRTQIVLSDRHIAPGKLPIHASLATGAVHHRLTEKGLRCDSNILVETATARDPHHFAVLIGFGASAVYPFLAYEVLGDLIRTGEVLGDLYEVFKNYRKGITKGLLKILSKMGISTIASYRGAQLFEAIGLSEEVCELSFRGVPSRIKGARFVDIEAEQKALATESWSPRKPIQQGGLLKFVHGGEYHAYNPDVVNTLQAAVQQGDYAKFKEYTSLVDNRPVSMIRDLFKVKTLDTPLDISEVEPLESVLKRFDSAGISLGALSPEAHEALAEAMNRLGARSNSGEGGEDPARYGTIKSSKIKQVATGRFGVTPEYLVNAEVLQIKVAQGAKPGEGGQLPGGKVNGLIAKLRYAVPGVTLISPPPHHDIYSIEDLSQLIFDLKQVNPKALVSVKLVAEAGVGTIAAGVAKAYADLITISGYDGGTGASPLTSIKYAGAPWELGLAETHQTLRGNDLRGKVRVQTDGGLKTGLDVIKAAILGAESFGFGTAPMIALGCKYLRICHLNNCATGVATQNEKLRKDHYIGTVDMVVNFFTYVAEETREWLAKLGVRSLEELIGRTDLLEVLEGQTAKQHHLDLTPLLGSDHIPADKPQFCGVERNPPFDQGLLAEKMVEMATSAINDLSGAEFDLDICNCDRSIGARISGEIARKHGNQGMAKAPITFRFKGTAGQSFGVWNAGGLNMYLEGDANDYVGKGMTGGKLTIVPPKGSVYKTQESAIIGNTCLYGATGGKLFAAGTAGERFAVRNSGAHTVVEGTGDHCCEYMTGGFVCVLGKTGYNFGSGMTGGFAYVLDQDNTFVDRVNHELVEIQRISGEAMEAYRSHLQNVLNEYVAETDSEWGRELAENLDDYLRRFWLVKPKAANLKSLLSSTRANPQ

SEQ ID NO: 33086 - protein, 600 aa, Pseudomonas fluorescens PfO-1
MTDSSPAASPSSLKIYFRLLGYVRPYISLFLISIVGFLIFASTQPMLGYILKYFVDGLSNPEAVLFPTVPYLRDLQLLQAVPLLIILIAAWQGLGSYLGNYFLAKVSLGLVHDLRVQLFNNLLVLPNRYFDKHNSGHLISRITFNVTMVTGAATDAIKVVIREGMTVIFLFASLLFMNWKLTLVMVAILPLIAVMVRTASKKFRKQSKKIQLAMGDVTHVASETIQGYRVVRSFGGEAYEEKRFLDASQGNTDKQLRMTRTGAIYTPLLQLVIYSAMAILMFLVLYLRGDASAGDMVAYITLAGLLPKPIRQLSEVSSTIQKGVAGAESIFEQLDVEPEVDTGTVERDSVSGRLDVRNLSFTYPGTERQVLDDISFSVEPGQMVALVGRSGSGKSTLANLIPRFYHHDKGEILIDGVEVEQYKLLNLRRHIAQVTQHVTLFSDTVANNIAYGDLAGAPREDIEKAARDAYAMDFIAQLPEGLDTQVGENGVLLSGGQRQRLAIARALLKNAPLLILDEATSALDTESERHIQAALDQVMKGRTTLVIAHRLSTIEKADLILVMDQGRIVERGTHDDLLAQNGYYARLNAMGLDAPAEDIA

SEQ ID NO: 33087 - protein, 433 aa, Pseudomonas fluorescens PfO-1
MSSTTTKSIDVKKSLVEAILAGLIALIVFGPIVGVVLDGYSFNLEPTRVAWIIAIVMAGRFALSLFLQTPKGLRILDGFESTGSGVHVLPPDYKSRLRWIIPLMIAIAVALPFFSNSYLLGVVILGLIYVLLGLGLNIVVGLAGLLDLGYVAFYAIGAYGLALGYQYLGLGFWTVLPLAAITAGLAGCILGFPVLRLHGDYLAIVTLGFGEIIRLVLNNWLSLTGGPNGMPAPLPTFFGLEFGKRAKDGGVPFHEFFGIAYNPDVKYYFIYAVLFLVVLAVLYIKHRLVKMPVGRAWEALREDEIACRSMGLNHVLVKLSAFTIGASTAGLAGVFFATYQGFVNPTSFTFFESALILAIVVLGGMGSTIGVVIAAFVLTVAPELLRGFAEYRVLLFGILMVLMMIWRPRGLIRISRTGVTPRKGAIHYERTAP

SEQ ID NO: 33088 - protein, 432 aa, Pseudomonas fluorescens PfO-1
MSNAIRPSACPGLLRIVQALDGGICRIKLDGGSITADQADAVANAAERFAGGAIEATNRGNLQIRGIGDQSAALIDSLLAAGLGPRTAAGDDVRNLMLSPAAGIDRQMRFDTRPLAGQILETLQSHPRFHELSAKFAVQLDGGEALAMLKHPHDLWLSAFESGENTLLAFGLAGCPTERPLAAVALVDGHALVVAVLELFLDLARPEQTRMRHLLDECPAPLFLEKLGQRISLKAAGDWQRAAGPEGLHLGIHPQPSAGQVYVGAAPPLGRLGPDMLRGAAQLAITFGDGSLRFTPWQSLLLPNVRETDAVQVLDELGKLNLLTHVEEPLTHLIACTGANGCGKGLADTKHDARLLATLLPHAVDVHLSGCPRSCAAAHRAAVTLLAVGPGHYDLYFRDAALPGFGALHAHNLTIEAAATLLAARSRSPLDA

SEQ ID NO: 33089 - protein, 291 aa, Pseudomonas fluorescens PfO-1
MQLGFIGLGTMGAPMVLNLLKAGHRVRVWNRSSAPLEALAKAGAEAVQTPALAAQAEVLISMLGDDTAIRSVFFDAKALHGLRAGSVHVNMSTVSVALARELATVHEARGVGYVSAPVLGRVDVAAAGNLNILASGPAEALVRVQPLFDVLGRKTWTLGDTAEVACAAKLSANLMIASAIESMAEASTLAGGYGISRGAFIEMITSTLFAVPVYQGYGKLMVDEKFEPAGFKLSLGLKDVRLALEAGEAAQVPLPFASVLKDNLLDGMAHGQADQDWASLSKVSDRRAGVK

SEQ ID NO: 33090 - protein, 638 aa, Pseudomonas fluorescens PfO-1
MGKIIGIDLGTTNSCVSVLENGKAKVIENAEGARTTPSIIAYANDGEILVGQSAKRQAVTNPHNTLFAVKRLIGRRFEEEVVQKDIKLVPYKIVKANNGDAWVEASGKQMAPPQISAEVLKKMKKTAEDYLGEAVTEAVITVPAYFNDSQRQATKDAGRIAGLDVKRIINEPTAAALAYGMDKAKGDHTVIVYDLGGGTFDVSVIEIAEVDGEHQFEVLATNGDTFLGGEDFDMRLIDYLVDEFKKESGMDLKNDPLALQRLKEAAEKAKIELSSSQSTDVNLPYITADATGPKHLNVKISRAKLESLVEDLVTRTIEPCRIALKDAGIDASKIDDVILVGGQTRMPMVQKAVSDFFGKEARKDVNPDEAVAMGAAIQGAVLAGDVKDVLLLDVSPLTLGIETMGGVMTALIEKNTTIPTKKSQVFSTADDNQGAVTIHVLQGERKQAAQNKSLGKFDLADIPPAPRGVPQIEVTFDIDANGILHVGAKDKATGKEQKITIKANSGLSDEEIQKMVRDAELNAEEDRKFEELAAARNQGDALVHSTRKMIADAGDKVTAEEKTAIEAAVVALEAAVKGDDKAAIDAKVEELSKVSAPVAQKMYAEQAQPAEGAAPHDEKAEKADDVVDAEFEEVKDHK

SEQ ID NO: 33091 - protein, 324 aa, Pseudomonas fluorescens PfO-1
MSQTSDLIQSAQRTIRLEVEAVQGLLPHIDADFVRACEMILASKGRVVVVGMGKSGHIGNKIAATLASTGTPAFFVHPAEASHGDMGMITRDDVILALSNSGSTNEIVTLLPLIKRLGIQLISVTGNPQSPLAKAAEVNLNVHVEHEACPLNLAPTSSTTAALVMGDALAVALLEARGFTAEDFAFSHPGGALGRRLLLKVENVMHAGQELPQVQRGTLLKDALMEMTRKGLGMTVILEADGKLAGIFTDGDLRRTLDRSIDIHSATIDQVMTVHGKTARAEMLAAEALKIMEDHRINALVVVDEEDRPIGAFNLSDLLRAGVM

SEQ ID NO: 33092 - protein, 699 aa, Pseudomonas fluorescens PfO-1
MQTFFIAPTDFGVGLTSISLGLVRTLERAGLKVGFFKPIAQPHPGDTGPERSTELVARTHGLKPPQPLGLAHVERMLGDGQLDELLEEIITLYQQAAIGKDVLVVEGMVPTRSASYAARVNLHLAKSLDAEVILVSAPENEVLTELSGRVELQAQLFGGPKDPKVLGVILNKVKTDESMDAFAARLKEHSPLLRTGDFRLLGCIPFQPELNAPRTRDVADLMGAQVLNAGDYETRRMTKTIICARTMRNTVDLLKPGVLVVTPGDRDDIILAVSLAAINGVPLAGLLLTSDTLPDPRIMDLCRGALQAGLPVLSVSTGSYDTANLLNGLNKEIPVDDRERAEIITDFVASHLDANWLHQRCGTPREMRLSPAVFRYQLIQRAQAANKRIVLPEGSEPFTVQAAAICQERGIARCVLLAKPADVEAVARAQGITLPPGLEILDPDLIRERYVEPMVALRKSKSLNAPMAEQQLEDTVVIGTMMLALDEVDGLVSGIINTTANTIRPALQLIKTAPGCTLVSSVFFMLFPEEVLVYGDCVMNPHPSASELAEIALQSADSAAAFGITPRVAMISYSSGESATGEEVEKVREATLLAHEQQHSLLIDGPLQYDAAANETVARQLAPNSQVAGRATVFVFPDLNTGNTTHKAVQRSADCVSLGPMLQGLRKPVNDLPRGAQVDDIVYTIALTAIQAANRPLDI

SEQ ID NO: 33093 - protein, 326 aa, Pseudomonas fluorescens PfO-1
MPMKKTVLAFSRITPPMIERLQQDFDVIVPNPKNGDINAQFNEALPHAHGLIGVGRKLGKAQLENAAKLEVVSSVSVGYDNYDLAYFNERGIMLTNTPDVLTESTADLAFALIMSSARRVAELDAWTKAGQWQASVGAPLFGCDVHGKTLGIVGMGNIGAAVARRGRFGFNMPIIYSGNSRKTELEQELGAQFRSLDQLLAEADFVCLVVPLSDKTRHLISHRELALMKPDAILVNISRGPVVDEPALIEALQNNRIRGAGLDVYEKEPLAESPLFQLKNAVTLPHIGSATNETREAMANRALTNLRSALLGERPQDLVNPQVWRG

SEQ ID NO: 33094 - protein, 343 aa, Pseudomonas fluorescens PfO-1
MKMLKSTLAIVTAAAVLGVSGFAQAGATLDAVKKKGFVQCGVSDGLPGFSVPDSTGKIVGIDADVCRAVAAAVFGDATKVKFSQLNAKERFTALQSGEIDILSRNTTMTSSRDAGMGLKFPGFITYYDGIGFLVNNKLGVKSAKELDGATICIQAGTTTELNVSDYFRGNGLKYTPITFDTSDESAKSLESGRCDVLTSDKSQLFAQRSKLASPKDYVVLPETISKEPLGPVVRNGDDEWLAIVRWVGYALLNTEEAGISSKNVEAEAKSTKNPDVARMLGADGEYGKDLKLPKDWVVQIVKQVGNYGEIFEKNLGKSTPLEIDRGLNALWNNGGIQYAPPVR

SEQ ID NO: 33095 - protein, 300 aa, Pseudomonas fluorescens PfO-1
MTDTNATRCGYVAIVGRPNVGKSTLLNHILGQKLAITSRKPQTTRHNMLGIKTEGDVQAIYVDTPGMHKGGEKALNRYMNKTASAALKDVDVVIFVVDRTKWTEEDQMVLERVQYVTGPLIVALNKTDRIEDKAELMPHLSWLQEQLPNAQIIPISAQQGHNLDALEKVIADHLPENDHFFPEDQITDRSSRFLAAELVREKIMRQLGAELPYQITVEIEEFKQQGATLHIHALILVERDGQKKIIIGDKGERIKRIGTEARKDMELLFDSKIMLNLWVKVKGGWSDDERALRSLGYGDL

SEQ ID NO: 33096 - protein, 199 aa, Pseudomonas fluorescens PfO-1
MLDELLHRVSNHTPRTLETDTRFPEAAVLVPITRSDEPELVLTLRASGLSTHGGEVAFPGGRRDPEDPDLVFTALREAEEEIGLPPGLVEVIGPLSPLISLHGIKVTPYVGVIPDFVEYQANDAEIAAVFSVPLEFFRKDPREHTHRIDYQGRSWYVPSYRYGDYKIWGLTAIMIVELINLLYDAKISLHQPPKSFINT

SEQ ID NO: 33097 - protein, 69 aa, Pseudomonas fluorescens PfO-1
MATRETGNVKWFNDAKGYGFIQREDGVDVFVHYRAIRGEGHRSLTEGQQVEYAVVEGQKGLQAEDVVGL

SEQ ID NO: 33098 - protein, 298 aa, Pseudomonas fluorescens PfO-1
MMSTRPSLGFAGIGLMGLPMCRRLLAAGYPLAVWNRNPAKCAPLVEAGARQVATPAELCEQADVVMLCLADTAVVREVVFGPAGVAEGAKPGQLLVDFSSLEPTATREMAAELADKTGMAWLDSPVSGGVVGAEAGSLAIMVGGAEADLQRVRPVLLELGQRVTHMGGVGAGQVTKACNQMIVACNALVIAEVVALAEQAGVDASLIAEALAGGFADSRPLQILAPQMAESRFEPVKWHVRTLLKDLDTAVKFSRETGSATPISGLAAQLMRLHGAQGFLQKDPATLVQMYRAPDSTD

SEQ ID NO: 33099 - protein, 401 aa, Pseudomonas fluorescens PfO-1
MMRDVYICDAIRTPIGRFGGGLAAVRADDLAAVPIKALMERNPSVDWSAIDEVFLGCANQAGEDNRNVARMALLLAGLPESVPGVTLNRLCASGMDAIGTAFRAIASGEMELAIAGGVESMSRAPFVMGKADAAFSRNMKLEDTTIGWRFINPLMKAQYGVDAMPQTADNVADDYEISREDQDAFALRSQQRTAAAQAAGYFAEEIVEVRIAHKKGETVVSQDEHPRADTTIEALTKLKPVNGPEKTVTAGNASGVNDGAAALILASAEAVKKHGLTARAKVLGMASAGVAPRVMGIGPVPAVRKLTERLGVAVSDFDVIELNEAFASQGLAVLRELGLADDAAQVNPNGGAIALGHPLGMSGARLVLTALHQLEKSGGKKGLATMCVGVGQGLALAIERV

SEQ ID NO: 33100 - protein, 316 aa, Pseudomonas fluorescens PfO-1
MDKILHQPLGGNEMPRFGGIATMLRLPHVPTAAGLDAAFVGVPLDIGTSLRPGTRFGPRDIRTESVMIRPYNMATGAAPFDSLSVADIGDVAINTFNLLDAVRIIEEAYDNILEHNVIPMTLGGDHTITLPILRAIHKKHGKVGLVHIDAHADVNDHMFGEKIAHGTTFRRAVEEGLLDCDRVVQIGLRAQGYTADDFNWSRDQGFRVVQAEECWHKSLAPLMAEVREKVGGGPVYLSFDIDGIDPAWAPGTGTPEIGGLTTIQAIEIVRGCQGLDLIGCDLVEVSPAYDTTGNTSLLAANLLYEMLCVLPGVVHR

SEQ ID NO: 33101 - protein, 463 aa, Pseudomonas fluorescens PfO-1
MGIKVLLVEDDRSLREALADTLLLAGHDYHAVGSAEEALNAVEREAFSLVVSDVNMPGMDGHQLLGLLRARQPQLPVLLMTAHGAVERAVDAMRQGAADYLVKPFEPKALLDLVARHALGSLVASDAEGPVAVEPASAQLLDLAARVARSDSTVLISGESGTGKEVLARYIHQQSHRASQPFIAINCAAIPDNMLEATLFGHEKGSFTGAIAAQAGKFEQADGGTILLDEISEMPLGLQAKLLRVLQEREVERVGARKPITLDIRVVATTNRDLAGEVAAGRFREDLYYRLSVFPLAWRPLRERTADILPLAERLLAKHVNKMKHAMAKFSSEAQACLIGYPWPGNVRELDNAVQRALILQQGGLIQPQDFCLSGPALFAPLPAVVPVAPVIREVEIEVDSAGALGDDLRRREFQMIIDTLRTERGRRKEAAEKLGISPRTLRYKLAQMRDAGMDVEGYLFAT

SEQ ID NO: 33102 - protein, 297 aa, Pseudomonas fluorescens PfO-1
MAKIGFIGTGIMGHPMAANLQKAGHSLFLSAHHDAAPADLVAAGAVALANPREVAQEAEFIIVMVPDTPQVEDVLFRADGVAAGIGKGKVVIDMSSISPTATKAFAAKINEKGAQYLDAPVSGGEVGAKAATLSIMVGGDADAFERALPLFQAMGKNITLVGGNGDGQTAKVANQIIVALNIQAVAEALLFASKNGADPAKVREALMGGFASSKILEVHGERMIKGTFDPGFRISLHQKDLNLALQGAKELNINLPNTANAQQVFSTCAAIGGSNWDHSALIKGLEHMANFTIRDKK

SEQ ID NO: 33103 - protein, 403 aa, Pseudomonas fluorescens PfO-1
MTQTSAGPLAWVNGSDAPEKSAINLGFMALSDCASLVVAATQGFAQPYGLTLNLKRQSSWANLRDNLVSGELDAAHSLYGLIYAVHLGIGGVAPTDMAVLMGLNQNGQSLNLSHGLQGLGVTGPEALHHHVHQTRAKLTFAQTFPTGTHAMWLYYWLASQGIHPLRDVDSVVVPPPQMVAHLQAGRIDGFCVGEPWAASAVQQSLGFTLATSQTIWPDHPEKVLGCTRAFVEQYPNTARALVMAILEASRFIEESPENRRSTAQLLSAAEYLDAPVSCIEPRFLGDYDDGLGNRWQDPHALRFHGDGAVNLPYLSDGMWFMTQFRRWGLLRDDPDYLAVARQVQQLEIYRDAATAVGVAPWGKDMRSSQLIDGKIWDGSDPAAYARSFKLHALSDSATLLAQR

SEQ ID NO: 33104 - protein, 70 aa, Pseudomonas fluorescens PfO-1
MSNRQTGTVKWFNDEKGFGFITPQGGGDDLFVHFKAIETDGFKSLKEGQTVSFVAEKGQKGMQAAQVRPE

SEQ ID NO: 33105 - protein, 478 aa, Pseudomonas fluorescens PfO-1
MEHSILLVEDDELLAENIQTYLERKDFEVTVCHSAEDALGQLESFMPDIVLTDNSLPGMSGHDLIQKLRISAPDLKVIMMTGYGNVEDAVVAMKEGAFHYVTKPVALPELKLLLDKALATERMERTLSFYQEREAQKSGVQALIGESAPMLHLKNTIGQLLDAERRMANGDLPPVLVEGETGTGKELVARALHFDGARSKGPFIEFNCASIPANLVESELFGHEKGAFTDAKDRRVGLVEAADGGTLFLDEIGEMDLVLQAKLLKLLEDRTIRRVGSVKERKVNLRVISATNCNLEQMVQQGKFRRDLFFRLRIISIKVPRLYARGEDILLLARHFLASHGKRYGKPNLHFSDQAEELLLSYTWPGNVRELRNMLEQTVLLAPNDTIAAHQLNVCMSLCDELPPQHQHEVPHTHFEPRPASNTESMNLPEVERDMVRKMLDKTDWNVTKSARLLGLSRDMLRYRIEKLGLARPDKRQW

SEQ ID NO: 33106 - protein, 393 aa, Pseudomonas fluorescens PfO-1
MQDVVIVAATRTAIGSFQGSLASVSAVDLGAAVIRQLLEQTGLDGAQVDEVIMGQVLTAGAGQNPARQSAIKAGLPHAVPAMTLNKVCGSGLKALHLGAQAIRCGDADVIIAGGQENMSLANYVMPGARTGLRMGHAQIVDTMISDGLWDAFNDYHMGITAENLVEKYEISREQQDAFAAASQQKAAAAIEAGRFVDEITPILIPQRKGDPVAFKVDEQPRGDTTADSLAKLRPAFKKDGSVTAGNASSLNDGAAAVILMSAEKAKALGLPVLAKIAAYANAGVDPAIMGIGPVSATRRCLDKAGWNIGQLDLIEANEAFAAQSLAVAKDLQWDLDKVNVNGGAIALGHPIGASGCRVLVTLLHEMIKRDAKKGLATLCIGGGQGVALALERA

SEQ ID NO: 33107 - protein, 318 aa, Pseudomonas fluorescens PfO-1
MKPEVLQLSPILIPQINARLGELFTIRRYFEQADKAAYLQEHGANIRGVITGGHTGISQALMAQLPKLEVVAVNGVGTDAVDLAYARDRGIRVTATIGALTEDVADLAIGLLIAVCRGLCTSDRYVRSGQWPQSPTPLAPLPLARQVSGMRIGIVGMGRVGRAVATRAAAFGCPISYTDLQPMSDVSHTFIADLKQLARDSDALILAAAADKAEAIIDASVLQALGKGGYLINVARGKLVNETDLVAALTAGEIAGAALDVFVDEPNVPEALFAQEQVVLQPHRASATLQTRTRMGEMVVASLVDSFAGKTPQGCVTG

SEQ ID NO: 33108 - protein, 543 aa, Pseudomonas fluorescens PfO-1
MSGQGKFKKQLSLIDLTFIGLGAIFGSGWLFAASHVSAIAGPAGIFSWLLGGFAVLLLGIVYCELGAALPRAGGVVRYPVYSHGPLLGYLMGFITLIAFSSLVAIEVVASRQYAAAWFPSLTKAGSGDPTLLGWLVQFGLLCVFFLLNYRSVKTFAKANNLVSVFKFIVPLLVIGVLFTFFKPENFQIQGFAPFGLSGIEMAVSAGGVIFAYLGLTPIISVASEVKNPQRTIPIALILSVLLSTAIYVLLQTAFLGGIPTELLANGWAGVSKEFALPYRDIALALGVGWLAYLVVADAVISPSGCGNIYMNATPRVIYGWAQTGTFFKVFTHIDAKSGIPRPALWLTFALSVFWTLPFPSWEALINVVSAALVLSYAVAPVTVAALRRNAPDMPRPFRVKCMGVLGPVSFIIAALIVYWSGWNTVSWLLGLQILMFVVYLLCGRFVPTAQLSLSRQVRSSAWLIAFYAVTIVLSKLGTFGGLGILTHPFDTLVVAACAMGIYYWGAATGVPAHLLRLESEEDESEVASPSPASTANPRAAGAY

SEQ ID NO: 33109 - protein, 335 aa, Pseudomonas fluorescens PfO-1
MSFQIALNFEDGVTRFIEASGHETVADAAYRQGINIPLDCRDGACGTCKCFAEAGRYAMGDNFIEDALSDDELAQGYVLTCQMCAESDCVVRVPVGSQVCKTEQASYQAAISDVRQLSESTIALSLKGESLSKLAFLPGQYVNLQVPGSEQSRAYSFSSLQKNGEVSFLIRNVPGGLMSSFLTGLAKAGDSLNLAGPLGSFYLREIKRPLLLLAGGTGLAPFTAMLEKIAEQGSEHPVHLIYGVTNDFDLVELDRLEAFAARIPNFSFGACVANPQSQHPLKGYVTQHIEPRHLNEGDVDVYLCGPPPMVEAVSQYIREQGITPANFYYEKFAAA

SEQ ID NO: 33110 - protein, 464 aa, Pseudomonas fluorescens PfO-1
MPIDLTRRQLLQRASIVGAFSALACNPALGQLMRAPRLIPWRNWSGGQSCLPAARVAPKNLDELTAVIQQAPGKIRPVGSAHSFSALVPTDGTLLSLSYFNGLLDHDPKTLQAEFAAGTPMSRMGTPLKDVGQALQNMADIDYQTLAGAISTSTHGTGKTFQSYSAHVCGMQLVTARGEVLDCDSQRHPEVFNAARVSLGALGVATKIRLQNRPAYRLRERQWIAKTEELLEDLDKNTRENQHWEMLVVTHSDYALSIALNETTDPPTLPIPPEEEGGNEFVTLIEKIDKYGSDFPNLRSSLLNSLRHLASFDDRVGDSFEIYANVRTVRFNEMEYSVPAEHGPACLREILKLIRDKDLRTWFPIEYRYVKADDIPLSMFEGRDSCSISVHQHYQMDHHNFFAAVEPIFWKYNGRPHWGKLHTLNARTLQTLYPRWQEFIQVRQAVDPSGKFLNGHLSSILGVS

SEQ ID NO: 33111 - protein, 557 aa, Pseudomonas fluorescens PfO-1
MYEYDDYDRALVFERVAQFRDQVERFMAGELSEEEFLPLRLQNGLYMQKHAYMLRVAIPYGTLSAEQMRTLASIARDYDRGYGHFTTRQNMQFNWIELHEVPDILERLAQVNMHAIQTSGNCVRNITTEAFAGVAADELIDPRPLAEILRQWSTINPEFLFLPRKFKIAICSAKQDRAAIMMHDIGLYLYPGRDGQMLLRVIVGGGLGRTPILGLQIRDGLPWQHLLSYVEAVLRVYNRHGRRDNKYKARIKILVKALGIEAFAKEVEEEWQHLKDGPAQLTEDEYQRVASAFVPPSYRTLAGTDLDFGTHLAENPAFARWVARNVQPHKVPGYTSVVLSTKPGLAAPPGDVTDAQMQAVADWSERFGFGEIRIAHEQNIVLPDVPKSELFALWQQAKEQGLGAANVGLLTDIIACPGGDFCALANAKSIPIAQAIQARFDNLDYLHDLGDISLNISGCMNACGHHHIGNIGILGVDKNGSEWYQITLGGAQGKNSALGKVIGPSFSAAEVPQVIERIIGTFVRYREAEEQFVETVARIGLEPFKERVYPKALEVSA

SEQ ID NO: 33112 - protein, 319 aa, Pseudomonas fluorescens PfO-1
MDVPMQNDQALTRDSLFGTAAESTYAGITSFMRRRYSRDLRGADVAVSGVPFDTATSNRPGARFGPRGIRAASTGIAWERHWPWAFDPFDHLAVIDYGDCDFDYGSPHTIPDSIEAHAEHILSSGSAMLTFGGDHFISYPLLKAHARKHGTLSLIHFDAHSDTWPDEGGKRVDHGTMFWHAAREGLVDPARSVQIGLRTTNDDHQGFQVLDARQVHRCGCEAIIEAIRARVGDNPVYLTFDIDCLDPAFAPGTGTPVCGGLSTVQALEILGGLRGINLVGMDVVEVAPAYDHADVTSLAAATLAMEMLCLYAARHKVDA

SEQ ID NO: 33113 - protein, 241 aa, Pseudomonas fluorescens PfO-1
MDCANVSRLLIVDDDGEILSLLKKFFVQHGYQVDVAAHGEAMWAAIAQARPDTIILDLMLPGEGGLSLCQKVRAQMGIPIIMLTAMAELSDRIVGLELGADDYLTKPFAPQELLARVRALQRRVGENAPSGAEPSRPVMAFAGWHLDITCRELRSPEGVMIPMSAGEFDLLLVLLEHPQRILTREQLIDLTHGQGHDAYDRSIDVQISRLRRKIEPDSKRPDLIRTVRNGGYMFTAKVSRS

SEQ ID NO: 33114 - protein, 596 aa, Pseudomonas fluorescens PfO-1
MTVTVGDFLVERLSQWGVTRIFGYPGDGINGVFGTLSRAGGKIEFVQARHEEMAAFMASAHAKFTGELGVCIATSGPGASHLITGLYDARLDHMPVLAIVGQQARTALGSHYQQELDLVSMFKDVAGAFVQQASAPSQVRHLLDRAVRTAIGERRVTALILPNDLQDLEYKAPARAHGTAHSGVGYSKPKVLPYDADLQRAADVLNAGEKVAILVGAGALHASEQVFAIAEKLGAGVAKALLGKAVLPDELPWVTGCIGLLGTEPSYKLMTECDTLLMIGSGFPYAEFLPKEGQARGVQIDLQPDMLSLRYPMEVNLAGDAAETLAALAPLLEHKPLRKWRKKIEGWRASWDKTLEKRAMAKADPVNPQRVVYELSPRLPEQAIITSDSGSCANWFARDLKIRKGMKCSLSGGLASMGAAVPYAIAAKFAFPQRPVIALVGDGAMQMNNMAELITVAKYWRQWDSPKWICAVFNNEDLNQVTWEQRVMEGDPKFGASQSIPDVPYHLFAISIGLKGIFVDREEDVAAAWEQALASEVPVVIEFKTDPNVPPLPPHIKLEQAKKFASTLLKGDPDEAGVIVQTAKQVLGTVLPGKRK

SEQ ID NO: 33115 - protein, 321 aa, Pseudomonas fluorescens PfO-1
MKKTILAFSRVSPSLLEPYKDDYEVIIISPELGDMDAQFEAAISNAHGLIGGSRRLGEAELAAAVNLEIVSSISVGYDNYDLDYLNRRGIMLTNTPDVLNETTADLALALILATARRIPELDSWTKEGNWTQTIDASQFGCDVHGKTLGIIGLGKIGEAIARRGRFGFGMTILYSGNSRKPKLEQELGARFVPQEELLSASDFVCPVVPLTDATRNLIGRKELALMGPESILINISRGPVVDQDALIEALQEKTIRAAGLDVYVKEPLTNSELFNLRNVVTVPHIGSATTDTRNAMAKRALENLLAGLEGRQPRDLVHFKK

SEQ ID NO: 33116 - protein, 438 aa, Pseudomonas fluorescens PfO-1
MMTLPSKTSLRRAVTGPMLFLFILGDVLGAGVYALAGTIAGEVGGAIWMPLLIALFFAMLTAGSYAELVTKYPHAGAASVFAEKAFGSPLISFLVGFCMLSAAVTSAAGLSLAFAGDYLAAFIHVPPHISALLFLLVIALLNARGIKESLGANLVMTVIELSGLLLVVVAAAWYFRTGDADLGRSLEFKPGVSPVLAVLGAALIAFYSFVGFETSANLAEEIRDVRKVYPRALFGALLTAGVLYMAVGVAASSVLPMEKLVATSAPLLEVVRASGLNIPPRVFAFIALVAVANGALLTMIMASRLTYGMACLGLLPNALSKVLPQRRTPWIAVIATTLVAIGLTLTGTLATLAETVVLLLLFVFLSTNLSVLILRRDEVAQDHFRVPTWVPLLAIVSCLVLLSQQSLETWMRGGALILTGMLLFACARVALPAPVEPG

SEQ ID NO: 33117 - protein, 396 aa, Pseudomonas fluorescens PfO-1
MTISNDPIVIVSAVRTPMGGFQGELKSLTAPQLGAAAIKAAVERAGVAADAVDEVLFGCVLPAGLGQAPARQAALGAGLDKSTRCTTVNKMCGSGMETAILAHDMLLAGSADVVIAGGMESMSNAPYLLDRARAGYRMGHGRVLDSMFLDGLEDAYDKGRLMGTFAEDCAETNDFSREAQDAFAIASTTRAQQAIKDGSFKDEIVPLTVTVGKEQVVISNDEQPPKAKLDKIASLKPAFREGGTVTAANSSSISDGAAALVLMRQSQAQKQGLKPLAVIHGHAAFADTPGLFPVAPIGAIKKLMKKTGWSLDQVDLFEVNEAFAVVGMAAMTHLEIPHDKLNIHGGACALGHPIGASGARILVTLLSALRQKGLKRGVAAICIGGGEATAMAVECV

SEQ ID NO: 33118 - protein, 322 aa, Pseudomonas fluorescens PfO-1
MKKQVVLYKKLSPALMARLEEQVDVTLIDSLDADGLMKLRDALPGAHGLLGASLKLDAALLDLAPNLEAISSVSVGVDNYDIDYLTQRKVMLTNTPDVLTETTADTGFALILATARRVVELANMVRGGHWHRSIGPAHFGTDVHGKTLGIIGMGRIGEALAQRGHFGFGMPVIYHSQSRKPAVEERFDAQYRSLEDLLQQADFICLTLPLTAQTEGLIGAEQFALMRPESIFINISRGKVVDEAALIDTLRHNRIRAAGLDVFEREPLNHDSPLLQLNNVVATPHMGSATHETREAMARCAVENLLAALAGQRPANLVNPPL

SEQ ID NO: 33119 - protein, 395 aa, Pseudomonas fluorescens PfO-1
MRYSALTQRIAGEGAAAWRIHDRALELRAEGIDVLLLSVGDPDFDTPLPIIHGAIDSLLAGDTHYSEVRGRLELRKRIAERHRRSSGQDVDAEHVIVLPGAQCAVYSVAQCLLDPDDEVIVAEPMYVTYEGVFGACGATVVPVPVRPENGFRVDPVDVAARITSKTRAMLLNSPNNPSGASLSLLIWQELAALCIRHDLWLISDEVYSELLYEGEHVSPASLPGMAERTATINSLSKSHAMTGWRIGWMIGPKPLAEHLVNLSLSMLFGLPDFVQKAAQVALEKDLPEVTQMREEYRLRRDLVCERLRGCPGLYPIKPDGGMFVMVDVRQTGLGAQDFAERLLEGYGVSVLAGEAFGPSAAGHIRIGLVVDRVKLADACSRIALCAAQLLQVRSA

SEQ ID NO: 33120 - protein, 337 aa, Pseudomonas fluorescens PfO-1
MSFQIALNFEDGITRFIEAQGHETVADAAYRQGINIPLDCRDGACGTCKCFAEAGRYDMGDNFIEDALSEDELTQGYVLTCQMRAQSDCVVRVPAASQVCKTEQESFQASISDVRQLSESTIALSIKGDCLNKLAFLPGQYVNLQVPGSEQTRAYSFSSLQKDGEVSFLIRNVTGGLMSSFLTGLAKAGDSMNLAGPLGSFYLREIKRPLLLLAGGTGLAPFTAMLEKIAEQGSEHPVHLIYGVTNDFDLVELDRLEAFVARIPNFSFRACVANPQSTYPFKGYVTQHIEPCHLNGGEVDVYLCGPPPMVEAVNHYIREQGINPANFYFEKFAPAAA

SEQ ID NO: 33121 - protein, 324 aa, Pseudomonas fluorescens PfO-1
MSLIYVTSPIHPEVLQALSSVGEVRLGYGPNAAPYSEIQNEVDAVFLRGGHISAEMIAASPKLRIVARHGAGYDNVDYKAAAELGVWVTNTPGANRRSVVEHVFALLLGISRKVQLATDQTRNNIWAQDRLSLTGIELEGRTLGLIGFGDIGRHVAPVAEAFGMKVLATDPAYDTSFDKRLVDLDTLLTQADVVSLHVPLQEGTENLISRAEIEKMKTGAILINTSRGGVIDEAAVADALRSGKLGGAGIDVLAAENTDMITPFSYNTFPVADLPNLLVTPHVAGQTNESLLRVGMSAVKAISAVLRGAPPLHPVNNPVPKTFN

SEQ ID NO: 33122 - protein, 282 aa, Pseudomonas fluorescens PfO-1
MHRRPSLFKACVFVLAASSAVMGIAQAADSKLDSVLARGKLIVGTGSTNAPWHFQGADGKLQGFDIDIARMVAKGLFNDPSKVEFVVQSSDARIPNLLTDKVDMSCQFITVTASRAQQVAFTLPYYREGVGLLLPNNSKYKEIEDLQAGGDGVTVAVLQNVYAEELVHQALPKAKVDQYDSVDLMYQAVNSGRADAAATDQSSVKYLMVQNPGRYRSPTYAWSPQTYACAVKRGDQDWLNFVNTALHEAMTGVEFPTYAASFKQWFGVDLPSPAIGFPVEFK

SEQ ID NO: 33123 - protein, 552 aa, Pseudomonas fluorescens PfO-1
MYVYDEYDQRIIEDRVKQFRDQTRRYLAGELSEEEFRPLRLQNGLYIQRFAPMLRVAVPYGQLTSRQVRMMAKIARDYDKGYAHISTRQNVQFNWPAVEDIPDILAELATVQMHAIQTSGNCLRNVTTDQFAGVAADELIDPRPWCEIVRQWTTFHPEFAYLPRKFKIAVNGSTSDRAAIEVHDIGLEPVHNAAGELGFRVLVGGGLGRTPVVGAFINEFLPWQDLLSYLDAILRVYNRYGRRDNKYKARIKILVKALTPEVFAQKVDAEMEHLRGGQTTLTEAEVHRVAKHFVDPDYKALSNQDAELAALDKEHPGFARWRTRNTLAHKKPGYVAVTLSLKPTGVAPGDITDKQLDAVADLAERYSFGQLRTSHEQNIILADVEQSQLFTLWGELREAGFATPNIGLLTDIICCPGGDFCSLANAKSIPIAESIQRRFDDLDYLFDIGELDLNISGCMNACGHHHVGHIGILGVDKKGEEFYQVSLGGSASRDASLGKILGPSFAQEDMPDVISKLIDVYVEQRTEDERFIDTYQRIGIDLFKERVYAANH

SEQ ID NO: 33124 - protein, 322 aa, Pseudomonas fluorescens PfO-1
MPATVLVLVETINDYLPILERQGFHLILAPTPAERAQAIATHGARIDAVLTRGPLGLYAEEIAALPALKIICVIGAGYEQVDLQAASDRGLTVTNGAGVNASSVADHAMAMLLALVRDIPRCDGAVRRGEWPKIMRPSLAGKRLGILGLGAVGMAIAKRAGLGFDMEISYHNRQVRSDVPYAFCSTPTELARASDFLVVATPGGIGSQHLVTRPVLDALGPNGFIVNIARASVIATADLISALEQRRIAGAALDVFDHEPQVPDALKSLSNVLLTPHVAGLSPEATQGTVELVGKNLVAFFSGQPVLTPLQLPPKLNNQRVH

SEQ ID NO: 33125 - protein, 846 aa, Pseudomonas fluorescens PfO-1
MELASLIGRLNPDNRRALERAAQRCLQRGHHFVEIEHLLLELLDIEGGDFAFLLPRFGLERDALTAEINKALDLFKTGSTRTPALSSHTLGLLEDAVVQASVLGIDSIRSGLLLLALIDRDERRSLLLNSASSLLRIPKEALRANLLEWTENSREHVGPRSVSSGSPTPRQDSVLDQYTQDLTADAHAGRIDPIVGRDGEIRQCIDILLRRRQNNPILVGAPGVGKTAVVEGLALRIAAGDVPPSLQEVSLRVLDLGLLQAGAGVKGEFEQRLKGVIDTVRSADKPIILFIDEAHTLIGAGGTEGGSDAANLLKPALARGELRTLAATTWMEYKKYFEKDPALARRFQLVQVEEPDEITAVEMLRGVAAKLEQHHGVQVLDAAIHEAVKLSHRYISGRQLPDKAISVLDTACARVALGQHDVPPPLESLRHRQQSLKEEVERLRREQATGLDHRERITLLESESKTNVQAIRELETRWSEERVAVRELLDTRRELLALSESADSDKPDEAIDSRIDHLAAELLRLEAGLDAIRQDDPLVPEQVDGKTVAAVIAGWTGIPVGKMLADEAHAVRTLGTRMGQRVMGQSTALNTIAQRLQAYRAGLTDPQKPVGVFLLVGPTGVGKTETAYALADALYGGERNLISINLSEYQEAHTVSQLKGAPPGYVGYGSGGVLTEAVRRKPYSVVLLDEIEKAHPDVLEAFYNVFDKGLMEDGTGLVVDFKNTVMLATSNVGAELLLDTPTAQLGSEAFNEALHKVLLQAFRPAFLARMTVVAYRPLDEQTLEGIVLAKLEKLRGRYKAATGKQFEFDSGIVKAVLAKCSAAGARDVENVLMTQVTGKLAEWVLE

SEQ ID NO: 33126 - protein, 566 aa, Pseudomonas fluorescens PfO-1
MSKPTVDPTSNSKTGPVTPVNFLRPIIQADLDSGKHTQIVTRFPPEPNGYLHIGHAKSICVNFGLAQEFGGVTHLRFDDTNPAKEDQEYIDAIESDVKWLGFEWSGEVRYASQYFDQLHDWAVELIKAGKAYVDDLTPEQAKEYRGSLTEPGKNSPFRDRSVEENLDWFARMRAGEFPDGARVLRAKIDMASPNMNLRDPIMYRIRHAHHHQTGDKWCIYPNYDFTHGQSDAIEGITHSICTLEFESHRPLYEWFLDALPVPARPRQYEFSRLNLNYTITSKRKLKQLVDEKHVNGWDDPRMSTLSGFRRRGYTPASIRNFCEMIGTNRSDGVVDFGMLEFSIRQDLDANAPRAMCVLRPLKVVITNYPEDQVENLELPRHPQKEELGVRQLPFAREIYIDRDDFMEEPPKGYKRLEPNGEVRLRGSYVIRADEAIKDADGNIVELRCSYDPDTLGKNPEGRKVKGVIHWVPAAASIECEVRLYDRLFRSPNPEKAEDSASFLDNINPGSLQVLTGCRAEPSLGNAQPEDRFQFEREGYFVADIKDSKPGQPVFNRTVTLRDSWGQ

SEQ ID NO: 33127 - protein, 391 aa, Pseudomonas fluorescens PfO-1
MSLNPRDVVIVDFGRTPMGRSKGGMHRNTRAEDMSAHLISKLLERNTKVDPAEVEDVIWGCVNQTLEQGWNIARMASLMTQIPHTSAGQTVSRLCGSSMSALHTAAQAIMTGNGDVFVVGGVEHMGHVSMMHGVDPNPHMSLYAAKASGMMGLTAEMLGKMHGITREQQDAFGVRSHQLAHKATVEGKFKDEIIPMQGYDENGFLKTFDYDETIRPETTLESLAALKPAFNPKGGTVTAGTSSQITDGASCMIVMSAQRAQDLGIQPLAVIRSMAVAGVDPAIMGYGPVPATQKALKRAGLGINDIDFFELNEAFAAQALPVLKDLKVLDKMNEKVNLHGGAIALGHPFGCSGARISGTLLNVMKQNGGTFGVATMCIGLGQGISTVFERV

SEQ ID NO: 33128 - protein, 597 aa, Pseudomonas fluorescens PfO-1
MIPMLSSRHRRALRLTSSFLAPYRWPAFGALLALIVTAGITLSMGQGIKLLVDQGFMTQSPHLLNQSIGLFMLLVLGLAVGTFARFYLVSWIGERVVADIRRQVFNHLVYLHPGFYEDNRSSEIQSRLTADTTLLQSVIGSSLSLFLRNLLMVIGGVVLLFITNPKLTSIVVIALPLVIAPILIFGRRVRNLSRLSQDRIADIGSYVSETLGQIKTVQAYNHQVQDEQRFASTVEQAFETARKRIFQRAWLITLVIVLVLGAVAVMLWVGGMDVIAGRISAGELAAFVFYSLIVGSAFGTLSEVIGELQRAAGAAERIAELLRSENIIQPPTTGLVTLPERVKGELELQDVRFSYPSRPDSLAVDGLSLTINAGETLALVGPSGAGKSTVYDLLLRFYDPREGRILIDGVPLTSLDPLDLRRCFALVSQTPALFFGSVEENIRYGCPTATLEQVREAARIAHAHDFIEQMPDGYQTHLGDGGLGLSGGQRQRLAIARALLVDAPILLLDEATSALDAQSEHLIQQALPSLMQNRTTLVIAHRLATVKNADRIAVMDQGKLVAIGTHQELIASNPLYARLAALQFSDGRQVSTDPVTD

SEQ ID NO: 33129 - protein, 388 aa, Pseudomonas fluorescens PfO-1
MNTRPLYFDYAATTPVDERVIQVMIECLGFNGNFGNPASSSHAFGQQARQTVENARRQVAELVGAQAQQIVWTSGATESNNLALKGVAQARGVSGGHIITSQIEHKAILDTARQLQDAGVAVTYLVPDAEGLITAQAVSEAMRDDTFLVSLMLVNNELGTVNDIPAIGEVVRGRGALFHVDAAQGAGKVAIDLAQWPVDLMSFSAHKLYGPKGIGALYVGPHAQQRLQAQIHGGGHEGGLRSGTLATHQIAAMGSAFALAAEAFDDEKKTIVALRERLLEQLLSLPGVRLNGSSTHRIPHTLSLTFSEGEFNPAALSHSIAFSATSACNSASNTPSHVLLALGHDAHLAGRTIRLSLGRFTTAEDIDKAVDLIKTACASATAFWATGL

SEQ ID NO: 33130 - protein, 402 aa, Pseudomonas fluorescens PfO-1
MENLQSAVDTLVHSSNTLFILIGAVMVLAMHAGFAFLEVGTVRQKNQVNALSKILSDFAVSTLAYFFIGYWLSYGVTFLHPAAVLSADHGYGLVKFFFLLTFAAAIPAIISGGIAERARFVPQLCATALIVAFIYPFFEGMIWNGNYGLQAWLTAQFGAPFHDFAGSVVVHAMGGWLALAAVLLLGPRTGRYRDGKLVAFAPSSIPFLALGSWILIVGWFGFNVMSAQTLQGVSGLVAVNSLMAMVGGTVAALIVGRNDPGFLHNGPLAGLVAVCAGSDLMHPVGALVNGAIAGALFVWCFTAAQVKWRIDDVLGVWPLHGLCGVWGGIACGIFGSTTLGGLGGVSLISQLIGTALGVAVALIGGFAVYGSIKALHGLRLSQEQEYYGADLSLHKIGAVSQD

SEQ ID NO: 33131 - protein, 403 aa, Pseudomonas fluorescens PfO-1
MQFSKSNKLANVCYDIRGPVLKHAKRLEEEGHRILKLNIGNPAPFGFEAPDEILQDVIRNLPTAQGYSDSKGLFSARKAVMQYYQQKQVEGVGIEDIYLGNGVSELIVMSLQALLNNGDEVLVPAPDYPLWTAAVSLAGGNAVHYLCDEGADWFPDLADIKAKITPNTKAMVIINPNNPTGAVYSKEVLLGMLELARQHNLVVFSDEIYDKILYDDAVHICTASLAPDLLCLTFNGLSKSYRVAGFRSGWIAISGPKHNAHSYIEGIDMLANMRLCANVPSQHAIQTALGGYQSINDLVLPQGRLLEQRNRTWELLNDIPGVSCVKPMGALYAFPKIDPKVCPIHNDEKFVLDLLLSEKLLVVQGTAFNWPWPDHFRVVTLPRVDDLDMAIGRIGNFLKSYRQ

SEQ ID NO: 33132 - protein, 557 aa, Pseudomonas fluorescens PfO-1
MTQEIGGFAALELHPNIVAAVVATGYEEPSAIQQQSIPIILAGHDMIGQAQTGTGKTAAFALPILHRIDPSKREPQALILAPTRELALQVATAFETYAKQMPGVTVVAVYGGAPMGPQLKAIRNGAQIVVATPGRLCDHLRRDEKVLQTVNHLVLDEADEMLKLGFMDDLEVIFKAMPETRQTVLFSATLPQSIRAIAERHLRDPKHVKIQSKTQTVTAIEQAHLLVHADQKTSAVLSLLEVEDFDALIMFVRTKQATLDLASALDAKGYKAAALNGDIAQNQRERVIDSLKDGRLDIVVATDVAARGLDVPRITHVFNVDMPYDPESYVHRIGRTGRAGREGRALLLVTPRERRMLQVIERVTGQKVAEVRLPDAQAVLDARIKKLTNSLSPLVADAESTHGDLLDRLTADIGCTPRALAAALLRKATNGQALNLAAIEKERPLVPNSAPRGDRPERSGDRPDRGDRERRAPMPLGEGRARCRTALGARDGIAAKNLLGAILNEGGLAREAIGRIQVRDSFSLVELPEDGLDKLLTKLKDTRVAGKQLKLRRYRED

SEQ ID NO: 33133 - protein, 394 aa, Pseudomonas fluorescens PfO-1
MREVVIVDSVRTGLAKSFRGKFNQTRPDDMAAHCVNALLSRNDIDPASVEDCIVGAGSNEGAQGYNIGRNVAVLSQLGTGTAGMTLNRFCSSGLQAIAIAANQIASGCSDIIVAGGVESISLTLKSVNTDHLINPLLKQQTPGIYYTMGQTAEVVARRYGVSREAQDRYSLQSQIRTAQAQAAGLFNDEIVPMAVKYRVEDKNSGDVQILDGIVDRDDCNRPDTTYESLAGLKPVFAEDGSVTAGNSSQLSDGASMTLVMSLEKALQLGLKPKAFFRGFTVAGCEPDEMGIGPVFSVPKLLKAKGLQVADIDLWELNEAFASQCLYARDRLEIDNEKYNVNGGSISIGHPFGMTGSRQVGHLVRELQRRNLRYGIVTMCVGGGMGATGLFEAVR

SEQ ID NO: 33134 - protein, 590 aa, Pseudomonas fluorescens PfO-1
MCGLAGELRFDQQPADLAAIERITHHLAPRGPDAWGFHAQGPIALGHRRLKIMDLSDGSAQPMIDSQLGLSLAFNGAIYNFPELRAELEALGYAFYSGGDTEVLLKGYHAWGEALLPKLNGMFAFAIWERDAQRLFIARDRLGVKPLYLSRTGQRLRFASALPALLKGGDINPILDPVALNHYLNFHAVVPAPRTLLAGIEKLPPASWMRIEADGTTEQKTWWTLPYGPHADEKNLTLEDWRDRVLDSTREAVAIRQRAAVDVGVLLSGGVDSSMLVGLLREVGVENLSTFSIGFQDAGGERGDEFQYSDLIAKHYGTQHHQLRIDEKEIIEQLPAAFRAMSEPMVSHDCIAFYLLSREVAKHCKVVQSGQGADELFAGYHWYPQVDGAADPYAAYREAFFDRSYDDYAATVQPKWLTANDAAGDFVKEHFAQPGADAAVDKALRLDSTVMLVDDPVKRVDNMTMAWGLEARTPFLDYRLVELSARIPGQFKLPDGGKQVLKEAARRVIPSEVIDRKKGYFPVPGLKHLQGETLSWVRELLLDPSQDRGLFNPAMLDQLLTDPQGQLTPLRGSKLWQLAALNLWLSEQGI

SEQ ID NO: 33135 - protein, 413 aa, Pseudomonas fluorescens PfO-1
MALIVQKFGGTSVGTVERIEQVADKVKKFRDAGDDLVVVLSAMSGETNRLIDLAKQISGEDQPVPRELDVIVSTGEQVTIALLAMALIKRGVPAVSYTGNQVRILTDSAHNKARILQIDDQKIRGDLKAGRVVVVAGFQGVDEHGNITTLGRGGSDTTGVALAAALKADECQIYTDVDGVYTTDPRVVSVAQRLDKITFEEMLEMASLGSKVLQIRAVEFAGKYNVPLRVLHSFKEGPGTLITIDEEETMEQPIISGIAFNRDEAKLTIRGVPDTPGVAFKILGPISAANIEVDMIVQNVAHDNTTDFTFTVHRNDYQSAQTVLENTAREIGAREVVGDTKIAKVSIVGVGMRSHAGVASRMFESLAKESINIQMISTSEIKVSVVIEEKYLELAVRALHTAFELDAPARQGE

SEQ ID NO: 33136 - protein, 475 aa, Pseudomonas fluorescens PfO-1
MSQPTQKLRLGALIALVVGSMIGGGIFSLPQNMAARADAGAILIGWGITAIGMLTLAFVFQTLANRKPELDSGVYAYAKAGFGDYMGFSSAWGYWISAWLGNVGYFVLLFSTLGYFFPVFGQGNTPIAIGCASVLLWAVHFLVMRGIKEAALINQLTTVAKIIPLIMFVVIAAVAFKADVFTRDIWGRSNPNFGGVMDQVRNMMLVTVFVFIGIEGASVYSARAEKRTDVGRATVIGFLGVLALLVLVNVLSLGIMSQPELATLQNPSLAAVLEHIVGPWGALLISVGLAISLLGALLSWALLCAEILFATAKDNTMPAFLKKENANHVPVNALWLTNVMIQIFLLITLFSAGTYTSLIYLASSMILVPYLWSAAYAVLLSGRGETYEHASAERTKDLLIGGIALCYAVWLLYAGGVKYLLLSALLYAPGVILFAKAKHEQGEPLFTTLEKGIFTCVIAGAGLAAYGLYSGVLSL

SEQ ID NO: 33137 - protein, 70 aa, Pseudomonas fluorescens PfO-1
MSQRQSGTVKWFNDEKGFGFITPESGPDLFVHFRAIQGNGFKSLKEGQKVTFVAVQGQKGMQADEVIAEA

SEQ ID NO: 33138 - protein, 200 aa, Pseudomonas fluorescens PfO-1
MLKIVHLLMGAAALLLSFIPSLKSEAVPYLQQPDALYLAFFGLLNLILAPVIPYWNKGPRQHLQNLVSALLVLTVVLQTLTLIAPMPVIAGQPAVLFSLVIALVAVVLHLAVSFYKSSPAAATQSYDMSNRDTGTVKWFNTSKGFGFISRDSGDDIFVHFRAIRGEGHRVLVEGQRVEFSVMNRDKGLQAEDVIAALPRR

SEQ ID NO: 33139 - protein, 442 aa, Pseudomonas fluorescens PfO-1
MLNSVMVVDDESSIRSAVEQWLSLSGFEVQLFSRAEECLAALPAHFAGVIVSDVRMPGLSGLELLAEVQRRDADLPVILLTGHGDVPMAVEAMRDGAYDFLEKPFSPETLLGSLRRALDKRRLVLENRALHEQADNRARLDATLLGVSRGLQTLRRQVLDLATLPVNVLIRGETGSGKELVARCLHDFGPRADKPFVALNCAAIPEQLFEAELFGHESGAFTGASGKRIGKLEYADGGTLFLDEIESMPLAQQVKLLRVLQEQKLERLGSNQSIRVDLRIVAATKPDLLDEARAGRFREDLAYRLNVAELRLPPLRDRREDIPLLFESFAQSAAQRLGRTFPPLSGAQLSHLLSHDWPGNVRELANVAERQVLGLDEPVQGIDPGQSLAAQQEAFEAQCLRAALTRHKGDVKAVLEELQLPRRTFNEKMQRHGLTREMFIPD

SEQ ID NO: 33140 - protein, 545 aa, Pseudomonas fluorescens PfO-1
MATCGEVLVKLLEDYGVEQVFGIPGVHTVELYRGLARSSINHVTPRHEQGAGFMADGYARTSGKPGVCFIITGPGMTNITTAMGQAYADSIPMLVISSVQSRSQLGGGRGKLHELPNQSALVGGVAAFSHTLMSASELPGVLARAFALFQAGRPRPVHIEIPLDVLVEEADELLTSVPVNIDRAGAAPAAVSRMTELLAGARRPLILAGGGAIDAAAELTELAELLDAPMALTINAKGMLPSSHPLLIGSTQSLVATRALVADADVILAIGTELAETDYDVTFAGGFEIPGKLLRVDIDPDQTVRNYPPHVALVADSRNAAQALLSALSHKPLAERRNDWGQVRAARLREDLAATWDAPTLAQTRFLETVLHELPNAVFVGDSTQPVYTGNLTFNPERPRRWFNSSTGYGTLGYALPAAIGAWLGGNLEHGARPPVVCLIGDGGLQFTLPELASAVEARTPVIILLWNNQGYEEIKKYMVNRAIEPVGVDIYTPDFIGVAKALGCAAQAISSAEHLRGALRAATDRQGPTLIEIDQTQWMKAVAQ

SEQ ID NO: 33141 - protein, 405 aa, Pseudomonas fluorescens PfO-1
MADVNKVVLAYSGGLDTSVILKWLQDTYNCEVVTFTADLGQGEEVEPARAKAQAMGVKEIYIDDLREEFVRDFVFPMFRANTVYEGEYLLGTSIARPLIAKRLIEIANETGADAISHGATGKGNDQVRFELGAYALKPGVKVIAPWREWDLLSREKLMDYAEKHAIPIERHGKKKSPYSMDANLLHISYEGGVLEDTWTEHEEDMWRWTVSPEKAPDTPQYLELTYRNGDIVALDGVEMTPATVLATLNRIGGEHGIGRLDIVENRYVGMKSRGCYETPGGTIMLRAHRAIESITLDREVAHLKDELMPKYASLIYTGYWWSPERLMLQQMIDASQVNVNGVVRLKLYKGNVIVTGRKSDDSLFDANIATFEEDGGAYNQADAAGFIKLNALRMRIAANKGRKLF

SEQ ID NO: 33142 - protein, 113 aa, Pseudomonas fluorescens PfO-1
MDIIETIKEQIANNTILLYMKGSPNAPQCGFSAKAAQAVMGCGEKFAYVDILQNPEIRANLPKYANWPTFPQLWVAGELVGGSDIMAEMFANGELQTLVKEASAKAAAAKSQA

SEQ ID NO: 33143 - protein, 304 aa, Pseudomonas fluorescens PfO-1
MRIVPHILGAAIAAALISTPVFAAELTGTLKKIKESGVITLGHRDASIPFSYIADASGKPVGYSHDIQLAIVEAIKKDLDLPNLQVKYNLVTSQTRIPLVQNGTVDVECGSTTNNVERQQQVDFSVGIFEIGTRLLSKADSKYKDFDDLKGKNVVTTAGTTSERILKAMNADKQMGMNVISAKDHGESFQMLESGRAVAFMMDDALLAGEAAKAKKASDWAVTGTPQSYEIYGCMMRKGDEPFKKAVDDAIKATYASGEINKIYEKWFMQPIPPKGLNLNFPMSDELKALIANPTDKAADDKKS

SEQ ID NO: 33144 - protein, 441 aa, Pseudomonas fluorescens PfO-1
MARLQRTLSLGSVVLFGIAYMTPIIVLGTFGILAQSTAGMVPAAYLAALVAMFFTAMSYGRMAAAFPVAGSAYSYVRKAISPKLGFIAGWAVLLDYLFLPMAIWLIGAAYLASAFPSIPQWIWVLAFIGITSAINIIGLKLANGINALLMLVQFLVLIAFVGLCVHYVGGDASQPLWSIKPFFNGDMQMPLIMSGAAIACYSFLGFDAVSTLTEETRDPRRTIPRAIMLITLIGGLIFVGVSYFVQIAHPSFQFDSVDSAAYEIARNIGGDLFVSIFLIGLIVGQFASGLSAQASGSRLLFAMGRDGVLPKSFFGTLHERFGTPVNSILLCAVVALLALKLDVTTSTSFINFGAFLAFSLVNLSVIFHYWIGGEKKGLRELILFLIFPFIGLAADLWLMVSLDHLAVYLGLSWLAIGVVYLAVLTGGFRRQPPEMDFQEAA

SEQ ID NO: 33145 - protein, 473 aa, Pseudomonas fluorescens PfO-1
MPVGNHPPHGETAQGGPLKRELGERHIRLMALGACIGVGLFLGSAKAIEMAGPAIMLSYIIGGLAILVIMRALGEMAVHNPVAGSFSRYAQDYLGPLAGFLTGWNYWFLWLVTCVAEITAVAVYMGIWFPDVPRWIWALAALVSMGSINLIAVKAFGEFEFWFALIKIVTIIAMVLGGIGIIAFGFGNDGVALGISNLWAHGGFMPNGVTGVLMSLQMVMFAYLGVEMIGLTAGEAKNPQKTIPNAIGSVFWRILLFYVGALFVILSIYPWNEIGTQGSPFVMTFERLGIKTAAGIINFVVITAALSSCNGGIFSTGRMLYSLAQNGQAPAGFARTSSNGVPRRALLLSIFALLLGVLLNYLVPEKVFVWVTSIATFGAIWTWVMILLAQLKFRKGLSASERAGLKYKMWLFPVSSYLALAFLVLVVGLMAYFPDTRVALYVGPAFLVLLTVLFYVFKLQPKDSVQGAMRSAS

SEQ ID NO: 33146 - protein, 382 aa, Pseudomonas fluorescens PfO-1
MITSKLPNVGITIFTQMSQLAAQTGAINLSQGFPDFDGPQALRDAVGRHIASGHNQYSPMTGLPALRQQIAAKIARSYGANVDADTEVTVTPGATQAIFCAIQAVIRTGDEVIVFDPAYDSYEPAVELAGGRCVHVQLGLKDFSIDFDRLSAALSPRTRMIILNTPHNPSGALISRAELDQLAALIRDRDIYVISDEVYEHLVFDGVPHVSVLAHEELYQRAFVVSSFGKTYHVTGWKTGYVVAPPALTAELRKVHQYVSFCGVTPLQYALADYMAEHPEHVEELPGFYQAKRDLFCDLLAPSRFSFTRVTGTYFQLVDYSQIRPDLNDVEMAMWMTREHGVASIPVSVFYQHPPEGQRLVRLCFAKREETLREAAAKLCVI

SEQ ID NO: 33147 - protein, 404 aa, Pseudomonas fluorescens PfO-1
MKLPIYLDYSATTPVDPRVAQKMSECLLVDGNFGNPASRSHVFGWKAEESVENARRQVADLVNADPREIVWTSGATESDNLAIKGAAHFYASKGKHLITSKIEHKAVLDTMRQLEREGFEVTYLDPTEDGLITPAMIEAALREDTILVSVMHVNNEIGTVNDIAAIGELLRSKGILFHVDAAQSTGKVEIDLQKLKVDMMSFSAHKTYGPKGIGALYVSRKPRVRIEATMHGGGHERGMRSGTLATHQIVGMGEAFRVAKEDMAAENVRIKALSDRFYKQVEHLEELYVNGSLTARVPHNLNLSFNYVEGESLIMALKDLAVSSGSACTSASLEPSYVLRALGRNDELAHSSIRFTFGRFTTEEEIDYAAQKVCEAVTKLRALSPLWDMYKDGVDISKIEWAAH

SEQ ID NO: 33148 - protein, 393 aa, Pseudomonas fluorescens PfO-1
MLSVQDRAIVKSTVPLLESGGEALITHFYRMMLSEYPEVRPLFNQAHQASGDQPRALANGVLMYARHIDQLDQLGDLVAKIINKHVALQILPEHYPIVGTCLLRAISEVLGEEIATPEVMSAWGAAYGQLAEILIGAETAIYDQKEQAVGGWRGAREFIVAAKVEESAEIISFYFEPADKGPILAAEPGQYIGMKLVLDGEEIRRNYSLSALANKGQYRISVKREPGGRASNYLHDQLHVGASIQLFPPSGEFTLTASDKPLVLISGGVGITPTLAMLEAALETERPVYFIHSARNGSVHAFRDWIDGLAARHPQLKRFYCYAEDDGVSPAADKVGLLSEEQLGEWLPAERDVDAYFLGPKGFMGAIKRHLKALGVPEKQSRYEFFGPAAALE

SEQ ID NO: 33149 - protein, 321 aa, Pseudomonas fluorescens PfO-1
MTNAHRAVFLDHPSLDLGDLDLSPLRDCFSDLQLFAQTLPAQVAERLQGATVAISNKVLIDAAAMAANPQLKLILITATGTNNVDLAAARAHGITVCNCQGYGTPSVAQHTIMLLLNLATRLADYQKAVSQGRWQQAKQFCLLDYPIVELEGKTLGLLGHGELGGAVARLAEAFGMRVLLGQIPGRPARPDRLPLEELLPQIDALTLHCPLNEHTRHFIGARELASMKPGAFVVNTARGGLIDEQALADALRSGHLGGAATDVLSVEPPTNGNPLLAADIPRLIVTPHNAWGSREARQRIVGQLVENTQAFFSGKALRVVS

SEQ ID NO: 33150 - protein, 310 aa, Pseudomonas fluorescens PfO-1
MMVFTGNANPDLARRVVRQLHIPLGDISVGKFSDGEITAEINENVRGKDVFIIQPTCAPTNDNLMELVVMADAFRRSSATRITAVIPYFGYARQDRRPRSARVAISAKVVADMLTVVGIDRVLTVDLHADQIQGFFDIPVDNIYGSPVLVDDIEDQRFENLMIVSPDIGGVVRARAVAKSLGVDLGIIDKRREKANHSEVMHIIGDVEGRTCILVDDMVDTAGTLCHAAKALKEHGAAKVFAYCTHPVLSGRAIENIENSVLDELVVTNTIPLSAAAQACARIRQLDIAPVVAEAVRRISNEESISAMFR

SEQ ID NO: 33151 - protein, 574 aa, Pseudomonas fluorescens PfO-1
MELLSGGEMLVRFLRDEGVKYIYGYPGGALLHVYDALFKEPEVTHILVRHEQAATHMADGYARATGKAGVVLVTSGPGATNAITGIATAYMDSIPMVIISGQVPSTMVGTDAFQETDMIGISRPIVKHSFMIKHASEIPEVMKKAFYLAQSGRPGPVVVDIPKDMTNPAEKFEYIFPKKAKLRSYSPAVRGHSGQIRKAAEMLLAAKRPVLYSGGGVILGNGSAPLTELAKMLNLPVTNTLMGLGAYPGTDRQFIGMLGMHGSYTANLAMHHADVILAVGARFDDRVINGAPKFCPNAKIIHIDIDPASISKTIKADVPIVGPVESVLTEMVAILKEIGETPNKEAVASWWKQVDEWRGDRGLFPYDKGDGSKIKPQTVIETLCEVTKGDAFVTSDVGQHQMFAAQYYKFNKPNRWINSGGLGTMGFGLPAAMGIALSFPDTDVACVTGEGSIQMNIQELSTCLQYGLPVKIVILNNGVLGMVRQWQDMSYGSRHSHSYMESLPDFVKLAEAYGHVGVRITESKDLKSKMEEAFAMKDRLVVIDISVDTSEHVYPMQIKDGSMRDMWLSKTERT

SEQ ID NO: 33152 - protein, 390 aa, Pseudomonas fluorescens PfO-1
MAQPYSARSRAIEPFHVMALLARANELQAAGHDVIHLEIGEPDFTTAEPIIRAGQQALTAGKTRYTAARGIPELREAISGFYQTRYGLNIDPRRILITPGGSGALLLASALLVDPGKHWLLADPGYPCNRHFLRLVEGAAQLVPVGPDVRYQLTPDLVARHWDHDSVGALVASPANPTGTILTRDELSGLSTAIKARHGHLVVDEIYHGLTYGTDAASVLEVDDSAFVLNSFSKYFGMTGWRLGWLVAPDAAVSELEKLAQNLYISAPSMAQHAALACFEPDTIAILEERRAEFGRRRDFLLPALRELGFNIAVEPEGAFYLYADISQFGGDAFAFCRHFLETEHVAFTPGLDFGRYQAGHHVRFAYTQNLPRLQEAVERIARGLKSWQG

SEQ ID NO: 33153 - protein, 854 aa, Pseudomonas fluorescens PfO-1
MRIDRLTSKLQLALSDAQSLAVGHDHPAIEPAHLMQAMLEQQGGSIKPLLMQVGFDVNSLRKELTKELDQLPKIQNPTGDVNMSQDLARLLNQADRLAQQKGDQFISSELVLLAAMDENSKLGKLLLGQGVSKKALENAINNLRGGEAVNDANHEESRQALDKYTVDLTKRAEEGKLDPVIGRDDEIRRTIQVLQRRTKNNPVLIGEPGVGKTAIAEGLAQRIINGEVPDGLRGKRLLSLDMGALIAGAKYRGEFEERLKALLNELSKQEGQIILFIDELHTMVGAGKGEGSMDAGNMLKPALARGELHCVGATTLNEYRQYIEKDAALERRFQKVLVDEPSEEDTIAILRGLKERYEVHHKVAITDGAIIAAAKLSHRYITDRQLPDKAIDLIDEAASRIRMEIDSKPEVLDRLERRLIQLKVESQALKKESDDAAKKRLEKLQEEIDRHEREYSDLEEIWNSEKAEVQGSAQIQQKIEQSRQELEAARRKGDLNRMAELQYGVIPDLERSLQMVDQHGKSENQLLRSKVTEEEIAEVVSKWTGIPVSKMLEGERDKLMKMESLLHQRVIGQDEAVVAVANAVRRSRAGLSDPNRPSGSFMFLGPTGVGKTELCKALAEFLFDTEEAMVRIDMSEFMEKHSVARLIGAPPGYVGYEEGGYLTEAVRRKPYSVILLDEVEKAHPDVFNILLQVLEDGRLTDSHGRTVDFRNTVIVMTSNLGSMQIQELVGDREAQRAAVMDAISTHFRPEFINRVDEVVIFEPLARDQIAGITEIQLGRLRNRLAERELKLELSPEAMDKLIAVGYDPVYGARPLKRAIQRWIENPLAQLILSGRFMPGETATGVVENDEITFN

SEQ ID NO: 33154 - protein, 407 aa, Pseudomonas fluorescens PfO-1
MKFVDEVSIRVKAGDGGNGCMSFRREKFIENGGPNGGDGGDGGSIFMMADENLNTLVDYRYTRHFDAERGSNGGSTDCTGKKGEDLILRVPVGTTVIDSATQEVIGDLTKAGQKLMVVQGGWHGLGNTRFKSSTNRAPRQTTPGKPGEQRDLKLEMKVLADVGLLGLPNAGKSTFIRSVSAAKPKVADYPFTTLVPNLGVVSVDRWKSFVIADIPGLIEGASDGAGLGIRFLKHLARTRLLLHLVDMAPLDESSAPDAAEVIVNELIKFSPSLAERDRWLVLNKCDQILEEEHEARVKEIVDRLEWTGPVYVISAIAKEGTERLTRDIMRYLEDRADRLANDPAYKEELADLDQRIEDEARAQLQALDDKRALRRSGVKSVHDIGDDDWDEEDVDDEDGPEIIYVRD

SEQ ID NO: 33155 - protein, 446 aa, Pseudomonas fluorescens PfO-1
MTFATLGLIEPLLRSLEKLGYQTPTPVQAQAIPVVLAGRDLMAAAQTGTGKTAGFALPLLQLLAMEGPKVTANSVRALILVPTRELAEQVHEAVRQYAENLPLRTYAVYGGVSINPQMMKLRGGVDLLVATPGRLLDLFRQNALKFNQLQTLVLDEADRMLDLGFSEELANIYRALPKKRQTLLFSATFSDDIRLLAGQMLNDPQSIEVSPRNVAANTVKQWVVTVDKKRKPELFVHLMRKNKWKQVLVFAKTRNGVDALVEKLQGLGVNADGIHGDKPQATRQRALDRFKLSEVQILVATDVAARGLDIEDLPLVVNFDLPIVAEDYIHRIGRTGRAGSTGEAISLVCADEVNMLSAIEMLTRSTLKREIEPDFVPEHRVPDTDASGQVIKKPKKPKKPKASGGGGGKRNLGKWVDSGETQAPEPSIKPVRKVPVFNTGPRKRKP

SEQ ID NO: 33156 - protein, 456 aa, Pseudomonas fluorescens PfO-1
MTSTTQLKPTLGTLHLWGIAVGLVISGEYFGWSYGWGTAGTLGFLVTALMVATMYTCFIFSFTELTTAIPHAGGPFAYSRRAFGEKGGLIAGIATLIEFVFAPPAIAMAIGAYLNVQYPGLDPKLAAVGAYFVFMTLNILGVSIAATFELVVTVLAVAELLVFMGVVAPGFSFSNFVLNGWSGANEFTMGSIPGIFAAIPFAIWFFLAIEGAAMAAEEAKDPKRTIPRAYVSGILTLVFLAIGVMVMAGGVGDWRQLSNINDPLPQAMKAVVGNNSTWMHMLVWIGLFGLVASFHGIILGYSRQFFALARAGYLPKGLAKLSRFQTPHRAILAGGVVGIAAIYSDGLVNLQGMTLTAAMITMSVFGAIVMYIISMLSLFKLRKTEPNLERTFRAPGYPVVPAIALFLAVVCLVAMAWFNTLIGCVFLGFMAAGYLYFQLTAKQRSEAPADAMLEGI

SEQ ID NO: 33157 - protein, 560 aa, Pseudomonas fluorescens PfO-1; identical to SEQ ID NO: 342

SEQ ID NO: 33158 - protein, 366 aa, Pseudomonas fluorescens PfO-1
MSNSFLNPVTTQTWANGRHIVRCVKVIQETWDVRTFCFMADQPILFFFKPGQFVTLELEIEGQPIMRSYTISSSPSVPYSFSVTIKRVPGGKVSNWLHDTLHEGQELAVHGPVGLFNAIDFPSPKVLYLSGGVGITPVMSMARWFYDTNGNVDMTFIHSARSPKDIIYHRELEHMASRIDNFSLHLICEKHGLGEPWAGYRGYLNHKMLELMVPDFLEREVFCCGPTPYMTAVKRLLENAGYDMKRYHEESFGATPPEARADAVEQAEQAAEAPEVPAADLHLVEFTSSDKSIRVAPGETVHAAAAKVGLMIPKACGMGICGTCKVLKLGGEVEMDHNGGITEDDEAEGYILSCCSVPKGDVRIEY

SEQ ID NO: 33159 - protein, 665 aa, Pseudomonas fluorescens PfO-1
MSSASLIKTPPEKVTVNGWVFYTSTALILLLTAILIIAPQEAGRMLGVAQAWLSRSFGWYYMVVIAAYLVFVVGLAFSSYGKLKLGSKDDTPDFSYGAWAGMLFSSGIGISLLYFGASEPLDHYFNPPEGASATNMAARQAVQLTFLHWGLHGWAIYALVGLAVAYFAYRHNQPLALRSALYPLVGERWVKGAAGHAVDGFGMFVTLLGLVTNLGIGSLQVSSGLENLFGMEHSNTNLLIVIIVMSTVATIAAVSGVENGIRRLSNLNIILFSGLLIFVLLFGPTLHLLNGFVQNIGDYLNGVVLKTFDLYVYEGDSEKSDRWLGLWTLFYWAWWISWAPFVGMFIARISRGRTVRELVAGVLLIPLGFTLAWLSIFGNSALDLVMNQGAVELGKTALEQPSMAIYQLLEHYPASKVVIGVSIFVGFVLFLTPADSGAVMMANLSCKGGNVDEDAPHWLRIFWSVVITLVTIGLLFAGNFEAMQTMVVLAGLPFSVVLVCFMFGLHKAMRQDMQIEQEQAQLAERGRRGFSERLTQLDLQPSQSVVQRFMDKHVSPALEDAAAQMRAQGLEVQTLLGKSKRCMGVRVEMEEGNPFVYEVSLDGYLATPSESVQSDEARQRFYRAEVYLHNGSQDYDLMGFTQDQITRDVLDQFESHRQLLGRVYS

SEQ ID NO: 33160 - protein, 622 aa, Pseudomonas fluorescens PfO-1
MSFASLGLSEALVRAIEDAGYTEPTPVQQRAIPAVLQGRDLMVAAQTGTGKTGGFALPILERLFPNGHPDKSQRHGPRQPRVLVLTPTRELAAQVHDSFKIYARDLKFVSACIFGGVGMNPQVQAMSRGVDVLVACPGRLLDLCGQGSVDLSHVEILVLDEADRMLDMGFVHDVKKVLARLPAKRQNLLFSATFSKDITDLAGKLLHNPERIEVTPPNTTVERIEQRVFRLPASHKRALLAHLITAGAWEQVLVFTRTKHGANRLAEYLDKHGLPAVAIHGNKSQNARTKALADFKAGEVRILVATDIAARGLDIDQLPHVVNFELPNVDEDYVHRIGRTGRAGRSGEAISLVAPDEEKLLKSIERMTKQKIADGDLMGFDASTIEAEKPEVRERPDMRNPRNARGPRGDGPNGGGGGGGRKDKGKDKGKEKPAGERGERPARQQKPREGTPAREQRQPSQPPRAAADRAPDEFLDDDIDNFGNRVDYVPKQAPTGGRNRRPGAPAQGAGSGAPRGGQSQGRQNGPRNSNGSSTGTPPGKRSGPRNGAPRDGQGRRDENSRNRRPARDDQQRAEPAVQNPRSSGPKIMHKESKADRFPTPEQLDQLPSRPRGEKPALLTRNR

SEQ ID NO: 33161 - protein, 261 aa, Pseudomonas fluorescens PfO-1
MTKRYSALLAALFAGLMLSQAPAHADGLDDVVKRGTLKVAVPQDFPPFGSVGPDMKPRGLDIDTAKLLAEQLKVKLELTPVNSTNRIPFLTTGKVDLVISSLGKNPEREKVIDFSRAYAPFYLAVFGPPDAAVSTLDDLKGKTISVTRGAIEDIELTKVAPEGVTIKRFEDNNSTIAAYLAGQVDLIASGNVVMVAISEKNPKRVPALKVKLKDSPVYVGVNKNEPALLGKVNEILTTAKADGALEKNAQTWLKEPLPADL

SEQ ID NO: 33162 - protein, 885 aa, Pseudomonas fluorescens PfO-1
MINVDLQQLIQALDAETRRDLERSAERCVARGGSKILVEDLLLGLLERPNGLLSRALQDADVDAGELSAALQSRVEHSASRNPVFAPELVQWLQDALLVANLELGQTSVEDAALILALLRNPMRYAGSRYQPLLAKLNIDRLKEFALSQQPQAAANGKPAAQGESLLERFTHNLTQQARDGKLDPVLCRDGAIRQMVDILARRRKNNPIVVGEAGVGKTAIVEGLASRIAAGEVPQVLKGVELLSLDMGLLQAGASVKGEFERRLKGVIDEVKASPKPIILFIDEAHTLIGAGGNAGGSDAANLLKPALARGELRTIAATTWAEYKKYFEKDPALARRFQPVQLHEPTVSEAVTILRGLAQVYEKSHGIYLRDDAVVSAAELSARYLAGRQLPDKAVDVLDTACARVRISLAAAPESLERLRGELAEGGRQRQALRRDAEAGLLIDHEALEALEARLDEAEAEMVALETQWTEQKQLAERLLELRQQLAKAREAAAVEPVVTVEEDAEGTVIETHAAEVDEALSVEALEAQLNETHSALTAAQVKERLVSFEVCPRLVAEVISAWTGVPLAQLAREHNAKVASFATDLRTRIRGQEQAVHALDRSMRATAAGLNKPDAPVGVFLLVGPSGVGKTETALALADLLYGGDRFITTINMSEFQEKHTVSRLIGAPPGYVGYGEGGMLTEAVRQKPYSVVLLDEVEKADPDVLNLFYQIFDKGVANDGEGREIDFRNTLILMTSNLGSDKISDLCEDGARPTAEVLEETIRPVLSKHFKPALLARMKVVPYYPVGGPVLRELIEIKLGRLGERLNRRQLDFTWCQNLVDHLSERCTQSESGARLIDHLLDQHVLPLVADRLLDAMATGESLKRVHATLDGEASVTCEFA

SEQ ID NO: 33163 - protein, 676 aa, Pseudomonas fluorescens PfO-1
MERSPWHAGEQQLQAHVGVAERMEEFGRKVIRTWMPDQHRQFYQQLPFMLYGAVDAEGRPWASVLEGEPGFAHSPEPTQLQFASLPAADDPAQLQAGAAIGLLGIELHTRRRNRLNGHIDNLDANGFGLTVDQSFGNCPQYIQLRQFQRVPLTDPQTRKAEHRDSLDAAAIALIESADTFFVASYVDVDGERSVDVSHRGGQPGFVRIEGNRLTIPDFAGNLHFNTLGNLLLNPLAGLLFIDFSTGDVLQLSGRTEIILDAPQIEAFQGAERLWTFEVEKLVRRPAALALRWRFDGMSPTSLLTGNWAQADARLQAKALGDSWRPLRVAKVEMESRHIRSIYLEPNDGAGLPVFLAGQHLPLRFTLDGEVHIRTYSLSGAPSDDFFRISVKREGRVSTHLHEQIRVGDVLEARLPQGHFTVAALERKPLVLLAAGVGITPLLSMLREVVYQGLRTRRIRPTLFVQSSRSLADQPFRAEVDRLLEDAGDAVKVLRVLSQPEDDLVEGKDFDLRGRIDGDLLRNLLTDEDFDQVDFVLCGPGGFTQGIYDILRELNVRDGQIHAETFGPSTLKRQADPDAIVMEQPPAATTSVPVLFERSAKEARWQPDGGSLLELAESRGLRPEFSCRGGSCGTCKTRLISGAVNYPQPPAEVPEEGQVLICCAVPAQSAQPLVLDL

SEQ ID NO: 33164 - protein, 602 aa, Rhodobacter sphaeroides 2.4.1
MTQTDIAAPLAAALAAKGYESLTPVQEAVLAEGVAGRDALVSAQTGSGKTVAFGIAIADQILQGADRLLFADTPIALAIAPTRELALQVARELGWLYGEAGAHIATCVGGMDYRTERRALDRGAHIVVGTPGRLRDHIERGSLDLSGLRAVVLDEADEMLDLGFREDLEFILGSAPEERRTLMFSATVPKEIEALAKEFQQDAVRIQTAGERKQHADIEYRALTVSARDKEHAIFNVLRFYEAPSAIVFCKTRLAVNHLLARMGNRGFQVVALSGELSQQERTHALQALRDGRARVCIATDVAARGIDLPGLELVIHADLPTNSETLLHRSGRTGRAGSKGVSVLIAAPSEVRKAQRLLTGAKLVADWGKPPSADEVQERDDARLLEHPVLGQDLSDEMPLAEKLLERFGPAQMSAAFVRLWREGRSAPEVLQDLAPPEPSQRAPRERGEFGEAVWYAVAVGHTGRAEARWLLPQDLRGGRRDQERDRRHPRPAGADLRPDREGGRWEVRRRARDRGGRGHGAPRRRAHAGAPRTRAAQAVRRARPPRPGRGAPAREGALPAQALALRRGRSGRGPWRLDPGRPPRAGAPAAPRGRRAVREA

SEQ ID NO: 33165 - protein, 759 aa, Rhodobacter sphaeroides 2.4.1
MDEARQDNARHAALDYHEFPKPGKLEIRATKPLANGRDLARAYSPGVAEACLEIKADPATASRYTSRGNMVGVVTNGTAVLGLGNIGALAAKPVMEGKAVLFKKFAGIDCFDIELAEPDPLKLAEIVCALEPTFGAINLEDIKAPDCFIVEKICRERMNIPVFHDDQHGTAIVVGAAATNALHVAGKRFEDIKVVSTGGGAAGIACLNMLLKLGVKRENVWLCDIAGLVWKGREAEMTPQKAEYAQDSDLRTLAEVIEGADLFLGLSGPGVLTPAMVERMAERPIIFALANPTPEILPDEVRSVRPNAIIATGRSDYPNQVNNVLCFPFIFRGALDVGATTINDEMQLACIEGIASLARATTSAEAAAAYKGEPMSFGADYLIPKPFDPRLIGVVALAVARAAMESGVATRPIADLDAYRRRLEGSVFRSALIMRPVFEASAAESRRIVFAEGEDERVLRAANAVLEETVHKPILIGRPEVVEMRCERAGLPIRPGRDFDLVNPENDPRYRDYWESYHALMARRGVTPDTARAVMRTNTTAIGAIMVHRGEADSLICGTYGQYLWHLNYVTQILATRNRRPIGALSLMILEDGPLFVADTHVHHEPTPEEIAETVIGAARHVRRFGLAPKVALCSSSQFGNLDCSTGRRMRAALEILDERRVDFAYEGEMHIDAALDQAIRDRIFPGGRFDGPANVLVFGNSDAASGVRNILKVKANGLEVGPILMGMGNLAHIVTASITARGLLNMSALAGTPVTHYG

SEQ ID NO: 33166 - protein, 268 aa, Rhodobacter sphaeroides 2.4.1
MKQVPPAAPVAPWLGGKKRLHPLILERIEAIPHRAYVEPFVGMGGIFLRRRFRPRLEVMNDRNGEIINLFRILQRHYPQLLEIMRFQICSRREFDRLRVTDPATLTDLERAARFLYLQRLSFGGKPNGSFGISPGNGPLFSLARLEPLLDAARTRLDGVVFECLDWAELIPRYDTAETLFYLDPPYFGGENDYGRGIFDRAQFARIAEILGGLKGAFLLSINDTPEIRALFGRFHLEPVRLSYSVAASGSTEAQELLVSNRERIATLL

SEQ ID NO: 33167 - protein, 304 aa, Rhodobacter sphaeroides 2.4.1
MTETTRAGFVALIGEPNAGKSTLLNRMVGAKVSIVTHKVQTTRARIRGVAMEGQAQIVFVDTPGLFRPRRRLDRAMVAAAWGGAADADVIVLLVEAHRGLTEGTQAIIDAMRDRIPQGQTVALAINKIDRVKAEVLLGLAQELNGAFPFAETFMISAEKGHGVEKLRRWLAGILPEGPWFYPEDQIADVPMRAIAAEITREKLTLRLHEELPYQLTVETEAWEDRPDGSTRIDQVVYVARDGHKGIVLGNKGETIKQIGQAARAEIATFLERPVHLFLQVRVRPNWLEEPERYSEMGLDFKDGD

SEQ ID NO: 33168 - protein, 338 aa, Rhodobacter sphaeroides 2.4.1
MTKSVFLGTLTVAGLAAGLASAATLDDVKARGELNCGVSTGLTGFSLPDANGNWTGFDVSLCRAVAAAVLGDGTKVKFVPTTGQTRFTALASGEVDMLARNSTWTFSRDTDLKLDFVGVNYYDGQGFMVRKDLGVTSAKELDGATVCIQTGTTTELNLADWFKVNNLSYTPVAVETNAEGEQQYAAGACDAYTTDASGLAATRAAFADPENHIILPEIISKEPLGPAVRHGDNEWADIVRWTLNALIAAEEYGVTSANMEELAANSPNPEIQRLLGVQGDLGKMIRLDNDWAKRAIAVGGNYGEIFAATIGEATPIGLARGLNAQWTQGGLLYAPPFR

SEQ ID NO: 33169 - protein, 419 aa, Rhodobacter sphaeroides 2.4.1
MPLLVMKFGGTSVADLARIKNAAQKVKREVERGYDVIVIVSAMSGKTNELVGWVEQTSPLFDAREYDAVVSSGENVTAGLMALTLQEMEVPARSWQGWQVPIRTTSQHSAARFLEIPRENLDAKFAEGFKVAVVAGFQGVSPEGRITTLGRGGSDTTAVAFAAAFAAERCDIYTDVDGVYTTDPRIASKARKLEKIAYEEMLELASLGAKVLQTRSVELAMRYKVKLRVLSSFEDTDETSGTLVCDEEDIMESKVVSGVAYSRDEAKMTLVTVEDRPGVAAAIFGPLAEAGVNVDMIVQNISEKDYGSHPGSVTDMTFSCPINQVARARKALEDAKAEGTIVYDDLVVDTEVAKVSVVGIGMRSHAGVAATMFKALAADGVNIKVIATSEIKISVLIDRKYMELAVQALHDAFALETAN

SEQ ID NO: 33170 - protein, 556 aa, Rhodobacter sphaeroides 2.4.1
MYSYTDFDEAFVRTRVAQFSEQVRRRIDGSLTEDEFKPLRLMNGLYLQLHAYMLRVAIPYGTLDSRKMRQLAMIAERWDKGYGHFTTRQNIQFNWPKLGDVPEILSALADVGMHAIQTSGNCVRNVTADHFAGAAADEIEDPRPVAELLRQWSTDHPEFQFLPRKFKIAITGSPNDRAVTKSHDIGLRMVRNADGEPGFEVIVGGGLGRTPMIGRVVRDFLPKADLLPYVEAILGVYNELGRRDNKYKARVKILVHETGLEPLREIIEERFLETRAEFGGQDMALLAEIERAFAPPAFRQAPTAAYDDFYRADPIFRAWADTNLARHRNADYAIVTISLKAHGATPGDATAEQMRVMADLAERYGHDELRISHEQNVILPHVHKADLPAVHAALAQAGLATANVGLISDIIACPGMDYCALATARSIPVAQEIATRFDTLDLEHEVGPLKIKISGCINACGHHHVGHIGILGLDRAGVENYQITLGGDGTETAAIGEKTGPGFAYDEIVPAVERIVRAYLEIRSEPSETFLDTLRRVGHAPFKAALYEAEGKQDAA

SEQ ID NO: 33171 - protein, 77 aa, Rhodobacter sphaeroides 2.4.1
MANETGDITMANGTVKWFNATKGFGFIAPAGGSKDVFVHVTALERAGIRQLDDGQAVSFDLERDRNGRESATNLVLA

SEQ ID NO: 33172 - protein, 68 aa, Rhodobacter sphaeroides 2.4.1
MANGTVKWFNATKGFGFIAPAGGSKDVFVHISALERAGIRQLNDGQAVTFDLETDRNGRESATNLALA

SEQ ID NO: 33173 - protein, 268 aa, Rhodobacter sphaeroides 2.4.1
MKQVPPAAPVAPWLGGKKRLHPLILERIEAIPHRAYVEPFVGMGGIFLRRRFRPRLEVMNDRNGEIINLFRILQRHYPQLLEIMRFQICSRREFDRLRVTDPATLTDLERAARFLYLQRLSFGGKLDGVFGVSAGHGPRFSLARLEPVLDAAHERLDGVVFESLDWADLIPRYDTAETLFYLDPPYFGGENDYGRGIFDRAQFARIAEILGSLKGAFLLSINDTSEIRALFGRFHLEPVRLNYSVSAAGGTEAQELLVSNRERIATLL

SEQ ID NO: 33174 - protein, 578 aa, Rhodobacter sphaeroides 2.4.1
MSALRGLVPFLAPYRKLTFGALGALVLTAIISLILPVTVRRVVDGFMENNAALLDQYFAAALFIAAALAAGTGLRYYLVTRLGERVVADMRRALFDRMMGMSPAFFERIMTGEVLSRLTTDTTLLLSVIGSSISVALRNLLILIGGLVLLLFTSTKLTGLVMLLVPLVVVPIVILGRKLRRLSRENQDWIAQSSGNASEALLSVQTVQAFTHERQSRAFFGDVTEKSFLSAKDRIGTRALMTVIVIFLVFTGIVGVLWVGARDVRAGTMTPGEMVQFLIYAVMVAGSVGALSEIWSELQRAAGATERLNELLTAEDPVQDPATPVALPRPVKGEISFEGVRFRYPARPEVSALDGIDLVVRPGETVALVGPSGAGKTTILQLLLRFYDPQQGAVRIDGVDLRDMTRDDFRRAIALVPQDPVIFATSARENIRFGRPEATDAEVEAAAHAAAAHDFLSLLPQGYDTYVGERGVMLSGGQKQRVALARAILRDAKILLLDEATSALDAESERAVQTAVEALAQNRTTLVVAHRLATVKRADRIVVFDKGRIVATGTHDALVAEGGLYARLARLQFTDGSV

SEQ ID NO: 33175 - protein, 339 aa, Rhodobacter sphaeroides 2.4.1
MPAMNEPKLISGNANLTLAKSIARRMSVHRGMAVSLVDARVERFNDQEIFVEVYENVRGEDMYVIQPTSNPANDNLMELLIIADALRRSSADRITAVIPYFGYARQDRRAKARTPISAKLVANLIVEAGIDRVLTLDLHAAQIQGFFDIPVDNLYSAPVFALDIEHHFKGQLQDLMVVSPDVGGVARAREIAKRINAPLAIVDKRREKPGEIAEMTVIGNVAGKKCIIVDDICDTAGTLCKAAEVLIENGAVEVHSYITHGVLSGPAVERVTKSVMKSLVITDSIEPSAAVRGAPNIRIVPTAPMFAQAILNIWSGTSVSSLFETDTLVPIYEGMYQRG

SEQ ID NO: 33176 - protein, 328 aa, Rhodobacter sphaeroides 2.4.1; identical to SEQ ID NO: 450

SEQ ID NO: 33177 - protein, 308 aa, Rhodobacter sphaeroides 2.4.1
MRKTCILIGAPIDSGQRRPGCLMGPAAYRVAGLGRALADLGHAVEDRGDVALGPLPEMTPPEGPVHDLPETIGWTAALKTAVEEALGDGFPIVMGGDHSLALGTVAGAAAHAAAVGRPLFLLWLDAHSDFHTLQTTTSGNLHGVPVAYAAGRDGFDGFPPFPAPLPPERICLFGIRSVDPEEHAALLLHDVSIIDMRVIDEFGICAPMREFLEKVRAANGMLHVSLDVDFVDPAHAPAVGTTVPGGATVREAHLVMELLHESGLVTSLDLVELNPFLDERGRTARLMVELAASIMGRKVFDRPTRSFG

SEQ ID NO: 33178 - protein, 391 aa, Rhodobacter sphaeroides 2.4.1
MSLKDSEVTVLGAGVAGLAVARALALRGAEVTVLEQAEAIREVGAGLQISPNGAAVLRALGLGDALEAASMRAQAVELRNGVGGDLVLKLDLARLRPGQGYHLMHRADLIDLLAQGAREAGVQIRLLQKIEAVDLGGPRPRLVTAQGAEYAPNLLIGADGLHSLVRAELNGPAQPFFTNQVAWRTVIPATPGEPVVAEVHMGEGRHLVSYPMRGGTVRNIVAVEERKRWVQEGWNLRDDPVDLRLAFAGFNGRVRHWLEQVPDVWLWGLFRHPVAHTWYRGHAAILGDAAHPTLPFLAQGANMALEDAWVLAECLARHSNIKGGLADYQARRVPRCCRVVQAANNNAWAYHLRSPIREIAHLGLRLGSRLLPGPTLRRFDWLYGYDVTAAS

SEQ ID NO: 33179 - protein, 296 aa, Rhodobacter sphaeroides 2.4.1
MTAIGRKIMAKLAFLGLGVMGFPMAGHLAAKGHEVTVYNRSPAKAEAWAAQHGGRAAATPAEAAEGAAFVMACVGNDDDLRSICRGESGAFAGMERGAIFVDHTTVSAQVTRELAAEADGLGLGFVDAPVSGGQAGAENGVLSIMCGGSEAHYAAAEPVMAAYARVCRRLGESGSGQIAKMMNQICIAGLVQGLAEALAFGEKAGMDGKAVVEVISQGAAGSWQMANRHGSMLDGKFDYGFAVDWMRKDLGICLRTADEVGASLPVTALVDQFYKEVQQMGGGRWDTSALIKRLTR

SEQ ID NO: 33180 - protein, 321 aa, Rhodobacter sphaeroides 2.4.1
MALEDAKNEVDVAFGGRGPRGYAYENAFAGATSFLRRRYTKDLTGVDLAITGVAFDQAVTNRTGTRFGPRAIREASTLQPYDRPFGWGFDPLEELTVVDYGDLAFDYARTAEFPARLTAHVAGILAAGAGALTLGGDHSITLPILRAHAAVFGPLSVVQFDAHSDLWVDDDPGRIDHGTFMYKAVKEGLVDPARSVQVGIRTDTPDWLGMNVIDARTAHEQGPAAVAARVHAIVGHHPTYLTFDVDALDPAFAPGTGTPVWGGLASWQAAAILRDLAGLNLVGGDVVEVSPPYDPSGITAVAGAHVAYELICLYGWRRRKE

SEQ ID NO: 33181 - protein, 431 aa, Rhodobacter sphaeroides 2.4.1
MNRTLLLFAFVALLFVGTGVLQSWNSALGILNMALISAIMALGVNMQWGYAGLFNVGVMGFVALGGLAVVVTAAQPVPGAFSAGGWGVLAALALGAATIGGAVAVWRRMAKGWARTVALLAVLIGGFFAYRAIFDPAVAAIEAINPALYGNIGGLGLPVLLAWPAGGLLAALAAWAIGKTALGLRSDYLAIATLGIAEIIIAVMKNEDWLARGVKNMISLPRPVPYEVDLQQSAGFVAWAQGWGYDPVTASAIVVKLCYAALFVAVLAIIVTLSELALRSPWGRMMRAIRDNEVAAEAMGKDVTRRHLQIFVLGAAVIGIAGAMMTTLDSQLTPGTYNPLRFTFLVWVMVIVGGSGSNWGAVLGGFLIWWLWVMVEPIGLSLLGAITAGMADGSWLKAHLQDSAAHMRLLTMGLILLLVLRFSPRGLIPGR

SEQ ID NO: 33182 - protein, 121 aa, Rhodobacter sphaeroides 2.4.1
MTTTVEEQIRDMVTTNDVVLFMKGTKSMPQCGFSSRVAGVLNYMQVAYKDVNVLEDADVRQGIKDFSDWPTIPQLYVKGEFVGGCDIITEMTLSGELDQLFEAKGVSYDKTAADKIREANA

SEQ ID NO: 33183 - protein, 290 aa, Rhodobacter sphaeroides 2.4.1
MKIAFIGLGNMGGPMARNLATAGHEVTGFDLAAPAPEGVRAAASAAQAATGAEVVVTMLPNGAILRQVAQEIVPAMTAGAVLCDCSTVDVESARAVAAEAEAAGLGALDAPVSGGVGGAAAGTLTFMVGGSDAAFATVQPLFEIMGQKAVHCGGPGAGQAAKICNNMILGVTMIATCEAFALADKLGLDRQKMFDVVSTSSGYSWSMNAYCPAPGVGPTSPADNGYKPGFAAELMLKDLRLSQQAAEDADADTPMGQLAATLYETFVEAEGGRGRDFSAMLPRFETRGRG

SEQ ID NO: 33184 - protein, 313 aa, Rhodobacter sphaeroides 2.4.1
MERQRVIAVGSYPDWDRQAMEASFTVTTVPQLADLAGLDPALRAEAVAVAYKGGAPFGGEAMDLLPALGIIANFGVGFDAIDVEAARARGIRVTNTPDVLNDDVADTALAMMLALCRRIPEGDRFVREGRWPKGDFPLNRKFSGGRAGIMGLGRIGRAIADRLVAFGMEIHYHSRSAKDVPAGWTFHATPEGLAAEVDWLVVALVGGPATESYVSAEVIACMPQDAVLVNISRGSTVDEAALLSALEAGRIGAALDVFRNEPEIDPRFHALSNVILQPHQGSGTVETRRAMGELQRANITAFLQGEPLLTPVA

SEQ ID NO: 33185 - protein, 523 aa, Rhodobacter sphaeroides 2.4.1
MKIGAPREIFEGEARVAMTPDSALQLQKLGHHCVIETGAGMKAGFSDEAYAAAGVEVLPSAAALFEAADIVVKVRGPERAEAERLRRGQTLISFFWPAQNAELLELCKEKGATVVAMDMVPRISRAQKMDALSSMANIAGYRAVIEAGNNFGRFFTGQVTAAGKVPPAKVLVVGAGVAGLAAIGTATSLGAITYAFDVRPEVAEQIESMGAEFVYLEFEEAQDGAATGGYAAPSSPEFREKQLAKFRELAPEMDIVITTALIPGRPAPKLWTEDMVSAMKRGSVIVDLASERGGNCDLTVPDQKIVTPNGVTIVGYTDFPSRMAAQASTLYSTNIRHMLTDLTPKKDGVIHHNMEDDVIRGATVTHDGAITFPPPPPKVAAIAAAKPREKVKELTPEEKRAAEIATFRKQTVSQVAMLAVGTALLLFVGMYAPPSFMAHFIVFALACFVGFQVIWNVSHSLHTPLMAVTNAISGIVILGALLQIGSGNVLVVLLAAISVLIATINIVGGFLVTRRMLAMFQKS

SEQ ID NO: 33186 - protein, 233 aa, Rhodobacter sphaeroides 2.4.1
MNKLDESLLTKLPPFSRLDRPQIRTILDQAAPRRYDEGTTVFGEGMAAERFYLLLDGTIRVVRTTPTGEQIIALHIGPGQLFGIAPALARDTYPATAVAAADCVTLSWPVRLWADFTANYPGFATESYRTLGARLGEMQNRITELATQQVEQRVAACLLRLVNQSGRKVEAGIEISFPITRQNISEMTGTTLHTVSRLLSAWEREGIVESARRRIVVTAPHRLVVLSGASGQG

SEQ ID NO: 33187 - protein, 68 aa, Rhodobacter sphaeroides 2.4.1
MPTGTVKWFNSTKGFGFIAPDDGGKDVFVHISAVERAGLKGLSDNQKIGYELQSGRDGRSSAGDLRLL

SEQ ID NO: 33188 - protein, 331 aa, Rhodobacter sphaeroides 2.4.1
MDVAIFSAKPYDRQFLAAANEGRHQLAFIEARLSDETVRFAGGADCICAFVNDQVTAPVIAELAAAGTKLIALRSAGFNHVDLAAAEAAGMTVGRVPAYSPHAVAEHAVALILTLNRNTHRAFNRVREGNFALEGLLGFDLCGKTVGVVGTGLIGSTFAGIMRGFGCRVIASDPYPSDECAALGVTYVPLERLFAEADILSLQCPLTPDTHHLIDDRAIGLMKRGVMIVNTSRGAVVDASAVIRGLKSGVIGGLALDVYEEEADLFFEDLSQKAIQDDVFARLLTFPNVLITGHQAFFTREALSGIARTTIDNITAYEDTGRVLHPVTAPR

SEQ ID NO: 33189 - protein, 252 aa, Rhodobacter sphaeroides 2.4.1
MLEIKNLHVKLEEEDKVILKGVDLTVEAGKVHAIMGPNGSGKSTLSYVLAGRDGYEVTEGSATLDGEELLEMEPEERAAAGLFLAFQYPVEIPGVGNMTFMRTALNAQRKARGQEEMSAGDFLKLVREKAKALKIDADMMKRPVNVGFSGGEKKRNEILQMAILEPRMCILDETDSGLDVDALKLVSDGVNALRDAGRGFLVITHYQRLLDHIRPDVVHIMANGRIVKTGGPELALEVEKNGYADILAAEEA

SEQ ID NO: 33190 - protein, 348 aa, Rhodobacter sphaeroides 2.4.1
MGSRVYLDWNATTPLRAEARAAMLEAMDLVGNPSSVHAEGRRARALVERARAQVAAALGAEGADVVFVSGATEAAALACAGRGLLCADVEHEAVSAWCAPELAVDASGRVAVAEPGRSALQLANSETGILQDLPEGLAVSDLTQAFGKVPFAFNWLGCAMGFVSAHKIGGPKGVGALVIRRGLDLEARIKGGGQEMGRRAGTENLIGIAGFGAAAEAAARDLAEGLWEPVLQLRNILESALCDDGKGTISVGKAVPRLPNTLCLVTPGWKGETQVMQMDLAGFAVSAGSACSSGKVRASRVLRAMGLGEEEAGSALRLSLGPGVTEAEGLRFAEAWMRARDRHRARAA

SEQ ID NO: 33191 - protein, 387 aa, Rhodobacter sphaeroides 2.4.1
MERVYLDNNATTRLAPEALQAMLPFLTEEFGNPSSLHGQGRAPARALMAARRAVLELIGAEADSEILFTSGGTEADTTAIRSALAADPSRREIVTSTVEHAAVLALCDHLERQEGVTVHRIPVDGDGRLDIEAYRAALSPRVALVSLMWANNETGTVFPVEGLAELAHRAGALFHTDAVQAVGKVPIVLRGTEIDMLSLSAHKFHGPKGVGALWLRKGVPFQPLIRGGRQQRGHRAGTENIPGIVGLGRAAELALGGDHGAVRLLRDRLEQGILARVPKARVLGDPLDRLPNTSCVAFDFAEGEAIVMLLDRAGICVSSGAACASGAMEPSHVIRAMKVPFTAAHGAIRFSLSHWTTAAEIDRLLEVLPPIVDQLRALSPFGAEEVK

SEQ ID NO: 33192 - protein, 219 aa, Rhodobacter sphaeroides 2.4.1
MKFFVDSADVAAIAELNALGMVDGVTTNPSLILKSGRNILEVTKEICNLVSGPVSAEVVAAKAEDMIEEGRHLAEIAPNIAVKVPLTWDGLRACKVLSDEGRMVNVTLCFSVNQALLAAKAGATFISPFIGRLDDINLDGMELIADIRQVYDNYDFKTEVLAASVRTPNHVADCARIGADVITAPPAVIKALANHVLTDKGLDMFNADWAKTGQSILLK

SEQ ID NO: 33193 - protein, 68 aa, Rhodobacter sphaeroides 2.4.1
MAKGTVKWFNATKGYGFIAPEGGKKDVFVHITALERAGIRALNDGQAVTFDIESGRDGRESATNISIA

SEQ ID NO: 33194 - protein, 633 aa, Rhodobacter sphaeroides 2.4.1
MGNARNIAFWVVLFLLILALFNLFSGGQTTSSSRTISYSDFIARVDNGEVSSVTLDGERVMVRGKDGTQYVAIKPQGEEVTDRLINHGVEVRAEAQEQSGFFSLISLWLPFLVLIGIWIFFMNRMQGGGRGGAMGFGKSRAKLLTEKQGRVTFDDVAGIDEAKEELEEIVEFLRNPQKFSRLGGKIPKGALLVGPPGTGKTLLARAIAGEAGVPFFTISGSDFVEMFVGVGASRVRDMFEQAKKNAPCIVFIDEIDAVGRARGVGIGGGNDEREQTLNQLLVEMDGFEANEGVIIVAATNRKDVLDPALLRPGRFDRTIHVPNPDIKGREKILSVHARKVPLGPNVDLRLIARGTPGFSGADLMNLVNEAALLAARVGRRFVTMDDFENAKDKVMMGAERRSMVLTADQKEKTAYHEAGHAIVGLNLPKCDPVYKATIIPRGGALGMVVSLPEMDRLNMHKDEGKQKIAMTMAGKAAEIIKYGEEAVSSGPAGDIQQASALARAMVMRWGMSDVVGNIDYAEAHEGYQGNTAGFSVSAETKKMIEAEVKRLIDEGYQTAYRILTEKSEEFERLAKGLLEYETLTGDQIRRVIAGEPIDSDDDADRPVGGGSVAAIPKTRPKVIKADGGLEPSV

SEQ ID NO: 33195 - protein, 372 aa, Rhodobacter sphaeroides 2.4.1
MRIGCPKEIKPQEFRVGLTPHAAREAASHGHEVLVEAGAGAGAGFSDEDYRAAGARLVDTAEELFAAAELIVKVKEPQPVERQRLREGQLLFTYLHLAPDPEQTRDLMASGVTAIAYETVTDARGGLPLLAPMSEVAGRLAPQVGAWTLQKANGGRGVLLGGVPGVGPAKVVVIGGGVVGTHAARIAAGMGADVTVLDRSLPRLRALDEAFGTLFRTSYASSGTTAELVTAADLVIGAVLIPGAAAPKLVSRAQLGTMKPGAAIVDVAIDQGGCFETSRPTTHQDPIYEVDGVMHYCVANMPGAVARTSTLALGNATMPFLLALADKGWKRACEEDPHLLAGLNTHAGHLTYYAVGRALEIDVLSPQLALKM

SEQ ID NO: 33196 - protein, 388 aa, Rhodobacter sphaeroides 2.4.1
MVIVSAARTAVGSFNGAFASTPAHDLGAAVIEAVVARAGIDKADVSETILGQVLTAGQGQNPARQAHIKAGLPQESAAWSINQVCGSGLRAVALAAQHVQLGDASIVVAGGQENMSLSPHVAHLRAGQKMGDLSFIDSMIKDGLWDAFNGYHMGQTAENVAAKWQISRDMQDEFAVASQNKAEAAQKAGRFADEIVPFVIKTRKGDVTVDADEYIRHGATLDAMAKLRPAFIKDGTVTAANASGINDGAAAVLVMSAEEAEKRGLSPLARIASYATAGLDPSIMGVGPIHASRKALEKAGWKVGDLDLVEANEAFAAQACAVNKDMGWDPSIVNVNGGAIAIGHPIGASGARVLNTLLFEMQRRNAKKGLATLCIGGGMGVAMCLERP

SEQ ID NO: 33197 - protein, 400 aa, Rhodobacter sphaeroides 2.4.1
MAFLSDTLARVKPSQTIAVTNKARELAAAGRDVIGLGAGEPDFDTPDNIKAAAKRAIDAGRTKYTAVDGIPELKRAICEKFERENGLKYTPAQVTVGTGGKQILYNALVATLNPGDEVIIPAPYWVSYPDMVLLAGGTPVSVAAGMETGFKLTPEQLEAAITPRTKWFIFNSPSNPTGAAYTRAELAALCEVLMRHPQVWIMSDDMYEHLVFDDFDFTTPAQIEPGLYDRTLTCNGVSKAYCMTGWRIGYAAGPVELIRAMGTIQSQSTSNPCSIAQYAALEALSGPQEFLATNREAFQRRRDLVVSMLNEAKGVTCPNPEGAFYVYPDISGCIGKTSAGGAKITDDEAFASALLEETGVAVVFGAAFGLSPNFRISYATADEVLREACARIQAFCAGLS

SEQ ID NO: 33198 - protein, 461 aa, Rhodobacter sphaeroides 2.4.1
MPAHRKRPMADFSTLGLSERLMQGLAKAQFTQPTPIQVEAIPYVMQGRDLMGLAQTGTGKTLAFGLPLLHRLLGVGHPPPPRTIRALILAPTRELVTQIATNLELFTKGTPVKVVTITGGASINRQTERLARGADIMVATPGRLIDLLDRNAVVLDHTGYLVLDEADQMLDMGFIHSLRKIARFLPLKRQTLLFSATMPKLIEELAHTYLREPVKVQVAPPGKPVEKIAQGVHFTPQGDKAKLLESYLQKHPGEQALVFGRTKHGSEKLMKLLVSWGFKAGSIHGNKSQNQRDRTLTEFRDGSLDVLVATDVAARGIDIPGVRHVYNYDMPNVPENYVHRIGRTARAGAEGSAVAFVAPAEMEEFRAVEKLLKQPIPVIGGAPWAADIVAAAPRPGQKPRQGGRPKTGAKPQGKPQAKAQPKPQGAAKAHPRAGRPAGAPGGHAAPKRAARGPRRGDAARG

SEQ ID NO: 33199 - protein, 450 aa, Rhodobacter sphaeroides 2.4.1
MKKISQLMGLTALAAAAALPAWAQEAAEVVTEAAEAVVTPVMDKGDVAWMLMSTVLVFFMILPGIALFYGGLVRAKNMLSVLMQTTLIGCTVMVIWVIYGYSFAFGGGTSPFWGGMGKLFLAGVTTDSMAATFSDGFVIPEYLFICFQMTFAALTPALIIGGFAERIKFSAVLIFTVIWVTFAYFPIAHMVWDASGLIFNWGAIDFAGGTVVHINAGVAALIGAVMVGKRIGLGKENMAPHSMVMTMIGASMLWFGWFGFNVGSNLEANGGATLAMINTFVATAAAVVAWSLIEGLARGKASMLGAASGMIAGLVAVTPACGTIGPMGAIVLGAIASAVCYFFVTTVKNAMGYDDSLDVFGIHGVGGIIGAIGTGIFSAASLGGVNGDDYSIVGQTIIQAQAVVVTLIWTAIVSVVAFKIADLVVGLRVDTESERIGLDQTAHGESAYHG

SEQ ID NO: 33200 - protein, 470 aa, Rhodobacter sphaeroides 2.4.1
MSRLVVVSNRVPLPDENGNPPPGGLAVAVHAALRKNGGIWMGWSGRSTGEEEPQGLTTLEQDKISYVLTDLSQADLDEYYNGFANRVLWPIFHCRLDLAEYARQEMAGYFRVNRLFADRLVPMLEPDDVIWVHDYHLIPLAQELRKRGVRNRIGFFLHIPWPPADILTALPVYEIIMRGLAAYDLVGFQTDYDLDNFVGCLRREGWGDWSTPGWLRAFDKEVAAAAFPIGIETGDFARLAAKTDGLDLVTDMQQSLHGSSLIIGVDRLDYSKGIAARIDAFERYLMRNPDQAGKVTLLQVAPHSRSDVPEYLEMQGQVESHCGRVNGAHGTIEWVPIRYVNQSLTRPVLAGLYRLAKVGLVTPLRDGMNLVAKEYVASQDPADPGVLILSRFAGAARELDGAIFINPYDTEQTAGAIGRALSMPLDERIARWRRMMDHLESHDVLWWCRTFLAALNEAPEDNGALTRESD

SEQ ID NO: 33201 - protein, 623 aa, Rhodobacter sphaeroides 2.4.1
MDDQNKNLILATGLSFLVIMVWFFLFPPPEAVTEGEPTVATQQTAVAPSATPDAPTTAVPPDADLPETQRVVIDTPRLQGSISMLGGRLDDLSLKSYHETLDPQSQIVRLLSPVGQPNAYYALYGWTPAGALGYEDVPGANTTWTQVGSGALGVDQPVTLQWDNGKGLVFTRTISVDDHYMFSVAQTVENNSGQAVQLAPYGIVARHGKPLNLQNFFVLHEGVVGRADGKLTETKYDKVAELPQVAREGAQAEVIDAQQDGWIGFTDKYWMTTLIPQQGQPFTSVTKYVPGADIYQAETREQLVTVAPGATAEVSSRLFAGAKEWETIRAYQNEGATEPTEGAEPIPGFIDSIDWGWFFFLTKPIFTVLHWLNHMIGNMGLAIIALTFLLKALVLPLAYKSYVSMARMKELQPELEALRERAGDDKMLMQREMMRLYKEKQVNPAAGCLPILIQIPIFFSLYKVIFVTIELRHAPFFGWLKDLSAPDPSSIFNFFGLAPWAAPTPGTTMALIFIGALPILLGVSMWLQQKLNPAPGDKAQAMIFAWMPWVFMFMLGHFASGLVLYWIVNNLITFTQQYVIMRSHGHHPDIFGNIKASFSRKPAAQPAGKAANDGAAPAKKRKP

SEQ ID NO: 33202 - protein, 1512 aa, Rhodobacter sphaeroides 2.4.1
MTIYDEAWVKAEEAKRAWLDANGLYKAEDEHASCGVGLVVSISGTPSRKVVESGIAALKAVWHRGAVDADGKTGDGAGIHVQIPVKFFYDQIRRTGHEPDMHKLVAVGQVFLPRTDLSGQERCRTIVESEVLRMGHYIYGWRHVPVDTSVLGEKANATRPEIEQILIRCEKDIDDEQFERELYIIRRRIEKAAQAGSIQGLYLCSLSCRSIIYKGMMLAEQVATFYPDLQDERFESSFAIYHQRYSTNTFPQWWLAQPFRMLAHNGEINTLKGNINWMKSHEIRMASSAFGDAAEDIKPIVPQGSSDSGALDAVFEVMVRSGRSAPMVKTMMVPEAWSKTTTDMPKAWADMYAYCNAVMEPWDGPAALAMTDGRWVCGGLDRNGLRPMRYVVTGDGMLIAGSEAGMVPVDEMNVREKGALGPGQLIAVDMAEGKLYHDAELKDTLAASQPFGDWIEKVVDLNAILADVPEQRMFAPAELRKRQIAAGFSVEEIEQVLVPMAEDGKEMIASMGDDTPPAVLSSVYRPLSHFFRQNFSQVTNPPIDSLRESRVMSLKTRFGNLKNVLDEHSSQTEILILESPFVANSEFETMLSQFGTNVATIDCTFPADHHHDALRHGLERIRAEAEDAVRSGAAHIVLTDQNQGPGAVPMPMILATSAVHSWLTRKGLRTFTSINVRSAECIDPHYFAVLIGCGATTVNAYLAQDTIADRIERGLLEGNLNDAMRRYRDAINAGLLKIMSKMGISVISSYRGGLNFEAVGLSRAMVAEYFPGMHSRISGIGTSGIQHKLEQIHAKGWLGGSDVLPIGGFYKARRSGEKHAWEASTMHMLQQACDRASYDIWKQFSATLRANPPIHLRDLLDIKTLGRPVPIEEVESITSIRKRFVTPGMSLGALSPEAHKTLNIAMNRIGAKSDSGEGGEDPAHFVPEPNGDNPSAKIKQVASGRFGVTAEYLNACEELEIKVAQGAKPGEGGQLPGMKVTELIARLRHSTPGVTLISPPPHHDIYSIEDLAQLIYDLKQINPRAKVTVKLVAASGVGTIAAGVAKAKADVILISGHNGGTGASPGTSIKYAGLPWEMGLTEAHQVLAMNNLRDRVTLRTDGGLRTGRDIVMAAMMGAEEYGIGTAALIAMGCIMVRQCQSNTCPVGVCTQDKKLREKFTGSADKVVNLITFYAQEVREILASIGARSMDEIIGRADLLTQVSRGAAHLDDLDLNPLLITVDGSNRITYDRSKPRNAVPDTLDAEIVKDGARFFEDGEKMQLSYAVRNTHRTIGTRASSHIVRKYGMRNNLQPDHLTVKLTGSCGQSLGAFAAKGLKIEVAGDANDYVAKGLSGGTIVVHPQMESPLVAAENTIIGNTVLYGATDGFLFAAGRAGERFAVRNSGAKVVVEGCGSNGCEYMTGGVAVILGRIGANFGAGMTGGMAYLYDPSGVAEDFMNLETLVTCAIGHPHWEAQLKGLIERHVRETGSRHAARILNDWETERANFLQVCPKEMLVHLPFPLSDEPQAVPAE

SEQ ID NO: 33203 - protein, 307 aa, Rhodobacter sphaeroides 2.4.1
MIEAETTALTMLGASLDDSFGAAVETILRARGRVIVSGMGKSGHIGRKITATLASTGTPAQFVHPAEASHGDLGMVTRDDVALVLSNSGETPELADIIAHTRRFDIPLIGVASRAQSTLLRQSDVALLLPPAPEACGNGIVPTSSTTMTLALGDALAVALMEHRQFTPEHFRVFHPGGKLGARLARVADLMHRDLPLVAMGTSMGEALITMSRLGFGVLGVTGPEGRLAGIITDGDLRRHLDGLLSLSVEDVMTRHPLTIAPDALAEKAVAVMNGRKITSLFVVDPEGSGAAEGLIHIHDCLRAGVA

SEQ ID NO: 33204 - protein, 636 aa, Rhodobacter sphaeroides 2.4.1
MAKVIGIDLGTTNSCVAIMDGAQPRVIENSEGARTTPSIVGFTDSERLVGQPAKRQAVTNPSNTVFAVKRLIGRRVGDAEVEKDKKLVPYSIVNGGNGDAWVEVRGEKYSPSQISAFILQKMKETAEAYLGESVTQAVITVPAYFNDAQRQATKDAGKIAGLEVLRIINEPTAAALAYGLDKKDTKTIAVYDLGGGTFDITILEIDDGLFEVKSTNGDTFLGGEDFDMRIVNYLADEFKKEHGVDLTLDKMALQRLKEAAEKAKIELSSSQQTEINQPFISMDRNTGQPLHMVMKLTRAKLESLVGDLIKKSLKPCEAALKDAGVSKSDIDEVVLVGGMTRMPRVVEEVTKFFGKEPHKGVNPDEVVALGAAIQAGVLQGDVKDVVLLDVTPLSLGIETLGGVFTRLIDRNTTIPTKKSQVFSTAEDNQNAVTIRVFQGEREMAADNKLLGQFNLEDIPPAPRGMPQIEVTFDIDANGIVSVSAKDKGTGKSQNITIQASGGLSDEDIEKMVRDAEANAEADKKRRELVETKNQGESLLHSTRKSIEEHGDKVDPSTVEAIELAMGALEEALKSEDAGKIKGGIQNLTEAAMRLGEAIYKASQAEGGATPDEEGPRSVDDDIVDADFEDLGENKRK

SEQ ID NO: 33205 - protein, 195 aa, Rhodobacter sphaeroides 2.4.1
MPEALRRALESGGAASSDHDLNPEIVLPPDRRLRAAAVLVPVWQREGGARVILTKRASHLAHHPGQIAFPGGKIDPTDASPEEAALREAREEIGLPAEMVEVVGRLPAHETVTGFTVIPILAEVRGRFVPVTQEDEVEEAFTVPLAHLLDLSRYRVEQRLWRGGWRRYYVVPYGPYYIWGATARILHGLARRMQG

SEQ ID NO: 33206 - protein, 408 aa, Rhodobacter sphaeroides 2.4.1
MSAPKKVVLAYSGGLDTSIILKWLQTEYGCEVVTFTADLGQGEELEPAREKAVMLGIKPENIFIEDVREEFVRDFVFPMFRANALYEGLYLLGTSIARPLIAKRLVEIAAQTGADAVAHGATGKGNDQVRFELTAYALDPAIKVIAPWREWDLTSRTKLLEFAEQNQIPIAKNKRGEAPFSVDANLLHTSSEGRVLENPGEEAPDYVYQRTVDPEKAPDAPEFVEIAFEKGDAVAINGEAMSPATILTKLNELGGKHGVGRLDLVENRFVGMKSRGIYETPGGTILLEAHRGIEQITLDSGAGHLKDSIMPRYAELIYNGFWYSPEREMLQALIDKSQEHVTGTVRVKLYKGFARTVARWSEHSLYSEKHVTFEEDAGAYDQKDAAGFIRLNALRLKLIATRNARVKG

SEQ ID NO: 33207 - protein, 759 aa, Rhodobacter sphaeroides 2.4.1
MLAQDGPLMTKTKITPEEALLYHLEPRPGKYEITASTPMATQRDLSLAYSPGVAVPVQAIADAPETVYDYTVKGNMVAVISNGTAILGMGNLGAMASKPVMEGKAVLFKRFADVNAIDIELDTEDPDEIIQAVKLMGPTFGGINLEDIKAPECFMIEQRLKELMDIPVFHDDQHGTAVICAAGLINALELSGKKIEDCRIVLNGAGAAGIACLELLKTMGARHDNCIMCDTKGVIWQGRTEGMNQWKSAHAARTELRTLEEAMAGADVFLGVSAKGAVTPEMVRSMADNPVIFAMANPDPEITPEEAQAVRADAIVATGRSDYPNQVNNVLGFPYLFRGALDIHARAINDEMKIACARALAQLAREDVPDEVAMAYGRKLSFGRDYIIPTPFDPRLIYTIPPAVAKAGMDTGVARRPIIDLQGYELALKSRMDPTASILQGIHARAKAAQARMIFAEGDDPRVLRAAVAYQRAGMGKALVVGREQDVREKLEATGLGDAVRELEVVNAANSRHMEAYKSFLYNRLQRGGFDSYDIQRLATRDRHVFSALMLAHGHGDGLVTGATRKSAYVMQLINHVFDAKASDGAVGVTALLHKGRIVLIADTLVHEWPEAEDLADIAIKSARVARNLGLEPRVAFVSFSTFGYPVSERAAKMGEASRVLDGMKVDFEYEGEMTVDVALNKTAMAQYPFCRLTGPANILVVPARHSSSISIKLMQEMAGATVIGPILTGVSKPIQICGVNSTVNDILNMAVMAACKVG

SEQ ID NO: 33208 - protein, 396 aa, Rhodobacter sphaeroides 2.4.1
MKPVWLVLNIGSSTVKFGLFDVADARPLVRGLIEGIGLQPRLKASLPDGTLELRAPADARDAKELTLWLLGLLEGRLGPLDLHAAGHRVVHGGPDYNAPVLLTPEVIERLESFSPLAPSHQPFNLAGVRAVEARWPGVPQIACFDTAFHHDRPRLARLYALPRAMAEEGILRYGFHGLSYDYIAGRLPEVLGETGRGKVIVAHLGSGASLCAMENLRSLDTTMGFSALDGLMMGTRCGQLDPGVILHFLRQGLTGPEIETILGRQSGLAGVSGISPDMRDLLASDRPEAAEAVDLFVRFILRQIGALSAGMGGLDALVFTAGIGQHAPEIRARVMEGLGWLGLEMDAAANGAGQGVISAPGSRVTAAVIATDEEAVILRALHCGEVAHYSAGVALA

SEQ ID NO: 33209 - protein, 473 aa, Rhodobacter sphaeroides 2.4.1
MFGCDPSITTVENRTLEELQIGESAEVDRVLTPEDIELFAVMSGDVNPAHLDATYAAETGFHHVIAHGMWGGALISAVLGTRLPGPGTIYLGQSLRFRRPVSPGDRITVRVTVREKDMASAKVTLDCLCLNQAGELVITGEALVMAPREKVRRPVSHLPEVRLHTPGARFANLILAARSLPPLPTAIVHPCDDLSLLGAIQAEGAGLITPWWVGPKARILATAAAANVTLDESRIVDTPHSHASAEVAVDLVRDGRAGALMKGKLHTDELLSAVLRRDTGLRTERRLSHVFALDVPDVDRILFITDAAINIAPDLETMKDIVQNAIDLVMALGIECPRTALLSAVETVTGKIPSTLLAASICKMHDRGQIVGGLIDGPLAYDNAISMEAVKAKGIVSDVAGRADILVAPNLESGNMIAKQLIHLGGAEAAGLVLGAKVPIMLTSRADGPSARLTSAALARLHAEARPTKPVAE

SEQ ID NO: 33210 - protein, 534 aa, Rhodobacter sphaeroides 2.4.1
MPDMAPRVLVSDELSETAVQIFRDRGVEVDYMPKLGKDKEKLAEIIGQYDGLAIRSATKVTEKLLEQATNLKVIGRAGIGVDNVDIPAASRKGVIVMNTPFGNSITTAEHAIAMMFACARQLPEANASTHAGKWEKSRFMGVELFNKTLGVIGAGNIGGIVCDRALGLSMKVVAYDPFLSEERAKALGVTKVELDDLLARADFITLHVPLTDKTRNILSAEAIAKTKKGVRIINCARGGLVDEKALAEAIKSGHVAGAAFDVFEVEPASESPLFNLPNVVVTPHLGASTTEAQENVALQVAEQMSDYLLTGAVQNALNMPSVTAEEAAVMGPWVKLAGHLGAFVGQMTDEPIKAINVLYDGAVGEMNLAALNCATIAGIMKATNPDVNLVSAPVVAKERGIQISTTTQAKSGAFDAYIKLTVVTDKRERSVAGTCFSDGKPRFIQIKGINIDAEVGRHMLYTTNEDVPGIIGLLGMTMGKNGVNIANFTLGRTSVGQEAIAILYLDQAIDPKVVETLESTGLFQQVKPLEFDVA

SEQ ID NO: 33211 - protein, 389 aa, Rhodobacter sphaeroides 2.4.1
MSDILVLSAVRTAIGGFGGALAAVPPGDLATTVTRAALERAGVEPGRVGHVVFGHVINTEPRDMYLSRVAAMQAGIPSEVPAMNVNRLCGSGVQAVVSAMQALMLGDAEVALAGGAESMSRAPYALTTARWGQKMGDTRALDMMTGALNCPFGTGHMGITAEIVAERHGISREDQDAFALESQTRTARAQEEGRFDGQIVPVEIASRKGPVSFSRDEHPKATTLEALAGLRPAFQKGGTVTAGNASGINDGAGALILAREGAVPDARPLGRLIGYAHAGVDPEVMGLGPIPAVKALCARTGLSVADFDVIESNEAFAAQALAVARALDFDPARVNPNGGAIALGHPVGATGAIITVKALHELHRTGGRRALVTMCIGGGQGIALALERV

SEQ ID NO: 33212 - protein, 131 aa, Rhodobacter sphaeroides 2.4.1
MFAVLKTGGKQYKVQAGDVLRVEKLACEAGDKIQFNDILMVGGDSVTVGAPFVAGAAVQAEVIAQIKGEKTIHYVKRRRKHSSQRTKGHRQQLTLLRVTDVLASGADASGVAVATGTADARRAAHNASAKE

SEQ ID NO: 33213 - protein, 342 aa, Rhodobacter sphaeroides 2.4.1
MKFLDLCKVYIRSGGGGGGCVSFRREKFIEFGGPDGGDGGNGGSVWAEAVDGLNTLIDFRYQQHFFAKSGQPGMGSQRTGRSGDDIVLKVPVGTEIIDEDEETVIADLTEVGQRVLLAQGGNGGWGNLRFKSSTNRAPARANPGQPGIDRTIWLRLKLIADAGLLGLPNAGKSTFLSATSNARPKIADYPFTTLVPNLGVVGVDGKEFVIADIPGLIEGASEGRGLGDQFLAHVERCSVLLHLVDGTSSTIVKDYRTIIGELEAYGGDLALKPRITAMNKIDAMDSRQISDRRRALEKATGGKVFTISGVAGTGLMDVLRALWAEIDGARGDKVEEHAPWQP

SEQ ID NO: 33214 - protein, 551 aa, Rhodobacter sphaeroides 2.4.1
MADATIRTEPLPEEAIPAPEGPTQIIDTDYEIGQDNISYRRRFVFELDIHNVVFSVSALTIVAFTFLTLMFQTTLGPVFAAVRDALTSNLAWFFLLAGNVFVLLCVVLIFLPLGRIRLGGPDATPDYSRLSWFSMLFAAGMGIGLMFYGVSEPLGNYTAAFTGPVFENGVRTDWSPLNGAPGDTEAARRLAMAATIFHWALHPWAIYAVVALSLALFAYNKGLPLTLRSVFYPIFGERVWGWPGHVIDILAVFATIFGLSTSLGIGAQQAGAGLDFLFGLPSTVGVTVFLVIVITGIATASVIAGMDKGVKRLSEANMALAFLLLMFVILVGPTLQIVRGFFLNLLAYVEYLPALSNPFGRTDDNFRHGWTAFYWAWWISWSPFVGMFIARVSRGRSVREFLIAVLLIPSIVSTIWMTALGGTAISQVVNEGLSSVQDAALEIQLFEMLSHLPLTQITSMIGIVLVIVFFVTSSDSGSLVIDTIAAGGKVNAPVPQRVFWATFEGLVAIALLLGGGLAALQAMAVSTGFPFTIVLLGACYALIRGLAAEPR

SEQ ID NO: 33215 - protein, 288 aa, Rhodobacter sphaeroides 2.4.1
MSDTVVGIAGTGRMGTAFARRLRETGTPVRVWNRSSDRTGAAVDAGAEAVALEALAEADLVLLSLTDAAAAEAVLAGMGAALAGRIVVEMSTLLPDQAEALEAQATALGAQFLHCPVGGTVAPALKGQLLGFAGGPAETLEQARPVLERLCRRVEHLGSVGAAARMKLAVNLPLALYWQTLGESLLLLRGAGIPAEQAIGLMAESSGGPAVLKNRAQVVVETLEGADQRGTFDIAGLAKDLHLALALAEREGAALPLSAAAEERYRAALEAGLGRFDGASLARRTAEG

SEQ ID NO: 33216 - protein, 386 aa, Rhodobacter sphaeroides 2.4.1
MAAEPIVIAGAARTPMGAFQGALKGRTGVELGAAAISAALARAGLAPEAVEEVVMGCVLPAGLGQAPARQAALGAGLPLSVPCATLNKVCGSGMKAAMAAHDMIRAGSAGIVVAGGMESMSNAPYLLDKARGGYRIGHGRVLDHMFLDGLEDAYDRGRAMGTFAEDCAEAYQFTRDAQDAYALASLARAQAAIAEGRFAAEVVAVDGVAVDEAPGRARPEKIPQLRPAFREGGTVTAANSSSISDGAAALVIASAGAAEAQGLTPLATIRGHASHAQAPNLFTTAPIFAIGKLLERLGWSAAEVDLFEINEAFAVVAMAAMRDLDLPHDKVNVNGGACALGHPIGCSGARIVVTLIEALRARGLRRGVASLCIGGGEATALAVEVI

SEQ ID NO: 33217 - protein, 315 aa, Rhodobacter sphaeroides 2.4.1
MRLLITRPLPDRILEAARARFEVTVRNSTKPLSPEELRRALAEHDAVLPTLGDLFRAEVFADVPQPRARILANFGVGTNHIDVAAATAAGIAVTNTPGAVTDATADIALTLMLMTARRAGEGERLVRRGAWEGWHPTQMLGLHMTGKRLGILGMGRIGKAIARRAHHGFGMEITFFNRSPVADPGVPARQVGLAEALDADIVVVAVPATPATHHLVDAAALSQMRPGAILVNIARGDIVDETALIAALAEGRLAGAGLDVYEFEPEVPAALRAMENVTLLPHLGTAALEVREGMGLMAVENLLAFADGRPLPNAV

SEQ ID NO: 33218 - protein, 316 aa, Rhodobacter sphaeroides 2.4.1
MTVVLTTSPGFGRHGRVPARIEAEGWTFLRAADAAEMEAHLPEADYLVVGLVPVTAEVLAKGPRLKGVLKHGVGVDNIDIPACTAAGLPVTNTPAANADAVAELAMGLMFAMARFIPQGHASVTSGGWDRRIGTQLGGKVLGIVGLGNIGKRLARLARGLGMEVLATDRVEDPAFARDCGVTYLPLEELLARADYVSLHVFGGAGNAALIDDRALARLKPGARLVNLARGEVVDLDAVARALESGQLGGVAIDAYVTEPPDVSHPVFAHPNAVFTPHSGADTLEALENVGLMVIEDIRTLIAGGRPARCLNAAELG

SEQ ID NO: 33219 - protein, 402 aa, Rhodobacter sphaeroides 2.4.1
MTSSRLSSRLQAVQPSPTIAMTRLAAQLRREGKDIIGLSQGEPDFDTPVHIRQAAAAAIEAGQTRYTDVDGTPELKAAIVEKFRRENGLSYETNQISVGTGGKQVLYNALLATLDEGDEVIVPAPYWVSYPDMVRLAGGVPVTVSCPEEDDFLLTAPALRAAITPRTKWVILNSPSNPTGMGYSAAHLRALADVLLEFPHVLVMTDDMYEHLRYDGWEFATIAQVEPKLMDRVLTCNGVSKAFSMTGWRIGYAGGPADIIKAMATLQSQSTSNPSSVSQAAALAALTGPMEFLAERNEIFRQRRDLCLSALNQIEGLSCVRPNGAFYLFPSCAGMIGRTRPDGRKIETDTDFVMYLVEEAGVAAVPGSAFGLAPYFRISFATDTERLRTACERIRAASARLT

SEQ ID NO: 33220 - protein, 331 aa, Rhodobacter sphaeroides 2.4.1
MNCLIVQPIHEAGLAALRAAGIAPILCPAPDMATVARHMAGIDAVITRDAGLDAAAFAAGDRLRAVVVHGAGHDPVDKEAAARRGVVVANTPGANARSVAELAVGLALAVARRIPAADRALREGKTGFRESARFSELRGRTALVVGWGASGRETGRMLAQAFDMRLLVHSPRVPRIEGGERVASLAEGLAAADLVSLHTPLRPETHHMMDARAFAAMRPGAILINMARAGLVDEAALLEAVASGHLGGAGLDVCSPGAPSGPLAAHGNVVFTPHLGGTTEEALRRVALEAVRHVITALEGRLPETAINPDVWRVESRSPASAATEVGGTQA

SEQ ID NO: 33221 - protein, 399 aa, Rhodobacter sphaeroides 2.4.1
MTQVFICDYIRTPIGRYGGALSPVRADDLGAVPLKALMARNGGVDWEAVDDVIFGCANQAGEDNRNVARMSALLAGLPVGVTGTTINRLCGSGMDAVLTAARQIAAGEADLVIAGGVESMSRAPFVLPKAGTAFTRSAEIHDTTIGWRFVNPAMEAAYGVDPMPQTGQNVACDFGISREAQDAMALASQTKAAAAQANGRLAQEITPVLVPQRRGEPVRVEQDEHPRATTPEALAKLKPLFAGGSVTAGNSSGVNDGAAALILASEAAVRRHGLTPMARVLGGATAGVPPRIMGIGPVPATRKLMARLGLTTEAFDVIELNEAFAAQGVATLRQLGIAEEDARVNPNGGAIALGHPLGMSGARITGTAALQLQRTGGRRALSTMCIGVGQGIAIALERV

SEQ ID NO: 33222 - protein, 68 aa, Rhodobacter sphaeroides 2.4.1
MANGTVKWFNATKGFGFIAPAHGSKDVFVHVTALERAGIRQLNDGQALTYDMETDRNGRESATNLVLA

SEQ ID NO: 33223 - protein, 77 aa, Rhodobacter sphaeroides 2.4.1
MANKTGEITMANGTVKWFNATKGFGFIAPTGGSKDVFVHVTALERAGIRQLDDGQAVSFDLERDRNGRESATNLVLA

SEQ ID NO: 33224 - protein, 268 aa, Rhodobacter sphaeroides 2.4.1
MKQVPPAAPVAPWLGGKKRLHPLILERIEAIPHRAYVEPFVGMGGIFLRRRFRPRLEVMNDRNGEIINLFRILQRHYPQLLEIMRFQICSRREFDRLRLTDPATLTDLERAARFLYLQRLSFGGKLDGVFGVSAGHGPRFSLARLEPVLDAAHERLDGVVFESLDWADLIPRYDTTETLFYLDPPYFGGENDYGKGLFDRAQFARIAEILGGLKGAFLLSINDTPEIRALFGRFHLEPVRLSYSVSASGGTEAQELLVSNRERIATLL

SEQ ID NO: 33225 - protein, 320 aa, Rhodobacter sphaeroides 2.4.1
MSVLPTDSLSTPRFVGLPSFMRLPMATELQGLDAAIVGLPSDSGAPFRTGARFAPNALRAMSVMLRPINPYRGHINIFEVLRVADAGDATCVPGYEIESLAALERALDAVVEAGAVPFGIGGDHSVSLAGLRAVAKRHGPLGLVHFDSHTDTWDSYFDGKRYSAGTMFRRAIEEGIVDPARSIQVGMRGSLFQPADVSQSVDLGLEVITCDEMFALGLPETARRIAARSAGHPAFLSFDLDFVDPAYAPGVETPECGGPTARETLSLLRSLQGLNLVGCDVVELNPSYDGPGQITALLGATVMAELLAILAEARVRERSR

SEQ ID NO: 33226 - protein, 268 aa, Rhodobacter sphaeroides 2.4.1
MKQVPPAAPVAPWLGGKKRLHPLILERIEAIPHRAYVEPFVGMGGIFLRRRFRPRLEVMNDRNGEIINLFRILQRHYPQLLEIMRFQICSRREFDRLRLTDPATLTDLERAARFLYLQRLSFGGKPNGSFGISPGNGPLFSLARLEPLLDAARTRLDGVVFECLDWADLIPRYDTAETLFYLDPPYFGGENDYGKGLFDRAQFARIAEILGSLKGAFLLSINDTPEIRALFGRFHLEPVRLNYSVSAAGSTEAQELLVSNRERIATLL

SEQ ID NO: 33227 - protein, 634 aa, Gluconobacter oxydans
MSKVIGIDLGTTNSCVAVREGDETKVIENSEGARTTPSMVAFTDNGERLVGQAAKRQAVTNPANTLYAVKRLIGRRYDDPTVQKDKEMVPYAIVRGDNGDAWVEARGEKYAPSQIAAYVLGKMKETAESYLGETVSQAVITVPAYFNDAQRQATRDAGKIAGLEVLRIINEPTAAALAYGLGKRDSGTVAVYDLGGGTFDVSILEISDGVIEVKSTNGDTFLGGEDFDNRIIGFLADEFKKDQGIDLRGDKLALQRLKEAAEKAKIELSSSKETEINLPFITADASGPKHLVVKLSRAKLESLVDDLIQRTLGPCRAAIKDASVSANEIDEVILVGGMTRMPKVIETVKEFFGKDPARNVNPDEVVAIGAAVQGAVLKGDVKDVLLLDVTPLSLGIETLGGVFTRLIDRNTTIPTKKSQTFSTAEDNQNAVTIKVYQGEREMAADNKLLGNFDLQGIAPAPRAVPQIEVTFDIDANGIVNVSAKDKATNKEQQIKIQASGGLSDADIDRMVKDAEANASADKAKRELVDVRNSTESLIHQTEKSITEGGDKVPAADKSEAEAAIAEAREALGGENLDTLKAASEKLTQAAMKVGQGVYQAGQGAEGGAAPEGEKKDENVVDADFEDLEDDSKKH

SEQ ID NO: 33228 - protein, 924 aa, Oryza sativa Japonica Group
MPSASAAAAALVLLFLAFSLSNAQPGFISLDCGGDDDYTDGIGIQWTSDAKFVSAGQEANLLLQNQQLQQYTTVRSFPADNRKYCYTMNVRNRTRYLVRATFLYGNFDNSNVYPKFDLSLGPTPWTTVVIDDATTPVVQEAIILAAAPTLSVCLSNASTGQPFISTLELRQFNGSLYYTTDEKQFFLRLSARINFGAESNASVRYPDDPFDRIWESDLVRRANYLVDVAPGTERISTTKPIFVSTNEEPPQRVMQTAVVGKNGSLTYRIDLEDFPGNAWGVSYFAEIEDLAPNQTRKFKLVIPGKPEFSKPTVDVEENAQGKYCLYEPGYTNIPLPFVFSFGFKKTNDSSEGPILNAMEIYKYIEISVGSQDANIMASLVSRYPEAGWAQEGGDPCLPASWSWVQCSSEAAPRIFSISLSGKNITGSIPVELTKLSGLVELKLDGNSFTGQIPDFTGCHDLQYIHLEDNQLTGALPPSLGELPNLKELYIQNNKLSGEVPQALFKKSIIFNFSGNSDLRMGHSNTGRTIVIIVCAVVGAILILVAAIVCYLFTCKRKKKSSDETVVIAAPAKKLGSFFSEVATESAHRFALSEIEDATDKFDRRIGSGGFGIVYYGKLTDGREIAVKLLTNDSYQGIREFLNEVTLLSRIHHRNLVSFLGYSQQDGKNILVYEFMHNGTLKEHLRGGPDDVKITSWVKRLEIAEDAAKGIEYLHTGCSPTIIHRDLKSSNILLDKNMRAKVADFGLSKPVVDGSHVSSIVRGTVGYLDPEYYISQQLTEKSDMYSFGVILLELISGHEPISNDNFGLHCRNIVEWARSHMESGDIHGIIDQSLDAGYDLQSVWKIAEVATMCVKPKGVLRPSISEVLKEIQDAIAIELQRELPSSIHHLMSKTSPSEAVNTTGSVQDLEQNASFDELLMRPGLR

SEQ ID NO: 33229 - protein, 535 aa, Oryza sativa Japonica Group
MARALRWPDLVGLGLGGMVGAGVFVTTGRATRLYAGPAVVVSYAIAGLCALLSAFCYTEFAVDMPVAGGAFSYLRVTFGELAAFLTGANLIMEYVFSNAAVARSFTAYLGTAVGVDAPSKWRIAVPGLPKGFNEVDLVAVGVILLITVCICYSTKESSSVNMVLTAVHVLFIMFVIVMGFWRGDTRNLTRPADPEHNPGGFFPHGAAGVFNGAAMVYLSYIGYDAVSTMAEEVERPSRDIPIGVSGSVVLVTLLYCLMAASMSMLLPYDAIDTEAPFSGAFKGSSGWGWVSNVIGAGASLGILTSLMVAMLGQARYLCVIGRSGVMPAWLARVNPRTATPVNASAFLGVFTAALALFTELDILLNLVCIGTLFVFYMVANAVVYRRYVAAAEDDEEGRRRGAVPTLAFLLAFSLVALCFTLVWKLAPRGGARTGLLVACGAAAAAAVAAFRALVPQARRPELWGVPAMPWVPAASVFLNVFLLGSLDRPSYVRFGFFTAAAALVYVLYSVHASYDADEAAAALDGAKVLDEGCKV

SEQ ID NO: 33230 - protein, 300 aa, Oryza sativa Japonica Group
MAASQRSRSTAAQLDVDDQAAADQLMTMMRRPAAVLQDEAAAEEEASAAAADLQLELRRGPWTVDEDLTLVNYIADHGEGRWNSLARAAGLKRTGKSCRLRWLNYLRPDVKRGNFTADEQLLILDLHSRWGNRWSKIAQHLPGRTDNEIKNYWRTRVQKHAKQLNCDANSARFKDAMRYLWMPRLADASQLGDHHGYNSTTAMGDAHGMPVMTSSSSDSFATSESYDGGLYANVQDNEMVNGGDYWMQGANKGFCSNYESEQLHPHEHSQFQDPDLVGWVQGFSEGISENFWSLEDIWKM

SEQ ID NO: 33231 - protein, 970 aa, Oryza sativa Japonica Group
MEEAAAAVHRRWRRRLLPKLMLLLCAVVHGQQPDSLGFISIDCGIPDGGGYSDESTRGLRYVPDAGFLDAGAGLSAGINPPYTDRDLAARYLTVRYFPGAASAAGERGGCYTLRQLSPGGRYLVRATFYYGNYDGAIAMLPVVFDLHLGANRWTAVNVTAADAIYIFEAVVSPPADFLQVCLVNIGKGTPFISGLDLRPLKPELYPEATANQSLLLLNHDRPPARFAFNRYQFWRPASYYKLFRYPFDPYDRLWQPYGDDPSWTNITVAAAVDVTNISRSDDPSPILRSAATPANATVRRLDFPWSSDDAATTTYLLLLYFAELQRLPAGAARRFDVLVDGDASAGGGRRGYTPRYLAAEVVRSTVRAARPGQRHVVSLVAAPDSALPPIVNGLEIYSVQPMPELATNDRDAKAMMEIRDNYELKKNWMGDPCAPKAFAWVGLNCGYSSSDPALVTALNLSSSVLIGPVNLSFGDLKSLQYLDLSNNSLSGPIPDFLVQMPALKFLDLSSNKLSGSIPSDLLQKRENGSLVLRIGNNANLCYNGANNTCAPESKQSKRILVIAIAVPIVAATLLFVAAKFILHRRRNKQDTWITNNARLISPHERSNVFENRQFTYRELKLMTSNFKEEIGKGGFGTVFLGYLEDGTPVAVKMCSKTSSEGDKKFLAEAQHLTRVHHRNLVSLIGYCKDKKHLALVYEYMQGGNLEDRLRGEASIAAPLTWHQRLKIALDSAQGLEYLHKSCQPPLIHRDVKTRNILLSGDLDAKIADFGLTKVFAGDVVTHVTTQPAGTLGYLDPEYYHTSRLSEKSDVYSFGVVLLELVTGRPPAVPLGDGDGGGGESVHLAVWARQRLAEGDIESVADAAMGGCFEVNSAWKVAELALRCKERPSRERPAMADVVAELKECLELEASRALGRGYSCYSSGSGGGSSVATTTTTSGAANISAAASAASVSDAQIGELRQESVLELGPR

SEQ ID NO: 33232 - protein, 235 aa, Physalis alkekengi
WLGLFHRRKNQYGRFMMRLKLPNGVTTSAQTRYLASVIRKYGEEGCADITTRQNWQIRGVVLPDVPEILKGLAEVGLTSLQSGMDNVRNAVGNPLAGIDPEEIVDTRPYTNLLTQFITGNSRGNPAVSNLPRKWNPCVVGSHDLYEHPHINDLAYMPATKDGRFGFNLLVGGFFSAKRCDEAIPLDAWVPADDGVPVCKAFLEAFRDLGFRGNRQKCRMMWLIDELGVEGFRAEV

SEQ ID NO: 33233 - protein, 206 aa, Physalis alkekengi
GGRGNSIWLGLFHRRKHQYGRFMMRLKLPNGVTTSAQTRYLASVIRKYGKDGCADVTTRQNWQIRGVVLPDVPEILKGLDEVGLTSLQSGMDNVRNPVGNPLAGIDPQEIVDTRPYTNLLSQYVTANFRGNVAVTNLPRKWNVCVIGSHDLYEHPHINDLAYMPATKDGRFGFNLLVGGFFSPKRCAEAIPLDAWVPAEDVVLVCQ

SEQ ID NO: 33234 - protein, 234 aa, Solanum lycopersicum
WLGLFHRRKNQYGRFMMRLKLPNGVTTSAQTRYLASVIRKYGEEGCADITTRQNWQIRGVVLPDVPEILKGLEEVGLTSLQSGMDNVRNPVGNPLAGIDPEEIVDTRPYTNLLSQFITGNSRGNPAVSNLPRKWNPCVVGSHDLYEHPHINDLAYMPAIKDGRFGFNLLVGGFFSAKRCDEAIPLDAWVPADDVVPVCKAILEAFRDLGFRGNRQKCRMMWLIDELGVEGFRAE

SEQ ID NO: 33235 - protein, 234 aa, Solanum lycopersicum
WLGLFHRRKHHYGRFMMRLKLPNGVTTSDQTRYLGSVIRKYGKDGCGDVTTRQNWQIRGVVLPDVPEILKGLDEVGLTSLQSGMDNVRNPVGNPLAGIDLHEIVDTRPYTNLLSQYVTANFRGNVDVTNLPRKWNVCVIGSHDLYEHPHINDLAYMPATKDGRFGFNLLVGGFFSPKRCAEAIPLDAWVPADDVVPVCKAILEAYRDLGTRGNRQKTRMMWLIDELGVEGFRAE

SEQ ID NO: 33236 - protein, 389 aa, Zoogloea ramigera
SIVIASAARTAVGSFNGAFANTPAHELGATVISAVLERAGVAAGEVNEVILGQVLPAGEGQNPARQAAMKAGVPQEATAWGMNQLCGSGLRAVALGMQQIATGDASIIVAGGMESMSMAPHCAHLRGGVKMGDFKMIDTMIKDGLTDAFYGYHMGTTAENVAKQWQLSRDEQDAFAVASQNKAEAAQKDGRFKDEIVPFIVKGRKGDITVDADEYIRHGATLDSMAKLRPAFDKEGTVTAGNASGLNDGAAAALLMSEAEASRRGIQPLGRIVSWATVGVDPKVMGTGPIPASRKALERAGWKIGDLDLVEANEAFAAQACAVNKDLGWDPSIVNVNGGAIAIGHPIGASGARILNTLLFEMKRRGARKGLATLCIGGGMGVAMCIESL

SEQ ID NO: 33237 - protein, 389 aa, Zoogloea ramigera
  misc_feature (86)..(86): Xaa can be any naturally occurring amino acid
  unsure (1)..(389): unsure at all Xaa locations
SIVIASAARTAVGSFNGAFANTPAHELGATVISAVLERAGVAAGEVNEVILGQVLPAGEGQNPARQAAMKAGVPQEATAWGMNQLXGSGLRAVALGMQQIATGDASIIVAGGMESMSMAPHCAHLRGGVKMGDFKMIDTMIKDGLTDAFYGYHMGTTAENVAKQWQLSRDEQDAFAVASQNKAEAAQKDGRFKDEIVPFIVKGRKGDITVDADEYIRHGATLDSMAKLRPAFDKEGTVTAGNASGLNDGAAAALLMSEAEASRRGIQPLGRIVSWATVGVDPKVMGTGPIPASRKALERAGWKIGDLDLVEANEAFAAQACAVNKDLGWDPSIVNVNGGAIAIGHPIGASGARILNTLLFEMKRRGARKGLATLCIGGGMGVAMCIESL

SEQ ID NO: 33238 - protein, 397 aa, Fagus sylvatica
MFSELMNFLRACFRAKSDRHVHTGSNARGRQDGLLWYKDSGQHFNGEFSYGCGQANNLLEDQSQIESGSLSLNETGPYGTFIGVYDGHGGPETSRYVNNHLFQHLKRFTSEQHSMSVEVIRKAYQATEEGFLSQVTKQWPLKPQIAAVGSCCLVGVICGGTLYIANLGDSRAVLGRVMKATGEVLSIQLSAEHNVAIESVRQELHSLHPEDPQIVVLKHNVWRVKGLIQISRSIGDVYLKKAEFNREPLYAKFRLREPFKKPILSADPAISVHQLQPHDQFVIFASDGLWEHLSNQEAVDIVQNHPRSGSVRRLIKVALQEAAKKREMRYSDLKKIDRGVRRHFHDDITVIVVFLDSNLVSRASSVKCPSISVRGGGINLPHNTLAPYTTQMEVGST

SEQ ID NO: 33239 - protein, 341 aa, Sporothrix schenckii
MDNYQKLEKVGEGTYGVVYKARDLTAGGRIVALKKIRLEAEDEGVPSTAIREISLLKEMRDPNIVRLYNIVHAEGHKLYLVFEFLDLDLKKYMDSLPVSDGGRGKALPEGTGTRLHTLGLGDDIIKKFMSQLCAGIRYCHSHRILHRDLKPQNLLINKEGNLKLADFGLARAFGVPLRTYTHEVVTLWYRAPEILLGGHQYSTGVDMWSVGCIFAEMAMRKPLFPGDSEIDEIFKIFRLLGTPTEDVWPGVTTYPDFKASFPRWVQDTETPICPTLDPMGQELLELMLVYDPASRLSAKQACNHPYFDDLEKALPGTAAAAARQHTTTAAAGGAYNGSGYH

SEQ ID NO: 33240 - protein, 896 aa, Arabidopsis thaliana
MEKYFHGVLCVFIITVAFIHVVQAQDPNGFITLDCGLLPDGSPYTNPSTGLTFTSDSSFIESGKNGRVSKDSERNFEKAFVTLRYFPDGERNCYNLNVTQGTNYLIRAAFLYGNYDGLNTVPNFDLFIGPNKVTTVNFNATGGGVFVEIIHMSRSTPLDICLVKTGTTTPMISTLELRPLRSDTYISAIGSSLLLYFRGYLNDSGVVLRYPDDVNDRRWFPFSYKEWKIVTTTLNVNTSNGFDLPQGAMASAATRVNDNGTWEFPWSLEDSTTRFHIYLHFAELQTLLANETREFNVLLNGKVYYGPYSPKMLSIDTMSPQPDSTLTCKGGSCLLQLVKTTKSTLPPLINAIELFTVVEFPQSETNQDEVIAIKKIQLTYGLSRINWQGDPCVPEQFLWAGLKCSNINSSTPPTITFLNLSSSGLTGIISPSIQNLTHLQELDLSNNDLTGDVPEFLADIKSLLIINLSGNNFSGQLPQKLIDKKRLKLNVEGNPKLLCTKGPCGNKPGEGGHPKKSIIVPVVSSVALIAILIAALVLFLVLRKKNPSRSKENGRTSRSSEPPRITKKKKFTYVEVTEMTNNFRSVLGKGGFGMVYHGYVNGREQVAVKVLSHASKHGHKQFKAEVELLLRVHHKNLVSLVGYCEKGKELALVYEYMANGDLKEFFSGKRGDDVLRWETRLQIAVEAAQGPNEFVTLGLEYLHKGCRPPIVHRDVKTANILLDEHFQAKLADFGLSRSFLNEGESHVSTVVAGTIGYLDPEYYRTNWLTEKSDVYSFGVVLLEIITNQRVIERTREKPHIAEWVNLMITKGDIRKIVDPNLKGDYHSDSVWKFVELAMTCVNDSSATRPTMTQVVTELTECVTLENSRGGKSQNMGSTSSSEVTMTFDTEVNPVAR

SEQ ID NO: 33241 - protein, 519 aa, Medicago sativa
MDSLLKFPIMVNLKEEPFLMAIMVIVPLTLLLGLMSRILKRPRYPPGPKGLPIIGNMLMMDQLTHRGLANLAKKYGGIFHLRMGFLHMVAISDADAARQVLQVQDNIFSNRPATVAIKYLTYDRADMAFAHYGPFWRQMRKLCVMKLFSRKHAESWQSVRDEVDYAVRTVSDNIGNPVNIGELVFNLTKNIIYRAAFGSSSREGQDEFIGILQEFSKLFGAFNISDFVPCFGAIDPQGLNARLVKARKDLDSFIDKIIDEHVEKKKSVVDEETDMVDELLAFYSEEAKLNNESDDLHNSIKLTKDNIKAIIMDVMFGGTETVASAIEWVMAELMKSPEDLKKVQQELAEVVGLSRQVEEPDFEKLTYLKCALKETLRLHPPIPLLLHETAEEATVNGYFIPKQARVMINAWAIGRDANCWDEPESFKPSRFLKPGVPDFKGSNFEFIPFGSGRRSCPGMQLGLYALDLAVAHLLHCFTWELPDGMKPSEMDMSDVFGLTAPRASRLIAIPTKRVLCPLD

SEQ ID NO: 33242 - protein, 519 aa, Medicago sativa
MDSLLKYPIMENFKEEPFLMAIMFILPLILLLGLVSRILKRPRYPPGPKGLPVIGNMLMMDQLTHRGLANLAKKYGGIFHLRMGFLHMVAISDADAARQVLQVQDNIFSNRPATVAIKYLTYDRADMAFAHYGPFWRQMRKLCVMKLFSRKHAESWQSVRDEVDHAIRTVSDNIGNPVNIGELVFNLTKNIIYRAAFGSSSREGQDEFIGILQEFSKLFGAFNISDFVPCFGAIDPQGLNARLVKARKDLDSFIDKIIDEHVQKKKSVVDEETDMVDELLAFYSEEAKLNNESDDLHNSIKLTKDNIKAIIMDVMFGGTETVASAIEWAMAELMKSPEDLKKVQQELAEVVGLSRQVEEPDFEKLTYLKCALKETLRLHPPIPLLLHETAEEATVNGYFIPKQARVMINAWAIGRDANCWEEPESFKPSRFLKPGVPDFKGSNFEFIPFGSGRRSCPGMQLGLYALDLAVAHLLHCFTWELPDGMKPSEMDMSDVFGLTAPRASRLIAIPTKRVLCPLD

SEQ ID NO: 33243 - protein, 437 aa, Solanum tuberosum
MSTSGQQQFRYTQTPSKVLHLRNLPWDCSDEELVELCKPFGKIVNTKCNVGANRNQAFVEFADLNQAINMVSYYASSSEPAQVRGKTVYIQYSNRNEIVNNKSPGDVPGNVLLVTIEGVEAGDVSIDVIHLVFSAFGFVQKIATFEKAAGFQALIQFSDVGTASAAREALDGRSIPKYLLPEHVNHCHLRISYSAHTDLNIKFQSHRSRDYTNPYLPVNPTAMEGVLQPVVGPDGKKKEPESNVLFASLENMQYAVTVDVLNTVFSAFGTVQKIAIFEKNGQTQALIQYPDVTIAAAAKDALEGHCIYDGGYCKLHLSYSRHTDLNVQAYSDKSRDYTVPESSLLAMQQASAVHATPPVWHNPQSGPVQSSAGYATTGTVPGQAPPTWNPNLQGWRINLSIGSYWISWSFICSTSSCLCNCSASSWIVTADQSHFYW

SEQ ID NO: 33244 - protein, 126 aa, Xylella fastidiosa 9a5c
MQLSLLKAKIHRATVSHSELNYEGSIAIDGLLLEAAGLYEFEKVHIWNVTNGARFTTYAIRAEHGSGIISVNGGAARYVQVGDLVIVAAFAQMSEDEAAVFSPNLVYVDAANAMTHTNHSIPTQVA

SEQ ID NO: 33245 - protein, 480 aa, Xylella fastidiosa 9a5c
MSFLPSFLKRKSIDLITVHEEGRRLVPTLSWPHLIALGIGAIVGTGIYTLIGVGAEKAGPAILLSFVIAGVICACAALAYAEMATMMPVAGSTYTYSYVALGEGIAWIVGWSLILEYSLVVSTVAVGWSGYMSGFLKSVGVDMPLALTAGPYAGGIINLPAVVITCVVAGLLIVGTKESTTLNAVLVVVKIIALSVFVVIALPHFDMAHLKPFMPYGFTKSIDTGGVERGVMAAAAIIFFAFYGFDAISTAAEETKNPSRDLSIGIIGSMIGCTLIYVLVALAAIGAMHYTVFGPSTEPLALILRQLDQGNTARLIGAAAIIALPTVLLAFLYGQSRILFVMSRDGLLPRGLSTVNARTGTPIATTLFTAILVATAAGLVPLGEIAALANAGTLTAFIAVALCLLVLRVREPQRVRAFRTPLAWVVGPIAIAGCLYLFWSLPKMTQSLFLLWNALGLCVYLVYGRHTSLLSKAVSIDTPR

SEQ ID NO: 33246 - protein, 308 aa, Xylella fastidiosa 9a5c
MSLDSALRSRIETLLHSNRVVLFMKGRPGMPQCGFSAKAAGILQALGVEYAHVNVLDDQEIREGIKRYGDWPTIPQLYIDGELIGGSDIVSQMYENGELSALLGVAAPDLTPPSITITPTAVEMLKSTLANAPGSALALSIDSRFQPTFELTPINTQAIAAESNGLRVQFDLASARRAEGITIDWVDDIRGQGLVIDNPNAPQPIQELSPGDAAAQVGAGALTLVDVRPADERAIASVAVPFRTMDGGERAALEQLPKETPLAFLCHHGGRSLQAAEHFRSLGFTSIYNIGGGIDAWSIQVDASVPKY

SEQ ID NO: 33247 - protein, 424 aa, Xylella fastidiosa 9a5c
MSNSPQTPLATRQRLSEVRYEIRGELARRARELEAEGRKLIKLNIGNPGAFGFRAPEHLQRAIADDMGRTDPYTHQQGLPIAREAIAAAYVRRHYPDADADRVFVGNGVSELIDLSLRALLNPGDEVLVPSPDYPLWSAATILNDGRPVYYRCAPENGFQPDAVEIETLVSSRTRAIVLINPNNPSGANYSQELLERIVAIAVKHHLLLLVDEIYDQILYDGAVFVPVAPLAGTHPCITFSGLSKVHRACGWRVGWALLSGSSIQIDNLRNAMDLLGALRLCANVPGQYAIDAAVNGPDTITPLCSPGGPLYETRRAVIEACVVSEHLSLVVPAGALYAFPSVVGPAARHFDDYAFALELMNDEGVLVVPGSSFNVPYRDHFRVTLLPDAALIREVFSRIDRALSRRAEVAEKVVPLKSRSAAA

SEQ ID NO: 33248 - protein, 357 aa, Xylella fastidiosa 9a5c
MKFVDEAEIQVIAGNGGDGCVSFRREKFIPLGGPDGGDGGDGGSVWLVADENLNTLVDFRHERIFKAQRGVNGMGQQMYGKAGQDKIISVPIGTVVINVQTDEVIGDMVRHGDRLLVAKGGTGGLGNMHFKSSINRAPRQARPGEQGEERTLKLELKLLADIGMLGFPNVGKSTFIRAVSAATPKVADYPFTTLYPNLGVVKIEAYSSFVIADVPGLIEGAADGVGLGTQFLRHLQRTKLLLHMVDISATADAYGNEKVGVGLLPIEQVRKLEIELERHDPALLDKPRWLVLNKADLMPQEEAQALAEALIAELHWTAPWYLVSAVSREGTWPIMKSAMTLFEHQREVAAEQSVSSR

SEQ ID NO: 33249 - protein, 424 aa, Xylella fastidiosa Temecula1
MSNSPQTPLVTRQRLSEVRYEIRGELARRARELEAEGRKLIKLNIGNPGAFGFRAPEHLQRAIADDMGRTDPYTHQQGLPIAREAIAAAYARRHYPDVDADRVFVGNGVSELIDLSLRALLNPGDEVLVPSPDYPLWSAATILNDGRPVYYRCAPENGFQPDAVEIETLVSSRTRAIVLINPNNPSGANYSQELLERIVAISVKHHLLLLVDEIYDQILYDGAVFVPVAPLAGTHPCITFSGLSKVHRACGWRVGWALLSGSSIQVDNLRNAMDLLGALRLCANVPGQYAIDAAVNGPDTITPLCSPGGPLYETRRAVIDACAASEHLSLVVPAGALYAFPSVVGPAARHFDDYAFALELMNEEGVLVVPGSSFNVPYRDHFRVTLLPDAGLIREVFSRIDRALSRRAEVAEKVVPLKSRSAAA

SEQ ID NO: 33250 - protein, 764 aa, Xanthomonas campestris pv. campestris str. ATCC 33913
MILATDLDGTFLAGSAEHRHQLYRLVDQHPEIRLIFITGRGLEAVMPLLTDPTIPRPDYVVCDVGATVVDGHTLQPLQPLQSMIDAHWPGEQVVAQAMRAFPQLQRQDMPQERRCSYFCDPHTLAPLRAQIEQTARALGCDVLYSADRYLDILPPDTDKGRTLGALARQLELPRERILVAGDTLNDLSMYLAGFRGVCVGDSEAALTQATAQLDATYHASAPGCGGILEAIAHFGLLADDDPHVPAVQAPRKGGAELVMVYHRLPYDEVVEHGELVRRAPRSPNGIIPSLLSFFEGGQRGSWVAWSVDDPKRGPFQTHTEVDAQRYPTLTAARVPLSKSEVDIFYKRFSKEAFWPMLHVFWERARFREDDWQVFLAVNRKFAQATSAEAAHGATVWIHDYNLWMVPAYLRELRPDLKIAFFHHTYFPSADVFNVVPWRREIIGSLMCCDYVGFHIPRQVENFVDVVRGVMPVERLAQESCAPRFLTYGCAVGLDTMTTCLRVADRDVALGAHPVGTDLRRIRAALSKPDVRNDIFKLRREIGARKLVLSVERLDYTKGTLAKLEAFERLLDSQRQLLGKVTLLMVCVPAAREMTIYRTLQTQIEQAVGRINGRFSRLDWTPVRFFAQALPFEQVVAHYAAAQVMWITPLRDGLNLVAKEFVAVQGIEGGSGVLVLSEFAGAAAELKGAVLTNPHDPADLAAGLLQALAMPDDEAAGRLRQLYDSVEYYNIDHWGRDFLDAVARSRGAHARVPLAAASTVAEPVA

SEQ ID NO: 33251 - protein, 769 aa, Xanthomonas campestris pv. campestris str. ATCC 33913
MSNDDFKQAALDYHRQQPAGKIKVTATKPMLTQRDLSLAYSPGVAFACEAIVEDATQASELTARGNLVAVITNGTAVLGLGNIGPLASKPVMEGKGVLFQKFAGIDVFDIEINENDPDKLVDIIASLEPTFGGINLEDIKAPECFIVERKLRERMNIPVFHDDQHGTAIIVGAAVLNALVVTGKKIEDVKLATTGMGAAGISCVNMLVSLGLKSENILALDRDGVIHTGRTDLDPDKQRYARDTDKRTLAEIVEGADIFLGLSAAGILKPEMVATMARQPVIFALANPNPEITPEAAKAVRPDCIIGTGRSDYPNQINNVLCFPYLFRGALDVGATGINEDMKIACVKAIAAMARREASDLGAAYGGETPSFGPEYLIPRPLDPRLLVELSSAVAQAAMDSGVATRPIADMAAYRDRLSQFVYRTSLMMKPVYDRARADKQRVVYAEGEEEVVLRAVQNVIDEGLALPILIGRPDVIEARIQRMGLRIRAGEDFEITNIHDDPRFNDYWQYYYALTERRGVTVTAAKELMRSRPTLIAAVMVARGEADAMLSGVVGRFHKKLGYARSVIPLEPRVSSTSAMTGVINQQGMFFFLDTHVQEDPTVEQVVEATLQAAYRLKLFGIEPNIALLSHSNFGSHDSRDALKMREVREALLKRKPELNIDGEMQGDTAWDEALRKQIMPNSTLKGRANLFVLPNLEAANIAYNLVRVFTDGVAIGPILMGISKPVHILTTSATSRRVMNMTAIAAVDAQIRKQRDAEKHNAEKNGG

SEQ ID NO: 33252 - protein, 308 aa, Xanthomonas campestris pv. campestris str. ATCC 33913
MSLDPALRSRIDTLLQSNRVVLFMKGQPGMPQCGFSAKAIGVLDGLGIDYAHVNVLADQEIREGIKAYGDWPTIPQLYVDGELIGGSDIIVQMADSGELSSMLGLQAPDRSPPKITITPAAVEMLKGALADAPDASLTLAIDANFQPNFQLAPTNPNAIAAESNGLRVQFDLASARRADGITIDWVDDIRGRGLAIDNPNAPKPVQELAVRDADDRLKAGTLTVVDVRPADERALATVAAPFRTLDAHERLEIEQLPKDTPLAFLCHRGGRSLQAAEHFRGLGFTNVYNVTGGIDAWSDAVDNGVPKY

SEQ ID NO: 33253 - protein, 196 aa, Xanthomonas axonopodis pv. citri str. 306
MSDSLNAAALDQLFRTARTQNAFADTPVSHEVLRELYELVKWGPTAANSCPARFVFVTSAEGKAKLKPALSEGNAAKTLAAPVTVIVAHDEDFHEKLPYLFPHADAKSWFDGPREGRTESAFRNGSLQGAYLILAARALGLDAGPMSGFDNAKVDAAFFAGTPIKSNFLVNLGYGDPAGLFPRSPRLSFDEAARFE

SEQ ID NO: 33254 - protein, 458 aa, Xanthomonas axonopodis pv. citri str. 306
MSDPSAPDHLQRSLSNRHLQLIAIGGAIGTGLFMGSGKTISLAGPSILFVYLIIGAMLFFVMRAMGELLLSNLEYKSFIDFSTDLLGPWAGFFCGWTYWFCWIITAIADVIAIAAYAQFWFPGLAPWIPAILCVLLLLGLNLVTVKLFGEMEFWFALIKIIAIAALIVTGAGLVVWGFRSPSGNVASLSNLWNDGGMFPMGIGGFFAGFQIAVFAFVGIELVGTTAAETADPRRNLPKAINSIPVRILIFYVLALIAIMAVTPWRQVVADKSPFVELFVLAGVPAAASLINFVVLTSATSSANSGIFSTSRMLYGLAEEQHAPKGFAKLSRAAIPARGLLFSCLCLLLGAMLVYLIPNLVTAFTLVTTLSAVLFMFVWSLILCAYIAYRRKRPEQHAASAFKMPGGVLMCYVCLAFFAFVIVLLTLQDDTRQALLASPVWFLLLAIGYAVKRRGNRQR

SEQ ID NO: 33255 - protein, 769 aa, Xanthomonas axonopodis pv. citri str. 306
MSTDDFKQAALDYHRQQPAGKIKVTATKPMLTQRDLSLAYSPGVAFACEAIVEDATQASELTARGNLVAVITNGTAVLGLGNIGPLASKPVMEGKGVLFQKFAGIDVFDIEINENDPDKLVDIIASLEPTFGGINLEDIKAPECFIVERKLRERMNIPVFHDDQHGTAIIVGAAVLNALVVTGKKIEEVKLATTGMGAAGISCVNMLVSLGLKPENILALDRDGVIHTGRTDLDPDKQRYARDTDKRTLAEIVEGADIFLGLSAAGILKPEMVASMARQPVIFALANPNPEITPEAAKAVRPDCIIGTGRSDYPNQINNVLCFPYLFRGALDVGATGINEEMKIACVKAIAAMARREASDLGAAYGGETPSFGPEYLIPRPLDPRLLVELSSAVAQAAMDSGVATRPITDMEAYRDKLGQFVYRTSLMMKPVYDRARADKQRVVYAEGEEEVVLRAVQNVVDEGLAFPILIGRPDVIEARIERMGLRLTAGVDFEITNILDDPRFNDYWQYYHALTERRGVTVTAAKELMRSRPTLIAAVMVARGEADAMLSGVVGRFHKKLGYARSVIPLEPRVSSTSAMTGVINQLGVFFFLDTHVQEDPTVEQVVEATLQAAYRLKLFGIEPNIALLSHSNFGSHDSRDALKMRQVREALLKRKPELNIDGEMQGDTAWDEALRKQIMPNSTLKGRANLFVLPNLEAANIAYNLVRVFTDGVAIGPILMGISKPVHILTTSATSRRVMNMTAIAAVDAQIRRQRDAEKAAADKGND

SEQ ID NO: 33256 - protein, 308 aa, Xanthomonas axonopodis pv. citri str. 306
MSLDPALRSRIDTLLQSSRVVLFMKGQPGMPQCGFSAKAVGVLDGLGIDYAHVNVLADQEIREGIKAYGDWPTIPQLYVDGELIGGSDIIVQMADSGELSSMLGLQAPDRSPPKITITPAAVEMLKGALADAPDASLTLAIDANFQPNFQLAPTNPNAIAAESNGLRVQFDLASARRADGITIDWVDDIRGRGLAIDNPNAPKPVQELSVRDADDRLKAGSLTLVDVRPADERALATVAAPFRTLDAHERAAIEQLPKDTPLAFLCHRGGRSLQAAEHFRGLGFTNVYNVTGGIDAWSDEVDNGVAKY

SEQ ID NO: 33257 - protein, 769 aa, Xanthomonas campestris pv. campestris str. 8004
MSNDDFKQAALDYHRQQPAGKIKVTATKPMLTQRDLSLAYSPGVAFACEAIVEDATQASELTARGNLVAVITNGTAVLGLGNIGPLASKPVMEGKGVLFQKFAGIDVFDIEINENDPDKLVDIIASLEPTFGGINLEDIKAPECFIVERKLRERMNIPVFHDDQHGTAIIVGAAVLNALVVTGKKIEDVKLATTGMGAAGISCVNMLVSLGLKSENILALDRDGVIHTGRTDLDPDKQRYARDTDKRTLAEIVEGADIFLGLSAAGILKPEMVATMARQPVIFALANPNPEITPEAAKAVRPDCIIGTGRSDYPNQINNVLCFPYLFRGALDVGATGINEDMKIACVKAIAAMARREASDLGAAYGGETPSFGPEYLIPRPLDPRLLVELSSAVAQAAMDSGVATRPIADMAAYRDRLSQFVYRTSLMMKPVYDRARADKQRVVYAEGEEEVVLRAVQNVIDEGLALPILIGRPDVIEARIQRMGLRIRAGEDFEITNIHDDPRFNDYWQYYYALTERRGVTVTAAKELMRSRPTLIAAVMVARGEADAMLSGVVGRFHKKLGYARSVIPLEPRVSSTSAMTGVINQQGVFFFLDTHVQEDPTVEQVVEATLQAAYRLKLFGIEPNIALLSHSNFGSHDSRDALKMREVREALLKRKPELNIDGEMQGDTAWDEALRKQIMPNSTLKGRANLFVLPNLEAANIAYNLVRVFTDGVAIGPILMGISKPVHILTTSATSRRVMNMTAIAAVDAQIRKQRDAEKHNAEKNGG

SEQ ID NO: 33258 - protein, 473 aa, Pseudomonas aeruginosa
MAAKVLLVEDDRALREALSDTLLLGGHEFVAVDSAEAALPVLAREAFSLVISDVNMPGMDGHQLLGLIRTRYPHLPVLLMTAYGAVDRAVEAMRQGAADYLVKPFEARALLDLVARHALGQLPACEEDGPVALEPASRQLLELAARVARSDSTVLISGESGTGKEVLANYIHQQSPRAGKPFIAINCAAIPDNMLEATLFGHEKGSFTGAIAAQPGKFELADGGTILLDEISEMPLGLQAKLLRVLQEREVERVGARKPINLDIRVLATTNRDLAAEVAAGRFREDLYYRLSVFPLAWRPLRERPADILPLAERLLRKHSRKMNLGAVALGPEAAQCLVRHAWPGNVRELDNAIQRALILQQGGLIQPADLCLTAPIGMPLAAPVPVPMPAMPPATPPSVEIPSPAAGQDASGALGDDLRRREFQVIIDTLRTERGRRKEAAERLGISPRTLRYKLAQMRDAGMDVEAYLYAI

SEQ ID NO: 33259 - protein, 161 aa, Lotus japonicus
MSTLGSTCFTEEQEALVVKSWSVMKKNSAELGLKLFLKIFEIAPSAQKLFSFLRDSKVPLEENPKLKPHAMSVFVMTCESAAQLRKAGKVTVRESTLKKLGATHYKYGVVNEHFEVTKFALLDTIKEAVPEMWSPEMKNAWTQAYDQLVGAIKSEMKPSSS

SEQ ID NO: 33260 - protein, 161 aa, Lotus japonicus
MAENTTTIAFTEEQEALVVKSWNAMKKDSAELSFKFFSKILEIAPPAKQLFSFLRDSEVPLDQNPKLKPHAMSVFLMTCESAAQLRKEGKVTVRESNLKKLGATHFKKGVIPEHFEVTKQALLDTIKEAVPELWSLELKDAWAIAHDQLASAIIAEMKPES

SEQ ID NO: 33261 - protein, 339 aa, Burkholderia gladioli
MSDYRIALNFEDGVTRFIECKAGEKVLDAAFRARINLPMDCSDGVCGTCKCRAESGRYELGDDYIEEALSEDEKDQGLVLTCQMVPQSDCVIAVPASSQVCKTGQGGFAATVSKVEPHEDAAIVLELEADASAPVFLPGQYVNIEVPGSGQHRAYSFSSAPGDTRLAFLIKKIPGGVMSRWLEAARPGDTLQMHGPLGSFYLRELRRPLLFLAGGTGLAPFLSMLEVLARAPTLRVHLIYGVTRDLDLVQVEAIEAYAARLPNFSFATVVADAASTHPRKGWVTQHIPADALNDGEVDVYLCGPPPMVDAVRRYFDETGVKPRSFHYEKFTPNSKAKAA

SEQ ID NO: 33262 - protein, 340 aa, Burkholderia cepacia
MSSYKIALNFEDGVTRFIDCKAGEKVLDAAFRAKINLPMDCSDGVCGTCKCRAESGRYDLGDDYIDDALTEDEKDGGLVLTCQMVPQSDCVIAVPTSSVACKTGQSGFAATVTKVEQHNDAAVVLELDVGAAARVFLPGQYVNIDVPASGQHRSYSFSSAPADAKVSFLIKKIPGGVMSTWLESAQPGDTLELHGPLGSFYLRDVQRPLLFLAGGTGLAPFLSMLEVLARSGSQQRVHLIYGVTRDLDLVLVDAIEAYAAKLPNFSFATVVADAASNHPRKGWVTQHIPADALNDGDVDVYLCGPPPMVDAVRKYFDDEGVKPNSFHYEKFTPNVTAKAA

SEQ ID NO: 33263 - protein, 447 aa, Fagopyrum esculentum
MPTSLLFLLFLLLQAASAAAATFPLSISPSALDKWESINLAALSSLSRARHLKRPPTLTGKVTLPAYPRSYGGYSVIFSLGTPPQKVSLVLDTGSSLVWTPCTIPTATYTCQNCTFSGVDPTKIPIYARNKSSTVQSLPCRSPKCNWVFGSDLNCSTTKRCPYYGLEYGLGSTTGQLVSDVLGLSKLNRIPDFLFGCSLVSNRQPEGIAGFGRGLASIPAQLGLTKFSYCLVSHRFDDTPQSGDLVLHRGRRHADAAANGVAYAPFTKSPALSPYSEYYYISLSKILVGGKDVPIPPRYLVPSKEGDGGMIVDSGSTFTFMERIIFDPVARELEKHMTKYKRAKEIEDSSGLGPCYNITGQSEVDVPKLTFSFKGGANMDLPLTDYFSLVTDGVVCMTVLTDPDEPGSTTGPAIILGNYQQQNFYIEYDLKKQRFGFKPQQCDRSKN

SEQ ID NO: 33264 - protein, 248 aa, Arabidopsis thaliana
MEGSSKGLRKGAWTTEEDSLLRQCINKYGEGKWHQVPVRAGLNRCRKSCRLRWLNYLKPNIKRGKLSSDEVDLLLRLHRLLGNRWSLIAGRLPGRTANDVKNYWNTHLSKKHEPCCKIKMKKRDITPIPTTPALKTNVYKPRPRSFSGNNDCNHLNAPPKVDVNPPCLGLNTNNVCDNNIIYNKDKKKDQLVNNLIDGDNMWLEKFLEESQEVDMLVPETTTTEKGDTLAFDVDQLWSLFDGETVKFD

SEQ ID NO: 33265 - protein, 248 aa, Arabidopsis thaliana
MEGSSKGLRKGAWTTEEDSLLRQCINKYGEGKWHQVHVRAGLNRCRKSCRLRWLNYLKPSIKRGKLSSDEVDLLLRLHRLLGNRWSLIAGRLPGRTANDVKNYWNTHLSKKHEPCCKIKMKKRDITPIPTTPALKNNVYKPRPRSFTVNNDCNHLNAPPNVDVNPPCLGLNINNVCDNSIIYNKDKKKDQLVNNLIDGDNMWLEKFLEESQEVDILVPEATTTEKGDTLAFDVDQLWSLFDGETVKFD

SEQ ID NO: 33266 - protein, 248 aa, Arabidopsis thaliana
MEGSSKGLRKGAWTTEEDSLLRQCINKYGEGKWHQVPVRAGLNRCRKSCRLRWLNYLKPNIKRGKLSSDEVDLLLRLHRLLGNRWSLIAGRLPGRTANDVKNYWNTHLSKKHEPCCKIKMKKRDITPIPTTPALKTNVYKPRPRSFSVNNDCNHLNAPPKVDVNPPRLGLNTNNVCDNNIIYNKDKKKDQLVNNLIDGDNMWLEKFLEESQEVDMLVPETTTTEKGDTLAFDVDQLWSLFDGETVKFD

SEQ ID NO: 33267 - protein, 579 aa, Glycine max
MCGILAVLGCSDSSQAKRVRVLELSRRLKHRGPDWSGLHQYGDNYLAHQRLAIVDPASGDQPLFNEDKTVVVTVNGEIYNHEELRKQLPNHTFRTGSDCDVIAHLYEEHGENFVDMLDGIFSFVLLDTRDNSFIVARDAIGVTSLYIGWGLDGSVWISSELKGLNDDCEHFESFPPGHLYSSKERAFRRWYNPPWFSEAIPSAPYDPLALRHAFEKAVVKRLMTDVPFGVLLSGGLDSSLVAAVTARYLAGTNAAKQWGTKLHSFCVGLEGAPDLKAAKEVADYIGTVHHEFHYTVQDGIDAIEDVIYHIETYDVTTIRASIPMFLMSRKIKSLGVKWVISGEGSDEIFGGYLYFHKAPNKEEFHQETCRKIKALHKYDCLRANKSTFAWGLEARVPFLDKDFIRVAMNIDPEYKMIKKEEGRIEKWALRRAFDDEEHPYLPKHILYRQKEQFSDGVGYGWIDGLKAHAEKHVTDRMMLNAANIFPFNTPTTKEAYHYRMIFERFFPQNSARLSVPGGPSVACSTAKAVEWDAAWSNNLDPSGRAALGVHASAYGNQVKAVEPEKIIPKMEVSPLGVAI

SEQ ID NO: 33268 - protein, 1130 aa, Hordeum vulgare subsp. vulgare
MSSSRPATSSSSRNRQSTQERMLAQTTLDAELNAEFEESSDSFDYSKLVEAQRDTPTVLQEGRSEKVIAYLQHIQRGKMIQSFGCLLALDEKSFNLIAFSENAPEMLTTVSHAVPSVDDPPRLDIGTNVRSLFTEQGATALHKALGFADVSLLNPILVQCKTSGKPFYAIVHRATGCLVVDFEPVNPTEFPATAAGALQSYKLAAKAISKIQALPGGSMELLCNTVVKEVFELTGYDRVMAYKFHEDNHGEVFAEITKPGLEPYLGLHYPATDIPQAARFLFMKNKVRMICDVRARTLKVIEDEALPFDISLCGSSLRAAHSCHLQYMENMNSIASLVMAVVVNESEEDDEAESEQPAQQQKKKILWGLVVCHHESPRYVPFPLRYACEFLAQVFAVHVNKEFEVQKQLREKSILRMQTILSDMLFKEASPLTIVSGTPNIMDLIKCDGAALLYGDKVWRLGNAPTESQIRHIALWLSEVHMDSTGLSTESLHDAGYPGASALGDMVCGIAVAKINSNDILFWFRSHTAEEIRWGGAKNDPSDQDDSRRMHPRLSFKAFLEVVKMKSLAWSDYEMDAIHSLQLILRGALDDVAKPTGKASLDEQIGDLKLDGIAELQAVTSEMVRLMETATVPILAVDGNGLVNGWNQKAAELTGLRVDDAIGRHILTLVEESSVPVVQRMLYLALQGKEEKEVRFDMKTHGPKRDDGPVILVVNACASRDLHDDVVGVCFVAQDMTVHKLVMDKFTRVKGDYMAIVHNPNPLIPPIFGADEFGWCSEWNAAMTKLTGWHREEVLDKMLLGEVFDSSNASCLLKNKDAFVGLCVLINSALAGEETEKAPFGFFDRSGKYTECLLSVNSRANEDGLITGVFCFIHIPSHELQQALQVQQASEQASLRRLKAFSYMRHAINNPLSGMLYSRKALKNTDLNEEQMRQIHVSDNCHHQLNKILADLDQDNIMENSSCLDLEMAEFVLQDVVVAAVSQVLIACQGKGIRISCNLPERFMKQLVYGDGVRLQQILSDFLSISVKFSPVGGSVEISAQATKNSIGENLHLIDLELRIKHRGLGVPAELMAQMFEEENTEQSEEGLGLLVSRNLLRLMNGDVRHLREAGMSIFILTAELACAPTAMRQ

SEQ ID NO: 33269 - protein, 1130 aa, Hordeum vulgare subsp. vulgare
MSSSRPATSSSSRNRQSTQERVLAQTTLDAELNAEFEESSDSFDYSKLVEAQRDTPTVLQEGRSEKVIAYLQHIQRGKMIQSFGCLLALDEKSFNVIAFSENAPEMLTTVSHAVPSVDDPPRLDIGTNVRSLFTEQGATALHKALGFADVSLLNPILVQCKTSGKPFYAIVHRATGCLVVDFEPVNPTEFPATAAGALQSYKLAAKAISKIQALPGGSMELLCNTVVKEVFELTGYDRVMAYKFHEDNHGEVFAEITKPGLEPYLGLHYPATDIPQAARFLFMKNKVRMICDVRARTLKVIEDEALPFDISLCGSSLRAAHSCHLQYMENMNSIASLVMAVVVNESEEDDEAESEQPAQQQKKKILWGLVVCHHESPRYVPFPLRYACEFLAQVFAVHVNKEFEVQKQLREKSILRMQTILSDMLFKEASPLTIVSGTPNIMDLIKCDGAALLYGDKVWRLGNAPTESQIRHIALWLSEVHMDSTGLSTESLHDAGYPGASALGDMVCGIAVAKINSNDILFWFRSHTAEEIRWGGAKNDPSDQDDSRRMHPRLSFKAFLEVVKMKSLAWSDYEMDAIHSLQLILRGALDDVAKPTGKASLDEQIGDLKLDGIAELQAVTSEMVRLMETATVPILAVDGNGLVNGWNQKAAELTGLRVDDAIGRHILTLVEESSVPVVQRMLYLALQGKEEKEVRFDMKTHGPKRDDGPVILVVNACASRDLHDDVVGVCFVAQDMTVHKLVMDKFTRVKGDYMAIVHNPNPLIPPIFGADEFGWCSEWNAAMTKLTGWHREEVLDKMLLGEVFDSSNASCLLKNKDAFVGLCVLINSALAGEETEKAPFGFFDRSGKYTECLLSVNSRANEDGLITGVFCFIHIPSHELQQALQVQQASEQASLRRLKAFSYMRHAINNPLSGMLYSRKALKNTDLNEEQMRQIHVSDNCHHQLNKILADLDQDNIMENSSCLDLEMAEFVLQDVVVAAVSQVLIACQGKGIRISCNLPERFMKQLVYGDGIRLQQILSDFLSISVKFSPVGGSVEISAQATKNSIGENLHLIDLELRIKHRGLGVPAELMAQMFEEENTEQSEEGLGLLVSRNLLRLMNGDVRHLREAGMSIFILTAELACAPTAMRQ

SEQ ID NO: 33270 - protein, 814 aa, Hordeum vulgare subsp. vulgare
AVAQYTLDAGLHAVFEQSGASGRSFDYSQSLLAPPTPSSEQQIAAYLSRIQRGGHIQPFGCTLAVADDSSFRLLAFSENAADLLDLSPHHSVPSLDSSAAPPPVSLGADARLLFSPSSGVLLERAFAAREISLLNPLWIHSRVSSKPFYAILHRIDVGVVIDLEPARTEDPALSIAGAVQSQKLAVRAISRLQALPGGDVKLLCDTVVEHVRELTGYDRVMVYKFHDDEHGEVLAESRRGDLEPYLGLHYPATDIPQASRFLFRQNRVRMIADCHAAAVRVIQDPAMPQPLCLVGSTLRSPHGCHAQYMANMGSIASLVMAVIISSGGEDEHNMTRGVIPSAMKLWGLVVCHHTSPRCIPFPLRYACEFLMQAFGLQLNMELQLAHQLSEKHILRTQTLLCDMLLRDSPTGIVTQSPSIMDLVKCDGAALFYHGKYYPLGVTPTEAQIKDIIEWLTVCHGDSTGLSTDSLADAGYPGATALGDAVCGMAVAYITPSDYLFWFRSHTAKEIKWGGAKHHPEDKDDGQRMHPRSSFKAFLEVVKSRSLPWENAEMDAIHSLQLILRDSFRDAGEGTSNSKAIVNGQVQLGELELRGIDELSSVAREMVRLIETATVPIFAVDTYGCINGWNAKVAELTGLTVEEAMGKSLIKDLIFKESEEIVEKLLSQALRGEEGTNVEIKLKTFGSEQSKGPIFVIVNACSSRDYTKNIVGVCFVGQDITGQKVVMDKFVNIQGDYKAIVHNPNPLIPPIFASDENICCSEWNTAMENLTGWSRGEVVGKLLVGEVFGNCCRLKGPDALTKFMIALHNAIGGQD

SEQ ID NO: 33271 - protein, 1139 aa, Hordeum vulgare subsp. vulgare
MSSSRSNSRSACSRGSSARSRHSERVVAQTPVDAQLHAEFESSHRHFDYSSSVSALNRSGASTSSAVSAFLQNMQRGRYIQPFGCLLAIHPESFALLAYSENAAEMLDLTPHAVPTIDQRDALAVGADVRTLFRSQSAVALHKAAVFGEVNLLNPILVHARTSGKPFYAILHRIDVGLVIDLEPVNPADVPVTAAGALKSYKLAAKAISRLQSLPSGNLSLLCDVLVREVSELTGYDRVMAYKFHEDEHGEVIAECRRSDLEPYLGLHYPATDIPQASRFLFMKNKVRMICDCAASPVKLIHDGNLSQPISLCGSTMRAPHGCHAQYMANMGSIASLVMSVTVNEDDDEDGDTGSDQQPKGRKLWGLVVCHHTSPRFVPFPLRYACEFLLQVFGIQLNKEVELASQAKERHILRTQTLLCDMLLRDAPVGIFTQSPNVMDLVKCDGAALCYQNQIMVLGSAPSEGEIKKIAAWLLECHDGSTGLSTDSLLEAGYPGASALGEVVCGMAAIKISSKGFIFWFRSHTAKEIKWSGAKHEPGDADDNGRRMHPRSSFRAFLEVVKWRSVPWEDVEMDAIHSLQLILRGSLQDEDANDNNVRSIVEAPSDDVRKIQGLLELRIVTNEMVRLIETATAPILAVDIVGSINGWNGKVAEITGLPTTEAIGMLLVDLVEGDSVEVIKQMLNSAMQGTEEQNFEIKLKTFHQQESNGPVVLMVNACCSRDLSDKVVGVCFVAQDLTGHKMVMDKYTQIQGDYVAIVKNPNELIPPIFMINDLGSCLEWNEAMQKITGIKREDAIDKLLIGEVFTLHDYGCRVKDQATITKLSILMNTVISGQEPEKLAFGFFSTDGKYMESLLTANKRTDAEGKITGALCFLHVPSPELQHALQVQKMSEQAAARSFKELTYIRQELKNPLNGMQFTRKLLEPSDLTEEQRQLFASNVLCQEQLKKILHDNDLEGIEQCYMEMNTVEFNLEEALNTVLMQGMSLSKEKQISLDRDWPVEVSSMYLYGDNLRLQQVLADYLACTLQFTRPAEGPIVLQVIPKKEHIGSGMRIAHLEFRVVHPAPGVPEALIQEMFRHGPGVSREGLGLHISQKLVKTMSGTVQYLREAESSSFIVLVEFPVAQLNSKRSKPSTSKSNF

SEQ ID NO: 33272 - protein, 1139 aa, Hordeum vulgare subsp. vulgare
MSSSRSNSRSACSRGSSARSRHSERVVAQTPVDAQLHAEFESSHRHFDYSSSVSALNRSGASTSSAVSAFLQNMQRGRYIQPFGCLLAIHPESFALLAYSENAAEMLDLTPHAVPTIDQRDALAVGADVRTLFRSQSAVALHKAAVFGEVNLLNPILVHARTSGKPFYAILHRIDVGLVIDLEPVNPADVPVTAAGALKSYKLAAKAISRLQSLPSGNLSLLCDVLVREVSELTGYDRVMAYKFHEDEHGEVIAECRRSDLEPYLGLHYPATDIPQASRFLFMKNKVRMICDCAASPVKLIQDGNLSQPISLCGSTMRAPHGCHAQYMANMGSIASLVMSVTVNEDDDEDGDTGSDQQPKGRKLWGLVVCHHTSPRFVPFPLRYACEFLLQVFGIQLNKEVELASQAKERHILRTQTLLCDMLLRDAPVGIFTQSPNVMDLVKCDGAALCYQNQIMVLGSAPSEGEIKKIAAWLLECHDGSTGLSTDSLLEAGYPGASALGEVVCGMAAIKISSKGFIFWFRSHTAKEIKWSGAKHEPGDADDNGRRMHPRSSFRAFLEVVKWRSVPWEDVEMDAIHSLQLILRGSLQDEDANDNNVRSIVEAPSDDVRKIQGLLELRIVTNEMVRLIETATAPILAVDIVGSINGWNGKVAEITGLPTTEAIGMLLVDLVEGDSVEVIKQMLNSAMQGTEEQNFEIKLKTFHQQESNGPVVLMVNACCSRDLSDKVVGVCFVAQDLTGHKMVMDKYTQIQGDYVAIVKNPNELIPPIFMINDLGSCLEWNEAMQKITGIKREDAIDKLLIGEVFTLHDYGCRVKDQATITKLSILMNTVISGQEPEKLAFGFFSTDGKYMESLLTANKRTDAEGKITGALCFLHVPSPELQHALQVQKMSEQAAARSFKELTYIRQELKNPLNGMQFTRKLLEPSDLTEEQRQLFASNVLCQEQLKKILHDNDLEGIEQCYMEMNTVEFNLEEALNTVLMQGMSLSKEKQISLDRDWPVEVSSMYLYGDNLRLQQVLADYLACTLQFTRPAEGPIVLQVIPKKEHIGSGMQIAHLEFRVVHPAPGVPEALIQEMFRHGPGVSREGLGLHISQKLVKTMSGTVQYLREAESSSFIVLVEFPVAQLNSKRSKPSTSKSNF

SEQ ID NO: 33273 - protein, 695 aa, Hordeum vulgare subsp. vulgare
SGTPNIMDLIKCDGAALLYGDKVWRLGNAPTESQIRHIALWLSEVHMDSTGLSTESLHDAGYPGASALGDMVCGIAVAKINSNDILFWFRSHTAEEIRWGGAKNDPSDQDDSRRMHPRLSFKAFLEVVKMKSLAWSDYEMDAIHSLQLILRGALDDVAKPTGKASLDEQIGDLKLDGIAELQAVTSEMVRLMETATVPILAVDGNGLVNGWNQKAAELTGLRVDDAIGRHILTLVEESSVPVVQRMLYLALQGKEEKEVRFDMKTHGPKRDDGPVILVVNACASRDLHDDVVGVCFVAQDMTVHKLVMDKFTRVKGDYMAIVHNPNPLIPPIFGADEFGWCSEWNAAMTKLTGWHREEVLDKMLLGEVFDSSNASCLLKNKDAFVGLCVLINSALAGEETEKAPFGFFDRSGKYTECLLSVNSRANEDGLITGVFCFIHIPSHELQQALQVQQASEQASLRRLKAFSYMRHAINNPLSGMLYSRKALKNTDLNEEQMRQIHVSDNCHHQLNKILADLDQDNIMENSSCLDLEMAEFVLQDVVVAAVSQVLIACQGKGIRISCNLPERFMKQLVYGDGVRLQQILSDFLSISVKFSPVGGSVEISAQATKNSIGENLHLIDLELRIKHRGLGVPAELMAQMFEEENTEQSEEGLGLLVSRNLLRLMNGDVRHLREAGMSIFILTAELACAPTAMRQ

SEQ ID NO: 33274 - protein, 753 aa, Hordeum vulgare subsp. spontaneum
IPFPLRYACEFLMQAFGLQLNMELQLAHQLSEKHILRTQTLLCDMLLRDSPTGIVTQSPSIMDLVKCDGAALFYHGKYYPLGVTPTEAQIKDIIEWLTVCHGDSTGLSTDSLADAGYPGATALGDAVCGMAVAYITPSDYLFWFRSHTAKEIKWGGAKHHPEDKDDGQRMHPRSSFKAFLEVVKSRSLPWENAEMDAIHSLQLILRDSFRDAGEGTSNSKAIVNGQVQLGELELRGIDELSSVAREMVRLIETATVPIFAVDTYGCINGWNAKVAELTGLTVEEAMGKSLIKDLIFKESEEIVEKLLSQALRGEEGTNVEIKLKTFGSEQSKGPIFVIVNACSSRDYTKNIVGVCFVGQDITGQKVVMDKFVNIQGDYKAIVHNPNPLIPPIFASDENICCSEWNTAMENLTGWSRGEVVGKLLVGEVFGNCCRLKGPDALTKFMIALHNAIGGQDSEKSPFSFFDKNGKYVQALLTANTRSKMDGETIGAFCFLQIASPELQQAFEIQRQQEKKCYARMKELAYICQEIKNPLSGIRFTNSLLEMTDLKDDQRQFLETSAACEKQMSKIVKDASLQSIEDGSLVLEKGEISLGNVMNAVVSQVMILLRERDLQLIRDIPDEIKEASAYGDQYRIQQVLSDFLLSMVRFAPTENGWVEIQVRPNVKQNSDGTETMLFLFRFACPGEGLPPDIVQDMFSNARWTTQEGIGLSVCRKILKLMGGEVQYIRESERSFFLIVLELPQPRRSETRDRS

SEQ ID NO: 33275 - protein, 179 aa, Astragalus sinicus
MAVTTENGRRIMVAVDEGDESMYALSWSLKNLVFQNSKDVLILLYVKPPRVVYSAFDGTGYLFSSDITATMEKYSQQMADCVLEKAKMVCNDVQNVETRIENGDPRDVICEMVQRVGVDILVMGSHGYGVIKRAFLGSVSNHCAQNVKCPVLIVKKPKQPPPEEEEEEIYDTFVLSFCK

SEQ ID NO: 33276 - protein, 148 aa, Astragalus sinicus
MGFTEAQEVLVNSSWEAFKQNLPHNSILFYTFVLEKAPAAKDLFSFLKNSDGVPKNNPALQAHAEKVFGLVRDAAVQLRAKGTVTLGDASLGGVHVQKGVVDPHFVVVKEALLQTIKEVAGGSWSAELSAAWEAAYDGLAAEIKKAMS

SEQ ID NO: 33277 - protein, 320 aa, Nicotiana langsdorffii x Nicotiana sanderae
MLRSFASKRSLQSLFLHHHPLLRPNPHLTPFNPRLFSSTPVPTTSESELRKYIGYTLLLLGCGAATYYFFPFPEYAKHKKAQLFRYAPLPDDLHTVSNWSGTHEVQTRTFLQPESIEELEGIVKAANEKKQRIRPVGSGLSPNGIGLTRAGMVNLALMDKVLNVDKEKKTVTVQAGIRVQQLVDAIKEYGITLQNFASIREQQIGGIVQVGAHGTGARLPPIDEQVISMKLVTPAKGTIEISKEKDPELFYLARCGLGGLGVVAEVTLQCVERQELVEHTFLSNMKDIKKNHKKFLSENKHVKYLHIPYSDAVVVVTSFG

SEQ ID NO: 33278 - protein, 165 aa, Cichorium intybus x Cichorium endivia
MSFSEEQEALVKEAWEIMKEDIPALSLYFFTQVLEIAPAAKGLFSFLKDAEEIPQDNPKLKSHAVKVFKMTCEAIQLREKGEVVVSGSTLKYLGSVHLQKGVIDAHFAVVKEGVLRTVEKGVGEKWSEEMKGAWSEAYDQLAAAIITEMKKEATEMDEEAEETQT

SEQ ID NO: 33279 - protein, 823 aa, Oenococcus oeni
MDNQYTASAKNVLLLAQEQAKYFKHEIVGSEHLLLALTLEKDGLASKVLQDYNVTDDDIRNEIEQFTGYGTHTNIKAGFLAYSPKAQEILKNAALQAQSLGARQIGTEHLLLALLTDESILSSRILTSLDVRLQDLTRAVFKRIGVDPNQQKPKSKQQGQANQQGTPTLDSMSRDLTALASAGQIDPVVGRDQEVHRVIQILSRRTKNNPVLIGEPGVGKTAIAEGLAHKIATGQVPFDLANKRLMALDMGALIAGTKYRGEFEDRLKKIINEIHQDGQVILFIDELHTLIGAGGAEGALDASNLLKPALARGELQTIGATTFNEYQKYIESDQALERRFASVTIDEPSQEDSVEILKGLRPRYEEHHRVNISDEAINAAVKLSSRYITDRFLPDKAIDLMDEAAAKVRIDTVQPEDKKVDLERQLNGLRDQLDDAVSSGDFDQATKIRQQEIKIRKELAVVETDNLINGTKDHKYQLTVREKDITDVVGQQTGIPVTQLQKSESERLLHLEEILHRRVVGQNEAISAVSRAIRRARSGIKDPSRPIGTFLFLGPTGVGKTELAKALAEAMFDSEDNMIRVDMSEYQESYSASRLIGSAPGYVGYDEGGQLTERVRNHPYSVVLLDEAEKAHPDIFNLLLQVFDDGYMTDSKGRKVDFRNTIIIMTSNLGATRIRDNKHVGFGAIEPQDSYKAMSSEIQTALKERFRPEFINRIDETIIFHSLSKPELHKIVELMSHGILQRVAEQGVSIKMNKAAIDLVAQVGFDPEYGARPIRRAFQNQVEDKVSDALLSKDIRPGDSVTVGSRKGKIDLMIHHQIEKSTK

SEQ ID NO: 33280 - protein, 395 aa, Carboxydothermus hydrogenoformans Z-2901
MRDAVIVGAVRTPIAKEKGALKDLPPEVYAAEVIKEVIKRSGLKDSLEVDEVIFGHCLGAVGCMGRVAWLKAGLPLEVPAITVDRQCGSGSTTVNLAASLIWGGVGELYLVGGVESMTRQPYLMERPTEAFQRTAPAWIPRRTLAPAEIGDPPMGITAENVAERWQISREEQDEFAYLSQKKAARAIQEGRFKEQIVPIVVPQKKGDPVIFDQDEHPRPNTTLEVLAKLPPAFKPGGTVTAGNSSGINDGAAALLIASRQKAEKLGLKPMARIVGHAAAGVDPNIMGIGPVPAVKKVLAKTGLTLNDIDVIELNEAFASQSIAVCRELGIDWRDEEKFNPNGGAIALGHPIAASLAILVVKAVYELKRRQGRYALITACCGGGQGVATIIENIDD

SEQ ID NO: 33281 - protein, 349 aa, Carboxydothermus hydrogenoformans Z-2901
MPLFNRFISLPLFIRIEENLRYHLKNVIRESNFYFENPLFITGGANTWGIAEEVSRGFEAERYNFYQVGDNSLQEISNLKEKINTVNPDLLVAVGGGRVIDVAKVVATEKLLPLITFPTTLANDGVVSPVAVIRDGEKLRSIGVNMPVGVLIDLQVIKNSPVKLLKAGIGDLISNITALNDWELACQKGKDKMDGFAYMLSEKAASSILNYSGDNLLAPEFLKLLAEGLVLSGIAMAIAGNSRPASGAEHLISHALDKLFDRPALHGEQVGVAALFTAALQGKNFKELLNFYRKFGLWENPQSIGLNKQQFLEAVYLAPSMRPERYTVLNEDVVQKAAEIYDEVYGNLP

SEQ ID NO: 33282 - protein, 429 aa, Carboxydothermus hydrogenoformans Z-2901
MFYDTAKIYVKAGDGGNGCVSFRREKYVPNGGPDGGDGGRGGSVILVGDEGLNTLLDFRYKRHYKAPRGEHGKGSNRHGKAGENLYIRVPVGTVVKDEATGEILADITEHGQEVVVARGGRGGRGNAHFASPTHQAPKFAELGEPGEERWLLLELKLLADVGLVGYPNAGKSTLISRVSAARPKIADYPFTTLTPNLGVVEVGEGQSFVMADIPGLIEGAHAGVGLGHQFLRHVERTRVLLMVLDMSGFEGRDPVDDFEVLLKELKLYNEQLLTKPLVIAANKMDTANAQENLEKLKQHIAGKYEIYPISALTGEGLKPLIYRLWEIISTLPRESLEVKPQKVIKEQPEEGFVVEKVDGIFVVKGKKIERLVAMTNLDNEEAVDRLQRTFTRMGLEEQLKRAGVKPGDLVRIGKFEFYFVDETEGLEEE

SEQ ID NO: 33283 - protein, 127 aa, Carboxydothermus hydrogenoformans Z-2901
MFLTMMKGKIHRATVTEANLNYVGSITIDEELLDASGILPNEKVQVVNINNGARLETYTIPGPRGSGIISLNGAAARLCQIGDKVIIIAYALMEEKEAKQWQPKVVFVDEYNKIVKIKEKEIHGQTE

SEQ ID NO: 33284 - protein, 612 aa, Carboxydothermus hydrogenoformans Z-2901
MCGIAGMISFSKDLSPFVPLLEKMTQSLTHRGPDALGIWHSENIILGHRRLAVIDPERGRQPMIRTFGDWQYVIVYNGELYNTKELRDELEARGHHFYTTCDTEVLLVSYIEWGKECLSKLNGIFAFAIFDEKENQLFLARDRLGVKPLFYALVNDTLIFASEIKTLLLHPDIPSRLSTDGLKEVLFLGPARTPGMGVFAHISELLPGDYAVFNPEGLFIKPYWRLTSNPHPDDFPTTVKKTRELLEDAVIRQLVSDVPICTLLSGGLDSTVITAFAASHLHSRGETLNTFSVDYAENELYFTESAFQPNCDAMFIPLVAKEFNTLHRNIVLTQEELFEALFPALIARDLPGMVDIDSSLWLFSREIKKEATVGLSGECADEIFGGYPWFFRKEALEAKTFPWALSLDRRKTLFRQDLIAELKPDEYVQKRYHEALEEIPEISGLSPEEKRLREITYLTLTRWMPILLDRKDRMTMAWGLEVRVPYCDHRLVEYLWNVPWHFKTAGGQEKGLLRQAVADLIPDYILKRKKSPYPKTHHPLYTKLVREALTQILAENSSPINFLIDENEVRKLITNPSPPNARPWFGQLMGDTQIMAYLIQLNYWFKKYHISF

SEQ ID NO: 33285 - protein, 398 aa, Carboxydothermus hydrogenoformans Z-2901
MKVLVLNCGSSSLKYQLLDMEKETVLAKGLVERIGLEGSRLIIDLPGREKIKKEQPFVNHEVAINAVLEELVREEYGILRNLEEITAIGHRIVHGGEKFSGSVIINEEILKAVEECVNLAPLHNPPNILGIRACQKLLPNTPQVGVFDTAFHQTMPRKAYLYGVPYYWYEKYGIRRYGFHGTSHKYVAYKASEILGKPLNELKIITCHLGNGSSVAAVKEGKSIDTSMGFTPLEGLLMGTRSGNIDPAIVTFIQEKEGLSAAQVNDILNKKSGVLGISGYSDFRDIEERASAGDDKAKLALEMFCYQVAKYIGAYAAAMNGVDAIVFTAGVGENSDVVRKEVCKYLEFLGATLDEEKNKIRGKEAIISTPDSKVKIMVIPTNEELMIAKETLELVVNK

SEQ ID NO: 33286 - protein, 392 aa, Carboxydothermus hydrogenoformans Z-2901
MFSERALQIGESPTLAIDKKAKELIKQGKKVINFGVGEPDFDTPEYIKEAAINALRQGKTKYTPVGGIPELRKKIAEYLTQRTGVNYEDQEVVVTCGAKHGLYNIFQVILNPGDEVIIPVPYWVSYVEQVKLAGGVPILVPTGENFKLAPDKLINYLNNRTKAIIINSPSNPTGVVYSFDELKSLGRLLKDREILIIADEIYERIYFSEKPISFVAANPELKEKTFIVNGFSKSHSMTGWRLGYVAASRQYAAKLIELQSHQTSNPTSFAQWGALAALTIEDDSVEKMVQEFKKRRDFVVSRLQELKLKVIEPAGAFYVFPRIDNCFGKKHSGKIINTSIDFAEIMLEYYLVAMVPGIAFGDDRFVRLSYALSLADLKEGLKRLETFLKNLE

SEQ ID NO: 33287 - protein, 252 aa, Carboxydothermus hydrogenoformans Z-2901
MNSNIFELEYRIPYYDVDYQKRTLITSLINYFNDIAFVQSENLGGIAYLTQNNLGWVLMNWDIKVDRYPRFNERVLVRTAPHSFNKFFAYRWFEIYDKNGIKIAKANSRWLLINTEKRRPVKINDYLYGIYGVSYENNNILPIEEPQKLLSIDIEKQFEVRYSDLDSNGHVNNVKYVVWALDTVPLEIISNYSLQRLKVKYEKEVTYGKTVRVLTGILSEQKTIVSLHKIVDEDETELCFLESVWFLNEKLS

SEQ ID NO: 33288 - protein, 393 aa, Carboxydothermus hydrogenoformans Z-2901
MQEVVILSAVRTAIGKFGGSLKDIPAAELGAIVIKEALVRAQIPPAEVDEVIFGNVLQAGQGQNPARQAAIKAGIPVDIPAMTVNMVCGSGLRSVSLAATLIAAGEADLIVAGGMENMSAAPYAIPGARWGTRMGDGKIVDLMIKDGLWDAFYDYHMGITAENLAERYNISREEQDRFALESQRRAEKAIKEGRFRDEIVPVKLPQRKGEPLEFVQDENPRFDTTLEALAKLKPAFKEGGTVTAGNASSINDGAAALVIASSKKAESLGIKPMAVIRSWGATGVDPSIMGIGPVGATRKALKRAGLTIADIDLVEANEAFAAQALAVAKELELDLSKTNVNGGAIALGHPIGASGARILVTLLHEMKKSNSRYGLATLCIGGGMGVAAIVEKA

SEQ ID NO: 33289 - protein, 554 aa, Carboxydothermus hydrogenoformans Z-2901
MEITGAQALVKALELEGVTTIFGYPGGAVVPLYDALSRSKIQHVLVRHEPGAIHAANGYARASGKVGVCVATSGPGATNLVTGIATAYMDSVPVVVITGQVPTTMVGTDAFQEVDITGITMPITKHNFLVKNPADIPAVVKKAFYIAATGRPGPVLIDLPKDVAARTIDFQYPEKVEIRGYKPNLKGHPQKIAEAVKLIREAKRPVIIAGGGVLAANASQELYEFAVRAEIPVTNTLMGLTSFPQDSPLFLGMLGLHGTRYANLAVTECDVLIGLGVRFADRVTGELSGFAPKAKIIHIDVDPAEIGKNVRADVPIVGDVKNVLQEMLKQIEPQNRQEWLSQINTWKQEFPLKYEKDDFIKPQETIKLLGEKTTADTIIATDVGQHQMWTAQFYPFKKPRTFLTSGGLGCMGYGLPAAIGAAVAFRDKQVILITGDGSFQMNMGELATAREQNLSLKIILFVNKKLGMVKQLQEYYANKNYFGVDLGFVPDFVALAKAYGIPGRKITRPEEVDGALDEMLAHKGMYLLEIEISPEEKVLPMVLSGAPIGEAVDW

SEQ ID NO: 33290 - protein, 223 aa, Carboxydothermus hydrogenoformans Z-2901
MQPLIDAITWILNNLYLFTKSIGIPSYALAIIMLTILIKIILYPLNHAQMKSMKVMQELQPKMQEIQKKYKNDPQKQQQALMELYKEYGVNPMSGCLPMLIQLPILIALYRALYNFKYLNPAHAKFFWIANISHKDPYFILPILAALTTYIQSRMTMTSGNDPNQKVMLYVMPLMIGWIAMSLPAGLGIYWVVLNIMGIIQQYFVNQSTHKIVERGTKENAGD

SEQ ID NO: 33291 - protein, 464 aa, Carboxydothermus hydrogenoformans Z-2901
MVETEKELKRGLEARHIELIALGGTIGVGLFMGSASTLKWAGPSVILAYIIAGIFIFFIMRTIGEMLYIEPITGSFATYAHKYIGPLWGYLTAWSYWFMWVAVGMSEVTAVGIYMKFWFPTLPQWVPGLIAILIVGTANLAAVKYYGEFEFWFALIKVVTIVVMIILGIGMIFFGFGNHGRPIGLENLYIHGGFFPNGIKGFLFALCLVVAAFQGVELVGVTAGEAKDPQRTLRRAVQNITWRILIFYIGAIFVIVALYPWNKLGTIGSPFVLTFAKVGIPAAASIINFVVLTAALSGCNSGIYSSARMLYTLSQNGQAPKFLAKVSPSGVPVNSLLVTIACLLIGVALNYIAPQKLFVYIYSASVLPGMMPWFVILISQLKFRKLKDNEIKDHPFKAPLSPYSNYLTIIFLVLVLVGMWLNSDTRLSLIIGAAFMALIIISYYVFGIDKKQVPEVKKIKEEAI

SEQ ID NO: 33292 - protein, 300 aa, Carboxydothermus hydrogenoformans Z-2901
MEKNFLTPQEIVNFTLETGIKKAKLNFLASFILGILAGSYIAFGAFAANLISHSVENFGIAKFLGAAVFPVGLMLVVMAGGELFTGNTLMTIALAERKITLKAMLNNWLWVYAGNFVGSFLVAYLVGRSGMLELNKGLVAAAALRTAALKANLTFSEAFIRGILCNILVVLAVWLAYGAKDVVGKVVGIWFPIMTFVLSGYEHSIANMYYFAVGLQAKALGVAKLAHLKSEFLTNLNWGHIWLYNLIPVTLGNIFGGSILIGLGYWLVYLYLPRVNELSLAGLLKKFIFGVEKPKLQENN

SEQ ID NO: 33293 - protein, 372 aa, Carboxydothermus hydrogenoformans Z-2901
MIIGVPKEIKNNENRVAITPAGVEALVAAGHKVVIENNAGLGSGITNEEYIKAGAEILPTAADVFAAADMIMKVKEPLPPEYPLFKEGQILFTYLHLAPEPELTRALMEKKVVAIAYETIQLPNGSLPLLTPMSEVAGRMAVQIGARFLEKPQGGRGMLLGGVPGVPPAEVVIIGGGVVGTNAAKMAMGMGAHVTILDKSADRLRYLDDIFFGKITTMMSNSYNIAEAVKKADLLIGAVLIPGARAPKLVTEEMVKTMKPGSVIVDVAIDQGGCVETIDRVTTHQDPIYVKHGVVHYAVANMPGAVPRTSTFALTNVTLPYALAIANKGWERAVREDRALALGVNVLDGKVTCKAVADSLGLPYTPLEEILG

SEQ ID NO: 33294 - protein, 214 aa, Carboxydothermus hydrogenoformans Z-2901
MEIFLDTANIEEIKKGASLGIISGVTTNPSLIAREGRDLKEVVMEIVSLIDGPISAEVISLDYEGMVREAEELSKLHPNITIKIPMTWDGIRAVKTLSSMGIKTNVTLVFSANQALLAALAGATFVSPFVGRLDDTGHDGVYLIEEIKTIYENYNFKTKIIAASIRHPLHVTQVAKAGADIATVPFKVLTQMFAHPQTKEGIEKFLADWQAMKR

SEQ ID NO: 33295 - protein, 287 aa, Carboxydothermus hydrogenoformans Z-2901
MLPVEKFTGFMGSSDNYEGAAFVLFGIPMDFTVSFRPGARMAPQHIRQVSFGLEEYDWDLEKSLNDVNFYDMGDVALTLGRIEESFTSIRTVTKKVLSDGKIPLIIGGEHLITYPVILEFAEKYPDLAVVHFDAHADLRDHYQGEKLSHATVMRRVAEIIGPQNIYHIGIRSGTQEEKEFITKKSNYLGQNVLAGVEKALEKLGQKPVFISLDIDVVDPAFAPGTGTPEPGGATSIEIMEAIVKLSSLNIVGMDLVEVLPVYDPSERTSLLAAKILRRALLSFNITR

SEQ ID NO: 33296 - protein, 322 aa, Carboxydothermus hydrogenoformans Z-2901
MLKNWLTKENLTVTVLLLVLMLGVQVLYSAGILSPFVMLNLIIIAINIILAVSLNLVVGFTGQFSIGHAGFMALGAYASAIMTLNFNAPFIVSLLVGAIVAGIGGIIIGIPTLRLKGDYLAIATLGLAEIIRGVITNIDYLGGAYGLMGITQRTNWLWAFGCMLVTVMVIKNFVQSSHGRACISVREDEIAAEVMGINTTKYKVIAFTMGSFFAGIGGALLAHYITFIEPNAFNFLKSFDILVMVVLGGQGSLTGSVVAAIVLTLISTFLQSLAELRLIIYAIILILVMLFRPQGLLGTHELSFKLLQRKRGVSHGNHSANA

SEQ ID NO: 33297 - protein, 65 aa, Carboxydothermus hydrogenoformans Z-2901
MQGKVKWFDPKKGYGFIEREDGGDVFVHFSAIQEKGFKTLEEGQRVEFEIVEGARGPQAANVVKL

SEQ ID NO: 33298 - protein, 305 aa, Carboxydothermus hydrogenoformans Z-2901
MNKYVHAVPNFSEGRRKEVVEAIVDQVRNVPGVKLIGYFPDADFNRTVVELIGKPEPLKEALINMAAKAIELIDMEQQRGNHPRIGAQDTIPIFPMRNITLEECIQLAEEIGVELNKRTGVPIFFSGENARIPERKALDFIRKGQYEGLRDLLLSENPDPKRLPDIGDVKEFVHKGGTIVSAGTNPLVAFNVILGTDNLEIAKQIAKAVRGPSGGFTSVRAVALKFTERNQVVVSMNMFDHEACPLYRTYNFVKSEAARWGVPVVGTELIGTVPQEALVRVAEYFLQLENFNRDQIRENHIPDLL

SEQ ID NO: 33299 - protein, 103 aa, Carboxydothermus hydrogenoformans Z-2901
MYAIIQTGGKQYKVAEGDKIFVEKLNAEPGSIVTINEVLAVVKDGSIKAGNPYVEGAKVNLKVVRHGKGRKIIVFKYKPKKNYRRKYGHRQPFTEVIVEKIEA

SEQ ID NO: 33300 - protein, 392 aa, Carboxydothermus hydrogenoformans Z-2901
MNLEEKINPVLRQIPPSGIRKFFDLVANTKGVISLGVGEPDFVTPWYIREEGIYSLEKGYTMYTSNQGLLELREEISRYLLRLTGVAYDPVQEVLVTVGVSEGVDLALRALVSPGDEVLIPEPSYVSYGPTTMLAGGKPVYIRTRPENGFKLTPELLEEAITPKSKILLLCYPNNPTGAVMTADDLAKLLPVIAEHDLLVISDEIYAELTYEGKHVSVASFPGMKERTVILNGFSKAFAMTGWRLGYAAGPKEIIAAMTKIHQYTMLCAPITAQKAAIEALKNQNDAVKKMVEEYNYRRRILVEAFSEMGLWLFEPKGAFYAFPDISATGLSSEEFAERLLFEEKVAVVPGSAFGPSGEGFIRISYATARKDLIEALKRIKRFVRKKSLKKQ

SEQ ID NO: 33301 - protein, 619 aa, Carboxydothermus hydrogenoformans Z-2901
MNKVLKNLAIYLLIVLVAVMLINYSRPSATSIRDLKYDEFYSLLEKGQVASVAIQTDRTINEISGVLRDGTRFKTRGPLEDAELYKDLKKMNVTVEIMPPKEPAFWANLLSSLLPVLLMVGLFFFFMQQAQGGGNRVMSFGKSRAKLHTDEKKRVTFADVAGIDEVKEELAEIVEFLKNPRKYNELGARIPKGVLLFGQPGTGKTLLARAIAGEAGVPFFSISGSDFVEMFVGVGASRVRDLFEQAKKNAPCIVFIDEIDAVGRQRGAGLGGGHDEREQTLNQLLVEMDGFNSNEGIIIIAATNRPDILDPALLRPGRFDRHIVVDTPDINGRKEILKVHVKGKPLGDDVDLDVLARRTPGFTGADLANMVNEAALLAARRNKKVINMEEMEEAIERVIAGPEKKSKVISEREKRLVAYHEAGHAMVGYLLPHTDPVHKISIIPRGRAGGYTLLLPEEDRSYMTKSQLLDEITMLLGGRVAEALVLEDISTGARNDLERATETARRMVMEYGMSEELGPLTFGKGTEAVFLGRDLARDRNYSEEIAYTIDKEVRKIIDSCYSRAEEILKKNINVLHLVATKLMEVETMEGEEFEKLMKENGLTKPRVNGNNDSPADVLQ

SEQ ID NO: 33302 - protein, 410 aa, Carboxydothermus hydrogenoformans Z-2901
MAKKFIILKFGGTSLKTAELREKVAQKIINTFESGYQPVVVVSAIGRKGDPYATDTLLNFAYEVNRDLPPREADLLMACGEIISGVIMVNTLAKMGYKAKLFTGAQAGIITDDNFTSASILKVKADKILKAVDEGFIPVVCGFQGVTEDGEVTTLGRGGSDTTAAALGVALKAEFIDIYTDVEGIKTADPRIVEDAKTLEVVTYNEISQLAHEGAKVIHPRAVEIAMQKNIPLRIKSTLTDGEGTLVTSHAEVYGEVIEVIRDRIITGIAHIPGVTQIKILREDTPEIVNLAQKVFKGLALAEISVDFINISPEGLAFTVKGEVTEKAVDVLENMGFTPRIRRNCAKIAAVGAGMTGVPGVMAKIVEALTREQIEILQSTDSYTTIWVLVDGENMEKAVRAIHKAFKLNE

SEQ ID NO: 33303 - protein, 525 aa, Carboxydothermus hydrogenoformans Z-2901
MRILASDPIAEKGLNILREEGFIVDEKTKLSEEELIKIIPQYDALIVRSETKVTARIIEAAENLKIIGRAGVGVDNIDLAAASKKGIIVVNSPEGNTIAAAEHTFALMMALLRNIPQAHAALKEGKWLRKEFTGYELRGKTVGIIGLGRIGTAVAKRVKAFETRVIGYDPFISEERAQMLGITLMSLEELLQNSDIVTMHLPLNNETRNLINRERLKLMKKSAFIINCARGGIIDEEALYEALKAGEIAGAALDVFSKEPLTESPLFELPNVIVTPHLGASTKEAQINVAIDVAREIASVLKGGLAQNAVNFPAMDKESYQRLKPYINLAEKLGNFLAQILSGGLLAAEIVYNGSAFKEETRPLTLAALKGLLDPLLMERVNYVNAPVVAKERGIKVRETVMENGADYTNLITLKVTTEKGERIIAGTLFRNNEPRIVQIDQYRVDVVPEGYKLFVPHKDQPLMIGKVGIILGEKGINIAGMQLGRITPGGDAVMVLSLDHPADGDSIKAIAAIPGIYEVKAVSL

SEQ ID NO: 33304 - protein, 65 aa, Carboxydothermus hydrogenoformans Z-2901
MQGKVKWFDPAKGYGFIEREDGGDVFVHFSAIKGNGFKTLEEGQRVEFNIVEGTRGPQAADVVKL

SEQ ID NO: 33305 - protein, 393 aa, Carboxydothermus hydrogenoformans Z-2901
MERIYLDHGATTPLSREVLEEMLPYLTEKFGNPSSIHAFGREARKAIEDAREKVAKAINASDPGEIVFTGGGTEADNLAIKGIARAYKHKGNHIITSAVEHHAVLDACLALQKEGFEVTVLPVDKYGMVSVEDVKKAITDKTILITIMHANNEVGTIQPIAEIGEIAREKGVYFHTDAVQTVGKIPVDVKELKVDLLSLSAHKIYGPKGVGALYVRKGLKLEPLANGGGQERKRRPGTENVAGIVGLGKAIELAVAEMPEESARLTKLRDKLIKGVLERIPYVRLNGHPTKRLPHNANFSVEFVEGESMLLMLDMKGIAASSGSACTSGSLDPSHVLLAMGIPHEVAHGSLRLTLGKANTEEQIDYVLEVLPGIVERLREMSPLYNQKALGGE

SEQ ID NO: 33306 - protein, 390 aa, Carboxydothermus hydrogenoformans Z-2901
MREAVIVKALRTPVGKAPRGKLRNTRPEDLGALVIKEIINQTGINPEIIEDVIIGCAFPEAEQGMNLGRVVALRAGLPYSVPGVTVNRFCSSGLNAIADAAMKIMTGMSDVVIAGGIESMSMVPMGGNDLLPNPELMNVMPDAYLSMGLTAENVASRYNISREEQDEFAYKSHMKAKEAILGGKFKDEIVPVPVVEKIFDGKKVIEKTEMFEVDEGPRFDTTLEALARLKPVFRQGGTVTAGNSSQTSDGAAAALLMSAEKAEELGLKPIAVFRSFAVGGVEPEIMGIGPVVAIPKALKLAGITLDQVDVFELNEAFAAQALAVIKTLEIDPAKVNPNGGAIALGHPLGCTGAKLTATLLSEMQRRRAKYGVVSMCIGGGMGAAGVFELI

SEQ ID NO: 33307 - protein, 406 aa, Carboxydothermus hydrogenoformans Z-2901
MLVVQKYGGSSVANPERIKNVARRVAEYYRAGHRVAVVVSAMGDTTDELLDLMGEISPNPPAREIDMLLSTGEQVSVALLAMALHELGVPARSFTGLQAGIYTDEVHTKARITEIKPERVIACLNSGKVAVVAGFQGVNREGDITTLGRGGSDTTAVALAAALKADICEIYTDVDGVYTADPRIVPDARKIKEISYEEMLELASLGAVVLQPRSVDFARNYKVEVHVRSSFNYNEGTVLKEERDLEKKGVVTGVAHDKNVVKIGVFGVPDQPGVAYRLFSELAAHNINVDMIIQSAGKEEGQNDISFTIGKNDLAKTVEILEDVVKKLSARGYTYDEKVAKVSIVGAGMVTYPGVAAKMFEALYEENINIQMISTSEIKVSCIIAEDAVERAVNAIHKKFELGNGV

SEQ ID NO: 33308 - protein, 477 aa, Carboxydothermus hydrogenoformans Z-2901
MRGNLLVVSNRGPFTIEENNGSLKYRPAVSGLVSAVLPAVKKIGGTWLAWAGRIAEKPAEVQAVIKDEFQFVEILLSREEVEGYYEGYANGVLWPLCHLMPEKVRMYEENYRIYREVNQKFAQKAATLLRTGTLLWIHDYHLALMPHFIRQKNPWQRIAFFWHIPFPPVELFTIQPWAEEILRGLLGADIIGFHIDDYRENFLRAVERVLKLPVNYEWGTVYYNGREVLVKAVPIGIETKNFQKEVPEITEIEQEIAGLKIFLGVERLDYTKGLKEKIQGFARFLEKNPEYRGKVKLLQVAVPTRENIDQYQTYAREVLAEAAKVNERFGDNHWQPIKILKRNYSQEELIYLYRIADALVITSLEDGLNLVAKEYIASRKEPGVLILSKRTGVARQLNAALLVNPYSPEEIALKMKEAIEMPDTLKKKSFSLLKEQVILKNNEWWLENFLGKELRLMDTGFGKYYRKRGEKKVGAID

SEQ ID NO: 33309 - protein, 443 aa, Carboxydothermus hydrogenoformans Z-2901
MKETIKVLVVDDEENFRDLLIQRLTRKGYEVKGAATGEEALQFLKEETFHLAIFDIKMPGIDGIELLQRARQLDENLQVIILTGHGTIESAIGAMKLGAYDYLTKPCNLAELEITLQKAYEKRQLLEENLGMKEVLLRDRSSKVIVGKSKAITRVLELAKKVAASDSPVLIEGESGTGKELIVNAIHQWSSRAQQPLIAINSGALPAQLLESELFGYEKGAFTGAITTKIGLIESAHRGTLFLDEIGEMELGLQVKLLRFLETGEFRRVGDIRLRKVDVRVIAATNRNLEEEVAKGNFREDLYYRLNVIKIRVPPLRERKEDIPLLVEYFLQKAGNGVKKELTPEALQALMSYDYPGNVRELFNILERGLLLSTGDKIQKEDLFGCLPREEAPKKIYTLEEMEKRYIKQVLEAVQWNKTKAAELLGISVRNLYRKIEEYQLKK

SEQ ID NO: 33310 - protein, 552 aa, Carboxydothermus hydrogenoformans Z-2901
MELTGAQILIKVLEDLGVDTVFGYPGGAVLPIYDALYDSKITHYLTRHEQGAAHAADGYARASGKVGVCFATSGPGATNLVTGLATAYMDSVPVVAITGQVATSLLGRDSFQEADITGITMPITKHNYLVKDPGELAQTVVEAFYIARTGRPGPVLIDIPKDVSAARARYEFPEKVELPGYKPVLTPGEEEVNKAIALINSSERPLIFSGGGTVNAGAEQLLLAFAEKINAPVVASLMGLGGFPGDHPLFLGMLGMHGTKPANYAVSECDVLIAVGVRFDDRVTGDVKSFAPNAKIVHIDIDPAEINKNVLVEVPLVGDVKNSLELLIKGVKEKKPEKWLKYVFGLKEKYPLTYNRECGLKPQKVIETLYKITGGEAIIVTDVGQHQMWAAQFYKFNKPRRFISSGGLGTMGFGLPAGIGAQVARPEQQVIVVSGDGSIQMNSQELMTVAAYNIPVKVIILNNGYLGMVRQWQELFHQRRYSHTELKNPDFVKLADAYGIRGLRIKKEENLEEKLLEAINYAGPVVVDVWVDREENVFPMVPPGGAIHKMIG

SEQ ID NO: 33311 - protein, 393 aa, Carboxydothermus hydrogenoformans Z-2901
MEEVVIVSAVRTPIGSFLGSLAQTPAVDLGALVIKESLNRINLAPRFVDEVIMGNVLQAGLGQNPARQAAIKAGIPQEVPAFTVNKVCGSGLKSVGLAYQAIATGDADIVVAGGMENMSLAPYVLPKARTGYRMGHDTLIDSMIKDGLWCAFTDVHMGITAENIAEKYNITREEQDKFALQSQERAIKAIDEGKFKEEIVPVIIPQKKGEPLVFSTDEFPKRGTSLEKLAALKPAFKKDGTVTAGNASGINDGAAAVVVMSAKKAQELNIKPLAVIRGYAAAGVDPAYMGLGPIPATRKALKKANLTVSDLGLIEANEAFAAQALAVIKELELNPEITNVNGGAIALGHPIGASGARILVTLLHEMQKRNTKYGLATLCIGGGQGFALVVEKV

SEQ ID NO: 33312 - protein, 334 aa, Carboxydothermus hydrogenoformans Z-2901
MLNFIEKVKSKAREFKRTIVLPESKDDRVIKASSEIINQQLAKIILLGNEKEIAERAKNLNVDLNGVTIIDPLKDNNRDRYANLLYELRKNKGMTLEKAYELINDPLYYATLMVKAEDADGLVAGSLSPTPNVLRPALQIIKTKPEFSVVSGAFIMVIPNPQFGEHGIMLFADCAVNPDPNSQQLAEIAIASAMTAQKLLGITPYVGLLSFSTKGSAEHELVEKVREAARIANRLRPDLKIEGELQVDAAIVPAVGAQKAPGSEVAGRANVLIFPDLQSGNIGYKLAQRMSGGEAIGPILQGMAKPVNDLSRGCSVDEIVNLVAITAVQSYYGI

SEQ ID NO: 33313 - protein, 500 aa, Carboxydothermus hydrogenoformans Z-2901
MANLIPPRFKVVIDYERCRKCKRCVINCGFGVYSFADRVIPDHKKCVSCQRCVAFCPEEAITIIENPNVFRPNSYWTMEDRINIMKQASSSGMLLTGMGNDRPYKNYFDHLLIDACQVTNPSIDPLREPMELTTYLGKKPDAVKVKVENGKVKLDTQIAPQIKLDTPIIFSPMSYGSISLNAHKALARAAKECGILMNTGEGGLHKELYPYKDWIIVQVASGRFGVNQEYLDHSAVVEIKIGQGAKPGIGGHLPGEKVNREVSETRMIPEGTDALSPAPHHDIYSIEDLAQLIYALKEATHYEKPVSVKIAAVHNVAAIASGIARAGADIIYIDGFRGGTGAAPTVIRDHIGIPIELAIAAVDDRLRAEGIRNSVSIVAAGGIRHSGDVAKAIALGADAVAIGTAALIAMGCHVCQMCHTGNCSWGIATQRPELTQRLDPDWAAQQLINLVKSWSLELKEILGALGLNAIESLRGSRERLRGIGLTDTELAILGVKHAGR

SEQ ID NO: 33314 - protein, 313 aa, Carboxydothermus hydrogenoformans Z-2901
MSRYDLKIFSGNANPDLAREIASFLGVEVGDARVSRFSDGEIQVKINESVRGADVFIIQPTCTPVNENLMELLILIDAIRRASARRITAVLPYFGYARQDRKTRARDPITAKLVSNLITVSGARRVIAMDLHAGQIQGFFDIPVDHLVGVPILAKYFNEKGLENKVVVSPDLGGVTRARDLAERIGAPIAIIDKRRPEPNVAEIMNIIGEIEGKTVIMIDDIIDTAGTITQGAQALMERGAKEVYVCCTHPILSGPAVDRLANAPIKEVVVTNTIPLPPEKKLPKIKVLSVAPLMGEAIRRIHEDLSVSELFV

SEQ ID NO: 33315 - protein, 401 aa, Carboxydothermus hydrogenoformans Z-2901
MAEKVVLAYSGGLDTSIIIPWLKENYGYEVIAMVADVGQGEELEPLREKAIKSGAAKIYIEDVKEEFVRDFVFPMLKAGAVYENKYLLGTSVARPLIAKKLVEIAEKEGAVAVAHGATGKGNDQVRFELTVKALNPDLKIIAPWREWEIKSREDAIDYAEKRGIPVPVTKKQPYSMDRNLWHLSHEGGILEDPAVEPPEDVLLLTNPPEKAPDQPEYVEIEFVKGEPVAVNGEKLSPVELIFKLNELGGKHGIGIADMVENRLVGMKSRGVYETPGGTILTFAHRELESLTLDRQTMHFKQMVALKYAELIYDGLWFTPLREALEAFVDKTQETVTGKVRVKLYKGNIYPAGITSPYSLYVKDLATFGEDNLYNQKDAEGFINLFGLPLKVRAMTQKPYQK

SEQ ID NO: 33316 - protein, 390 aa, Carboxydothermus hydrogenoformans Z-2901
MLEATRVRNLPPYLFARIERLIAEKKEAGVDVISLGIGDPDTPTPKHIIEELYLAAQNPENHQYPSSVGMLSYRQAVAAWYARRFGVELDPKTEVVSLLGSKEGIAHISWCYVDPGDLVLVPDPGYPVYEGGTILAGGTTYKMPLKPENGFLPDLDSIPEEVARKAKLMFINYPNNPTGAVADLGFFEKVVHFAKKYEILVCHDAAYSEITFDGYRAPSFLEVKGAKDVGIEFHSLSKTYNMTGWRIGWAVGNAKAIDALGRLKSNIDSGVFQAIQYAGIKALEGPQDVVKELCDLYAQRRDLVIETLNKLGWNLSKPKGTFYIWAPVPKGFTSASFAEYLIEKAGVVITPGNGYGTNGEGYFRISLTIPTSRLKEALQRIEQHLGKVEF

SEQ ID NO: 33317 - protein, 604 aa, Carboxydothermus hydrogenoformans Z-2901
MGRIVGIDLGTTNSCIAVMEGGEVIVIPNAEGGRTTPSVVAFGKNGERIVGQVAKRQAITNPERTVISIKRHMGTNYRVKIDDKEYTPQEISAMILQKLKQDAEAYLGEKIEKAVITVPAYFTDAQRQATKDAGRIAGLEVLRIINEPTAAALAYGLDKEGEQTILVYDLGGGTFDVSILEIGDGVFEVKATAGNNRLGGDDFDQRIIDWLVENFKKEHGIDLRNDKMAMQRLKEAAEKAKIELSGVLETQINLPFIAANQNGPLHIDVTLTRAKFNELTADLVEATMGPTRQALADAGLKPEDIDKILLVGGSTRIPAVQEAIRKFFNKEPHKGINPDECVAIGAAIQAAVLAGEVKDVVLLDVTPLSLGIETLGGVFTKLIERNTTIPTSKSQIFTTAADNQTSVEIHVLQGERPMAADNVSLGRFTLTGIPPAPRGVPQIEVRFDIDVNGIVHVSAKDLGTGREQSITITNTSNLSEAEIKRMVEEAERYAEEDRKRKEEVETRNQADSLIYQAEKTLKDFKDKANPDLVARVEKAIAELREAMNSKDVQLMRAKMEELTKPLYELTSSIYQQSANQNQTQTGTNTQGNVYDADYKVNDDK

SEQ ID NO: 33318 - protein, 298 aa, Carboxydothermus hydrogenoformans Z-2901
MSYKSGFVSIVGRPNVGKSTLLNQVVGTKIAIMSDKPQTTRNKIRAVLTSEKGQIIFIDTPGVQKPRNKLGEFMLKQALTSLDEVDVLLYVVEANSPIGPQENYLLKTLAEVKTPIILVVNKIDVVKMIEAQTLARQIESRLKVAKTYYISALNGTGVSELVEGIFELLPEGPPYYPEGQVTDYPERFIIAEYIREQILHLTREEIPHSVAVVVEEIKPRENSNTVYVSAVIYVERESQKGIIIGKNGQMLKEIGQRARLEIERLLGSNIYLDLWVKVKEDWRNKDVWIRNFGFTEFE

SEQ ID NO: 33319 - protein, 393 aa, Carboxydothermus hydrogenoformans Z-2901
MREVVIVSAARTPFGKFGGGLSALKAVDLGAIAIKAAVERSGVSPEEFDYVYMGQVLQGGAGQIPSRQAARKAGLPWEVPSVTVNKVCASGLIAVAMAAKMIALGEIDVAVAGGMESMSNAPYILPSARWGQRMFNFEAIDLMVHDGLWCAFYDRHMAVHGSEVAKEYGISRQAQDEWAYISQMRAKEAMEKGRLNDEIVKVEVPGKKGEVVVIEKDEQPRPNTTIEALSKLPPVFDANGTVTAGNAPGVNDGAGALVLMSREKARELGIKPLATYLNHAEVALDAKYIATAPGQAINKLLAKKGMKIEQIDLLEVNEAFAAVVLVSQKIAGYNLEKVNVNGGAVAFGHPIGASGARILMTLIYELRRRGGGTGIAAICSGAAQGDAMLIKVE

SEQ ID NO: 33320 - protein, 309 aa, Carboxydothermus hydrogenoformans Z-2901
MVIAKNFLITEYARPFVKWAGGKGQLLNTLERYYPLKLLQGEIKRYIEPFVGGGAVLFNILQKFNIEEAYIFDINVDLINAYKVIKFNVDELVYYLKSLEKRYYNLDNDNRKKMYYEIRDEYNSKVSNTKHIDIERAAKFIFLNRTCFNGLYRVNKEGKFNVPYGDYKNPTICDERNLYLVNSLLQKVQIFAGDYRESAKYISKDSFVYFDPPYRPLNKTSNFTSYSKSDFTDKDQIELARFYAQMNELGAFLLLSNSDPKNEDPNDNFFDDLYKNFNIYRVMARRSINSDGQGRGLIKELLITNYKVE

SEQ ID NO: 33321 - protein, 1490 aa, Xanthomonas campestris pv. vesicatoria str. 85-10
MAPRTRQGLNDYGLYNSVRDERDACGFGMVAQLDDQPSRALVDTAIAALSRMTHRGGVAADGLTGDGCGLLIRKPDAFLRGLARDAGIPLGTRYAAGVVFLPLDESEAARCRAELEAQLQAAGVQLRGWRVVPTDDSVCGQLARDTLPRIEQLFVDAGAEQTEDGFTLALFLARRRAEQQLQGVPDFYVTTLSPNGISYKGMVLPDKLSTFYPDLQRSDLSSSAIVFHQRFSTNTLPRWPLAHPFRLLAHNGEINTIEGNRRWAQARSKVWQTPRFDIAEFDPVISMHGSDSQSLDNMLELLIAGGMDLLQALRILVPPATQSLEFKDADLAAFYEFYGLNTEPWDGPAGIVACDSRYAACMLDRNGLRPARWMLTSDRHFLVASEAGVWELPAERITRKGKLGPGEMMAIDLKRGDLLDSDAIDRINRARAPYKQWLQQGVTYLQTELIDPSLVEEPFSEQTLRSYHKLFQLSTEEVEQVLRPLAETEQEATGSMGDDTPMAVLSRQTRPLYDYFRQAFAQVTNPPIDPLREGIAMSLTTQLGRETNIFHAGAETVNHVILNSPVLSQRKLRQLLKMEQYVERNRLIDLSYSLEEGLKAGLERICQEVEAAARDGAVMLLLSDRYPVPDRPMAHALLATGAVHHHLCKVGLRCDVNLIIETGTARDPHHMACLLGVGATAVYPYLAYQTLFDLGRRGILQLSKGGEQSQIGRRYRKGIYKGLSKIISKMGICTIASYRGAQLFEIVGLDPDVVDLCFADTPARIGGVDLARLDTEARELTVRAWNDQLKPEVGGLLKYVHGGEYHMYNPDVVMTLQRATRTGDAGDWQKYVDAVHARPASTLRDLVQLKRADTPTPLDQVAPAEDVLRRFDSAAISLGALSPEAHEALAIAMNRLGGRSNSGEGGEDPARYGTEKRSKIKQVASGRFGVTPEYLVNAEVLQIKVAQGAKPGEGGQLPGHKVNELIARLRYAKPGIGLISPPPHHDIYSIEDLAQLIYDLKQVNPTALVSVKLVAHAGVGTIAAGVVKAGADLITVSGHDGGTGASPVSSIRYAGVPWELGVAESHQALVANDLRERTILQTDGGLKTGLDVVKAALLGADSFGFGTAPMIVLGCKYLRICHLNNCATGVATQDERLRAGYFTGLPERVEHFFRLLAEEVRQWLSYLGVRSLDEIVGRTDLLEQLEVSPRPGVKVDLSRLLTHARYDGSHCAAQRLYESPDSLATQMDGLLADAIANKRGGDHRFLIHNTDRSIGARLSGAIARVHGNHGMSDAPLNLRFRGTAGQSFGAFNAGGLQLELEGEANDYVGKGMAGGRLVVRPPRGARFEARNTPIVGNTCLYGATGGELFAAGRAGERFAVRNSGALAVVEGAGDHCCEYMTDGIVLVLGKVGLNFGAGFTGGLAYVLDIERDFVDRYNHELIDIHRVSAEGFENHRQHLHTLISRHRELTGSIWAQQILDEFRDYIGKFWLVKPKAASIESLTESLRRAA

SEQ ID NO: 33322 - protein, 575 aa, Xanthomonas campestris pv. vesicatoria str. 85-10
MAKKKTLARFLAETLQSAGVERIWGVTGDSLNGLTDALREMQTIAWMHVRHEEVAAFAAGAEAAVTGQLAVCAGSCGPGNLHLINGLFDCHRSRQPVLAIAAHIPSSEIGLSYFQETHPQELFRECSHFVELVTNPAQLPEVLHRAMRTAILQQGVAVVVIPGDIALLEVDKHVSSAWPALRQPRMLPAAEDVRQLAELLQQSKAVTLLCGSGCAGAHDAVVALADTLGAPVVHALRGKEYVEWDNPFDVGMTGLIGFSSGYHAMLNCDTLLMLGTDFPYRQFYPKDATIVQVDRDPSALGRRTPLQLGIAADVGETIAALLPQLQRREERGFLEKSLAHYRKAREGLDDLAVPADPGQPLHPQFVTRLISQIADQDAVFTCDVGTPTVWAARYLRMNGKRRLLGSFNHGSMANAMPQALGAQAAFPGRQVISLSGDGGFAMLMGDFISLAQLNLPVKVVVFNNASLGFVAMEMKAAGYLDTGTELRNPDFAAMSNAMGILGIRVDESSQLERALRQAFAHSGPALVDVRIATQELAVPPAIKLEQAKGMGLYLLKAVMSGRGDEVIELVKTNLR

SEQ ID NO: 33323 - protein, 319 aa, Xanthomonas campestris pv. vesicatoria str. 85-10
MSLHEVRVAEVVDQGHRQRAIRLEPVGAQLPAFEAGAHVDLHLPDGLVRQYSIASAPHVRDHYLLCVKLADASRGGSRHLCEQLATGDRLRISTPRNLFPLHPGERHVLLAAGIGITPLLSMAEALEARGEAFVLHYYARRHADVAFSQRLQQGFTHGQVYLHLSDGGQSPRVHVPEELRQARARDQLYLCGPAAFMDHFTVLAKAHGWTAAQLHREHFAAAAPSLAHDADSAFEVELAASGRVVQVPADCSIASALRDAGIEVPLSCEQGMCGACLTGVLAGTPDHRDSVLSDAERAANRQITVCCSRSRSPRLVLDL

SEQ ID NO: 33324 - protein, 292 aa, Xanthomonas campestris pv. vesicatoria str. 85-10
MPIGFLGLGTMGLPMAHNLLRGGFALSVWNRSPERAQPLHDAGATVVEQPHDTAHGPLLFSMLADDDAVRQTLLERGVLDALPAGSVHVNMATISVALAHELTALHAERGVAYVAAPVLGRVDVAEVGKLNILAAGDEAAVARVQPMFDALGQKTWYIGRAPEQANAVKLAANFCLASAIGAMAEASALARGHGVDATQFLGMLTSTLFAAPAYQGYGRLIMQRQYLPAGFTATLGRKDVDLAIQAGADKQVPMPLGELLRAGLDEAIAHGDGNADWAVLADVSARRAGQVA

SEQ ID NO: 33325 - protein, 327 aa, Xanthomonas campestris pv. vesicatoria str. 85-10
MRKDTQWHRARVVSIADACPGVREIVLDPGAAARSFEVGSHVDFRVQLHGRDDVRSYSLVGEPRADGYYQIAVRQMPDSRGGSLHMWTLAPGDVVEMSPPSNNFALDESGEEILLIAGGIGITPIVGMAQRLARGHRAFRLLYAGRSRSAMAYVDTLEALLGERLQLQCDDSAGPPDLAAELARLSPNAEVYVCGPLGMLEAVRQHWHAAGRPRARLHFETFGNSGRVPAQAFVVKLPGLGLEVPVAENESMLDALADAGVELIAECRRGECGLCAVDVLDSSADIDHRDVFFSDEQRRENRKLCACVSRAVGGSISIDTGYRSKLG

SEQ ID NO: 33326 - protein, 402 aa, Xanthomonas campestris pv. vesicatoria str. 85-10
MSEVYLIDGIRTPIGRYGGALSSVRADDLGAVPIAALLARQSQLEPASIDDVYLGCANQAGEDNRNVARMSLLLAGLPSSVPGSTLNRLCGSGLDAIGTVARGIRAGELDLAIAGGVESMSRAPWVMGKADSAFARTQQLEDTTMGWRFINPRLQAVYGTELMGETAENVAQRYAIAREDQDAFALRSQQRVAAAQAAGFFDAEITPVAVAARKGGDASTVKHDEAPRPNTTADMLAKLKPVFRQPGTVTAGNASGLNDGAAALLLASAQAVQTHRLTPRARVLGFASAGVEPAYMGIGPVPATQRLLARLHLRIAQFDAIELNEAFAAQALACTRALGLADDAAHVNANGGAIALGHPLGMSGARLALTLLRQLEAGNGRLGLASMCIGVGQGVALAIERL

SEQ ID NO: 33327 - protein, 196 aa, Xanthomonas campestris pv. vesicatoria str. 85-10
MSDSLNAAALDQLFRTARTQNAFADTPVSHEVLRELYELVKWGPTAANSGPARFVFVTSAEGKAKLKPALSEGNAAKTLAAPVTVIVAHDEDFHEKLPYLFPHADAKSWFDGPREGRTESAFRNGSLQGAYLILAARALGLDAGPMSGFDNAKVDAAFFAGTPIKSNFLVNLGYGDPAGLFPRSPRLSFDEAARFE

SEQ ID NO: 33328 - protein, 458 aa, Xanthomonas campestris pv. vesicatoria str. 85-10
MSDPSAPDHLQRSLSNRHLQLIAIGGAIGTGLFMGSGKTISLAGPSILFVYLIIGAMLFFVMRAMGELLLSNLEYKSFIDFSTDLLGPWAGFFCGWTYWFCWIITAIADVIAIAAYAQFWFPGLAPWIPAILCVLLLLSLNLVTVKLFGEMEFWFALIKIIAIAALIITGAGLVAWGFRSPSGNVASLSNLWNDGGMFPMGIGGFFAGFQIAVFAFVGIELVGTTAAETADPRRNLPKAINSIPVRILIFYVLALIAIMAVTPWRQVVADKSPFVELFVLAGVPAAASLINFVVLTSATSSANSGIFSTSRMLYGLAEEQHAPKGFAKLSGAAVPARGLLFSCLCLLLGAMLVYLIPNLVTAFTLVTTLSAVLFMFVWSLILCAYIAYRRKRPEQHAASAFKMPGGVLMCYVCLAFFAFVIVLLTLQDDTRQALLASPVWFLLLAIGYAVKRRGNRQH

SEQ ID NO: 33329 - protein, 394 aa, Xanthomonas campestris pv. vesicatoria str. 85-10
MDSTLPYAGGYSRRSQDIAPFHVMSLLARANALEQAGHDVIHLEIGEPDFTTAAPIVAAGQAALAAGHTRYTAARGLPALREAIAGFYAQRYACNLDPERILVTPGGSGALLLASSLLVDPGKHWLLADPGYPCNRHFLRLVEGAAQLVPVGPDSDYQLTPALVESAWNADSVGALVASPANPTGSVLSRTQLAALSQALHARGGHLVVDEIYHGLTYGLDAHSVLEVDDGAFVLNSFSKYFGMTGWRLGWLIAPPDAVPELEKLAQNLYISASTIAQHAALACFTPESIAIFEARRGEFQQRRDYLLPALRALGFEIAVEPQGAFYLYADISGFSDDAQAFCAHFLETEHVAFTPGIDFGHYRANQHVRIAYTQSLPRLQQAVERIARGLKRL

SEQ ID NO: 33330 - protein, 659 aa, Xanthomonas campestris pv. vesicatoria str. 85-10
MSATAPHTLPVRTLRPVFVLAATVVCTFALLVSLFPLESGRVLLDAQTWASRNVGWYYLLAMTLYLVFVLATALSSYGNIKLGADHDEPEFSYLSWAGMLFAAGISITLFFFCVSEPLTHYLQPPQGGTGSGEASARQAMQVLFLHWGLHGWGVFALAAMALAYFAFRHNLPLALRSALYPLIGKRINGPIGYTVDALGIVATVFGLGADMGFGVLHLNAGLSTLMDVPHTHWVQVALIVAMMGAAIVVAVSGVEKGVRWMSDINMLLAIALLLFMLFAGPTQYLLNALMQNLGDYLGSVVNKSFDVYAYGGRADWLGNWTVFYWAWWIGWAPFVGLFIARISRGRTIREFVLGVLLIPLGFTLAWLSIFGNSALDQLLHHGQAAWAQQAIDAPQTVLYSLLQSYPWSRTVITVTVAISFVFFVTSADSGTVVLSTLSSHGGEPHDDGPRWLRVFWGVLTAVVTAGLLLAGSMEALKSAVVLASLPFSAVLLLMAWGLSRALSEESQRKRAQLYSPSPLIGQSRHHGGWRQRLGQAMHFPARDEVYRFMHDQVRPAIEAVTAQLQEEGWKVSSRIDDGDMEISVDHGEQQGFRYQIVMRGYLTPSFAAQRFRNQRYYRAEVYLYEGSQDYDLVGYSREQIINDIIDQYERHLQFLHLTR

SEQ ID NO: 33331 - protein, 579 aa, Xanthomonas campestris pv. vesicatoria str. 85-10
MSETLATDATAPAEKKDFIRQIVREDLASGKHTVIRTRFPPEPNGYLHIGHAKAICLDFGLAAEFGGLCNLRLDDTNPAKEDPEFVVAIQDDVRWLGYEWAQLRHASDYFQVYYLAAQKLIRDGHAFVCDLSAEQVRQYRGTLTEPGRNSPFRERSVEENLELFARMRAGEFPDGARTLRAKIDMASGNINLRDPALYRIKHVEHQNTGNAWPIYPMYDFAHSLGDAVEGITHSLCTLEFEDHRPLYDWCVDKVDLAGHPELLQPLLDKGLPREAAKPRQIEFSRLNINYTVMSKRKLTALVEEQLVDGWDDPRMYTLQGLRRRGYTPAAMRLFVDRVGISKQNSLIDFSVLEGCLREDLDAAAPRRMAVIDPLKLVLTNLPEGHTETLQFSNHPKDESFGTREVPFARELWIEREDFAEVPPKGWKRLVPGGEIRLRGAGIARVDEVIKNADGEIVELRGWLDPESRPGMEGANRKVKGTIHWVSAVHAVEAEIRLYDRLFSVEKPDDESEGKTYRDYLNPESKRNVRGYVEPSAAMAAPEQAFQFERSGYFVADRRDHSAATPVFNRSVTLRDTWAK

SEQ ID NO: 33332 - protein, 365 aa, Xanthomonas campestris pv. vesicatoria str. 85-10
MAVQVLVLKERAAGERRVAATPETVKKLVALGAGVWIEPGAGLASSMDDAAYLQAGAQLAGADAVAQAEMVLCVQAPSTGTLLGCKPHTVVIGMLAPDTDPARAQAFAARQLIAFPLERLPRTTRAQSMDVLSSQAGMAGYKAVLIAAQLAPRFFPMLTTAAGTMRPCKVLVIGAGVAGLQAIATAKRLGAQVEGFDVRPETREQIASLGARFLDLGVSAAGEGGYARQLSDDERAEQQRRLAEHLTGVDVVVCTAAVPGRPAPKIVTTEMARGMRAGSVIVDLVAETGGNCAATRPGETYELDGVVIAGPLNLASQGAVQASEMFARNVYAFAALLIKDRALTLDWDDELLAKTRWSAPAPTTA

SEQ ID NO: 33333 - protein, 319 aa, Xanthomonas campestris pv. vesicatoria str. 85-10
MQDQRNLLVFSGNANKPLAQSICKELGVRMGKALVTRFSDGEVQVEIEESVRRQEVFVIQPTCAPSAENLMELLVLIDALKRASAQSVTAVIPYFGYSRQDRRMRSSRVPITAKVAAKMICAMEADRVLTVDLHADQIQGFFDVPVDNVYASPLLLADIWRAYGTDNLIVVSPDVGGVVRARAVAKRLDDADLAIIDKRRPRANVATVMNIIGDVQGKTCVLVDDLVDTAGTLCAAAAALKQRGALKVVAYITHPVLSGPAVDNINNSQLDELVVTDTIPLSEAARTCAKIRQLSVAELLAETIRRIAFGESVSSLYVD

SEQ ID NO: 33334 - protein, 355 aa, Xanthomonas campestris pv. vesicatoria str. 85-10
MKLVDEAEILVTAGNGGNGCVGFRREKFIPLGGPDGGDGGAGGSVWIVADENVNTLVDFRHERTFKAQRGENGMGRQAYGKGGEDRIIVVPVGTVVINVQTDEVIGDLTRHGDRLLVAKGGKGGLGNMHFKSSVNRAPRQATTGEEGEERLLKLELKLLADVGLLGFPNAGKSTLIRAVSSATPKVADYPFTTLYPNLGVVSVEAYRSFVIADVPGLIEGAADGAGLGTQFLRHLQRTRLLLHLVDISPALGVYGEGGVDGVSPADQVRTIERELERHDPELLKKPRWLVLNKADLMFEDEARAAAESIVAELGWTAPWYLVSALGRDGTFPIMKDVMAFFDRQREDELDARNAG

SEQ ID NO: 33335 - protein, 295 aa, Xanthomonas campestris pv. vesicatoria str. 85-10
MSKIAFIGLGNMGGPMAANLIKAGHQLRVFDLAPAALEAASAAGAHAASSAQDTLADAEVVISMLPASRHVEGVYLGESGILAQIPDGALVIDCSTIAPVSARRVADAAKARGLTMLDAPVSGGTAGAAAGTLTFIVGGAADALERARPVLQAMGKNIFHVGDNGAGQVAKLCNNMALGVIMAATGEALALGVAQGLDPVVLSQMMAVSTGRSWATEVCNPWPGVLPNAPASRGYSGGFGNDLMLKDLGLVAESAVQAGVSIPLGELARNLYAMNSQAGNGALDFSSVVKLVAKI

SEQ ID NO: 33336 - protein, 300 aa, Xanthomonas campestris pv. vesicatoria str. 85-10
MSETSSPHRSGSVAVIGRPNVGKSTLTNALVGAKVSIVSNRPQTTRHRLLGIATFPEGQLVLVDTPGLHREQKRAMNRVMNRAARGSLEGVDAAVLVIEAGRWDEEDTLAFRVLSDAGVPVVLVVNKVDRLKDKTALFPFLAQVSEGRTFAAVHPVSALKRKGLDALVGDLLKLVPEAEAMFGEDEITDRSQRFLAGELVREQLMRQLGEELPYATTVEIERFAEDGALLRIGAVIWVEREGQKAIVIGKGGTRLKEIGGKARLQMERLFGAKVFLETWVRVREGWSDDEAALKAFGYSE

SEQ ID NO: 33337 - protein, 391 aa, Xanthomonas campestris pv. vesicatoria str. 85-10
MSDIVIVAAKRTAIGSFLGQFNAVPAPTLAAAAIQGALAQSGIAPADISEVIVGCVLPANLGQAPARQAAIAAGIPTSTGATTINKVCGSGMKAIMLGHDLIKAGSASIVVAGGMESMSNAPHLLPNSRTGNRYGNFQAVDHMAWDGLTNPYDGQAMGVFGEATAEKFGFSRADQDAFAIASVERAQAAQRSGAFADEIVPVTVTTRKGDVVVDSDEQPGKSDVAKIPTLKPAFKKDGSVTAASSSSISDGAAITVLMSADDAQRRGVTPLARIVGHVTHAQEPEWFTTAPVAAIQSLVSKLGWRLDDVDLFEINEAFAVVAMAPIRQLGIAHDKVNVHGGACALGHPIGASGARLVVTLVNALRSRGGKRGIATLCIGGGEATAIAIELI

SEQ ID NO: 33338 - protein, 465 aa, Xanthomonas campestris pv. vesicatoria str. 85-10
MPESSSATAPQFQRSMQVRHLVMLSLGGVIGTGLFFNTGYIIASTGALGTVLAYLIGALVVYLVMQCLGELAVAMPQTGAFHVYAARYLGPATGYVVAWLYWLTWTVALGSSLTAAAFCMQYWFPHSPAWPWCLLFCALIFGLNTVSARWFAEGEFWFSLIKVVTILVFIVLGGAAVIGLLPLADGSPAPGLRHLRAEGWFAHGALPILMTMVAVNFAFSGTELIGVAAGETAQPARAIPLAIRTTLVRLVVLFVGTVLVLAALLPAKQAAVETSPFVRAFELLGIPYAADILNAVILTAILSAANSGLYAAARMLWSLANEGTLPSGLARLTGRGIPLRAVSLSMLGGLLALLTGVYAPETVFVAISAVSGFAVVVVWLSICAAHYRFRRQLLRDGAALETLAYRAPWYPWTPILGFSLCLLACIGLAFDPQQRIALWCGVPFVALCYGAYALTQWLAARRLHA

SEQ ID NO: 33339 - protein, 564 aa, Xanthomonas campestris pv. vesicatoria str. 85-10
MCSIFGIFGLQPGDDLQALRRQALECSQRQRHRGPDWSGVYVDTGAILVHERLAIVDPAGGSQPLLSDDGQLALAVNGEIYNHRELKAELLQPYAFQTGSDCEVINALYREDTPASYLNRLNGIFAFALWDKTEGRVIIARDPIGVVPLYWGHDREGRLRVASELKSLVDDCADAAQFPPGHWYDSATGALSRYYERAWRHYDAVEGVQVQLQELREAFERAVHRQLMTDVPYGVLLSGGLDSSLVAAVAARYARHRIEENDTTEAWWPRLHSFAIGLKGSPDLAAAEVAAAALGTVHHGFEYTFDEGLDALPDVIRHIETYDVTTIRASTPMFLLARRIKAMGVKMVLSGEGSDEIFGGYLYFHKAPNAREFHEELVRKLDALNNYDCLRANKSMMAWGVEPRVPFLDREFLDVAMRMDARFKMIDKTSGGAARMEKGVLREAFAGYLPESILWRQKEQFSDGVGYGWIDGLKAHAQAQVSDRELAAADRRYPVNPPQTKEAYFYRSLFEQFFPGQAAAETVPGGKSIACSSPTAIAWDASFAAMADPSGRAIAGVHAQALAS

SEQ ID NO: 33340 - protein, 646 aa, Xanthomonas campestris pv. vesicatoria str. 85-10
MCGLAGMLLASPRLHGEQLDALVRPMGAALRHRGPDDAGTWCDAQAGVALAHQRLSILDLSPLGHQPMRSADGRYVLAYNGEVYNFAQLRAALSALGHRFRGHSDTEVLLAAVVEWGLDETLTRCNGMFAIALWDERDNCLFLARDRVGKKPLYYGWAGDTLVFGSELKALWQHPDFDNGVDRDALTLLLRLGYIPAPACIHEHTFKLMPGRVLRMDAQAVAAGAAAHRPDQAQQPFWNAREAMQRALATPFTGTDAQAEEQLDSVLRDAVALRMVADVPVGVFLSGGTDSSIVTAMMQAQSAQPVHTFSIGFEGSHHDEAPLAREVATHLRTDHTELYVSGADALAVVPGLPDMFDEPFADASQVPTALVARLARGGVTVALSGDGGDELFFGYGRYQRALRNWRMHGLVPGPLRRLMAVAARRNGESSRTGGLAALVAEAGARGIGDIYRNRISRWRDPAAVVLGATEPDSFYSLADPLHGSGTPADAMMLADFAAYLPDDLLCKVDRTTMAVGLEARAPLLDWRVAEFAWSLPLSLKYRDGVSKYLLKRVLCRYLPDAMVYRGKRGFGAPVSAWLRGDLHGWADDLLAHGALQREGVFAADSVARLWRDFNGGERKWHTHLWTVLMFQAWQAHWREQRAAVVR

SEQ ID NO: 33341 - protein, 641 aa, Xanthomonas campestris pv. vesicatoria str. 85-10
MGKIIGIDLGTTNSCVSIMDGGKARVIENSEGDRTTPSIVAYTKDGEVLVGASAKRQAVTNPKNTFYAVKRLIGRKFTDGEVQKDISHVPYGILAHDNGDAWVQTSDAKRMAPQEISARVLEKMKKTAEDFLGEKVTEAVITVPAYFNDSQRQATKDAGRIAGLDVKRIINEPTAAALAYGLDKNGGDRKIAVYDLGGGTFDVSIIEIAEVDGEKQFEVLATNGDTFLGGEDFDNRVIEYLVDEFNKDQGIDLRKDPLALQRLKDAAERAKIELSSSQQTEVNLPYVTADASGPKHLNIKLTRAKLEALVEDLVKKSIEPCRTALNDAGLRASDINEVILVGGQTRMPKVQQAVADFFGKEPRKDVNPDEAVAVGAAIQGGVLAGDVKDVLLLDVTPLSLGIETMGGVFTKIIEKNTTIPTKASQTFSTAEDNQSAVTVHVLQGEREQARFNKSLAKFDLSGIEPAPRGMPQVEVSFDIDANGILHVSAKDKKTNKEQKVEIKAGSGLSDEEIQRMVADAEANREEDKKFQELVQARNQADGLIHATRTAITEHGSKVGGDVIGKVEAALSDLETAMKGDDKAQIEARTKTLEEAGQSLYAAAAAAEQGGNADAASGNAQASKAADDVVDAEFTEVKDDKK

SEQ ID NO: 33342 - protein, 589 aa, Xanthomonas campestris pv. vesicatoria str. 85-10
MTEPAAARPNPLRKLGSLRTLWPFVQRQRGLFAAWLVALSISAAATLSLPAAVKRMIDQGFSGDSQINQAFSLLFAVSVVLALATAARFYFVALLGEKVVADLRGRLYAHLIGLDAGFHDRSRSGELVSRLSADSELLRGLIGTTMSVALRSSVTVIGSMVMLLVTSPRLAGFTLIGIPLAVLPIVLGARRLQKISRASQDRVADANTLAAETLGAVRTVQAHARERYESQRFSTALFAAIDTAKLRIRTQATVTAVAIMLIFGAIVAVLWLGAHDVIAGRMTPGTLGQFVLYALIGGGSVGALAEVWNELQRAAGGMGRVSELLDEQPAIVAPATPQALPQPLRGAIHFDRVVFHYPQRPDAPALDGFDLHVSPGETVALVGPSGAGKSTVLSMLLRFHDPVSGKVRIDEIDLRDVDPVLLREHIALVPQQPTLFAASAADNIRYGRLQASDAQVEAAAAAAEADGFIRALPQGYASELGERGTRLSGGQQQRVAIARALLKDAPILLLDEATSALDAQSERAVQQALERLMEGRTTLVIAHRLATVLKADRIVVMDAGRIVAQGTHAQLIAEGGLYAELARLQFIDQ

SEQ ID NO: 33343 - protein, 267 aa, Xanthomonas campestris pv. vesicatoria str. 85-10
MSGNDVGSEAGPLPSPCIGVCSLDAQSHCVGCLRSLDEIARWMSMSDAERQDYLHTMLPARALTARLPEYAQLRRALYPLDTAPAGPGWNHAELIDLTDGDPSAEAAVLCGLVPREQGTTVLLTRRTDSLRHHAGQVSFPGGRMEPSDADAAAAALRESCEEIALGAQHVHALGYLDPFVTVSGFRVTPVVAVIDPAFVAVPQPDEVADVFEVPLAYLMDPDNLRSVELEFRGRPRRVLEYDWPAHRIWGATAAILLNLRRRLEQVA

SEQ ID NO: 33344 - protein, 648 aa, Xanthomonas campestris pv. vesicatoria str. 85-10
MRMNDLTKNLLLWVVVAVVLMVVFQSFSPRMAGGVGADSITYTQFLKEVDSGRVKSVDYTDETNLAVNAIRFKRTDGSEATVYGPRDDKLVDVLYSKNIEMTRQKPSTGPGFWSLVLNFLPVILIIGFWLFIMRQMQGGGGGAKGAMSFGKSRAKLQGEDQIKITFADVAGCDEAKEEVGELVDFLRDPTKFTKLGGKIPRGVLMVGPPGTGKTLLAKAIAGEAKVPFFSISGSDFVEMFVGVGASRVRDMFEQAKKHAPCIIFIDEIDAVGRHRGAGLGGGHDEREQTLNQLLVEMDGFEGGEGVIVIAATNRPDVLDPALLRPGRFDRQVVVGLPDVKGREQILRVHMRKLPLAEDVVPMVIARGTPGFSGADLANLCNEAALFAARGSEKEVRMDHFDRARDKILMGAERRSMAMSEDEKTLTAYHEAGHAIVGRLVPEHDPVYKVTIIPRGRALGVTMYLPEGDRYSMNRVAIESQLCSLYGGRVAEELIFGGDKVTTGASNDIERATKMARNMVTKWGLSDELGPVAYGEEEDEVFLGRSVTQHKNVSDETARKIDEVVRSILDKAYSKTKTILTENLDKLHAMSQLLLQYETIDVPQIDAIMEGREPPPPAGWGKSDKDGGNNNDKGSPRPLPPIAGPAEQL

SEQ ID NO: 33345 - protein, 126 aa, Xanthomonas campestris pv. vesicatoria str. 85-10
MHLSLLKAKIHRATVTHSELNYEGSIAIDGLLLEATGIREFEQVHIWDVTNGARFSTYAIRAEEGSGIMSLNGGAARHVQVGDLIIVAAFASMSEDEAKTFKPNLVYVNAHNAISHTNHSIPTQAA

SEQ ID NO: 33346 - protein, 476 aa, Xanthomonas campestris pv. vesicatoria str. 85-10
MFKQLWATKHPHASHEAADGLGLQRALGPWGLTALGIGAVIGGGIFVITGQAAADHAGPAIMLSFVLAAVCCAFCAMAYAEFAAMVPVSGSAYTYTYATFGELAAWLIGWMLVLEYGVSASAVAVSWTGYFLSLLEHFDIHLPAAFVSAPLDGKLQPTGAIANLPAAGIVLLLTWLCYVGIRKSSAMNMAMVILKTGLILLVIAVGWKYVDTSNWHPFIPANEGPGKYGMEGVLRGAAMVFFAYIGFEAVSVAAQESHRPQRDLPIGMILSLVICTVLYIAMAAVMTGLVPYTLLGTDEPVVTAVAAHSQLAWLRVVVEVGALIGLSSVVLVMIIGQPRIFMIIARDGLLPSIFTRIHPKYRTPHVNTVITGVGIALLAAVFPLDVLGELTSMGTLIAFAAVCAGVLILRRTHPELPRPFRMPAAWLICSAGVLSCLALLSAMTLHNWMLMGLWTLVGLVIYFGYGYRHSRLRDGR

SEQ ID NO: 33347 - protein, 490 aa, Xanthomonas campestris pv. vesicatoria str. 85-10
MLKSLLRVKSIEPAGHVDAGEPVEGSLQGEATLQRTLTAKHLIMLGIGAVIGAGIFVLTGQAAANHAGPAVMLSFVFAGIACAFAGLCYAEFAAMMPVSGSAYSYSYATLGEGIAWFIGWCLVLEYLFAGSSVAVGWSAYLISFITGTLGLPFPAELAGAPLAWDGHGFVSSGNLVNLPAVLIVAAVSILCYVGVTQSAFANAIVVAIKVVVICLFVGFGISYIDPANWHPFIPENTGPGQFGWDGVFRAASIVFFSYIGFDAVSTSAGETKDPQKNMPIGILVSLAICTVIYIIVCAVLTGLLPYTQLGTAKPVATALEAHPQLTWLKTAVEIGAIAGLSSVVLVMLMAQPRIFYTMAKDGLMPKLFGKVHPKFRTPYVGTLFVGVVAALLAGVIPLNVLGELVSMGTLLAFATVCAGVLVLRFTKPDLPRPFRVPLAMVICPLGALACLFLFFQAFQEHWKVFVGWTVIGLAIYFGYGIHHSRLAKRA

SEQ ID NO: 33348 - protein, 440 aa, Xanthomonas campestris pv. vesicatoria str. 85-10
MRTAHRGHPIAHPIWHSCRPDCCIAFPMSPKKTSFPKQDIRVLLLEGISPTAVDVFRAAGYSQIELHAKSLPEDELIARISDAHIVGIRSRTQLSAEVLAHAKRLIAVGCFCIGTNQVDLDAAELAGIPVFNAPYSNTRSVAELVIAEAILLLRGIPQKNAQCHRGGWSKSAAGSHETRGKVLGIVGYGHIGTQVGVLAEALGMQVIFHDIETKLSLGNARAAIDLDELLARSDVVTLHVPETPSTKDMIGAAEIARMKPGAHLINASRGTVIDIDALDAALTSGHIGGAAVDVFPIEPKGNGDAFESPLTAHDNVILTPHVGGSTLEAQDNIGIEVAAKLVRYSDNGSTLSAVNFPEVTLPEHAESLRLLHIHRNVPGVLSQINELFSRHNVNIDGQFLRTDPKVGYVVIDVSASEELAGVLKDELGQITGTLRTRVLY

SEQ ID NO: 33349 - protein, 401 aa, Xanthomonas campestris pv. vesicatoria str. 85-10
MSKQIQEAYIVAATRTPVGKAPKGVFRNTRPDDMLAHVLRAVVAQAPGIDTSRIDDAIIGCAMPEGEQGMNVARIGVLLAGLPNSVAGQTINRFCSSGIQAIAMAADQIRLGNADLMLAGGTESMSMVPMMGNKVAMSPSVFADDHVAIAYGMGITAEKVAEEWKVSREDQDAFALASHQKAIAAIAAGEFRDEITPYEIHSHQPDLAGNVIALRKRLVDTDEGPRPDSSLEGLAKLRPVFRNGQFGGSVTAGNSSQMSDGAGAVLLASEQAIKDYGLTPLARFVSFSVAGVRPEVMGIGPIAAIPKALKQAGLTKDQLDWIELNEAFAAQALAVIRDSELDPSKVNPLGGAIALGHPLGATGAIRAATLVHGLRRRQQKYGMVTMCIGTGMGAAGIIEAL

SEQ ID NO: 33350 - protein, 362 aa, Xanthomonas campestris pv. vesicatoria str. 85-10
MSQAEYPVLRVAYLPLIDCAPLVAAQHLGLDHQHGLQLELQRQASWAGVRDRLLAGEVEAAHTLASLVYAIDLGIAGPQCPMALLMTLNHNGQAITLAPALAHALAAGRTLPQALAGLGRRAVFAQTFPTGTHALWLYYWLAAGGVDPIGDVDVLSIPPPQMPEALASGLVDGYCSGEPWAAVAEAQGTGRRVIRSGELWPGHPEKVLACRREFAALQPELSERLTACVLEACRWLDAAPANRAHCAQWLAEPQHIGVPATHLAVCLGAHPEVESHVGCGAAADDATALAFHRGGVVNMPWLSDGEWFLGQFQRWGWHDVQDDDIARLGDIHRLDNYRRAAARVGVVAPDSDHRSNRLFDTP

SEQ ID NO: 33351 - protein, 388 aa, Xanthomonas campestris pv. vesicatoria str. 85-10
MIRTGTMPLTTKLPKVGTTIFTVMSQLAAEHGAVNLGQGFPDFAVPQRLVDELSKAMAAGHNQYPPMTGVAALRQAIAGKAQRCYGAQVDADTEITVTSGATEAIFNAIHAVVRAGEEVIVLDPAYDCYEPAIDLAGARAVHVALHPQTFAVDWAALRAAITPKTRLLMINSPHNPSGAMLSAEDMQTLTELLRGTDIFLLSDEVYEHIVFDGRRHESVLRWPELRERALVISSFGKTYHCTGWKIGYAIAPPALTAEFRKVHQYNTFTSFGPAQHAFAAMIRDEPEHDEQLGAFYQAKRDHFRERLLTTRLKPLPVPGGYFQLVDYSAISDLPDTEFVKWLTIEKGVAAIPLSPFYQNAPAGQRLARLCFAKNDATLDAAIERLRRL

SEQ ID NO: 33352 - protein, 411 aa, Xanthomonas campestris pv. vesicatoria str. 85-10
MSAASTNPESRIPTPGTKDIVLAFSGGLDTSFCIPYLQERGYAVHTVFADTGGVDAEEREFIEKRAAELGAASHVTVDGGPAIWEGFVKPFVWAGEGYQGQYPLLVSDRYLIVDAALKRAEELGTRIIAHGCTGMGNDQVRFDLAVKALGDYQIVAPIREIQKEHTQTRAYEQKYLEARGFGVRAKQQAYTINENLLGLTMSGGEIDRWEAPGEGARGWCAPRSAWPSEALTVTLKFVEGEAVELDGKPLPGAKILAKLNTLFAQYGVGRGVYTGDTVIGLKGRIVFEAPGLISLITAHRALEDAVLTKQQNRFKPDVARKWVELVYEGFYHDPLKSDIEAFLKSSQSKVNGEVTLETRGGRVDAVAVRSPHLLNTKGATYAQSADWGVEEAEGFIKLFGMSSTLYAQVNR

SEQ ID NO: 33353 - protein, 451 aa, Xanthomonas campestris pv. vesicatoria str. 85-10
MRNEHLKPTLGTWQLWGIAVGLVISGEYFGWSYGWSTAGTLGFLVTTLLVAVMYTCFIFSFTELTTAIPNAGGPFAYSLRAFGTYGGMLAGLATLIEFVFAPPAIAMAIGAYLNVQYPTLDPRLAAVGAYLFFMSLNIVGVAIAATFELIVTLLAVIELLVFMGVVAPGFSVARFAANGWAGSDGFGPAAISGIFAAIPFAIWFFLAIEGAAMAAEEAKDPRRTIPRAYIAGILTLVILALGVMVFAGGVGDWRQLSNINDPLPQAMKAVVGNSSTWLHMLVWIGLFGLVASFHGIILGYSRQFFALARAGFLPHGLARLSRFRTPHRAILAGGVIGIAAICSDSVVKIQGMSLTAAMITMSVFGAIVMYVMSMLSLFRLRRAEPGLERSFRAPGYPVVPAIALLLALVCLVAMVWFNPIVALIFLGLLLFAAACCVLSLRTQHTPVASAG

SEQ ID NO: 33354 - protein, 528 aa, Xanthomonas campestris pv. vesicatoria str. 85-10
MTTHAATTQGKFHKRLSLTDLTFIGLGSIFGSGWLFSASHVSSIAGPAGIVSWILGGIAVLLLGLVYCELGAALPRAGGVVRYPEYSHGALLGSLTGFITLIAFSSLIAIEVEAARQYAAAWFPWLSQPHSTHPSVAGWLVQLALLVLFFVLNYFSVKTFALANNIVSIFKFLVPILVIVLLMQHFDAGNLSVHGFAPSGMAGVEAAISAGGIIFAYLGLTPIVSVASEVRDPQRNIPIALILSVALSTVIYVLLQLAFLGSIPAAQLAQGWACIDKAFSLPYHDIALALGMAWLAALVICDAMVSPSGTGNIYMNATPRVVYGWARSGGFLPVLTRVDPASGIPRPALWLSLGLSIFWTLPFPSWETLIGVVSAALVLSYAVAPITVAALRRSAPDLPRPFFVRGLPVMGPLSFMVAALIVYWSTWPTLSWLLGLQVLAFVLYVLFRLPLRQGRARLVRQVRASLWLIVFFVLVMLVSWAGTFGGHGWIAHPFDTLSVAVIAFCIYHWGARSGLRSDELALEEDDGE

SEQ ID NO: 33355 - protein, 370 aa, Xanthomonas campestris pv. vesicatoria str. 85-10
MWARCRRAFPVRSMSDGRRPRVWVSQPLFDDVVAQLGEHFELTTTQRVSAYSPAELAAQLAPLDGALITLNERIGAAEIAAAPQLRAIANVGVGYNNLDIDALSAAGILASNTPDVLTETTADLGFALLMATARRITESERWLRDGQWGQWSFKTMLGADIHGSTLGILGMGRIGQGIARRGAHGFGMRVLYHNRSPLPAATEQALGARYVDFETLLAQSDHLVLVLPYTRDSHHIIDAAALGKMRATATLVNIARGGIVDELALADALANGRLAGAGLDVYEGEPHVRPELLALNNVVLTPHIGSASLATRRAMVQLAVDNLIAALGKGPHAGNPPSALNADAVAAAKRGGTGVDAKETGVTGSISTKR

SEQ ID NO: 33356 - protein, 869 aa, Xanthomonas campestris pv. vesicatoria str. 85-10
MSAPHSTDRWIVLKFGGTSVSRRHRWDTIGKLAGKRAHETGGRVLVVVSALSGVTNELTAIADGAADSAQRVAALDQRHREFLAELELDADAVLGERLAALHALLGDARAAMRTLDWQAEVLGQGELLSSTIGAAYLHASGLDMGWLDARQWLSAPPPQPNQSEWSKRLSVSCQWQSDADWRTRFAAQPTRLLITQGFISRHADGGTAILGRGGSDTSAAYFGALLGASRVEIWTDVPGMFSANPKEVPDARLLTRLDYYEAQEIATTGAKVLHPRSIKPCRDSGVPMAILDTERPDLPGTSIDGNAEPVLGVKAISRRNGIVLVSMEGIGMWQQVGFLADVFTLFKKHGLSVDLIGSAETNVTVSLDPSENLVNTDVLAALSADLSQICKVKIIVPCAAITLVGRGMRSLLHKLSDVWATFGQERVHMISQSSNDLNLTFVIDEADADGLLPILHAELIDSGAMPVSEGEVFGPRWRQIIGSVRPRPTPWWHAERAHLLSLSKAGTPRYAYHLPTVRARAHALAQIAAVDQRYYAIKANAHPAILMALEQAGFGLECVSHGELRRVFQTLPELSPRRVLFTPSFAPKAEYEAAFALGVTVTVDNVEALRNWPEVFRGRTIWLRIDLGHGDGHHEKVNTGGKASKFGLSSTRVDEFVDVARTLEVTITGVHAHLGSGVETGEHWRMMYDELAGFARRIGTVETIDIGGGLPIPYSAEDEPFDLEVWAKGLAEVKAVHPGYRLAIEPGRYLVAEAGVLLASVTQVIEKDGVHRVGLDAGMNTLIRPALYDAWHDIENLSQLDAPAGGMFDIVGPICESSDVFGKRRRLPAATAPGDVVLVADAGAYGYTMASTYNQRELPREEVIDASTG

SEQ ID NO: 33357 - protein, 155 aa, Xanthomonas campestris pv. vesicatoria str. 85-10
MSRKVAARKSRIHGNGMFALAPLRKGERIIQYKGRLRTHAEVDADDAGDVESGHTFLFTLSDDYVLDANYEGNVARWINHSCDPNCEAVIEEAEGDDRRKDKIFIEAKRDIKPGEELTYNYGITLAERHTPRLKKIWECRCGSKNCTGTMLQPKR

SEQ ID NO: 33358 - protein, 254 aa, Xanthomonas campestris pv. vesicatoria str. 85-10
MLNIQNLHASIAGKDILKGLSLDIQPGQVHAIMGPNGAGKSTLGNVLAGRDGYEVGAGSVQFDGKDLLDLPPEERAAAGLFLAFQYPVEIPGVNNTYFLRAALNAQRKARGEDELDSMQFLKLVRQKLAVLHLKDELLHRGVNEGFSGGEKKRNEIFQLAVLEPKLAILDETDSGLDIDALKSVADGVNALRLPERSFLVITHYQRLLDYIKPDVVHVLAEGRIVQSGGPELALELEKHGYHFLKDRVVPEVAA

SEQ ID NO: 33359 - protein, 333 aa, Xanthomonas campestris pv. vesicatoria str. 85-10
MAVSPLPSATVSDASLVASGQRVLQIEREALASVGARIGSEFAAACRLVLASRGRVVATGMGKSGHVARKIAATLASTGTPAFFVHPGEAGHGDLGMITEADIVLALSYSGESDEVRMLLPVLKRQGNPIIAMTGRTGSTLAQAADVHLDVSVSAEACPLHLAPTSSTTASLAMGDALAVALLDARGFTADDFARSHPAGSLGRRLLLHITDVMHAGEDLPRVREDASLSEALMEMSRKRLGMTAVVDADDRLIGLFTDGDLRRALDSDIDVRSAGIAQVMTRNPRTIAADQLAAEAARLMEDYKINGLIVVDAQHRAVGALNIHDLLRAKVV

SEQ ID NO: 33360 - protein, 462 aa, Xanthomonas campestris pv. vesicatoria str. 85-10
MPLPTDSVAETAAPAAPALRHALKPRQLMMMGLGTAIGAGLFLGSGVGIHAAGPAVLISYLIAGALVIIVMNALGEMAAAKPASGAFSVYAADAMGPTAGATVGWLWWFQVVVVIAAEAVGAAGLLATVWPALPVPLLALLFMATFTAINLLGVRNFGEFEFWFAILKVLAIVVFLLIGVALLAGWLPGVASPGLSNFTQNGGFAPKGLAGIGSALLVVVFAFGGTEIVAVAAAETADPGRSLARTIRTVAWRILVFYIGSISVIVAVVPWTSAALSSPFAAVLDVARIPGAATAITLVAVVALLSALNANLYGASRMIFSLAQRGEAPRLLARTSGEQVPLVAVIASVLFGFAAAALELLYPNKVLPMLLNIVGATCLLVWTISLVSQLILRARADRAGLALPFRMRGYPFLTVLALVILGVIFVLLASSADTRAQFLSMVALTAVIAAVSEVARRLRARM

SEQ ID NO: 33361 - protein, 460 aa, Xanthomonas campestris pv. vesicatoria str. 85-10
MTDTPRRDDAATLQRFGYAQELKRQLTLKDLLIYGLVCMVPTAPFSIFGGVFDISAGMVPLTYLVGFVAMLFTALSYQQMSQAFPVAGSVYAYVGRGLSSGMGFLAGWAILLDYLLVPTLLYVVGANAMQTVLPAIPQPAWIGFFVVLNTVVNLRGIETTARANRFFLLAQLLVLAVFVVLATLAIQRGVNGAHWSWRPLYNPQAFSPQLIFSALSVAVVSFLGFDAISTMSEEARGGNRVVGRATLLALLIVAGLFILQTWLAALLQPTLQRYPSAQASNDAFFEIGRLIAGPWLQIVIALTVAISAAIANSLVAQAATSRLLFAMARDRQLPGFLRYIHPRTGVPQRAILLVAGLSLVLGEVFVGQIALLSSLCNVGALTAFVLLHIAVLWHFRTHGRRVLHGVVPLIGIVILAYVLLNADLHAQLGGAAWMAVGLTVLAFLKLSGRSTELRASDALE

SEQ ID NO: 33362 - protein, 455 aa, Xanthomonas campestris pv. vesicatoria str. 85-10
MSRLVVVSNRVAVPGETRAGGLAVGLLAALKERGGMWFGWSGKTVRGDSGGMHEQTEGDITFVTMDLNKRDIDSYYNGFANRTLWPLLHFRLDLVDYDRATREGYMRVNRLFAEKLAPLLKDSDTLWIHDYHMIPLGAMLRELGVGCKMGFFLHVPMPSADLVQAMPDHARLFSTFYAYDLVGFQTQRDAERFKAYVRLFGGGRILEGDLVEGPGGRRFTASSFPIGIDTDLIAHQAKASAGKQAVRDLRESLRGRQLAIGVDRLDYSKGLPERFQGFERYLERYPDQSGSLTYLQIAPVSRGDVTEYRQLRSQLEQIAGHINGGHAEPDWTPLRYVNQNFSHATLTGFYRAASVCLVTPLRDGMNLVAKEFVAAQDPADPGVLVLSLFAGAADEMKEALLVNPHDLDGVADAIATAASMPLASRIERWHAMMDHLRKNNINHWRQRYLQALSEV

SEQ ID NO: 33363 - protein, 769 aa, Xanthomonas campestris pv. vesicatoria str. 85-10
MSTDDFKQAALDYHRQQPAGKIKVTATKPMLTQRDLSLAYSPGVAFACEAIVEDATQASELTARGNLVAVITNGTAVLGLGNIGPLASKPVMEGKGVLFQKFAGIDVFDIEINENDPDKLVDIIASLEPTFGGINLEDIKAPECFIVERKLRERMNIPVFHDDQHGTAIIVGAAVLNALVVTGKKIEEVKLATTGMGAAGISCVNMLVSLGLKPENILALDRDGVIHTGRTDLDPDKQRYARDTDKRTLAEIVEGADIFLGLSAAGILKPEMVASMARQPVIFALANPNPEITPEVAKAVRPDCIIGTGRSDYPNQINNVLCFPYLFRGALDVGATGINEEMKIACVKAIAAMARREASDLGAAYGGETPSFGPDYLIPRPLDPRLLVELSSAVAQAAMDSGVATRPITDMEAYRDKLGQFVYRTSLMMKPVYDRARADKQRVVYAEGEEEVVLRAVQNVVDEGLAFPILIGRPDVIEARIERMGLRLTAGVDFEITNILDDPRFNDYWQYYHALTERRGVTVTAAKELMRSRPTLIAAVMVARGEADAMLSGVVGRFHKKLGYARSVIPLEPRVSSTSAMTGVINQLGVFFFLDTHVQEDPTVEQVVEATLQAAYRLKLFGIEPNIALLSHSNFGSHDSRDALKMRQVREALLKRKPELNIDGEMQGDTAWDEALRKQIMPNSTLKGRANLFVLPNLEAANIAYNLVRVFTDGVAIGPILMGISKPVHILTTSATSRRVMNMTAIAAVDAQIRRQRDAEKAAADKGSD

SEQ ID NO: 33364 - protein, 423 aa, Xanthomonas campestris pv. vesicatoria str. 85-10
MSTAPQKPLAIRERLSEVRYEIRGELARRARELEAQGRKLIKLNIGNPGAFGFRAPEHLQRAIADDMGRTDPYTHQQGLPEAREAVATAYSRRQHPDAHPDRIFIGNGVSELIDLSLRALLNPGDEVLVPSPDYPLWSAATILNDGRPVYYRCAPENGFQPDPVEIETLVSSRTRAIVLINPNNPSGASYSRELLERIVAIATKHNLLLMVDEIYDQVLYDDAAFVPVAPLAGAHPCITFSGLSKVHRACGWRVGWALLSGDQARINDLRNAMDLLGALRLCANVPGQYAIDAAVNGPDTISALCAPGGRLYETRRAVIEACAASEHLQLVAPAGALYAFPAVVGAAARNFDDHAFALDLMNEEGVLVVPGSSFNVPYRHHFRVTLMPEAGVMRDVFARIDRALARRAEAITKVVPLKPRNVA

SEQ ID NO: 33365 - protein, 308 aa, Xanthomonas campestris pv. vesicatoria str. 85-10
MSLDPALRSRIDTLLQSSRVVLFMKGQPGMPQCGFSAKAVGVLDGLGIDYAHVNVLADQEIREGIKAYGDWPTIPQLYVDGELIGGSDIIVQMADSGELSSMLGLQAPDRSPPKITITPAAVEMLKSALADAPDASLTLAIDANFQPNFQLAPTNPNAIAAESNGLRVQFDLASARRADGITIDWVDDIRGRGLAIDNPNAPKPVQELSVRDADDRLKAGSLTLVDVRPADERALATVAAPFRTLDAHERAAIEQLPKDTPLAFLCHRGGRSLQAAEHFRGLGFTNVYNVTGGIDAWSDEVDNGVAKY

SEQ ID NO: 33366 - protein, 531 aa, Xanthomonas campestris pv. vesicatoria str. 85-10
MSEHSLRRDVGPFALMLTGLGSIIGSGWLFGAWRAAGLAGPGAIWAWVLGAAIITTIALSYAELGAMFPESGGMVRYSHYSHGSLVGFIAGWANWIAIVSVIPVEAEASVQYMASWPWAWAQGLYVQAPGGAGELSVPGLLISAVLVLVYFFLNFWSVKLFARSNTLITVFKLVVPAATGVALIASGFHSENFSVGIHGDSHVLDLAAVLTAVATAGIVFSFNGFQSPVNLAGEARNPGRSIPFAVLGSIALATVVYVILQVAYIGAVPPDLLAKAGWHGIDFRSPFAELAIIVNLHWLAMLLYIDAFVSPSGTGITYTATTARMVYGMEKNGTMPAVLGKLHPVWGVPRMAMFFNLAVSFVFLFFFRGWGTLAAVISVATIISYLTGPISAMALRRHAPELHRPLRIAALPVLAGVAFVMATELLYWARWPLTGEIILLMVVALPVYCYYQAKQGWPDLRRNLKGAAWMICYLPTIALVSWAGSTDFGGHGYLSYGTDLVVVAVVGAVFYVWGVRSGWRTPSVEKAVAQA

SEQ ID NO: 33367 - protein, 438 aa, Xanthomonas campestris pv. vesicatoria str. 85-10
MSTPQPAPDATGLVRVVSRWQIVGLSINDVIGSGIYLLPAATAALLGPMSLWAVMLAGLAVALLVLCYAQAGSYFDTPGGSYLYTREAFGPFVGFQIGWMIWLTRISSAAALSNGLADAVARFWPTASTDPWARLLVVVGSLGLLTAINVIGVKSAARTGIALVIGKLVPLLLFVAIGLFYVDWSWAFAGTAPDLRDLGNLGEAALLLLFAYAGFENIPAAAGEYRNPRRDVPFALITMIVTVTLIYAAVQVVAQGTLPNLAASPTPLADAASRFGGEALALILTVGATISILGTTSNTVMLGPRFLFALARDGYGPAFLARVHPRFHTPAAAVLTQGALSLALALSGSFTQLALLSMVTRLFAYIGTAAAVIVLARRYRQRTDTLRLPGGPAIPIAALVLSLGLLASASWQNLAAAGVALLVGWVFYLFPRKQVENG

SEQ ID NO: 33368 - protein, 364 aa, Xanthomonas campestris pv. vesicatoria str. 85-10
MRIVRPMNLASPRKSKSPLPARLARRLVSPQLFDFWATRLNPLWTLEQPMARLVQRTPASRDAVTLVLQPNGHWRGLQAGQHVSLGVEIDGRRLLRSYSPTVQADGRLAITVKAIEGGLVSRFLAHDAALGTVVSLAPAFGDMLLPTTPTPLVLLAAGSGITPMRALLQAAAQAGMPMDVDLLYWVRQRDEACFVDEFAALAAAHPRLRVQLLTTREGETPAERVDTYSLDHIAALEQRHVMACGPGGFVQAARERLQGRVAAFQAEAFSVPALDQAETGQVQVQLSRSGRTLTLPRGQSLLEGLEAQGLRPKHGCRMGICNTCACPRQSGTTRHLLTGERSNEPTAQVRLCISAPSTDLILDL

SEQ ID NO: 33369 - protein, 307 aa, Xanthomonas campestris pv. vesicatoria str. 85-10
MATQYVPVSLIGVPTDIGAGHRGARMGPEALRIAGLQEALVGRGVEVRDLGNLDGPRNPWQAPQAGYRHLDEVVAWNQALMDASYAELRAGRMPIMLGGDHCLGIGSITAVAKYCREQGRPLRVLWLDAHSDFNTSEVTPSGNVHGMPVACLCGLGPESLTHLGGSAPALLPEQVRQIGIRSVDPEEKRLIKQHRIDVYDMRYIDEAGMKRTMEAALQGMSADTHLHVSFDVDFLDPSIAPGVGTTVPGGPNYREAQLVMEMIADTGRMGSLDIVELNPVLDNRNATAELAVDLVESLFGKSTLMRD

SEQ ID NO: 33370 - protein, 471 aa, Xanthomonas campestris pv. vesicatoria str. 85-10
MSSWLRRKSIDQVTVHETGRQLVRSLSWPHLIALGIGAIVGTGIYTLIGVGADKAGPAVLLSFVAAGIVCACAALAYAEMATMMPAAGSAYTYSYTALGESIAWVVGWSLVLEYSLVVSTVAVGWSGYFVGFLQWLGVGLPHELIAGPHAGGIVNLPAVVITFLVAGLLMAGTKESATLNAVLVVLKIIALGVFVAIALPAFNSANLQPFMPYGFSKAMGPDGVERGVMAAAAIIFFAFYGFDAISTAAEETKNPGRDLSIGIVGSMIGCTLIYVLVALAAVGAMSFTVFGKSPEPLALILRELGHGKAALVIGAVAIIALPTVLLAFLYGQSRIFFVMSRDGLLPRGLSKVNARTGTPVAITLFTAVLVAALAGVARLDEIAALANAGTLAAFTAVAACLLVLRVREPGRARAFRTPLAWVVGPVAIGGCLYLFWSLPSKTQVWFLLWNALGVVVYLAYGRRNSRLNQAG

SEQ ID NO: 33371 - protein, 574 aa, Xanthomonas campestris pv. vesicatoria str. 85-10
MNQTRVFLIFAWLMVAALLWMEWGKDKAAANAPVAAATQAVPAARDPDAAAPSAANVPSAQPIPQAGAPGTVPATSSTAATPAAAGAAPVVTLTSDVLRLKLDGRSVLDAELLQFPQTKDGTEPVSLLTEDPAHPYNATSGWASEHSPVPGVGGFRAEQPGTTFEMAKGQNTLVVPFVWNGPDGVSIRRTFTLERGRYAISIKDEVINKSGAPWNGYVFRKLSRVPTILSRGMTNPDSFSFNGATWYSPQEGYERRAFKDYMDDGGLNRQITGGWVALLQHHFFTAWIPQKDQASLYVLAQDGPRDVAELRGPAFTVAPGQTASTEARLWVGPKLVNLIAKEDVKGLDRVVDYSRFSIMAIIGQGLFWVLSHLHSFLHNWGWAIIGLVVLLRLALYPLSAAQYKSGAKMRRFQPRLAQLKERYGDDRVKYQQATMELFKKEKINPMGGCLPLLIQMPIFFALYWVLVESVELRQAPWLGWIQDLTARDPYFILPLLNISIMWATQKLTPTPGMDPMQAKMMQFMPLVFGVMMAFMPAGLVLYWVVNGGLGLLIQWWMIRQHGEKPSKIIQANAK

SEQ ID NO: 33372 - protein, 396 aa, Burkholderia sp. 383
MTTQDPIVIVGMARTPMGGFQGDLAAASASDLGAVAIRAALERANVPAERIDEIVFGCVLPAGQGQAPARQAALKAGLPLAAGATTVNKMCGSGMKAAMFAHDLLLADSAGVAVAGGMESMTNAPYLLPKARAGMRMGHGQVLDHMFLDGLEDAYEKGRLMGTFAEDCAQAYQFTREAQDAFAIASLTRAQRAIADGHFVSEIAPVTVKAGKSETVVSIDEQPGNAKLDKIPTLKPAFREGGTVTAANASSISDGAAALVMMRRSEAERLGLTPKAVIVGHSTYADKPGLFATAPIGALRKLSEKTGWNLRDVDLFEINEAFAVVPMAAMRDLDLPHEKVNVHGGACALGHPIGASGARVMVTLLAALETYGMKRGVASLCIGGGEATAIAIERIV

SEQ ID NO: 33373 - protein, 564 aa, Burkholderia sp. 383
MNHPATVSSIAGARKATAAPCHARPRTCGEALVDLLERHGVECVFGIPGVHTVELYRGLAASSIRHVTPRHEQGAGFMADGYARVTGRPGVCFIITGPGMTNIATAMAQAYADSIPMLVISSVNARRELGSGDGRLHELPSQRDVFAGLTAFSHTLLDAADLPQVLARAFAVFASARPRPVHIEIPLDVIVMPAPALSDAPPALPARPAPDANALAAAADLLAHARRPLILAGGGAIHAAAELRELAERLHAPVALTINAKGLLPAGHPLLIGSTQSLPATRAAIRDADVVLAVGTELGETDYDVTFDGGFAIDGRLIRIDIDAQQLMRNARAEIAIAGDSQLALGALSTRLHETPAPTPDAGWGAPRVAAVRAAIAATHDSAAQSQALLIDTIVATLPGAIIAGDSTSPVYVGNFTHDAPAPRSWFNSSTGYGTLGYGLPAAIGAKLAAPARPVVCLIGDGGLQFTLPELASAVEARLPVIVIVWNNHGYGEIRKYMVARDITPVGVDPYTPDFQVLARGFGCAAHTAATPGALAAALRDAAARAIPTVIEIDEATWFGQVQR

SEQ ID NO: 33374 - protein, 323 aa, Burkholderia sp. 383
MTSGVGGLTVRVAAKREEAVGICSFELVSTDGQPMPAFSAGSHIDVAVPGGPTRQYSLCNAPEEGHRYQISILRDPNSRGGSAGMHDRVQVGDALAISVPKNNFPLAHDATRSLLMAGGIGVTPILCMAERLAAIGAPFEMHYCSRSRARTAFLDRISRATYARHVQFHFDDQPDTPAFDIAARLARPESGTHLYVCGPTGFMDAVLGAARAAGWPEAQLHYEFFAAGERVAADSDRFEVEVASSGQVVTVEEDESIVQALARVGIEIETSCEQGVCRTCETRVLAGEPDHRDVCLTPAERADNDRLMPCCSRSKSARLVLDL

SEQ ID NO: 33375 - protein, 397 aa, Burkholderia sp. 383
MSNAAKEVVVVSGVRTAIGDFGGSLKDFSPTDLGAKVVAEVLSRANVPGDAVGHVVFGHVVNTEPKDMYLARVAAINGGVAQHTPALTVNRLCGSGLQAIVSAAQTIMLGDADIAIGGGSESMSRAPYTVPAARFGQRMGDGKLVDMMLGALHDPFQTIHMGVTAENVAAKYGISRDAQDALALESHRRAARAIAEGRFKDQILPISIRTKKGEVAFDSDEHVRHDASADDFTKLRPVFKKEEGTVTAGNASGINDAAAAVLMMSADAARAQGVKPLARLVAYAHAGVDPAYMGIGPVPATQKALERAGLKISDLDVIEANEAFAAQACAVTQELGLDPAKVNPNGSGISLGHPIGATGALITVKALYELKRIGGRYALVTMCIGGGQGIAAIFENI

SEQ ID NO: 33376 - protein, 1148 aa, Burkholderia sp. 383
MDIQEKKGYCTLCRSRCGTINVVRGDMMIKVWPDETHPTGHAMCMKGKAAPELVHSPNRVLYPMRRTRPKGAADPGWKRIGWEEALSEIAERLAYFKRENGAESVAFGVTTPSGTPMSDSIDWVERFVWLFGSPNICYATEICNWHKDSAHVFTFGCGMPTADYQQADLIVLWGNNPANTWLAQADAIAKGRRRGAKLIVVDPRPTPLAREADLWLRVNPGTDGALAMAIARQMIAIGNVDEPFVRRWTNGPLLVRADTGRFLRERDIDPHASGNRYALWNQTLDRLELVEEEAGTALSDLSMTGTRHVGITDSAGRCTQVECTPAFDLYARALAAYTPELASTITGIDAADIMKAAQMLHPGQGIAYHAWSGVGMHTNATQTERAIATLYALTGAFDTRGSNREWAKQPANAVSSYAMLNPGQRAKALGLAERPLGPPSQGWVTARDVYRAILDAEPYRVRALFAFGTNMVLSQADGGIAHNALCALDFHVHCDLFETPSSRYADILLPVNTPWEREGLRLGFEINERAVELVQLRQRMVPPRGESRADYDIVFDLAVRLGMKDRFFGGSIEAGWNHVLEPLGMDVALLRTHPEGIARPLTQYERRYASATPDGVRGFNTETLRVELYSEKLHRHGYPAVPQYVPPQHGLGEGVNDRRRFPYTLTSMKNGYYCHSQHRGLPSLRRRAPYPVAELNDALAAEHGIVDDDWFLVETTNGSARFKARIVPELAHDVIVAEYGWWQACDEIGMDALAVEGRNHSNFNRLVSAARLDPVSGSSPLRSVRCRIRPDPSTDPSRRAWKGRRDFVVSAIHEEASGVRTVTFRASDRGALPDYLPGQHVTVHVPALGDGGTTRAYSLTGAASEDDRRTYSISVRHQKGRTGEGVPFEGAMSSYIHGSLKVGDPVLLGAPAGTFIVPPASKQPVVMFAGGIGITPFISYLESIRDRGAQAPESRLFYANQNSGTHAFRERIERLKQRLPKLEVVNCYNQPHDEVLGRDYQIRGYLTADVVSDDLIQRRARFYLCGPEPMMQAITAGLIERGVPPFDIFKEAFRSPSRPALDPSKRFVVQFTRSRRVSTWTPRDGSLLSFAESLGVVMPSGCRVGQCESCAVKVVSGEVAHLSGHGPDEPDVCLACQAIPATDVAIDA

SEQ ID NO: 33377 - protein, 235 aa, Burkholderia sp. 383
MEPDRSIPNTGGGLAGVHAEAGSPQALLDAIVRGVEGRGIPAGTDWPTAKQSLADNEGQWKFSAVLVAIVARREPTILLTKRSPDLSEYSSHVSFPGGRPAESDRDIGATALREAFEEIRLAPDAVRVAGSLPIHQTRKRNHAIFPVIGIVPETAKWEAAPAEVAEIFEFPFAALLNPDLPRQYTDGERTGAWYWAEQTQDIWGVTALILKSLAGLVRDAVRGDAFMHRAFVRQG

SEQ ID NO: 33378 - protein, 340 aa, Burkholderia sp. 383
MSSYKIALNFEDGVTRFIDCKAGEKVLDAAFRAKINLPMDCSDGVCGTCKCRAESGSYDLGDDYIEDALTEDEKDGGLVLTCQMVPQSDCVIAVPTSSVACKTGQSGFAATVTKVEQHNDAAVVLELDVGAAAPVFLPGQYVNIDVPASGQHRSYSFSSAPADAKVSFLIKKIPGGVMSTWLESAQPGDKLELHGPLGSFYLRDVQRPLLFLAGGTGLAPFLSMLEVLARSGSQQKVHLIYGVTRDLDLVLVEAIEAFAATLPNFSFATVVADAASSHARKGWVTQHIPADALNDGDVDVYLCGPPPMVDAVRKYFDDEGVKPNSFHYEKFTPNVTAKAA

SEQ ID NO: 33379 - protein, 423 aa, Burkholderia sp. 383
MRAAAPTWRTAMPVNHSSFNYRIETTMIRSAVIVDAVRSPMGRTKAGGAFVQLHPADLLSQVIQALVARNDLDPGTVDDVMIGCVSQVGEQSTTPGRVAWLAAGFPAHVPATTIERKCGSSQQAIHFAAQAIMAGVNDIVIAGGVESMSRVPMGSARIDRDPYGARFHARFPQGLVGQGVSADLVAQKWDLSREALDAYSAESHRRAEAARTAGQFAREIVPIDVPGDGGLRRVDTDETIRVGTSVERLASLAPSFENAELAQRFPGIRWNVTAGNASQISDGAAALLVMSEQKAARLGLKPRARIVAFDVCGDDPLMMLTAPIPATERLLKRQGLSVHDIDRFEVNEAFAAVPLAWQKALGADGARLNAAGGAIALGHPLGASGARLMTTMLNSLEASGGRYGLQTMCEAGGMANATLIERL

SEQ ID NO: 33380 - protein, 405 aa, Burkholderia sp. 383
MRQAVICEPVRTPVGRYGGVFKDIPVATLAETVIRELVRRTALDPARIDDVIFGQCYPNGEAPAIGRVASLDAGLGIRVPGLQLDRRCGSGLQAVIDAAMRVQTGAADLVLAGGAESMSQAEHYMLGARWGGLRGDSSPMWDRIARGRITSGGRHHPVEGGMLETAENLRREYGITRDAQDALAYRSHSRAIAAHESGRFGDEIVPVQVKTKGGTTLVDRDEHPRADVTMESLAALRPVRQKVDAESTVTAGNASGQNDGAAVCIVTTPEQAADLGLRPLARLVTWAVAGVEPERMGIGPVPATELALRRAGLALKDLDLIELNEAFAAQVLACTAGMGFDAGDYERLNVNGSGISLGHPVGATGVRILATMLRELDRRGGRYGLETMCIGGGQGLAAVFERVAA

SEQ ID NO: 33381 - protein, 530 aa, Burkholderia sp. 383
MTLQIGVPLETAHEERRVATVPDVVEKLIKLGFSVAVQSGAGTGANFSDDDYRTAGAEVVPTAADLWGRSDIVLKVRPPSSEEVALMREGGTLIGFVWPAQNPELMQQLAAKRATVLAIDSLPRTLSRAQKMDALTSMAGVSGYRAVIEAAHAFGRYFNGQITAAGKVPPAKVFIAGAGVAGLAAIGTAAGLGAIVRANDTRAEVADQVKSLGGEFVKVDYEEEGSGGGGYAKVMSEGFQQAQRAMYAQQAKEADIIITTALIPGKPAPKLITAEMVQSMKPGSVIVDMAGEQGGNCELTVPGEAVVRHGVTIVGYTDLASRLARQSSTLYATNLLRVVEELCKTKDGTINVDFNDDAIRGLTVIKEGNVTWPPPPIQQPVVAAKPAAAPVAAAASKGHGHGSGAPMSAKSLAIVFAVGALAFLLVGQFAPATFLAHFTVFVLACFIGYMVIWNVTPSLHTPLMSVTNAISSIIAIGALVQVAPPLGDAAAEGRPSGLILGLAVGALTLTAVNMFGGFAVTRRMLAMFRK

SEQ ID NO: 33382 - protein, 401 aa, Burkholderia sp. 383
MKRAAIVSPLRTPVGAFGGALKGIPVEELGATVARAVVERTGLDPARIDDVVFAQSYASGETPCTGRWVALQAGFPIEVAGMQLDRRCGGGVQALATAAMMVQTGAADVVMAGGVESMSNVEFYTTDMRWGKRAGSVTMHDRLDRGRERSQPESRFGRISGMIETAETLAREYDITREASDRFAARSHQRAAAAQQAGYFDAEIVPVAVPQRKGDALIVKQDEGVRGETTLESLAKLRTIMKDGVVTAGNACQQNDAAAACLIVAEDKLDELGLTPIGWLVGWAAAGCDPARMGIGPVPAVQKVLARTGLTFDQMDLIELNEAFACQALACVKGWGSSMAALEDKLNVNGSGISLGHPVGATGGRIMTTLLHEMQRRQARYGLETMCIGGGQGIAMIVERA

SEQ ID NO: 33383 - protein, 310 aa, Burkholderia sp. 383
MRQNHIESARQVFEIESRALAGVAARLDANFDAAVETILGSRGRVVVCGMGKSGIVGRKIAATLSSTGTPGFFMHPGEAYHGDLGMVTPDDTFLAISNSGETDEVIKLIPFLRNNGNDLIALTGNPSSTLASAARVHLDIGVEREACPLQLAPTASTTATLAMGDALAVTLMRARGFQPEHFARFHPGGSLGRRLLSTVDDEMACRDLPFVTEDTSTLDVLDAMTRGRLGLAIVKRDAGWGIVTDGDVRRAIERHGDGVLRRTAADMMSIEPSTVPPGTRVEDALLLMQQQRIGALLVSDGTRIVGVFKK

SEQ ID NO: 33384 - protein, 463 aa, Burkholderia sp. 383
MDNDSPGRYASAAATHDFGAHAMRGDADERRKPHLLGLATLVIFGLAYMLPMTVFTTYGIVTSETNGHLTAAYAVTLVAMLFTARSYGHMARLMPSAGSAYTFASRNFGTSAGFMVGWALLMDYLFIPMISYLAIGIYMKQIFPGVPAGVWIVGSIVLITGLNIVGIRLVNRVNLILIASQLVFIAIFFVASARVAAGEGLSMAVALPSSGDARAIFAGSAILCLSFLGFDAVTTLSEETREPKRTVPRAILLCTLASGVLFMLVAYVGQVVFPDWHAFKDLDSASLELMRRIGGGTLSAFFVAVYVAGCFASAMAGQASVTRVLFAMGRDRVLPERVFGHLHARLRTPVRATLAVGIVSLSALFITLDLASTMISFGALVAFAVVNLCVMRSYLCRPEHRRFAGWITFGVMPAIGFAMNVWLWSGLSRQTFYVGTGWLVLGLCQLVWLTRGFTRPAPTLSMN

SEQ ID NO: 33385 - protein, 323 aa, Burkholderia sp. 383
MPATFAVKVTRKWNETPDICVLELHAVREDQKLPAFEAGAHVEVHLRGLPSRQYSLCNTPGPTDCYQLGIFLEPESRGVSRAIHQTVEVGHTLDISPPKNHFPLAEGATHSLLLAGGIGVTPVLAMAEALASRSASFDFHYCTRSAERMAFQTRIGQSGWRQNAHLYFDDAPDDRRLDLNAVLSSPAAGTHLYVCGPSGFVTWVKQAATQSGWPDTHVHSESFTGTAVEVQDGDRAFDVEIAETGQIIHVGKDQTALNALVEAGIDIPSSCEAGNCGTCQTMVVSGAIDHRDQYLTAAERVANKSFIPCCSRAADDMIVIGLE

SEQ ID NO: 33386 - protein, 471 aa, Burkholderia sp. 383
MNQRQGFDAIVEREKGLHRGLSTGQLSMIAIGGAIGTGLFLGSGFAIGFAGPSVLVSYAIGALIALLLMGCLAEMTVAHPTSGSFGAYAEHYVSPWAGFLVRYAYWASIVFAVGTEVTAIAVYMKYWFPAVPGWYWIVGFSAALIGINLVSVKVFGAVEYVFSMLKIAAIVAFIALGAVVVFGAPAGSGIGFANYTAHGGFFPKGVWGMWVAVIVSIFSYLSIEMIAVAAGEARDPHQAITRAFRATMVRLVFFYLLTLALMLAIVPWTAAGADESPFVKVMAATHVPGAAGVINFVILVAALSAMNSQLYITTRMMFSLSRAGYAPKALGRLTGHGVPAAALGLSAIGIALATVLNVLYPDTSFVMMMSVSMFGAMFTWLMIFVTHLFFRRHHRGQVLAFRMWGFPVTSLLGAALMFAALVTTYFTREFRMTLFCGVPFMIVLSVVYAVWYRGKGAEPAAGREGVHVPGQ

SEQ ID NO: 33387 - protein, 312 aa, Burkholderia sp. 383
MTARPGVLALVPLPDTTRDALRRDYVLHDHPDGMPADFAEAGTIRAVVTNGTCGLDDARMARLPALEIVCAFGAGYENVDVAAAARRGIVVAHAPGTNASTVADHAIGMLLALARGYAPLTGAVRAGRWHASRAARPTLTGAALGVIGMGRIGRLVAARAQGFDMTLGYHARGPHGDAPGRYYADLVQLAADSDFLVIACHGGPATRHLVDRAVLRALGPHGYVVNVARGSVLDTAALRDALDAGDIAGAGLDVIEHEPDVPAALFDHPDVLVTPHVAGRSPAAWLAQRDALLASLAQHFSRLPVEFAVRAA

SEQ ID NO: 33388 - protein, 326 aa, Burkholderia sp. 383
MTQHQSGALDRQVLIVRDVADEANGIRSYELATEDGADLPAYEPGAHVAVHLENGITRQYSLYEAAGLRKTYRIAVLKDPASRGGSRFLHEQVSVGERVRISGPYNHFPMTAGATSSLLIAGGIGITPILSMAARLFSEGQPFALHYCARREQDAAFVDLLRRGVPFAAHVHLHFDGGDPGKGLDVRSLLSDVTEGRHLYCCGPGGLMNAVEAAASHWPAGTVHFERFAAETADAAENTAFRIHLCKSGLDLDVPADKSVLQVLKHAGFDISTVCEQGVCGACLTDVVDGVPEHRDQILTDEEKRANDVMAVCCSRSRSPRLVLDL

SEQ ID NO: 33389 - protein, 463 aa, Burkholderia sp. 383
MQQHTMRRELGARQISFMALGMAIGVGLFLGSASAIKAAGPGALVAYLIGGAMIFLIMRALGEMAVHRPVSGSFGAYAFEYVGPFAGYVVGWSYWLLMVGVGVAETTAIGIYMGFWFPDVPQWLWVVSAIAAISAFNLLNVKVYGELEFWFAIVKVVTIVLMIAGGALIVFTGIGHGGVPVGLSNLWRHGGVFPHGVLGVVSALPIVAYSFAGVEMIGLTAGEAREPQKMIPRAINSVLWRILIFYVGALFIIMALYPWHELGEHGSPFVTTFESLGLRQAAGIVNFVVVTAALSSFNCIVFSGARMLSSMAGNGLAPASFAALSASGSPSRAVRATVLFMSVGVVLNYVIPARVFGWLMSFLSFDVAVIWAMIVLTHMRFRRALAARGETVAFRMPYASVTSWICLVFVAFVFVMLGVDPTTRGSLYAGAAVMALMAIIYRRSRHLQAAARSTRVGLGVERV

SEQ ID NO: 33390 - protein, 400 aa, Burkholderia sp. 383
MTEAFLCDAIRTPIGRYGGALSGVRADDLGAVPLKALVERNRDVDWTAIDDVIYGCANQAGEDNRNVARMSALLAGLPQGVPGSTINRLCGSGMDAVGVAARAIKSGEAALMVAGGVESMTRAPFVMGKAASAFARQADIYDTTIGWRFVNPLMKQLHGVDSMPETAENVAVDYNISRADQDLFALRSQQKAARAQQDGTLAEEIVAVTIPQKKGDPVVVSRDEHPRETSLETLAKLKGVVRPDGSVTAGNASGVNDGAAALLLANEETAKRFGLTPRARVLGIATAGVAPRVMGIGPAPATQKLLARLGMTIDQFDVIELNEAFASQGLAVLRMLGVADDDPRVNPNGGAIALGHPLGASGARLVTTAMYQLHRTNGRFALCTMCIGVGQGIAIAIERV

SEQ ID NO: 33391 - protein, 318 aa, Burkholderia sp. 383
MNDHTHFQPLGGNEMPRCGGIATMMRLPHVASAEGLDACFVGVPFDLGTSNRTGARFGPRQIRTESVLLRPYNMATRAAPFDSLQIADIGDVAINPYNLHDSIARIEAAYDAILEHDCKPITLGGDHTIALPILRAIHRKHGKVALIHVDAHADVNDTMMGEKIAHGTPFRRAVEEGLLHGDKVTQIGLRGTGYAAEDFDWCREQGFRVVQAEECWNKSLAPLMEEVRARVGDTPVYISFDIDGIDPAYAPGTGTPEIAGLTVPQALEIIRGAKGLNIVGCDLVEVAPPYDPFGTTALLGANLAYELLCVLPGVAYRD

SEQ ID NO: 33392 - protein, 321 aa, Burkholderia sp. 383
MSTTTLTVRVARKWQEARDICGFEFVSDDGSPLPHFDAGAHIDVHLPGGFVRQYSLCNHPEHGDRYEIAVLRDADGRGGSRAIHDDVRQGDTVRIGVPRNQFALVPDAPHHLLLAGGIGVTPILSMAQRLFSSGTPFDLHYCARSTDRMAFAERINAAAFHDRARFHVDDGAPAQRFDLAAVLAAAPAGTHLYVCGPRGFMDAVLNAARERNWAEARLHYEFFGGTVASSGSDRAFQVRIASSGKVIDVPAECTVIAALAANGVDVLTSCEQGVCGTCATRVLQGEPDHRDSYLTAEEQAAGDQFMPCCSRARSDLLVLDL

SEQ ID NO: 33393 - protein, 309 aa, Burkholderia sp. 383
MKPELLVLIALRGDAHRDISTSFDVRYAPTSEARERAIAEHGGTIRAVLTNGSTGLTAAEIDRLTQLTFISALGAGYENIDVTHAKARGITVVTGAGTNDDCVADHAFALLLAAVRNVVQLDAKTRAGVWRDGLAMPPNVSGKKLGIVGLGKIGEKCARRAAGFDIEIGYHNRSVKDVPYRYFDRVDALAKWADFLIVATPGGAGTRHLIDRAVLDALGPGGFVVNVSRGSVVDTAALAEALHEGRIAGAGLDVYEGEPEPPRALTDLGNVVLTPHMGGWSPEALDRSVQQFIDNAVRHFAGQPVLTPV

SEQ ID NO: 33394 - protein, 327 aa, Burkholderia sp. 383
MAPIIPFPPGDRIAAVVVEAAMLTPEIRGIVLAAADGAALPPAEPGAHVEVRLPDGIVRHYSIVERAADGSTYRIAVLREPRSRGGSAYLVERLAPGDVLDVSAPRNHFALDEHASEYVLIAGGIGITPILPMARRLDALGKSFTLLYLARSRERMALHDAIERGPLREKARLHCSEQHGEADLRTLLGVPRAGAQVYVCGPGRLIDSVLEVARDWPAGTVHFERFAGAAPPREPEAGAQAFEVELARTGRRVAVPAGRSILDVLRDERIAVDSVCGEGVCGTCAVTLLDGEAEHRDCLQTDAERRANNLIYICVSRAKSSRLVLDL

SEQ ID NO: 33395 - protein, 382 aa, Burkholderia sp. 383
MMRDAANFEPTDSRVTRPAFWNGLPERWTSDVEETLVCCHVRQETHDVKSFFFRSPQGRSFSFEPGQFLTLELDIDGETINRCYTISSSPARPHTVSITVKRVPGGKVSNWLHDNLQPGAPVRVLGPAGEFTCARHPARKYLFLSAGSGVTPLMSMSRAHHDLAEDRDILFVHSARTPDDIIFARELDLIASNHTNFRTSFVVERVGARTNWPGVTGFLTLPLLKLIAPDFMEREIFTCGPAPYMKAVRDLLDEAGFERKQYHEESFSFETLAQTASDELLADLAPPAEGADTDTKQYTVSFAKSNREISCGSEQHVLDAARQSGVRLPASCTQGMCGTCKVKLVSGQVEMKHNGGIRQREIDQGMVLLCCSKPLSDLVIDK

SEQ ID NO: 33396 - protein, 423 aa, Burkholderia sp. 383
MSQVISVRRPAADASIGQALKNAVAAAFLTAILTIPVLGLQLKLDGYQVVLTPHWRPVWIAVAAVFLFQLFKPWLVRAKAAVKLPAVPAMGAQQQRVIIWVMLAIGFVWPFFGSRGAVDVATLALIYVILGLGLNIVVGFAGLLDLGYVGFYAVGGYTYAMLNQYFGLSFWECLPIAAIAAATFGFLLGFPVLRLRGDYLAIVTLGFGEIIRLLANNLTSLTGGPDGISSIPKPTVFGFEMARSASVEGAKTFHELIGLEYSGEHMVIFLYLIALVLVCFTLFVTSRLIRMPMGRAWEALRDDEIACRSLGLNPTRIKLSAFTLGAAFAGIGGAFFAARQGLVNPESFTFIESALILAIVVLGGMGSQLGVILAAILLTVLPEVARGFAEYRMLIFGLVMVLMMMWRPQGLLPASRPHVELPQ

SEQ ID NO: 33397 - protein, 779 aa, Burkholderia sp. 383
MTASLTQPAFRRLGMKALLVQHDIDERTATGRAATALAEELRTRLVDVVIATSADDACAVVAADPAIQCLLLNWELGNDADHAPAQAVLDAMRARNATVPVFLLASRASASAIPVDAMRKADDFIWMLEDTTAFIGGRIVAAIERYRETVLPPMFRALAKFSRVYEYSWHTPGHTGGTAFLKSPVGRAYFEFFGESLFRSDLSISVGELGSLLDHSGPIGESERYAARVFGAHRTYHVTNGSSMSNRVILMASVTRNQVALCDRNCHKSAEHAMTMSGAIPTYLIPSRNHYGIIGPIMPERLTAAAVRLAIDANPLVRGRDGIDPTPVHALITNSTYDGLCYNVARVEELLGQSVDRLHFDEAWYGYARFNPIYRDRHAMHGDPSQHDASKPTVFATQSTHKLLAALSQASFIHVRDGRNPIEHARFNEAYMMHASTSPNYAIIASNDVSAAMMDGPGGEALTTDAIREAVAFRQMLARLHTECAENNDWFFNGWQPDSVVDRKTGRRVRFHEADETLLATDPSCWVLHPGDTWHGFGDIEDDYCMLDPIKVSIVTPGVASHGGLMPVGIPASVVTAYLDRHGIVVEKTTDFTILFLFSLGVTKGKWGTLVNTLLDFKRDYDANAPLEQALPELVARYPERYGKIGLRDLCDLMFSSMSDLKTTEMMSRGFSTLPKPDYSPAEAFEHLVHNDIEMLELSEMEGRTVATGVVPYPPGIPLLMPGENAGSADGPLLGYLKALEQYDLRFPGFTHDTHGVEVEDGVYRIACIKQKASDNNTR

SEQ ID NO: 33398 - protein, 510 aa, Burkholderia sp. 383
MSDASSSSSRSAAPSAAASAPKIGVIPATLMVAGNMMGSGVFMLPANLAATGGIAIFGWLITVVGAVSLALVFAKLAAIDPAAGGPYAYARKSFGPYMGYQTNLIYWLANVLGNVGLAVAGLGYLTHFFPVLKDPLVFALAQIFVIWLFTYANILGPNVVGRVQSVTTIFALVPILGMAVFGWFWFSKDVYFAGWNVSGASSFSAIGATLNFTLWAFIGVESASVSAGVVENPSRNVPIATVGGVVLAAVCYVLSSTVIMGMIPNKALLASSAPFADAARLALGNTAANAVAICAALGCLGSLAGWTLLVGQTAKAAADDGLFAGVFARVNSKNVPSAGLAIVALIMSVQVLATMSPSASEQFGKIASIAVIMTLLPYIYSCIAIKVLGYGKMPSHQFTFYTIVGLVGAVYALWAMVGSDGQQTRWSLIFVVATIVFYELSINRQREIEETHIHPGGRSPRWVRYLALGVTIAALAATFWISVGRHQADTLHARSPAVAASVQATQQTGE

SEQ ID NO: 33399 - protein, 459 aa, Burkholderia sp. 383
MQDNSLRQSLKQRHITMIALGGVIGAGLFVGSGAIIATAGPAAILSYLIGGVIVTLVMFMLGEMASRNPDSGSFSTYASSYLGEWAGFAVGWLYWFKSMMTITVEAILLGAILHDFLPWLPVWGGALFMLVTLIASNAYSVRSFGEAEYWLSFAKVTTIIIFMALGASILLGFQPRIPAPGLINLTDHGGFMPNGISPVLAGVMVVIFSLGGSEIAAVAAGESENPSKNVIRAIKSVIVRVMVFYVGSVSILILCMPWTDKANLKSPYVSLFSMAGFTSAAVAMKLVLFVSFMSVMNSFLFSNSRMLFSLSQRGHAPAMFGRTNAKGVPMNALVLCLAICVSILGIHFVSGGDLFLMLAKSSGAFVMIVWIFIIVAHFAMRRQEKHAPRDPQAFRAWFYPVSNWIALLALVAVLGSQAFNPDSRFQFWFTVLTALAIVAAYFVRRKPVQLGDTAGAKVR

SEQ ID NO: 33400 - protein, 390 aa, Burkholderia sp. 383
MVTPAKNRPRALIIGGSLGGLFTATTLQAAGWDVDIFERSPNELDSRGGGIVLQADVLSAFHFAGIQTGAALGVPSGDRIYLDRADRVIQRSFMPQTQTSWNMLYGTMKAHLPARVFHPGEHFVRFEQNGDRITAWFASGRVETGDLLVGADGARSAVREQVAAGLSPTYAGYVAWRGLVPETALPASAAAVLDGTFAFQQGPGHLMLEYLVPGEDLSTRKGQRRWNWVWYRKVAHGEALTSLLTDRLGIRHSFSLPPGAPKDEDLARMTQASKDLLAPTFQTLVEATREPFVQAILDLQVKQMVYGRAILLGDAAFVPRPHTAGSTAKAAANALALAQALHSTDSGIDEALSRWQAGQLHQGIGMTEWGMNIGDRIMGIPRSNVVLNGA

SEQ ID NO: 33401 - protein, 396 aa, Burkholderia sp. 383
MDIAILGAGVAGMSTALALAGQGHRIRLYERRPSETTMGAGVVLWPNAGFVLEQLGLLPDIAEVSGHLRTMRCMDRDGAPIKRVDIGELDRHMGFPTRSILRRDLQAVLARHVAAHDIEVCFGHCATAIDTGIDGRAVVHFDNGATIVPDLVIGADGRMNSVARRHVVGDATPVYQGFVNWIGVAQSDAPLVDDVSIFDYWGQRERFGIVALDRHRMYWAAARAEAEIDHHDNDDAAPGDHGPLLERLFDGWPAPIADVMRATPPGTIAKIHVHDLDPVDVWHRGNVLLIGDAAHAPLPTSGQGACQALEDAWHLARCLDEHGKGNGSDLDAALASFTQRRTRKTEAITLRAREFAQRLFRNDTHEAARQVDPTAEIEALAKAWGAGLPMPFLRDR

SEQ ID NO: 33402 - protein, 655 aa, Burkholderia sp. 383
MCGIDGFLNSVAFDEETARGTLARMTASLAHRGPDGQGIWVDPEAGIALGHRRLAIVDLSVHGRQPMASACGRYVMVFNGEIYNHRELRAELERAGRAPAWRGHSDSEVLIAAIVAWGVDATLRRATGMFSIALWNRESRVLTLARDRIGEKPLYYGRIGDALVFASELKALRGYPGFDGAIDRDALCLYLRQSSVPAPHTIYRGIHKLPPGTYIQFEHARDTPRLRAYWTLEQAIEDGRAQPFEGNADEAVSQLDAVLRQAVARQMEADVPLGAFLSGGVDSSTIVALMQAQSSTPVDTFTIGFHEAGYDEAGYAKAVARHLGTRHTELYVTADHALGVVPKLPSIYDEPFSDASQIPTFLVSEMTRRHVKVSLSGDGGDELFGGYTRYFLTPRLWRKLHRVPGAVRARIAAALHALRPDHADQLAAVAQGAWGGVEARESATRIGDRLHKLGHVMTAESRIGLYRLLMSSVHHPERLALSGQEPATPLDTVSAWPAHLSFAEQAMAIDTLTYLPTDILAKVDRAAMAVSLETRMPFLDHHVVEFAWRMPADLRLPEGQSKALLRRLLDRYVPSALIDRPKQGFCAPVDHWLRGSLRDWAEALLRPSRLREEGFFDAAAVERLWRQHVTGRMNWQHQLWTVLMFQAWLEAQRAT

SEQ ID NO: 33403 - protein, 195 aa, Burkholderia sp. 383
MTTLSDSALDQLFLSARTHNAWQDKPVDDALLHRLIDLTKFGPTSANASPARFVFVKSPEAKARLKPALSEGNLAKTMAAPVTVIVGMDMAFHEHLPRLFPHADARSWFAGNDALIETTAFRNSSLQGAYLILAARALGLDAGPMSGFDGAKVDAAFFAGTAIRSNFLVNLGYGDPAGLFPRSPRFDFDDIARIE

SEQ ID NO: 33404 - protein, 340 aa, Burkholderia sp. 383
MTYRIEITTRDGERFGFGCDGEQDLLSAAADADITLPSQCRRGSCGACQATVVDGAYEMQPDSAGVLPASQRGAVLLCRTRPRGDLRVAAPYDRTKVLLHPVPVRTARIAALETVAADTMRVELQVEPDDTFGSAAEFEPGQFAELEVPGSGVRRPYSLANTSNWDGRLEFLIRLRPGGWFSTYLRERARPGDPLTVRVPMGGFGLVADSLRSRWFVAGGTGLAPILSMLRRMAEFQERVDARLFFGVNQESELFMLDELARLQAELPQLRVDLCVWQPGGEWGGLSGTPVDALRMALAQNDGPLDLYVCGPPPLVQAARDVAVAAGVPDAQFASERFTV

SEQ ID NO: 33405 - protein, 322 aa, Burkholderia sp. 383
MTELLHGDGAIRRTTPYGSSIENTYAGVLSFMRRNYSRELDGVDVAISGVPLDLATTYRSGARLGPAAIRAASVQLAELHPYPWGFNPFDDLAAVDYGDCWFDAHNPLSIKPAIVEHARTILGSGAKMLTLGGDHYITYPLLVAHAERYGKPLSLIHFDAHCDTWADDDPDSLNHGTMFYKAVKEGLIDPATSVQVGIRTWNDDFLGIERLDAAWVHDHGARAAVERIVDIVGARPTYLTFDIDCLDPAFAPGTGTPVAGGLSSAQALAIVRALGAVNLVGADVVEVAPAYDHADITAIAAAHVACDLLCLWRQKKVAGALK

SEQ ID NO: 33406 - protein, 67 aa, Burkholderia sp. 383
MDTGIVKWFNDSKGFGFITPDNGGDDLFAHFSEIRADGFKTLAENQKVSFETKQGPKGLQAANIKPL

SEQ ID NO: 33407 - protein, 343 aa, Burkholderia sp. 383
MFRFLTKTKTVKAVINDRAITVEPAETLLQAALRHGIDFPHSCRVGGCATCKCKLVDGRVKELTQTGYILSDDDLDQGFILACQSIPQSDVTIAVDTSRQAARRKIDGRVIGQDRMTHDIVRLRVQLDESLPYKAGQYAQLSIASLPGEARHYSFATSVRPNAQVNFLVRKVPGGVFSGHVHAHDLVGRTVSVEGPLGDFWMRPADAPLILIAGGSGLAPILAMLEDGVAARTTRAVTLLFGARAQHDLYALDTIHDLAARWPGRFDFQPILSDEPADSSWRGSRGMVTDAIAADLPAQTHAYLCGPPRMIDAATDVLVARGLSRSRIHADRFTTQHDTQAIA

SEQ ID NO: 33408 - protein, 404 aa, Burkholderia sp. 383
MQTNLKIAIVGAGIGGLTLALALREHGIDAQLYEQTEVLREVGAAVALSANATRFYERMGLRAAFDAVCADIPGLVYRDGRSGAVIGHHRGDPDYRRQFGGAYWGVHRADLQALLSKAVGLDSIHLGHRLTDLAQHPDRVTLSFDNGVRVDADLVIGADGARSITRRWMLGYDDVLYSGCSGFRGVVPAARLSLLPDPETLQYWIGPHGHLLHYPIGDNGDQNFLLVERHPSPWPSRDWVMPSEEGEQLRVFRDWHPAVVQMITAVPISQRWGLFHRPPLGRWSRGRVTLIGDAAHALVPHHGQGANQSIEDAVVLAAQLTQAGPGNWREAQEAYERLRRGRTRKVQYASISVADVLHLPDGPAAQARNARLAERDSVLHHLDWIHDFDALAGEPSERQGGTWL

SEQ ID NO: 33409 - protein, 658 aa, Burkholderia sp. 383
MRCTPARDRLGPAMAGLRASMRVNGDPCNHAGVAWIVGGPFVVACGPAPTVSDTHRLRALAMRCLPGARCANAFANPVTPYSRIPRMQDSNESRASGVRLLKGILPIRRGGAIRDIFAGMSLASMDIPQVLGYARIAGMPAVTGLYTVFLPLIAFACFGASRHLVVAADSATATIFASRLSSMAPAGSAEYVALAGMVALLTAAMLLLARIFKLGFLADFLSRTVLVGFLAGVGVQVSIAMLGDMLGLAVPYPASRSLAQLDYVVTHLVHTNRPTFALAALVVVAILACKRFLPRVPMPMIAVAGSIAASSAFGFAAHGIAVLGPVAGGLPPLRWPSVTWQQFLDLVPVAASCFVMIIAQSAAAARVFAQQYDEEVDTNADILGLAAANAAAAVGGAFVVNGSPTQTAMADGAGVRSQIGHLAFAAVVAVVLLFFSTYLQYLPHAVLAGIVFTIALGLINVRSLAAIRKESPGEFTLALVTALAVVTVGVEHGILLAVALSLMRHVRHSYQPHTMVLEPVEGNGRWQPVPARRGAMTAPGLIVYRFGSDLFFANDHLFTAEVTELVDAAPMPTRWFVVDAGAITDIDYSAARTLADLVKMLQARGIGVLFGRVNRYLRADMDRHRITEIVGASCIFPTLHQALEAAGTTPAPQEPGIV

SEQ ID NO: 33410 - protein, 334 aa, Burkholderia sp. 383
MRFLYSVAPDARPAPRTTTETFMTIDILLTQPLPDAIDAELSARYAVHRLYAADQPDALLDRVATRIRGVVTGGANGLSAALMNRLPALEIVAISGIGTDAVDLDRARARGIHVTTTPDVLTDDVADMAMGLILMTLRDLGAGERIVRAGRWGKTAQPLATQVTGKRLGIVGLGRVGRAIAQRAQAFRMPVSYFGPREHRDSGYRFVPDLAALARDSDVLVIAASADHGNVLVTADVLAALGPEGFLINVARGKLVDEAALIRALADGTIAGAGLDVFANEPHVPAELLEFDRVVVQPHRASATRETREEMGRIVLANLAACFAGQRPPTSVTR

SEQ ID NO: 33411 - protein, 353 aa, Burkholderia sp. 383
MNAMDTSSPAAPERAHLRLGFVALSDAAPLIVAQRLNLGARHGLTLELSRQPSWAAVRDKLLSGELDAAHALYGLVCGLQLGIGGPQADMAALMVLNRNGQAISLSRGLADAYRASGSVRDAFTTLGRKPLLAQTFPTGTHAMWLNHWLASHDVDPLRDVRSVVIPPPEMVAALASGELDGFCAGEPWHAVAEACGAGRTIAVTSEIWPDHPEKVLATRRDFVALYPATARALIRTLVDACAWLDSAPHRRETADWLASPDALGVPARLIAPRLLGDYGSGPFAVPPLPIRFHDGGAVNRPDPREGEWFLSQYRRWGMLDGSHDDARIARAIAQTALYDAAVAESGAAGLSQA

SEQ ID NO: 33412 - protein, 353 aa, Burkholderia sp. 383
MSDSRFHRLTVAEVIAESDDACSFVFDVPAALRDAFAYRPGQFLTLNVPCADATVARCYSLSSAPGIDAAPKITVKRVRDGRASNWLCDRVKAGDALDVLPPAGVFTPRTLDGDLLLFAGGSGITPVLSILKSALVHGRGMLTLIYANRDERSVIFRAELQQLAQRHPGRVRVIHWLDSVQGIPQQRHLEELARPFSQQETFICGPALFMENALAAMLGLGLPRARVHVERFASLPDAPAQAPAASDTTASSVAAAASASGDGAAIETVLDGDAFAFDSAPGETLLDAMLRAGVPAPNSCRMGQCGACMCRIERGEVALDSNHVLDEDEIAAGWTLACCARPASDALRVVFPD

SEQ ID NO: 33413 - protein, 67 aa, Burkholderia sp. 383
MDTGTVKWFNETKGFGFISPDNGGDDLFAHFSEIRGTGFKTLAEGQKVSFEVKRGPKGLQASNITPQ

SEQ ID NO: 33414 - protein, 468 aa, Burkholderia sp. 383
MSRLVVVSNRIADPRKAAAGGLAVAVKDSLQESGGVWFGWSGRLRGGDDQPTHGDEVQIQNVGGIQLATIDLDPQDYDAYYLGYSNNVLWPVFHYRLDLAQFDRRFADGYRRVNQLFARKLRTLLRPDDTIWVHDYQLIPLAAELRAMGCTNPIGFFLHIPMPPPPIMAAIPEHEWLMRSLFAYDLVGFQTESDLLHFEHYVEAEAGAARLPDGRLRAFGRTLSAGAFPIGINVDEFESLARDRDGIDMFERMRDEYSRRQLLVGVDRLDYTKGLPQRVHAFRQLLEQYPENRNRATLIQIAAPSREDLGAYDDLRREMDSLCGAINGDYGELEWMPMRYIHRTVARKRLPGLYRASRVALVTPLRDGMNLVAKEFLAAQDAADPGVLVLSRFAGAAEQLKSALLVNPYDTQGTAQAIQRALAMPLEERRQRHAALMAIVRKTDVHWWRTRFLDALAEAAEVAAATES

SEQ ID NO: 33415 - protein, 460 aa, Burkholderia sp. 383
MNQPEDQLHRGLEERHINLMALGATIGVGLFLGSASAIRVAGPAILLTYLLGGIAIFLIMRALGEMAIANPVAGAFSRYARDYLGPLAGYLTGWTYWFVWIVTCMAEITAVGVYMHMWFPGVPNWIWALAALMAMGSVNFIAVKLYGEFEFWFALIKIVTIVLMIIGGGLMIAFGIGNGGVAIGLSNLWAHGGFMPNGINGVIAALPIVMFAYLGVEMLGLTAGEARNPEKSLTKAVNSVFWRVLIFYIGALFVIMSLYPWDQIGTQGSPFVMTFSRLGIPAAAGIINFVVLTAALSSCNSGLFSTARMLYNLAQQGQAPSKLGKVNRNGVPVYGVIVSVALLLIGVLLNYLAPQHVFTWLTSVSTFGAIWTWCVILIAQMRFRRTLSADKIARLPIRVPFYPLGSFVALGFLVLVVVLMAFTPDTRVALVIGPVWIVLLGITYALFYANRPAASVPTKS

SEQ ID NO: 33416 - protein, 468 aa, Burkholderia sp. 383
MAMMSESTGTLQAAPATEDAPRALSQTLSVRDAVMITVSGVTPASSIFVIAPFAIQQAGSGAVLSFLLGGVLALAFALCYAELSAAHRSAGGEYVMAKRVFGTLPGYLTFITVLSVSVFIPAVLASGAAPYLNNALGTHFSNQSVALTIVLLSYLLGMLNIKTNAWITGAFLVVEIGVLMLIAGLGFGSPHRGADALIAPVVASGNALVPATLAAIVPAIGTAIFCYNGFGSAAYLAEDLRGGNRNVAKAVIYSLLVILVVELIPLTAIVLGAPSLTELTKSADPIGYVVRSLSNPAVSRVVSGGIFLSVFNAIIAIVITMGRLLYSSGRHALWSRTCNRAFSTIHPRFESPWLATIALAVPSAGLVFVSSLDELTAFTVDLLLLIYLVVGLAALASRFVRRDVEHHYRMPLWPVTPLVAVVGAAYTLYTTLATATKPTDLIIIAGLLIAALVMYAVWARHSEAFRTL

SEQ ID NO: 33417 - protein, 371 aa, Burkholderia sp. 383
MLIGVPKEIKNHEYRVGLTPAGARELTRHGHRVLVQRGAGTAIGLLDNDYTAAGASLCDGADEVFARADMIIKVKEPQPAECAMLRRGQILYTYLHLAPDPDQAAALVKSGAVCIAYETVTGPGGGLPLLAPMSEVAGRMSIQVAATHLESPRGGRGLLMAGVPGVPAAHVVVLGAGVVGTGALQMAVGLGARVTVLDTNVNRLRQLDLVFANRITTVCSNAHTIDEAVRDADVVIGAVLVPGASAPRLVTRDMIATMRTGAVVVDVAIDQGGCFETSHATTHADPTFVVDGVVHYCVANMPGAVARTSTFALNNATLTHALALADKGWKQAMTDDPHLRAGLNVCDGHITYEAVALALGLPYVPATGVLA

SEQ ID NO: 33418 - protein, 424 aa, Burkholderia sp. 383
MPSHVDSPAAHHAGSLTIFQGAALYIGAVLGTGVIALPALAAEVAGPASLLAWAALVVLSGPLAATFAALGARYPDAGGVSTYARRAFGPKAAAIVGWCFYFAVPAGAPAAAMFGGAYVAAVTGGGHTTIIVTAAALIATVSAANAFGVTVSGRMQLVLSALLVTLLLAAVLASAPHARTANLHPFAPHGWLAVGQAAALLVWSFAGWEAITHLAAEFRRPAHDMPRSAGIAVVVVGFLYLSVAAASVTVLGPTAGGSGAPLAELIAGGIGGHAQVLAAVAALLLTLGTMNAYFAGAAKLGAALGRDGALPAWLAQGSQVGGVPRRSLGVIALLAVVALAATTLSDVGPKPLVLVTSGCFVMVYGLGAAAALKLLPRGGIAYRCAWISLVAVAGLFLTTGWYILCPLLLAGGALLYLQVAGPRQ

SEQ ID NO: 33419 - protein, 676 aa, Burkholderia sp. 383
MPAMPDSRPLPRTTFKPQVVLPALAVIGALLVVCALRPSEAGALFSAGQQWVIARFDWFYVLAVTGFLVFLVLIAASDFGNIRLGPDDAEPEFSFVSWTAMLFAAGMGIGLMYFGVGEPMQHFLKPPTVDPGTPAAAREAMLMTFFHWGFHAWAIYGLMGLVLAYFGFRYNLPLTLRSGLYPVLRERINGWIGHTVDAFALVGTVAGIATTLGYGVMQLSAGLHTVAGWDTGSNLFRIGLVAVVVILAGVSAATGLDKGVRRLSELNLLLAFLLLAFVVVAGPTAFLLRALGDNIGQYLSSLIDLSFRTYAYAPPREEGWFGGWTILYWAWWVSWSPFVGMFIARISRGRTIRQFVIGVLLVPTAFNLVWMTVFGNSAIWLDTHGAAGALAQTATNVDALLFRFFDFLPMPQLLSIVAIVLIAVFFVTSADSGAFVIDQIATRGNAHSPVWQRLFWAALLGVTAAVLLVAGGLGALQAMTLIAALPVAIIMIALCYGLWRGLAADRVHYSQDVAPATSFWTGQHWRHRLTHILRQTTEAEARQFVAETVEPALRKVADELRASGVDANVQRDSDDAVRLTVPTADHRDFVYGVRVTVKSAAAFLVREAAEPEAERAHVYGIVTFFEDGRLGYDVEYLRGDEVIADVLRQYERYVSLAADKRTHLLSRAPGHATEAE

SEQ ID NO: 33420 - protein, 402 aa, Burkholderia sp. 383
MGETKDNGRRVLVIGGGIGGLATALALARQGIRVKLLEQADQIGEIGAGIQLAANAFNALDALGVGEAARSRAVFTDWLQLMDAVDAREVARIDTGAAYRERFGNPYAVIHRADIHLSVYEAVKDHPLIEFRTSTQVCGFEQGGNGVTVTDQHGERYRADAVIGCDGVKSAIRHALIGDAHRVTGHVVYRAVVDVDNMPQDLQINAPVVWAGPHCHLVHYPLRGGRQYNLVVTFHSREQETWGVREGSKEEVLSYFDGIHPLPKQMLDRPTSWKRWATADRDPVERWSEGRATVLGDAAHPMTQYIAQGACQALEDAVTLGAAVAQTDGDFEAAFALYERVRIPRTARVLYSAREMGRIYHAKGVERQVRNGLWVGRTQAQFYDALDWLHGWRAKDCLKSVA

SEQ ID NO: 33421 - protein, 541 aa, Burkholderia sp. 383
MPGQGNAHPSVPLSRSAHPDAGHGKFKKQLSLTDLTFIGLGAIFGSGWLFAASHVSTIAGPAGIFSWLLGGFAVLLLGIVYCELGAALPRAGGVVRYPVFSHGPLLGYLMGFITLIAFSSLIAIEVVAARQYAAAWFPGLTVEGSSDPTTLGWLVQAALLCFFFYLNYSSVKTFAKANNIISIFKFIVPLAVIAVLFTFFKPANLTVHGFAPFGMPGIEMAVSAGGIIFAYLGLTPIVSVASEVRNPQRTIPIALILSILLSTLIYVLLQLAFIGSIPTAMLAAGWHDVSKAFSLPYRDIALALGVGWLAVMVVADAMISPSGCGNIYMNATPRVVYGWAKTGTFFKVFTRVDEASGIPRAGLWLTFGLAIFWTLPFPSWEALINIVSAALVLSYAVAPVSVAALRRTAPDLPRPFRASAFGITGPASFVIAALIVYWSGWSTVSWLLGLQIVMFVIYLACRRWVPTAHLSLTEQVRSSAWLIAFYAAMIVLSYLGGFGGTGQLAHPYDTVVVAAVALVIYYWGANTGVRADKLQLDDDED

SEQ ID NO: 33422 - protein, 204 aa, Burkholderia sp. 383
MSTLETLLKSRVSTNKYDSGRALTDHQIDELIQLATTAPSAFNLQNWKFVAVRSAAGKAKLLPLAYGQQKVADAAVTFIVCGTLEPHVTLPGALKPSVEHGILDKGIYEGWIGAANSMYGDNPAFQRDEAIRSASLAAMTLMLAAQDRGLASGPMIGFDPSGVAAAFHLQPTDVPVMLVTVGHAAPGNWPQKPRKSTSDVLSFA

SEQ ID NO: 33423 - protein, 576 aa, Burkholderia sp. 383
MKKTLSMTLVALLAVGACGMAVAGGGDVGQTAKQATNTTAIVLFALFVAGTLWITKWAASRTRSAADFYTAGGGITGFQNGLAISGDYMSAASFLGISAAVMTSGYDGLIYSIGFLVGWPIITFLMAERLRNLGKFTFADVAGYRFEQGPIRSFAAIGTLVVVAFYLIAQMVGAGQLIKLLFGLDYWVAVVIVGALMMVYVLFGGMTATTWVQIIKACMLLAGVTFMAIMVLAQYGFSPEALFAHAVEVKTAIAANAGKAPDDATRIGLSVMSPGGFIKDPISAISFGMALMFGTAGLPHILMRFFTVPDAKEARKSVFWATTWIGYFYVLIFIIGFGAITLVLTNPELADVAKGVIKGGAGTANMAAVLVAKTVGGDVFYGFISAVAFATILAVVAGLTLSGASAVSHDLYATVFKNGNANSADELRVSRITTLVLGVIAVLLGIAFEKQNVAFMVSLAFAVAASANFPVLFLSMMWKGCTTRGAVIGGFLGLVSSVGLTIVSPSVWEATLGYPKGSAWFPYTSPALFSMTIGFVGVWLFSVLDTSLRAKAEKGAFAAQQVRSETGLGATRASSH

SEQ ID NO: 33424 - protein, 503 aa, Burkholderia sp. 383
MTHNSERPADPAGGADSRHADPDAMFASHEAGYAKQLKPRHVQMIAMGGAIGTGLFLGAGGRLQHAGPALALVYLVCGVFAFLIMRALGELVMHRPTSGSFVSYAREFMGERASFVAGWMYYLNWATTGIVDITAVAIYMKYWAVFTDVPQWVFALGALGIVSVMNMIGVKVFGEMEFWFSIVKVGTLAVFLAVGAVFLASGHPVAGQMPGLHLVADHGGIFPHGILPAVLIVQGVVFAYASIELVGVAAGETADARKVLPKAINSVMWRIALFYVGSVVLLTMLLPWTAYSAHESPFVTFFSKLGVPYVGTVMNVVVLTAALSSLNSGLYSTGRVLRSLAMGGSAPRFVSRMNARGAPYGGILITVAINAIGVPLNYIVPAQAFEIVLNMASLGIITTWGFIVMCQILFRRAVDRGELKAVSFRMPGAPFTSWLTLAFLVGVLVLMAFDYPGGTWTIATIPVVVLALVVGWKLAKRGAAREQVADARASAATHAVADPARGA

SEQ ID NO: 33425 - protein, 344 aa, Burkholderia sp. 383
MKALDRILDAARRQPMRIALCEADDPRVLQAAARATHDGIARIVLVGNRAAIHAAAARDAIDLDGMTLVDPATAAQRDAYADTLHALRKNKGMTADAARDAVLDPLCHANLMVRLGDADGSVAGAVHATADVVRAAIQLIGVDPAFRIVSSFFLMMLCEPFHTIKGGLIFSDCALVVDPDANQLAEIAMAAADSAHALLGEAPRVAMLSFSTSGSAHHAAVDKVTAATAHVRERRPTLAIDGDVQLDAAIVAEIAERKIAHSQVGGHANVLVFPSLEAGNIGYKLAERIGRAKAVGPLLQGLRRPANDLSRGCSADDVYHVIAATTVQAQAAAQRAATGEAAHA

SEQ ID NO: 33426 - protein, 473 aa, Burkholderia sp. 383
MQPSNQSDLKCGLKQRHMTMIALGGVIGAGLFVGSGVVIQQTGPAAILSFLITGGLVVLVMRMLGEMACAMPAVGSFYEYARLAFGNWRGPGKMAGFLTGWMYWYFWVIVVALEAVAGAKLIQFWLPDTPAWIISLALLVVLTLTNLISVGSYGEFEFWFSSIKVGAIIVFLFLGGLYVLGLWPASMHTTSVLPTLLGHGGFMPLGIGPVMSGAVAATGFYFGAEIVTIAAAEAKEPAKAVAKATNSVITRVLVFYVGSVALVVALVPWNSHQMATPYVSALEVMGLPAAANVMNAIVLTAVLSALNSGLYAASRMLFALTRHGDAPAALAKVNKRGVPVRAILLGTVFGYVSVVMSYVSPDTVFAFLVNSYGTVALFVYVLIAFSQLRLRKRLDPVAASKLRVKMWAYPYLTWVAIIGMVGILVAMAFIPDQRKPLWLGVASLGVLVVAYGLTRRSRREHLDDSELLAYPPR

SEQ ID NO: 33427 - protein, 444 aa, Burkholderia sp. 383
MSTILESLPTGQKVGIAFSGGLDTSAALHWMKLKGAVPYAYTANLGQPDEDDYDAIPKRAIEYGAAGARLIDCRAQLVAEGIAALQSGAFHITTAGVTYFNTTPIGRAVTGTMLVAAMKEDGVNIWGDGSTYKGNDIERFYRYGLLVNPDLKIYKPWLDQTFIDELGGRAEMSEFMNQAGFAYKMSAEKAYSTDSNLLGATHEAKDLESLESGIKIVNPIMGVAFWRDDVKIAAEEVTVRFEAGQPVALNGVEFSDPVELLLEANRIGGRHGLGMSDQIENRIIEAKSRGIYEAPGLALLYIAYERLVTGIHNEDTIEQYRENGRRLGRLLYQGRWFDPQAIMLRETAQRWVARAITGEVKIELRRGNDYSILSTKSPNLTYQPERLSMEKVASTFSPRDRIGQLTMRNLDITDTRDKLRVYSQVGLLTPGETSALPQIKGDDK

SEQ ID NO: 33428 - protein, 403 aa, Burkholderia sp. 383
MQSRPIYMDYSATTPVDPRVVDKMVPFLHEQFGNPASRSHSYGWDAEQAVEEARAHVAALLGADPREIVWTSGATEGNNLAIKGAAHFYQGKGKHLVTVKTEHKAVLDTCRELERQGFDVTYLDVREDGLLDVDTVRQALRADTILVSVMLANNETGVIQPVAEIGALCRARGIVFHCDAVQAAGKIPVDVNALNIDLLTVTAHKVYGPKGIGALYVRRKPRVRIEAQMHGGGHERGMRSGTLPTHQIVGMGEAFRLAKEEMVEESRRVGALRDRLLAGLSTLDEVYVNGDLARRIPHNLNVSFNFVEGESLIMGIKGVAVSSGSACTSASLEPSYVLRALGRSDELAHSSIRFTLGRFTTEAEVDSVIAQVRDTVGKLRELSPLWDMHLEGVDLNAIEWAAH

SEQ ID NO: 33429 - protein, 713 aa, Burkholderia sp. 383
MNTPTAVVPGWELDSAPFHAGELAVQQRAGVTEAAGSAGRRGIRRFMPDQHRTFFAQLPFFVLGGVDAHGQPWATLRAGAPGFVTSPDARTLRIAARALPGDPLAGAWQPGAPLGGLGIEFDTRRRNRVNGVVRAIDGDALTIAVEQSFGNCAKYIQGRKPTFVAREVDTSAAPDVSDALNDADRALLAQVDTFFVASANTSADAGAARGADVSHRGGMPGFVRVDDARTLTTPDFSGNRFFNTLGNLQHDPRAGLLFVDFDNGDLLYVAARAEIVWDGPLVASFDGAQRVVRFHVREVRRMRAVLPFRWSAVERAPQFAAMAAGAGAGANANANAAAAAAAVVVPSASTPESTSESTSTSTSASTPASTSAPAWRPLRIAKIVDEARAIRSFHFEPVDGGTLPAYEAGQHLTLRVALPGSDSPAIRSYTLSDAPGDAHYRITVKREGRVSAWLHDHAHLGMTVDAQMPRGRFSFDLASPRPAVLVSAGIGITPMIAMLRRALADDQPSRRVVFVHGARESDDRPFAEELARVAATDERLSLHWFDSHPQEGSAAHAGRIDIAQLKRILSFDDYDFYLCGPSAFMRDLYDGLRALNVPDERIRFEAFGPSSVVRSATRAAATPAVASVPIVFRRTGREAAWTPADGTLLEFAEGQRVDVPSECRSGSCGTCATRVLSGAVDYEQAPDAPVEPGCALLCVARPVQGSEPLVLDR

SEQ ID NO: 33430 - protein, 492 aa, Burkholderia sp. 383
MNASIIIIAAFAVFALAIGVMARRGRKLTLEQWAVGGRGFGSLLTFLLMAGEAFSTFSFLGASGWTYSKGVPAFYILSYGCLAFVIGYWMLPAIWRYAKERGLVSFADYFAAKYDSRAIGVLVSIVAVFAMVSLLMIQLRGLGVIVSEMSYGLIPQAAAIWIAATLMAVYMVVSGIHGSASIAIFKDVLILAIAIFLGLYLPMHYYGGLGEMFARIDAAHPELLRMPEHGFNLSWYNSTILLTSLGYYLYPHGFTAIYVAKDERALRRNVILMPLYQVLIAFLFLVGFAAVMTVHGLEGAQTDLALLRLVKQTFPAWFVGIVGGTGLLTALVPGSLIMLNASTTIARNIYREGFAPNATDREVTRVARIALPIFTLVVVYFVLRGGATFVTLAIFSSSLLTQLVPMLASSFLKRPFGTREGAFAGIVAGAIVIAMTNYYGVTLASLFPGASNTVTSINPGLVALAVNAVVFIVISAVQRKLKARIAAPVGSA

SEQ ID NO: 33431 - protein, 330 aa, Burkholderia sp. 383
MQANRHQVRIDALIDAAQDIRCFRVSRVDGQPFDAYEPGAHIDVTAPSGITRQYSLCGNPDERGSYLFAVKKEAQSRGGSRSLHDDVQVGAELSIGAPRNLFRLTDDASEHVLIAAGIGITPLLSMAYALHQRGASYRLHYFARSREHAAFVAELSAEPFASHVTFHYGIEPAALAAELGRCVESVDARAHVYTCGPGPFMDAVVAAAATRLPEDSIHLERFAAEPAAADAGHTDAGAGPATDGFEVRLQRSGQSVRVTPDTSIVDALARIGIEVDTSCGEGVCGTCMVPVIDGEPDHRDHCLSKAERASNTVICCCVSRARSAVLVLDL

SEQ ID NO: 33432 - protein, 292 aa, Burkholderia sp. 383
MSTSATRNATTVAVLGIGVMGAPIARNLARQGFTVRAWNRTRAKADALAADGVAAFATPAETVSDARVVVTVLNDADGVLKAMEAAAPKLAAGTIWVQVSTVGVRGIARLAAFARTHDLVFYDAPVQGSRQPAENAQLVVLAAGPESDRAQVQPLFDAIGRRTLWVADDGSTGAGSRLKLALNHYAFTLTHAIAESLKLAGALGADPRDVIDVVSGGPMDNGYFQAKGALILNDDFRPAFTVANAVKDATLIAQAAHDAGMHADVANASLARFRRAVDAGHGDKDMAASFLA

SEQ ID NO: 33433 - protein, 392 aa, Burkholderia sp. 383
MADVILVLNAGSSSIKFSAFDVQGDTLGLIVHGQVDGLYTATAHFSAVDHHAERHEQQWAGGESFGHHEGLEQIAVFLEAHQEGHRLAAVGHRVVHGGQRFSGPVRVTPEIVAELDKLTPLAPLHQPHNLTPIRILETVQPGIEQVACFDTAFHRTQPAVTQAFALPESITSRGVRRYGFHGLSYEYIASVLPDVAPPAARGRTVVAHLGNGASMCALVAGKSVASTMGFTAVDGLPMGTRCGNLDPGVVLFLMEELGMDVRAVEDLIYRRSGLLGVSGISSDMRTLLASDDPHARFAIELYIYRIARELGSLAAAMEGIDAIVFTAGIGEHAAPIREGVMRRAAWLGVEIDVEANNMGGPLVTTASSRVPVWVIPTNEELMIAHHTRRLIR

SEQ ID NO: 33434 - protein, 312 aa, Burkholderia sp. 383
METRHEKYHRLIEHCQTLAPMPTAVVHPCDRSSLEGALEAARKRLIEPILVGPRARIEATAAACGLSIGDHEIVDAPYSEASAAAAVRLVRDGRASALMKGSLHTDELMAEVVRHDAGLRTGRRISHCFVMDVPAHADPLIVTDAAINIAPTLAEKVDILQNAIDLAHALAFPQVYVAILSAMETVNPKVPSTLEAAALCKMVDRRQITGALVDGPLALDNAIDPEAARIKQIDSPVAGHANVLMVPDLEAGNMLAKSLSFLAGADAAGIVLGARVPIILTSRADSLITRLASCAVAMLVANVQREATTREG

SEQ ID NO: 33435 - protein, 782 aa, Burkholderia sp. 383
MDRAGTGLAPVPGSENMKQTETQQQAAFDYHEFPTPGKISVVASKPLVTQRDLALAYTPGVAGVCEAIAADPLQAHRFTSRGNLVGVITNGTAVLGLGNIGPLASKPVMEGKAVLFKKFAGIDVFDIEINETDPDKLVDIIAGLEPTFGGINLEDIKAPECFTVEQKLRDRMKIPVFHDDQHGTAITVSAAFINGLKVVGKSISEVKVVTSGAGAAALACLDLLVDLGLPVENVWVTDIEGVVYRGRTALMDPAKSRFAQETDARKLAEVIGGADVFLGLSVGGILTADMLKAMAPRPLILALANPTPEIFPELAHATRDDVVIATGRSDYPNQVNNVLCFPYIFRGALDVGATTITREMEIAAVHAIAGLAEEEQNEVVAAAYGAYDVAFGAQYLIPKPFDPRLIVRIAPAVAKAAMEGGVAKRPLTDLDAYVEQLQQFVYHSGAFMKPLFATARRLVRDGGKARIVFTEGEDERVLRAVQVIVDEKLARPILVGRPEVLLARIERFGLRIRLGQDVEVTNPEYDERFPQYWTTYWELRCRDGISKEMARVEMRRRLTLIGAMMVRLGDADGMICGTVGEYHNHLRFVDEVIGKKPGASTYAAMNILLLDQRTVALVDTHVNDNPDAEQIAEFTIAAARQMEWLNLTPKAALLSRSNFGSGSAASGVKMRRALEIVREQAPDIEADGEMHGDCALDEGLRSRLLPMSPLKGAANLLVCPNVDAGNIAYNLLKTEAGSNVAVGPFLLGVNAPVNILTSSATVRRIVNMAALTVIEANRNASA

SEQ ID NO: 33436 - protein, 492 aa, Burkholderia sp. 383
MSDTTTLHYLDYAATTPADPRVIEAMTACLGFDGIFGNPASSSHAAGRLAKDKVEQARAQVAALIGADADEIVWTSGATESNNLALKGYAENATGKRHLVTSRIEHKAILDTMANLSKHGSSVTFLTPTRDGEITVDAVAAAIGPDTGLVSLMLVNNELGTLTDIGAISRIVHDAGALLHVDAAQALGKTPIDVRALGIDMLSMSAHKVYGPKGIGALFVRRDIADRIAPQIHGGGHERGLRSGTLATHQIVGMGVACELAADKLDGETARIAALGARLTDALVALGDVTQNAAAARRIPHTLSLTVNAPGFFPFMLGEALAVSSTSACNSTSGAPSHVLTAIGLDAETAGRTVRVSFGRFTTEQDVDFAIACFRHAIEQCRATAANGFSASRQITPADLKAIRNAGFRSVICNRPDGEGDEHPAFDEIAAAARELGLEARYLPVERDRIGDAEIDAFGELVDTLQKPVLAYCRSGNRSGMLWNRLSARRMA

SEQ ID NO: 33437 - protein, 415 aa, Burkholderia sp. 383
MELPRGGFWRNWVGNQSCVAAHLASPASEAEIAELVHTATRQGKHVRCAGSGHSFTPVVATSGLLLSLQDYQGIVAVDEARKRVTVKAGTKINAVTRHLKELGLSLVNQGDIDSQAIAGALATGTHGTGTTLSNLSSQVVGMRIVRPDGSIMTVSDRQDLDLLHATQVNIGMFGVVSELTLQVTDAFWLHDRVWREDFDALMAQYDDLAAKHRHFSFFWCPTSASRDLYCLPDTTKVSNSKKDYDVCEIKVMDVTDARTFHEGEHEKIAYSSEVYAIHYVPNFHELEYAVPAQHGKEALRRVRELILTKHRDCIFPVEYRFTKGDPAWISPFNHQDSVTISCSGGPNGVDYWPFLKDVDTILRDYGSRPHWGKLHFTNREDVDRWFPKAEAFRALRRSVDPEGYFLNDHLRTLFS

SEQ ID NO: 33438 - protein, 316 aa, Burkholderia sp. 383
MPRELNQPMGGNEMPRFGGIATMMRLPQAETTDGLDVCFVGVPLDLGTSNRSGSRFGPRQIRTESVLLRPYNMATRAAPFDSLQVADIGDVATNPYDLKDSVRRIEEAYDEIVANGCRPITLGGDHTIAWPILRALHKKYGQVAVVHVDAHADVNDTMFGEKIAHGTPFRRAVEDGLLQCNKVTQIGLRGTGYHADDFDWCRQQGFTVVQAEECWNKSLAPLMAQVRERVGDTPVYLSFDIDGLDPSFAPGTGTPEIGGLTVQQGLEIVRGMKGLNIVGADLVEVAPPYDPTGTTALTGANLAFEMLCVMPGVAYR

SEQ ID NO: 33439 - protein, 354 aa, Burkholderia sp. 383
MSHQLTIEPLGVTIEVEEGQTMLDAALRQGIYIPHACCHGLCGTCKVAVLDGETDLGDANPFALMDFEREEGKALACCATLQADTVIEADVDEEPDAEIIPVKDFAADVTRIEQLTPTIKSIRLKLSQPIHFQAGQYVQLEIPGLGQSRAFSIANSPADVAATGEIELNVRQVPGGLGTGYLHEQLAAGDRVRLSGPYGRFFVRRSAALPMIFMAGGSGLSSPRSMIADLLDGGITAPITLVYGQRNAKELYYHDEFRALAERYPNFTYVPALSEGAADAGGGIAQGFVHDVANAHFDGDFSGHQAYLCGPPAMIDACITALMKGRLFERDIYHEKFISAADAQQTRSPLFRRV

SEQ ID NO: 33440 - protein, 470 aa, Burkholderia sp. 383
MWRNWSGYVCSPDATVSTPASHAGLAAVLRDAAAAGATVRAAGAGHSFSPLVQTDDVILSLDGMQGVIDVDRDRRVARVHAGTRLWALGPALAAHGLAMENLGDINVQSIAGATSTGTHGTGITLGNLSTQIDSLTFMCADGSEIRASADTHPELFAGGRIGLGALGVLTEIGLRLVPAFKLRLERGGMQLDDCLAQADTLIAKHRSFEFYWFPHTDTVLTKAWDMTDEPADSVHWASRASESFLENTVFGALCGLGKRVPSLCPALSRLCASTVSAGRHVDASYAMLSTVRRVRFNEMEWSVPAERGADALREIRSFIARRSFPLMFPIEYRWVRGDDIWLSPDYGRDSVRISVHQYRGMPFDAYFSGVQAICRNHGGRPHWGKVHAMKAAELAACYPHWDDFLALRERMDPLGRFLTPYLRTLFGLPQHASASVASTARATPARRGTPPMHETAGIAQHRPRSNQEAS

SEQ ID NO: 33441 - protein, 176 aa, Burkholderia sp. 383
MSSRRIAVRRSGVHGKGVFAVAPIKAGERVVEYKGERISWKEALRRHPHDPSEPNHTFYFALDEGGVIDGKIDGNSARWINHSCAPNCEAEEVKGRVYIHALRDIGAEEELFYDYGLVIDAKLTKTLKREYACHCGAASCRGTLLATTDEGGKKKKKKDKKDGKSEPRSKDKKSKK

SEQ ID NO: 33442 - protein, 384 aa, Burkholderia sp. 383
MRSATAPRSKLPDVGTTIFTVIGQLAAQHDALNLSQGAPNFAPDPSLVEGVARAMRDGHNQYAPMAGVMALRERLAEKTEALYGTHYDPATEITVIASASEGLYAAISALVHPGDEVIYFEPSFDSYAPIVRLQGATPVAIKLSPEHFRVNWDEVAAAINPRTRMIIVNTPHNPTATVFSADDLERLAQLTRDTGIVILSDEVYEHVVFDGAQHQSMARHRELAERSVIVSSFGKSFHVTGWRVGHCVAPAELMDEIRKVHQFMVFAADTPMQVAFAEILARPDSYLGLSAFYQAKRDLLARELADSRFELLPSEGSFFMLARFRHFSDESDSDFVLRLIRDARVATIPLSAFYTDGTDAGVIRLSFSKDDATLVEGARRLRSL

SEQ ID NO: 33443 - protein, 470 aa, Burkholderia sp. 383
MKAESNGRPAAGAKSSGQPALQQTLGTWQLWGIAVGLVISGEYFGWSYGWASAGTLGFVVTALFVAAMYTTFIFSFTELTTSIPHAGGPFAYARRAFGPTGGYLAGAATLVEFVFAPPAIALAIGAYLHVQFPGLEPKHAAMGAYLVFMALNIVGVQIAATFELVVTLLAIFELLVFMGVVSPGFAWSNFMKGGWSGADHFSVGAFHGMFAAIPFAIWFFLAIEGVAMAAEEAKNPKRSIPIAYVAGILTLVALAIGVMVFAGGAGDWTKLANINDPLPQAMKYIVGANSGWMHMLVWLGLFGLVASFHGIILGYSRQIFALAREGYLPEWLAKVHPRFKTPYRAILAGGVVGIAAIYSDELIQFGGQTLTANIVTMSVFGAIVMYIVSMASLFKLRRSQPNLERPFRAPLYPIFPAFAILAALVCLATMVVFNGLVALVFLGFLAFGYAYFLATRSQRASAPGDVLLEE

SEQ ID NO: 33444 - protein, 567 aa, Burkholderia sp. 383
MSHSKDLEQPATTGARLLVDALLANHVERVFCVPGESFLAVLDALADDTARIQTVVCRHEAAAANMAEAVGKLTGRPGIAFVTRGPGATHASIGVHTAFQDSTPMILFVGQCAREHLDREAFQEIDYRRMFGQMAKWVAQIDDPRRIPEYLSHAFHVATSGRPGPVVLALPEDVLSEACAPQPVVPAAKRVAAAPSAAQLDELRERLARAERPFAIVGGSGWTPDACANLRTFVERWQLPVACAFRYQDTIDNAHPNYAGDVGLGINPALGKRIRDADLLLVIGPRLGEATTGGYTLLDIPKTRQTLIHVHQGADELGRVYAADLPIVSGMPEIAAPLAALEAPEHPAWAGTAADAHRAYREWHAPLPMPGDVQLGDVMVQLRERLPHDAILTNGAGNYAIWLHRHFAYRHFRSQLAPTSGAMGYGVPAALAAKSLYPSRAVVALAGDGCFMMAGNELATAMQYGLNIVVIVVNNGHFGTIRMHQERNYPGRVHGTGLTNPDFAAYARAFGAHGETVERTADFAPALERALTCGLPALIEIRIPQDASTPAATLEQIREQGRRARGG

SEQ ID NO: 33445 - protein, 289 aa, Burkholderia sp. 383
MDLGFIGLGEMGQAIATNLLKAGHTVRVWNRSRERAEPLAAIGAQIVDTPADAFRGDAVFSMLADDAAARAIFDDALLAQAPRGLIHVNMATVSVALAESLAHAHASRGIHYVAAPVMGRPDVAAAARLTIMAGGPAEAIDRVQPLFDAIGQKTWRFGSLPQHANVAKIAANFTLASAIETLGEASALLGAHGVAMRDFLDVITGSVFPGPVYEGYGSMIAERHYEPARFKARLGLKDVRLALEAGDAVSVPLPVASVVRDNLLDALAHGGGEQDFAVLGEVALRRAGR

SEQ ID NO: 33446 - protein, 756 aa, Burkholderia sp. 383
MDEQLKQAALAYHLNPKPGKISVTPTKPLSNQLDLSLAYSPGVAAACEAIHADPLDAQKYTSRGNLVGVITNGTAVLGLGNIGPLAAKPVMEGKGCLFKKFAGIDVFDIELSESDPDKLVEAIAMLEPTLGGINLEDIKAPECFYIEQKLRERMKIPVFHDDQHGTAIIASAAILNGLKVVDKKLSEVKLVCSGAGAAAIACLDLLVNLGLTKSNILVADSKGVIYEGRGNLDPSKQRYAATTDARTLADAIVGADVFLGCSSAGVLKQDMVKTMGDRPLILALANPEPEIRPEDAKAVRPDAIVATGRSDYPNQVNNVLCFPFIFRGALDVGATTITEEMKLACVRAIAELAQETDQSEEVAKAYEGHSLEFGPDYLIPKPFDPRLIIKIAPAVAQAAMDSGVATRPIQDMDAYREQLGATVYRTGMVMRPVFATAKQKQARIVFAEGEDERVLRAAQFVLQEKIAKPILVGRPSVIDMRLAKIGSKLKAGTDFEIVDPEDDARYHRYWQAYQEIGARDGVTPEVAKAAMRKFNTLIGAMLVHLGDADGMICGMIDTFHSHLKFIEQVLGRAKGAEHFAAMNLLMLPGRNLFVCDTYVNELPSAEQLADMTIQAAAEIERFGIAPKAALLSNSNFGSAPSASSRRMGEARKLIVERAPNLEVDGEMHGDAALSEMIRKQAFPGTTLSGEANLLIMPNVEAANIAYNLLKMVGGEGVTVGPFLLGAAKPAHILTPAATVRRIINMTAVAAANVNTK

SEQ ID NO: 33447 - protein, 362 aa, Burkholderia sp. 383
MATPQFHPLRIRDVRPETADAVTVSFDVPPELRDAYRFTQGQFVTLKTHIDGEETRRSYSICVGTTDYDRDGELRIGIKRVRGGRFSNFAFDSLQPGHTIDVMTPDGRFFTHLNADHGKQYVAFSGGSGITPVLAIVKTTLELEPRSTFTLIYGNRSVDAIMFAEELEDLKNRYMNRFVLYHVLSDDQQDVELFNGVLDQTKCAEFLGTLTPADAIDEAFICGPAPMMDAAEAALKAAGVPQAKVHVERFGTPLPQAGAPVVEITDQTPAADLEIVLDGKKRKLRLPYEGVSLLDVGLRAGLALPYACKGGVCCTCRAKVLEGEVRMEKNYTLEEHEVKDGFVLTCQCHPISDKVVVSYDER

SEQ ID NO: 33448 - protein, 67 aa, Burkholderia sp. 383
MATGTVKWFNDAKGFGFITPEGGGDDLFAHFSEIRVEGFKTLQENQKVEFEVKTGPKGLQAANIRPV

SEQ ID NO: 33449 - protein, 532 aa, Burkholderia sp. 383
MKSSIQRNIGPFALMLTGLGSIIGSGWLFGAWKAAKIAGPAAICAWIIGAVVILAIALTYAELGAMFPESGGMVRYARYSHGSLVGFISAWANWIAIVSVIPIEAEASIQYMSTWPYPWAHALFVNGELTVPGLLLSAVLVVIYFLLNYWGVKAFARANTTITIFKFLIPGLTILGLMLTSYHPENLGTASNASFAPYGWSAVLTAVATSGIVFAFNGFQSPVNLAGEARNPSRSVPFAVITSILIALVIYVLLQMAYIGSVNPADVAQGWSHFNFKSPFAELAIALNLNWLAILLYVDAFVSPSGTGTTYMATTTRMIYAMERNNTMPKMFGNVHPLYGVPRQAMWFNLFVSFLFLFFFRGWSSLAAVISVATVISYLTGPISLMALRRAATDIKRPLSIPLMKLIAPFAFVCASLILYWAKWPLTGEIILLMIVALPVYFYFQAKSGWTGWGDDLKAAWWLVAYLPTMAVLSLIGSKEFGGHGVLPYGWDMLVVAAIALVFYFWGVNTGYRTKYLDERESHDEILEGIGA

SEQ ID NO: 33450 - protein, 103 aa, Burkholderia sp. 383
MDTQQRIKQIVDENQVVLFMKGNAQFPMCGFSGRAIQVLKACGVDQFKTVNVLEDDEIRQGIKAFSNWPTIPQLYVKGEFIGGSDIMMEMYQSGELQQLFAAA

SEQ ID NO: 33451 - protein, 400 aa, Burkholderia sp. 383
MTDAYICDAIRTPIGRYGGALKDVRADDLGAVPLKALIERNRDVDWTAIDDVIYGCANQAGEDNRNVARMSALLGGLPTDVPGTTLNRLCGSGMDAVGTAARAIKAGEARLMIAGGVESMTRAPFVMGKATSAFARQADIFDTTIGWRFINPLMKQLYGVDSMPETAENVAVDYNISRADQDLFALRSQQKAARAQQDGTLAEEIVAVTIPQKKGDPVVVSRDEHPRETSLEALAKLKGVVRADGSVTAGNASGVNDGACALLLANAQAADQYGLRRRARVIGMATAGVAPRVMGIGPAPATQKLLRQLGMTIDQFDVIELNEAFASQGLAVLRMLGVADDDPRVNPNGGAIALGHPLGASGARLVTTALHQLERTGGRFALCTMCIGVGQGIALAIERV

SEQ ID NO: 33452 - protein, 103 aa, Burkholderia sp. 383
MYAVIKTGGKQYKVAVGEKLKVEQIPADIDAEITLDQVLAVGEGESIKFGTPLVSGASVKATVVSHGRHAKVTIFKMRRRKHYQKHGGHRQNYTELRIDAINA

SEQ ID NO: 33453 - protein, 370 aa, Burkholderia sp. 383
MKFIDEARIEVIAGDGGDGSASMRREKFVPFGGPDGGDGGRGGSVYAIADRNINTLIDYRYAKKHLARNGENGRGSDCYGKGGDDVTLRMPVGTIISDMDTGELIADLTEHDQQVMLAQGGSGGLGNLHFKSSTNRAPRQKTDGKPGERRMLRLELKVLADVGLLGMPNAGKSTFISSVSNARPKIADYPFTTLAPNLGVVRVGPSKSFVIADIPGLIEGAAEGAGLGHQFLRHLQRTGVLLHLVDLAPFDESVDPVAEATAIVGELRKYDEALYEKPRWLVLNKLDMVPEDERKARVADFLERFEWDGPVFEISALTGQGCEALCYAIYDYLAEHSDAHRAAEAEDLAADVRFRDEPPAKGGAAPGDDA

SEQ ID NO: 33454 - protein, 785 aa, Burkholderia sp. 383
MIGATMPSKSYSNPPAKRHMSTQASSKAKLREAALDYHEFPTPGKIAIAPTKQMINQRDLALAYSPGVAYACEEIVENPLNAARFTARSNLVGVVTNGTAVLGLGNIGPLASKPVMEGKAVLFKKFAGIDVFDIELNESDPHKLVDVIAALEPTFGGINLEDIKAPDCFIVEREARKRMKIPVFHDDQHGTAIVVAAAVTNGLKVVNKDIKKVKLVASGAGAAALACLDLLVDIGLPIENIIVTDLAGVVYKGRTELMDPDKERFARETDARTLAEVIDGADIFLGLSAAGVLKQEMVKGMAERPLILALANPTPEILPELALEVRPDAVLATGRTDYPNQVNNVLCFPFIFRGALDVGATTITREMEIAAVNAIAELAQHEQSDIVATAYGIQDLSFGPEYLIPKPFDPRLIVKIAPAVAQAAMDGGVATRPIEDMEAYRVHLQQFVYHSGTTMKPIFQIARAAPEEKKRVVFAEGEEERVLRAVQIIVDEKLAKPVLIGRPSVIEHRIQRYGLRLTPGTDFTVVNTEHDERYRDFWQTYYKMMARKGISEQLARVEMRRRTTLIGSMLVKKGEADGMICGTISTTHRHLHFIDQVIGKRPGCSVYAAMNGLVLPGRQIFLVDTHVNVDPTPEELAEITIMAAEEVRRFGIEPKVALLSHSNFGTSNAPSAKKMRDTLAILQERAPELKVDGEMHGDVALDAALRKEILPESTLEGEANLLILPNIDAANIAYNLLKTAAGNNIAIGPILLGAAQPVHVLTESATVRRIVNMAALLVADVNATR

SEQ ID NO: 33455 - protein, 317 aa, Burkholderia sp. 383
MAHESTQRPDLLMTGPYQPWDDAWLAGYNVHRLWEATDRAAFLAEHGAGVRAIATRGDLGANAELIAALPKLEIISCYGVGTDAIDLAAARERGIRVTNTPDVLTGDVADLGVGLALAMMRHIGAGDAYVRSGAWSDGDMPLVTRLYGKRVGVVGFGRIGTTIARRLSGFDVELGYFDVAPRTDSPHRFFGDLAELASWCDLLIVTLAGGPTTRHLVDAAVLDALGPQGYLVNVSRGTTVDEPALLDALERNAIAGAALDVFWNEPRIDPRFLALQNVLLQPHHASGTIETRQAMGWLVRDNLAAHFAGAPLVTPVV

SEQ ID NO: 33456 - protein, 385 aa, Burkholderia sp. 383
MTEGPTMHIGVPAETRANETRVAATPETVKKYAAAGHRVSIAKGAGIAASYPDEAYAAAGAELTGQSAAFDVDIVLKVQAPTDAELPLLKRGAVLVGMLDPFNGEQAAQLAAAGVTAFALEAAPRTTRAQSLDVLSSQANIAGYKAVLVAAALYPRFFPMLMTAAGTVKAARVLILGAGVAGLQAIATAKRLGAVIEASDVRPAVKEQIESLGAKFLDVPYETDEERDAAQGVGGYARPMPPSWLGRQAALVHERAKQADIVITTALIPGRPAPTLISVETVQSMKPGSVLVDLAAGRGPEFDGRKSGNCPLTVADQVIVHDGVTIAGYTNLASMVAADASALYARNLLDFMKLIVTKDGTLNIDLTDDIVAATLLCRDGEVARK

SEQ ID NO: 33457 - protein, 402 aa, Burkholderia sp. 383
MTHITADQMARVKATAPVLAVHGATITKHFYQRMFARHPELKNLFNQTHQKTGSQPETLAKAVYAYAANIDNLGALGGAVTKIAHKHASLNIRPEHYPIVGENLLASIVEVLGDAVDAETLEAWRVAYGQLAQILIGVEADLYAGAAWSGFRPFKVERKVRESDEITSFYLTPADGGAAPTFEPGQYITVKRFVGDLGVDQPRQYSLSDAPHGKWLRISVKREAGKPEVIPAGKVSTLMHDGVEEGAIVEVTAPMGEFSLKRGVETPVVLISGGVGITPMMSMASTLIAEGSQREVRFVHACRSGAVHAFRDWLNDTVRDHANVKRTVLYELVGPNDRAGIDYDLEGRLTPERVQQYALVPDADYYICGPIGFMKAQRDALVALGVAPERVNTEIFGSGALE

SEQ ID NO: 33458 - protein, 650 aa, Burkholderia sp. 383
MGKIIGIDLGTTNSCVAIMEGNQVKVIENSEGTRTTPSIIAYMDDNEVLVGAPAKRQSVTNPKNTLFAVKRLIGRRFEEKEVQKDIGLMPYTIVKADNGDAWVEAHGEKLAPPQVSAEVLRKMKKTAEDYLGEPVTEAVITVPAYFNDSQRQATKDAGRIAGLEVKRIINEPTAAALAFGLDKVEKGDRKIAVYDLGGGTFDVSIIEIADVDGEMQFEVLSTNGDTFLGGEDFDQRIIDYIIGEFKKEQGVDLSKDVLALQRLKEAAEKAKIELSSSQQTEINLPYITADASGPKHLNLKITRAKLEALVEDLVERTIEPCRIAIKDAGVKVSDIDDVILVGGQTRMPKVLEKVKEFFGKDPRRDVNPDEAVAVGAAIQGQVLSGDRKDVLLLDVTPLSLGIETLGGVMTKMISKNTTIPTKHAQVYSTADDNQGAVTIKVFQGEREMAAGNKLLGEFNLEGIPPAPRGVPQIEVTFDIDANGILHVGAKDKATGKENKITIKANSGLSEAEIDQMIKDAEANAAEDHKLRELADSRNQGDALVHSTKKALTEYGDKLDAGEKEAIEASLKSLEELLKDSSADKAAIDAKVEELGKVSQKLGEKMYADMQAQQAGAAGAAGAAEGAAHAGGAQQAADDVVDAEFKEVKKD

SEQ ID NO: 33459 - protein, 332 aa, Burkholderia sp. 383
MRVILFSSRQYDDDSFAAANRQFGYRLHFQPSHLDAETAILAHGYDVVCPFVNDTVDAAVLERLADGGTRLIALRSAGFNHVDLAAAERLGITVVRVPAYSPHAVAEHAVALILALNRRLPRAVARTREGDFSLNGLLGFDLHGKTVGVIGTGIIGSVFAKIMMGFGMHVLAHSVPPYNDELIAFGARYVALDELLHHADIVSLHCPLLPSTHHLINERTLARMKHGAMLINTGRGGLVDAQALVDALKSGQLGHLGLDVYEEESGLFFEDHSDLPLQDDVLARLLTFPNVIVTSHQAFFTREALAEIAHTTLLNIEAWHAGTPQNVVTANR

SEQ ID NO: 33460 - protein, 414 aa, Burkholderia sp. 383
MRPFFLLPRLPRPARPMNTATDSLVRLAARVDAIQPFYVMELMKEAQRLESSGRDVIHMGIGEPDFTAPEPVVEAAAAALRRGVTQYTSALGIAPLREAIAAHYARAYGLTISPERIVVTAGASAALLLACLALVGRDDEVLMPDPSYPCNRHFVAAAEGRAVLVPSGPDARFQLTEDDVRTRWGDRTRGVLLASPSNPTGTSLEPDELKRIVEAVRARGGFTIVDEIYQGLSYDAAPVSALSFGDDVVTVNSFSKYFSMTGWRLGWLVVPPALVGTFEKLAQNLFICPSALAQHAALACFEPAALDIYEARRLEFKRRRDFIAPALERLGFTVPVMPDGAFYVYAHCGGVAHPAAGDSAALTTAMLHDAGVVLVPGMDFGVHAPRDYIRLSYATAYSRLEEAVDRLATLFGQH

SEQ ID NO: 33461 - protein, 67 aa, Burkholderia sp. 383
MDTGIVKWFNDAKGFGFITSDNGGEDLFAHFSEIKMDGFKTLKENQRVSFDVKVGPKGKQAANIQAV

SEQ ID NO: 33462 - protein, 228 aa, Burkholderia sp. 383
MNRRPIIDPEVLPVEGTGAGLPAIDSRLMTPSGLRDRFARTLEWSVEPGEARLQKGVDLRSAAVLVPLVVRESGLTVLLTQRADHLNDHAGQISFPGGRREPFDRDATATALREAKEEIGLADKRVEILGALPDYLTGTGFCVTPVVGLVHPPFTVQADTFEVAEIFEVPLAFLMNPANHQVRVFRWEGGERRFFAMPYPNGEPGGHYFIWGATAGMLRNLYRFLAAG

SEQ ID NO: 33463 - protein, 329 aa, Burkholderia sp. 383
MQKILVARPIFPDVIERLKQYFDVDWHNGDALAPDALAARLADKDGALTAGDLVGAAELAAAPRLRVVANMAVGYNNFDMAAFNAANVLGTNTPDVLNESTADFGWALMMAAARRIAESEHWLRAGHWQKWAYDGFLGSDIYGSTLGVIGMGRIGQALARRARGFGMQVIYHNRSRVAPEIEAELNAEYVSKDALLARADHVVLVLPYTKENHHTIGAAELAKMKPTATLTNIARGGIVDDAALAVALRDGTIAAAGLDVYEGEPTVHPALLEVPNVVLTPHIASATEKTRRAMANLAADNLIAALGEGPRAGQPPNPINPDVIGKPRA

SEQ ID NO: 33464 - protein, 299 aa, Burkholderia sp. 383
MNTPAPTGFRCGMIAIVGRPNVGKSTLMNALVGQKISITSRKAQTTRHRITGINTFDDAQFVFVDTPGFQTRHSTALNRSLNRAVTSTLTSVDVILFVIEAGRFGPDDQKVLDLIPPGMPTLLIANKIDRVNDKASLFPFMQQMSTLREFTELVPLSAQRPEDIKRLLDTIKPYLPEGEPIYGEDELTDRSSRFLAAEILREKVFRWTGDELPYTSTVLIDKFEEEGRLKRIFATILVERDSHKAMVIGKKGEKLKQISTEARMDMEKLFDGPVYLETFVKVKSGWADNEAGLRAYGYE

SEQ ID NO: 33465 - protein, 459 aa, Burkholderia sp. 383
MSRLIIVSNRVAPISEGEPAAGGLAIGVYDALKETGGMWFGWSGEVVASGAPQIRVEEHGPVTFATIGLSRRDYDQYYRGFSNATLWPAFHYRTDLIQYDRHEFEGYSRVNVWLAQQLVPLLQDDDVIWVHDYHLIPFARALRAAGVKNRIGFFLHIPFPAAQVLVNVPPHRDLVESLCAFDLIGFQTEPDLRAFCDYVESEADGVIERDGHLATVRAFGRTLRAAAYPIGVHPDEIASLAQAGEHGKAVRTLAISLRGRKLIMSVDRLDYSKGLVERFRAFEKLLEHEPSHRNRVSFLQIAPSTRAELRAYQDIRLQLEGESGRINGRFAELDWAPILYIHRQYDRQLLAALYRLARVGYVTPLRDGMNLVAKEYVSAQNPEDPGVLVLSRFAGAARELTGALIVNPIDIDGMADALSQALTMPLAERRARYTDMIAQLRENNVSVWRDNFLRDLQHA

SEQ ID NO: 33466 - protein, 455 aa, Burkholderia sp. 383
MKNLQRHLSARHIRFLALGSAIGTGLFYGSASAIQLAGPAVILAYILGGAAVYMVMRALGEMAVRDPVAGSFGHYATENLGPFAGFVTGWTYTLEMVIVAIADITAFGIYMGFWFPDVPQWIWVLGVVAIICGLNLCHVKVFGELEFWLSIIKVGAIVAMIGGGVAILLTGMHFGHSADVPTFANLWNHGGFLPNGVGGLIASLSVVIFAYGGIEVIGMSAGEAKDPERVIPRAINAVPARILLFYVLTMVVLMSISPWTGVGNEGSPFVQIFSALGVKSAATILNLVVISAAISAINSDIFGAGRMMFGMARQGQAPRVLMTTSRHGVPWVTVVVMAAALLVGVLLNYLMPKDVFLMVAAIATFATVWVWLMILLSQVAMRRRLSSTEVAALKFKVPLWPVAPALTIAFMGFVIVMLGWFEDTRVALYVGAAWLALLALVFYARIRPKFAPASR

SEQ ID NO: 33467 - protein, 322 aa, Burkholderia sp. 383
MSQNDFAFTRDSLYGTQAEPTFAGATSFMRRRFSRDLDGVDLAITGVPFDSAASHRPGTRFGPRGLRIASTGIAWERPWPWSFDPFDVLAAVDYGDCAFDLGQPESVPGAIERHADAILARGCAMLTLGGDHFITYPLLKAHAKVHGPLSLVHFDAHTDTWPDRDVKRIDHGTMFYHAAREGWVVPERSAQIGIRTTNDEPMGFDIQDARQVHASTPAAIASRIRERVGDHPVYLTFDIDCLDPAFAPGTGTPVSGGLSSHQAFEILRHLEGINLVGMDVVEVSPPYDHAEITSLAGATIALELICLYASRRRQTMEKSNDD

SEQ ID NO: 33468 - protein, 632 aa, Burkholderia sp. 383
MNNNMFSKAAVWLVIALVLFTVFKQFDKPRVQEGVSYSQFMDDAKNGKVKNVIVQGRNLTVTPADGQKYQIVSPGDIWMVGDLMKYGVQVSGKADDEPNALMSALYYLGPTILIIVFWFYMMRQMQGGGKGGAFSFGKSRARLIDENNNAVNFSDVAGCDEAKEEVSELVDFLRDPQKFQKLGGRIPRGVLLVGPPGTGKTLLARAIAGEAKVPFFSISGSDFVEMFVGVGAARVRDMFEQAKKHAPCIVFIDEIDAVGRHRGAGMGGGNDEREQTLNQMLVEMDGFEANSGVIVIAATNRSDVLDKALLRPGRFDRQVYVGLPDIRGREQIMRVHLRKVPIANDVDAAVIARGTPGFSGADLANLVNEAALFAARRGKRIVEMQDFEDAKDKIFMGPERKSAVIREEAKRATAYHESGHAVVAKLLPKADPVHKVTIIPRGRALGVTWQLPEHDNETYSKDYLLDRLAILFGGRVAEELFMNLVSTGASDDFNKATQTARAMVARFGMTDALGPMVYVDDENDASPFGRGFTRTISEATQQKVDSEIRRVLDEQYSLARRLLDENRDKVEAMTAALMEWETIDADQINDIMEGRPPRSPKSSPAVGGDSSGGGSSAEVKPGNAPAPASPAA

SEQ ID NO: 33469 - protein, 569 aa, Burkholderia sp. 383
MSTERNDAPAASNFIRNIIDDDNRTGKWSGRVETRFPPEPNGYLHIGHAKSICLNFSVARDYGGVCHLRFDDTNPEKESVEYVDSIVDAVRWLGFDWRKDAVDHQYFASDYYDKLYEFAELLIQRGKAYVDSQSADEMRANRGSLTEGGKPSPFRERTPEENLDLFRRMKAGEFKEGEHVLRAKIDMASPNMNMRDPVIYRIRYAHHYRTGDAWCVYPMYDYTHCISDALEGITHSLCTLEFEDHRPLYDWVLNELAEAGMFTRPLPQQIEFSRLNLTYAITSKRKLLQLVTEGHVDGWDDPRMPTIVGVRRRGFTPESIHLFCERIGVTKIDSWIDMSIFEGALRDDLDDKAARTVAVLDPLKLVIDNYPEDLEEACTAPVHPHHPDRGVRTFPISRELWIEREDFVENPPKGYFRLFPGNKVRLRYGYVIECTGFDKDADGNVTAVHCNYFPDSKSGTEGANTYKVKGNIHWVSAKHAQPAEVRIYDRLFKEPHPDAGGANFLEALNPDSKKIVQAYIEPGNDDIAPETRLQFERHGYFVADRVDSKPGKPVFNRIVGLRDSWGKPA

SEQ ID NO: 33470 - protein, 264 aa, Burkholderia sp. 383
MKIALLKKLLVAGLIGTSFAAATAHAADLLDQVKQRGTLRVGLEGTFPPFNSKNPQGELVGFDVDIAKAVAAKLGVKAEFVTTEWSGIIAGLQAGKFDVIANQVGITDKRKETLDFSPAYTYSSAQLIQRNDDTRQFKSLEDLKGKKLGVALGTNYMDMAKSVPGIDVKTYPGAPEYLRDLAAGRLDAALNDRLMLAYLTKNSQLPLRPGANVGSANPSGIPFKKGNPKFQKAIDDAMAQLEADGTFTKISDKWFGIDVTKPIK

SEQ ID NO: 33471 - protein, 271 aa, Burkholderia sp. 383
MKINTLATWLVGAALITAGTVAHADRLDDIKKAGVLRVATFDSNPPFGYVDGKSNHIVGLDVDYAKALADKLGVKLQLQPTNPANRIPFLTSGKVDLVLANFTITDERAKQVDFSIPYFSSGQQFLAKKGVLKSADQLSALRVGADKGTTNEITLREKFPKATIVAYDDTPFAFAALRAGNVQAITQDGPKLIGLLANVPDKQNYEIPAFTISNDYMGVGVPKGETRLLGFVNDTLKGLEANGRAGQIYDAWFGPTTKTPLTRIFRIGDKT

SEQ ID NO: 33472 - protein, 478 aa, Burkholderia sp. 383
MAAARHCPGTPLSSAPVSIPASPVVRPSACPGLVRVVTAADGGLCRIKLPGGRLDARQARAIAAAARAFGSGTIDATNRANLQLRGIRDGAADALTRALLDAGLGPRIDGSANATADAAALAASDDVRNLMLSPLAGHDPAALVDSRALAAPLFDMLAREPRRGELSPKFSIQLDGGESVAALDHPHDIWLAAWHRSDGAVRVAAGLAGCPPVAHDDPPASVDVAPDQGVALVRALLLAFLDLAPADVTRMRALLATCGERTLLERAQRYLPFPLAADPALAGWRRTRADAALRFGVRPSRDAARCNVGAQCVLGRLDATQLERLAALAETDGDGTLSMTPWQGVFLHRVSLERAPATLDALASLGLVCASSDPLATLVACTGSTGCAKARADTKHDALALAARIGHAVDVHLTGCERHCALPHPATHTLVAVAPAHYDLYRRDAAAGLGAPLARHLTIDQAAARLTGARHSQDTTDA

SEQ ID NO: 33473 - protein, 402 aa, Burkholderia sp. 383
MAKVQHALIAGGGIAGPVVALALARAGIRSTIYESYAAPADGIGASLMVSPNGLEALKIVGVDGALRAVSQPIAHMAMADGRGKVLTRFDGLEGMQSSRVVYRSDLYRVLRDAVVDANIPVVHGKRLVGASETADGVRVSFEDGSHANGDILIGADGIRSTVRGLIDPGAPAPHYAGTLGFGALVPLDTLRIPVDTMTFVFGKHAFLGYWADPDRGICWFGNLPYAMPASMEAVREIPSAQWLAQLRELYGDDYPAHTLLRNTDPDQLFAPIASEMMPPVPRWHSERMVLVGDAVHAPSSSSGQGASLAIESAVQLARCLRDIPAPSLAFARYEQLRRARVEAIAAAAARTNTRKAMGPLGKALMHVIMPVALKTVFNPAKRLASDHGYRIDWDAGALPASR

SEQ ID NO: 33474 - protein, 390 aa, Burkholderia sp. 383
MVATAKNKPRALIIGGSLGGLFTATTLQAAGWDVDIFERSPSELDSRGGGIVLQDDVLSAFHFAGIQTGTALGVQSGDRIYLDRGDRVIQRSFMPQTQTSWNMLYSTMKAHLPAQVFHPGERFVRFEQNGDRITAYFASGRVETGDLLVGADGARSAVREQVSAGLSPNYAGYVAWRGLVPEAALPASAAAVLKGTFAFQQGPGHLMLEYLVPGEDLSTQEGQRRWNWVWYRKAAHGEELSTLLTDRSGIRHSFSLPPGALKDEDLTSLTQASKALLAPTFQTLVEATKDPFVQAILDLQVKQMVYGRAILLGDAAFVPRPHTAGSTAKAAANALALAKALHSAESGIDEALSRWQTGQLSQGIGMTEWGMNIGDRIMGIPRSNVVLKDA

SEQ ID NO: 33475 - protein, 321 aa, Burkholderia sp. 383
MKPRIVAYKPLPDDVLAYLREHADVVQADGTAALADALGDADGAIGASLKVTPQMLDRAPRLKAWSTISVGYDNFDVADLTRRGIVLAHTPDVLTESTADTVFSLILASARRVVELAEWVKAGNWHHSIGPDLYGTDVQGKTLGIVGLGRIGGAVARRAALGFRMQVLYANRSAHAEAETQYGARRVTLDELLAQSDFVCLQVPLSPETHHLIGAAEFAKMKRGAILINASRGPVVDEAALIDALRAGTIRGAGLDVFEKEPLAADSPLLQMKNVVALPHIGSATHETRHAMARCAAENLVGALAGTLRTNLVNPDALAQV

SEQ ID NO: 33476 - protein, 396 aa, Burkholderia sp. 383
MQREVVVVSGVRTAIGDFGGSLKDIAPTALGAQVVREVLKRAQVSGDEVGHVVFGNVVHTEPRDMYLARVAAIDGGVAQHAPALTVNRLCGSGLQAIVSAAQGVLLGDADIAIAGGAENMSRAPYSIPAARFGQRMGDMRAVDMMVGALNDPFQTIHMGVTAENVAAKYGISRDAQDALALESHRRASHAAKAGYFKDQILPVELIGSKKGTPVVFDHDEHVRHDASLEDFSKLRPVFVKENGTVTAGNASGINDAAAAVLLMERSVAEQRGAQPLARLVAYAHAGVDPAYMGIGPVPATQKVLARAGLTVADLDVIEANEAFAAQACAVTQELGLDPAKVNPNGSGISLGHPIGATGALITVKALYELQRVGGRYALVTMCIGGGQGIAAIFERI

SEQ ID NO: 33477 - protein, 393 aa, Burkholderia sp. 383
MTDVVIVSAARTAVGKFGGSLAKIAAPELGATVIRAVLERAGVKPEQVSEVIMGQVLTAGSGQNPARQSLIKAGLPTAVPGMTINKVCGSGLKAVMLAANAIVAGDAEIVIAGGQENMSASPHVLPGSRDGFRMGDAKLVDTMIVDGLWDVYNQYHMGITAENVAKEYGITREEQDAFAALSQNKAEAAQKAGRFNDEIVPVAIPQRKGEPLQFATDEFVRHGVTAESLSGLKPAFSKDGSVTAANASGLNDGAAAVLVMSAQKAAALGLTPLARIKAYANAGVDPSVMGMGPVPASRRCLERAGWTPGDLDLMEINEAFAAQALAVHKQMGWDTSKVNVNGGAIAIGHPIGASGCRILVTLLHEMAKRDAKRGLASLCIGGGMGVALAVERP

SEQ ID NO: 33478 - protein, 865 aa, Burkholderia sp. 383
MRIDKLTTKFQEALADAQSLAAGRDNQYIEPVHVLAALVAQQDGSARSLMSRAGVHIQALQGALNEAISRLPQVTGTGGDIQIGRELSGLLNQADKEAQKLNDTFIASEMFLLAVSDDKGDAGKLARQHGLTRKALEAAIAAVRGGSQVHSQDAESQREALKKYTVDLTERARAGKLDPVIGRDDEIRRSIQILQRRTKNNPVLIGEPGVGKTAIVEGLAQRIVNGEVPETLKGKRVLSLDMAALLAGAKYRGEFEERLKAVLNDIAKDEGQTIVFIDEIHTMVGAGKAEGAMDAGNMLKPALSRGELHCIGATTLDEYRKYIEKDAALERRFQKVLVDEPSVEATIAILRGLQEKYELHHGVDITDPAIVAAAELSHRYITDRFLPDKAIDLIDEAASKIKMEIDSKPEEMDKLDRRLIQLKIEREAVKKEQDEASQKRLQLIEEEIERLGREYADLEEIWTAEKAAVQGSAQLKEEIEKVRADIARLQRDGKLEKVAELQYGKLPQLEAQLKQVTQAEEQEQHNPTRPRLLRTQVGAEEIAEVVSRSTGIPVSRMMQGEREKLLHIEEKLHERVVGQHEAISAVADAIRRSRAGLADPNRPYGSFLFLGPTGVGKTELCKALASFLFDSEEHLIRIDMSEFMEKHSVARLIGAPPGYVGYEEGGYLTEAVRRKPYSVILLDEIEKAHPDVFNVLLQVLDDGRMTDGQGRTVDFKNTVIVMTSNLGSQVIQAMTGAPQEEIKDAVWLEVKQHFRPEFLNRIDDVVVFHALDRSNIESIAKIQLARLHDRLAKLDMALDVSEAALEQIGKVGYDPLFGARPLKRAIQQEIENPVAKLILAGRFGPKDVIPVDIHDGKFVFDRVVH

SEQ ID NO: 33479 - protein, 412 aa, Burkholderia sp. 383
MKPIQKSNKLLNVCYDIRGPVLEHAKRLEEEGHRIIKLNIGNLAPFGFDAPDEIIQDMIRNLPTSSGYSDSKGVFSARKAVMHYTQEKGVVGVGLDDIYIGNGASELIVMATQALLNDGDEVLLPAPDYPLWTAAVSLSGGTPVHYICDEQNAWMPDPDDIRRKITPNTKAIVVINPNNPTGALYSDELLLELLAIAREHGLIVFADEVYDKIVYDGLEHTALGSLSEDVITVTFNSLSKSYRSCGYRAGWMAVSGLGGDNRRRAKDYLEGLGILSSMRLCANVPGQFAIQTALGGYQSINELIVPSGRLYKQRELAYDMLTSIPGVTCVKPQAALYMFPRLDPKLYPIQNDQQFILDLLLEERVLLVQGTGFNWTTPDHFRVVFLPNLDDLTDSINRIARFLDGYRKRHSA

SEQ ID NO: 33480 - protein, 297 aa, Burkholderia sp. 383
MATIGFIGLGIMGAHMARNLLKGDHQLVVNGAFPIPDDLRTSAKVVANSTEVAQNADIIVVMVPDTPDVRNVLFADDGVAKGLTAGKLVIDMSSISPLDTQEFAKQINALGCDYLDAPVSGGEVGAREASLTIMVGGPEAAFERAKPLFEKMGKNITLVGDNGAGQTCKVANQIIVALNIEAVGEALLFAARSGADPERVRQALMGGFAASRILEVHGARMTKRTFDPGFRIELHQKDLNLALDGARKLGLALPHTASAQQLFSVCASHGGKAWDHSALVRALEIMSNFEIGQTPAA

SEQ ID NO: 33481 - protein, 392 aa, Burkholderia sp. 383
MTEAVIVSTARTPLAKSWRGAFNMTHGATLGGHAVAAALERSKLDPARVEDVIMGCANPEGATGANIARQIALRAGLPVTVPGMTVNRFCSSGLQTIALAAQRIIAGEGEVYVAGGVESISCVQNEMNHHMIQEGWLVQHKPEIYWNMLQTAENVAKRYGISKERQDEYGVQSQLRAAAAQEAGRFRDEIAPITVLAGLADKATGRLFTKEVTVSADEGIRPDTTLEGVSKIRSAVPGGVITAGNASQFSDGASACVVMSADAAQREGLQPLGVFRGFAVAGCEPDEMGIGPVFAVPKLLKQAGLKVDDIGLWELNEAFAVQVLYCRDTLGIPEDRLNVNGGAIAVGHPYGVSGARLTGHALIEGKRRGVKYVVVTMCIGGGQGAAGLFEIL

SEQ ID NO: 33482 - protein, 294 aa, Burkholderia sp. 383
MQTAVGFIGLGVMGTPMALNLARAGTPLVVWSRSHGSDDALRDAGARVAEHIDDVFASCRTVILMLANDAAIDAALARGTPGFAARVGGHTIVNMGTNAPEYSRALADDIAAASGRYVEAPVSGSRKPAEAGQLVVMLAGAPDDVDAVRALVKPLCRDSFVCGDVPSALTMKLAVNLFLITMVTGLTEATHFAQRHGIDLARFADVLNAGPMASDVSRVKLGKLVTADFSVQAAITDVLKNARLVAEAARGIGIASPLLDICHALYGETERAGHGADDMVAVIRAIEQRTDDAR

SEQ ID NO: 33483 - protein, 516 aa, Burkholderia sp. 383
MTSSINSSPLNAIADQALGLDDAAVPAAVEPASDEPNFASLGLSPEIVSALQAAGYVKPTPVQQRAIPAGIAGRDLLVSSPTGSGKTAAFMLPAIERFAQLQKTQAQQPRAPREPNQGDRRARRPQPVARPGLLVLTPTRELAMQVTTAATTYGKHLKRLRTVSILGGVAYGQQLMLLAKNPEILVATPGRLLDHLERGRIDLSELKMLVLDEADRMLDMGFIDDIETIVAATPESRQTMLFSATLDGKIGSLTSRLLKDPERIEIQQRLESRANIAQTVHYVDDRDHKDRLLDHLLRDDALDQAIIFTATKIDADQLAGRLADAGFESAALHGDLPQGARNRTIRALRERRVRVLVATDVAARGIDIPGITHVFNYDLPKFAEDYVHRIGRTGRAGRSGTAVSLVHHAEQGALKRIERFVRAPLPVNVIEGFEPRKAPPRNGGNGGRGRPGGGNGGRRFGGKPGGGYGGNGNGNGRSYGGGNGGGWSGKPGGSRDGGPRRDGQRSGGPRRSNSAS

SEQ ID NO: 33484 - protein, 417 aa, Burkholderia sp. 383
MALIVHKYGGTSMGSVERIKNVAKRVAKWHQAGHQMVVVPSAMSGETNRLLGLAKEISSQPSPRELDMIASTGEQVSVGLLSIALQEIGVEAVSYAGWQVPIKTDSAFTKARIHSIDDERVKADLNAGKVVIITGFQGVDPDGHITTLGRGGSDTSAVAVAAALGAEECLIYTDVDGVYTTDPRVVEEARRLDRVTFEEMLEMASLGSKVLQIRSVEFAGKFQVKTRVLSSLTDPLIALDEEMRSGTLITFEEDETMEKAVISGIAFQRDEARIAVMGVPDKPGIAYQILGPVADANVDVDMIIQNQSVQGKTDFTFTVGRGDYQKAMDILTNQVKGHVNAEQVQGDPKVSKVSVVGVGMRSHVGVASKMFRTLSEEGINIQMISTSEIKISVLIDEKYMELAVRALHKAFELDQAS

SEQ ID NO: 33485 - protein, 407 aa, Burkholderia sp. 383
MTQDTLHLPIYMDYSATTPVDPRVVDKMVPYLREQFGNPASRSHAYGWDAERAVEEARENVAALVNADPREIIWTSGATESDNLAIKGAANFYKGKGKHIITVKTEHKAVLDTCRELERDGFEVTYLDVKDDGLIDLDVFKAALRPDTILVSVMHVNNEIGVIQDIETIGEICREKGIVFHVDAAQSTGKVEIDLAKLKVDLMSFSAHKTYGPKGIGALYVRRKPRVRIEAQMHGGGHERGMRSGTLATHQIVGMGEAFRIAREEMATENERVRMLRDKLLRGLSQIEETYVNGDMERRVPHNLNISFNFVEGESLIMAIKDVAVSSGSACTSASLEPSYVLRALGRNDELAHSSIRFTVGRFTTEQEVDFVINLLNSKIAKLRELSPLWEMHQEGIDLSTIEWAAH

SEQ ID NO: 33486 - protein, 390 aa, Burkholderia sp. 383
MNAPSDMPTTPVFPSRLPNVGTTIFTVMSALAAEKGAVNLGQGFPDFDCDPRIVDAVATAMRNGHNQYPPMAGVAPLRDAIADKIAQVYGRRYDPATEITVTAGATQALLTAIMCTVHPGDEVIVVEPTYDSYLPSIELAGGKPVFVTLEAPDYAIPFDRLAAAITPKTRMILINTPHNPTGTVWREADMRKLEEIVRGTNVLILSDEVYEHMVYDGARHESVARYPELAARSFIVSSFGKTYHVTGWKVGYVAAPAALTAEFRKVHQFNVFTVNTPMQIGLADYLRDPAPYLTLADFYQKKRDFFRAGLERTRFKLLPCTGTYFQCVDYSAISDQPEAEFSKWLTSEIGVAAIPVSAFYHEPHESGVVRFCFAKQESTLASALERLARL

SEQ ID NO: 33487 - protein, 587 aa, Burkholderia sp. 383
MNMPSAEFSTSEPLSPPDSDSIGGTVLMKALADENVEFIWGYPGGSVLYIYDELYKQDKIQHVLVRHEQAAVHAADAYARSTGNVGVCLVTSGPGVTNAVTGIATAYMDSIPMVVISGQVPTAAIGQDAFQECDTVGITRPCVKHNFLVKDVRDLAETVKKAFYIARTGRPGPVLIDIPKDISKTPCEYEPVKSVSLRSYNPVTKGHSGQIRKAVSLLLTAKRPYIYTGGGIILADASRELNQFADLLGYPVTNTLMGLGGYRASDKKFLGMLGMHGTYEANMAMQHCDVLIAIGARFDDRVIGDPAHFASRPRKIIHIDIDPSSISKRVKVDIPIVGDVKEVLKELIEQLQTAEHGPDTEALAQWWKDIEGWRSKDCLKYDRESEIIKPQYVVEKAWELTDGNAFVCSDVGQHQMWAAQFYRFNKPRRWINSGGLGTMGFGLPAAMGVKMAHPDDDVLCITGEGSIQMCIQELSTCLQYDTPVKIISLNNRYLGMVRQWQQIEYSKRYSHSYMDALPDFVKLAEAYGHVGLRIEKTSDVEPALKEALRLKDRTVFLDFQTDPTENVWPMVQAGKGITEMLLGSEDL

SEQ ID NO: 33488 - protein, 583 aa, Burkholderia sp. 383
MDGTGTSPVTVLKRLWPYIRPLIGIVVLAVMTMGVVAATEAGIPALLKPLLDHGFGSHGSDSAKWYVPMAVIGLALVRGVSQYASNYLLNYVSNRILLQLRLEMFQRMLHTGASFFQRETASTVINAIVFEVNQILSVLTGVMVTLVRDSLTVIFLLGYLFYLNWRLTLIVAVILPGIGWLVSKINRRLRRLNREHQTLTNELSYIVEETVGGYKVVKVHNGEAYEMDRFTQMSKRLRGYAMRMTISGGLAQPLTQFLASIALAVVITIAVVQSSNDQTTVGGFVAFVTSMLLVISPLKHLIDVNQPLQRGMTAAELIFGLIDEPAEPQGGGRPLAQSRGDIEFRNVTFDYGAAERPTLDRISFKVAPGEMIALAGPSGSGKTTLVNLLPRFFDPTDGAILVDGVPVADYDLHALRSQMAMVSQDVVLFNDTIAANVAYGQTPDRARVQAALEAANLADAVAAMPDGLDTLVGGNGMRLSGGQRQRLAIARAIYKDAPILILDEATSALDSESERHVQAALERLMEGRTTLVIAHRLSTIERADRILVLEAGKIVEEGSHDELLRHGGLYAHLHRIQYQQQAA

SEQ ID NO: 33489 - protein, 527 aa, Burkholderia sp. 383
MSAGPAGLTHDVPAAPFERNATMSDSVAKPVDATFDQFGLAADILKAIAEQGYTTPTPIQAQAIPVVLAGRDVMGAAQTGTGKTASFSLPIIQRLLPQANTSASPARHPVRALILTPTRELADQVAANVHAYAKHTPLRSAVVFGGVDMNPQMAELRRGVEVLIATPGRLLDHVQQKTANLGQVQILVLDEADRMLDMGFLPDLQRILNLLPKERQTLLFSATFSGEIKKLASTYLRNPQTIEVARSNSTNANVTQIVYDVAEGDKQAAVVQLLRDRGLKQVIVFCNSKIGASRLARNLERDGVVASAIHGDKTQIERMQALDAFKRGEIEALVATDVAARGLDIAELPAVINFDLPFSAEDYVHRIGRTGRAGATGDALSLCSPNERKQLADIEKLIKRPLEMQTLALDKPARHRHDERGNDRGGDRNSERGGERGGERGGERGGRRDRDEHRGASAGRRPGGSERGHHRRHEAPVDDFFLKPYEPSAPAKQQDDAQPAQQPEKKGPKRQVAALLGGFGMPRKPSA

SEQ ID NO: 33490 - protein, 516 aa, Burkholderia sp. 383
MNLGATFVFVLLFIGVTIIGFLAANWRRGDLAHLDEWGLGGRRFGTIVTWFLLGGDLYTAYTFVAVPALVFGAGAMGFFALPYTILIYPFAFVVFPKLWSIAKRHGYVTAADFVNARYGSRMLALAIAVTGILATMPYIALQLVGIEVVIGALGFDTTGFVGDLPLIIAFAILAAYTYTSGLRAPAMIAIVKDILIYITIAAAVIVIPAKLGGFGHIFASVPPAKLLLKAPDAMSLNGYSAYATLAIGSALALFLYPHSVTAILSSSSGNSIRRNMAMLPAYSFVLGLLALLGYMALASGVKDMPQYAPYFKAFGPNFAVPALFLEYFPSWFVGVAFAAIGIGALVPAAIMSIAAANLYTRNIHREFVNRNMSHEQETHVAKLVSLIVKVGAVAFILGLPLTYAIQLQLLGGIWIIQTLPAIVLGLYTRVLDHRGLLAGWAAGIVCGTWMAISLKLAGSIFTIHLFGLAIPGYAAVWSLIVNLVVAVVVSVLVRVMGMAHAEDRTRPEDYLDVVEG

SEQ ID NO: 33491 - protein, 473 aa, Burkholderia sp. 383
MSRLIVVSNRVAAGEDTRPSAGGLAVGVMDALKETGGVWFGWNGEIVDAPDTEPAIQQDGNVTYATVGLNRRDYDQYYRGFSNATLWPVFHYRGDLARFDRQEYAGYLRVNAMLAKQLAALLRPDDLIWVHDYHLLPFAHYLRELGVKNPIGFFLHIPFPSPDMLRLVPPHEELVKFMCAYDVAGFQTETDKQAFTDYIERRGIGAASDDGMLHAHGRVVKVAAYPIGVHPDAIAQAAVQYSARKPVKMLREALDGRKLVMSVDRLDYSKGLVERFQSFERMLANAPGWQGRVSLLQIAPPTRSDVKTYQDIRETLEGEAGRINGRFSQLDWTPIQYLNRKYERNLLMAFFRMSQVGYVTPLRDGMNLVAKEYVASQDPADPGVLVLSEFAGAAAELTGALLVNPYDLSQMAEALERALSMPLAERQARHEENLARLRVNDLSVWRDTFVADLRSVAAAASVTRRAGRRVAHA

SEQ ID NO: 33492 - protein, 280 aa, Burkholderia sp. 383
MGRWLGYRALQFPCAVTRSNPFVPLFRSLTPPSRGKLRAMTTQILIVDDDQELRDLLRDYLVRQGMEVSVLHDAATLEKRLERERPDLIVLDLMMPGVDGLTALRQLRAAGDDIPVIMLTARADDVDRIVGLELGADDYLGKPFNPRELLARVQAVLRRRRATPSAAAPEQREPFAFGRFVLDFQARTLSVDGKPATLSSSEFALLKIFVNHALRTLTRERLLELLHGPEYDGTDRGIDVQVWRLRRILETDPSTPRFIQTVRGRGYVFVPDGEAHAQTH

SEQ ID NO: 33493 - protein, 128 aa, Burkholderia sp. 383
MQRHMLKSKIHRAAVTHCELHYEGSCAIDEDLLEASGIIENERIDIWNINNGERFSTYAIKGERGSGMISLNGSAARRAQLGDLVIIAAFAMVDEAELQAGWKPKLVFMDDGNKIKGHRDHVPTQNWT

SEQ ID NO: 33494 - protein, 559 aa, Burkholderia sp. 383
MYQYDQYDQTIVDERVAQYRDQVRRRLSGELSEEEFRPLRLQNGLYMQRHAYMHRIAIPYGNLRSDQLRMLARIAREHDRGYGHFSTRSNIQFNWIELEDTPEILAKLASVQMHGIQTSGNCIRNITADQFAGVAQDEEIDPRPWSEILRQWSTFHPEFAWLPRKFKIAVSGSKDDRAAVQIHDLGVYLKKNAQGEVVASILAGGGLGRTPIIGAVIKEDLPWQHLLTYCEAVLRVYNRYGRRDNLYKARIKILVKALSPAKFAQQVEEEWQHLKDGPSTLTQAEVDRVSQYFQPPVYEKLADTDASFEQHLLENKAFARWVERNVAPHKVAGYAAVTLSLKDHRVAPGDATDQQMELVADWADAYSFGELRVSHEQNLILANVKKRDLFAVWEKAKAAGFATPNIGLLTDIIACPGGDFCSLANAKSIPIALAIQQRFDDLDYVYDLGDLSLNISGCMNSCGHHHVGNIGILGVDKDGAEWYQVSLGGEQGTGQNGARLGRVIGPSFSAEEVPDVIAKLIDTFVESRVDGERFVETYDRIGIAPFKERVYAARQAVNA

SEQ ID NO: 33495 - protein, 343 aa, Burkholderia sp. 383
MAFNVTLKQSGRQFQVESDETVLAAALRQNVHLPYGCKNGACGSCKGQIVSGQIEQGPHAASALSNDERTRGLALLCCSKAQCDLEIDVREIAGVDGVQVKKLPCRIAALERKADDVMVVKLQLPANERLQYLAGQYVEFILKDGSRRSYSMANAPHEEGPVELHIRHMPGGKFTDHVFGAMKERDILRFEGPLGTFFLREDSDKPIVLLASGTGFAPIKAIIEHVKHTGITRPMTLYWGARRKKDIYLGELAEQWAREIPNFKYVPVLSEPDAGDQWTGRTGFVHRAVIEDLPDLSGHQVYACGAPVMVESAQRDFTQHHALPADEFYADSFTSAADLAHPV

SEQ ID NO: 33496 - protein, 468 aa, Burkholderia sp. 383
MVVQGSGNAVTQQQRSFDDIVAREQGLRHALTSGQMAMIAIGGAIGTGLFLGSGFAIGLAGPSVLVSYAIGALIALLLMGALAEMTVAHPTAGSFGAYAEHYVGPLAGFLVRYAYWFAVVFAIGTEISAIAVFMKYWFPAVPGWYWVIGFSALLIAVNLASVTLYGTVEYAFSLLKIAAIVVFIVLGAYLVWSAPAASGVGFANYTAHGGFMPKGPWGTWVAVIVAIFSYMSIEAVAIAAGEARDPQHAVTRAFRSTVFRLVLFYLLTLSLMLAIVPWTQAGTDESPFVKVMAATHVPYAAGVINFVLLIAALSAMNSQLYVTTRMMFSLSRARLAPAVFGRLGTNGVPRAALWISTSGVAVAAVLVALAPDTAFTVMMAIAMFGALFTWLMIFVTHLRFRSRYRGPALAFRMWGHPFGSLLGAGLVAAILFTTAFTREFRMTMVVGVVFAVLLTLAYALHYRHQHAR

SEQ ID NO: 33497 - protein, 67 aa, Burkholderia sp. 383
MATGIVKWFNDAKGFGFITPDEGGEDLFAHFSAITMNGFKTLKEGQKVSFDVVQGPKGKQASNIQAA

SEQ ID NO: 33498 - protein, 535 aa, Burkholderia sp. 383
MSGYQPPSAAPITVRDAVIDLLRQFGIDRVFGNPGSTELPMFRDFPDDFRYVLGLHEAVVVGMADGHAQATGNAAVVNLHSAAGVGNAMGNLFTAFKNRTPLIVTAGQQARAILPFDPFLGATQAAELPKPYVKWSIEPARAQDVPAAIARAYRIAMQEPRGPVFVSIPVDDWDQPAELLPRRDVSSVVRPDPDALARLGDTLDAARRPAFVVGAAVDRAGAWDDVVRLAERHRARVYVAPMSGRCSFPEDHPLFAGFLPAIREKIVARLDGHDLVFAFGAPAFTYHIEGFGPHVPPGATLVQLVDDPGIAAWTPSGDAVVGNLRLAARDLLARPAPPERPMPAPRPPRARVEPPAAGERMSVAFALQTLADVRDAHDIVVEEAPSARAVMQEHLPFTHSGTFYTMDSGGLGYGMPAAVGVALAHPGRRVIGLIGDGSSLYSIQALWSAAQLKLPITFVILNNRRYAALQDFAPVFGFGPDDPVQGTDLPNLDFVALAQGMGCRGVRVTDAAHLRDTLTEALRAATPVVVEVEIA

SEQ ID NO: 33499 - protein, 484 aa, Burkholderia sp. 383
MSFESLGLAEPLVKAVNELGYTSPTPIQQQAIPAVLGGGDLLAGAQTGTGKTAGFTLPILQRLHTFYADNRGAKRAVRALILTPTRELAAQVEESVRAYSKYLKLRSTVMFGGVSINPQIDALKRGVDIVVATPGRLLDHMQQKTIDLSNLDILVLDEADRMLDMGFIHDIKRVLAKLPPQRQNLLFSATFSDEIKALADSLLDSPALIEVARRNTTAESVAQKIHPVDRDRKRELLTHLIREHNWFQVLVFTRTKHGANRLAEQLTKDGISAMAIHGNKSQSARTRALAEFKNSTLQVLVATDIAARGIDIDQLPHVVNFDLPNVPEDYVHRIGRTGRAGATGEAVSLVCVDEKQLLRDIERLIKREIPQEVIAGFEPDPHAKPEPIQQRRGQQQPRSGGGGGGNRQPRAGGSGQPAAKRDGNAQPKASPQKAAKPRAQGQGQGGAGGSGGRPAGGGNSARPANGNAAHPNRNRSSRSGQRGH

SEQ ID NO: 33500 - protein, 187 aa, Burkholderia sp. 383
MPTSPNRKLVVLDRDGVINVDSDAFIKTPDEWIALPGALEAIARLNHAGYRVVVATNQSGIGRGLFDMATLNEMHLKMHRAAAAVGARIDAVFFCPHTAEDHCDCRKPKPGMMQMITERFEIDPGHTPVVGDSLRDLQAGVAVGFQPHLVLTGKGKKTLAAGNLPPGTKVHDDLRAFALDFLSHEHE

SEQ ID NO: 33501 - protein, 399 aa, Burkholderia sp. 383
MSKQLQDAYIVAASRTPIGKAPRGVFKNTRPDELLVHALKSAVAQVPGFDTKLIEDAIIGCAIPEAEQGLNVARMGALLAGLPQTVGGVTVNRFCASGITALAMAADRIRVGESDAIFAGGCESMSMVPMMGNKPSMSPHIFDRNEDFGIAYGMGLTAERVAEQWKVSREDQDAFSVESHRKALAAQQAGEFNDEIAAYTITERFPNLATGEVDVKTREIALDEGPRADTSIEGLAKLRTVFANKGSVTAGNSSQTSDGAGALLVVSEKVLKEFNLTPLARFVSFAVRGVPPEIMGIGPKEAIPAALKAAGLKQDDLDWIELNEAFAAQSLAVMRDLGLDPSKVNPMGGAIALGHPLGATGAIRAATVVHGLRRRNLKYGMVTMCVGTGMGAAGIIERL

SEQ ID NO: 33502 - protein, 393 aa, Burkholderia sp. 383
MTDVVIVSAARTAVGKFGGSLAKIAAPELGATVIRAVLERAGVKPEQVSEVIMGQVLTAGSGQNPARQSLIKAGLPTAVPGMTINKVCGSGLKAVMLAANAIVAGDAEIVIAGGQENMSASPHVLPGSRDGFRMGDAKLVDTMIVDGLWDVYNQYHMGITAENVAKEYGITREEQDAFAALSQNKAEAAQKAGRFNDEIVPVAIPQRKGEPLQFATDEFVRHGVTAESLSGLKPAFSKDGSVTAANASGLNDGAAAVLVMSAQKAAALGLTPLARIKAYANAGVDPSVMGMGPVPASRRCLERAGWTPGDLDLMEINEAFAAQALAVHKQMGWDTSKVNVNGGAIAIGHPIGASGCRILVTLLHEMAKRDAKRGLASLCIGGGMGVALAVERA

SEQ ID NO: 33503 - protein, 327 aa, Burkholderia sp. 383
MIAKINDDRALALARDVLDIEADAVRALRDQLDGGFVQAVALLLGCRGRVVVSGIGKSGHIARKIAATLASTGTPAFFVHPAEASHGDLGMVTSDDVFIGISYSGESEELVAILPLVKRIGAKLIAITGRAESSLGTLADVNLNAAVSKEACPMNLAPTASTTAALALGDALAVAVLDARGFGSEDFARSHPGGALGRRLLTYVRDVMRSGDDVPSVGLDATLSDALFQITAKRLGMTAVVDADGKVAGIFTDGDLRRVLARDGDFRTLPITDVMTRGPRTVAPDHLAVEAVELMERHRINQMLVVDADGVLIGALNMHDLFSKKVI

SEQ ID NO: 33504 - protein, 320 aa, Burkholderia sp. 383
MSSHSHDGLMVFTGNANPALAQEVVNILGIPLGKAMVSRFSDGEIQVEIQENVRGKDVFVLQSTCAPTNDNLMELMIMVDALKRASAGRITAAIPYFGYARQDRRPRSARVAISAKVVANMLEIAGVERIITMDLHADQIQGFFDIPVDNIYATPILLGDLRKQNYSDLLVVSPDVGGVVRARALAKQLNCDLAIIDKRRPKANVSEVMNIIGEVEGRTCVIMDDMVDTAGTLCKAAQVLKERGAKQVFAYATHPVLSGGAGDRIAASALDELVVTDTIPLSAESLGCSKIRALTSASLLAETFSRIRRGDSVMSLFAES

SEQ ID NO: 33505 - protein, 468 aa, Burkholderia sp. 383
MSLFRKKNVDRMIAGAHAAGLKKALGAIDLTFLGIGAIIGTGIFVLTGTGAVQAGPALMLSFVIAAIACGLAALSYAEFASTIPVAGSIYTYSYATLGELVAWIIGWDLMLEYGLASSAVSVGWSGYLQSLLQGFGLTLPTVLTAAPGAVPGVVTWFNLPAFLVMIVITTLLSIGIRESTRINNIMVFIKVSVVLLVIAVGVFHVTPANWKPFMPHGWNGVFGAAAVMFFAFIGFDAVSSAAEEVKNPKRDLPIGIIASLAVCAVLYVTVAAVATGIVPSAQYANISHPISYALQKAGETWVAGFIDLGAVLGMLTVILVMSYGQTRVIFAMSRDGLLPAALSRVHPRYATPFLTTWLVGLFFGLIAALVPLNVLAELINIGTLAAFSMVSIAVLVLRRTHPDLPRAFRCPGVPVVPILAVASCLFLMLNLQPITWAAFGIWLVIGLVIYFLYSRHHSKLAHGHHDAH

SEQ ID NO: 33506 - protein, 555 aa, Burkholderia sp. 383
MDIKRTVLWVIFFMSAVMLYDNWQRSHGRPSMFFPSATQTAPAAAAGGASGTGATTTTAGEVPAAAAGAAPSTTAPAAQAQLVKFSTDVYDGEIDTRGGTLAKLTLKKQGDGKQPDLYITLFDHTAGHTYLARSGLLGGDFPNHNDVYTQLNPGTTSLTGDQNALKLSFESPVKGGVKVVKTYTFTRGSYVIGVDTKIDNVGTAPVTPTVYMELVRDNTAVETPMFSHTFLGPAVYTDAKHFQKINFSDLDKNKADYVTSADNGWVAMVQHYFASAWIPQQGVKRDIYAEKIDPTLYRVGVKQPVAAIAPGQSADVQARLFAGPEEERMLEGIAPGLELVKDYGWVTIIAKPLFWLLEKIHSYIGNWGWSIVLLTLLIKAVFFPLSAASYKSMARMKEITPRMQALRERFKSDPQKMNSALMELYKTEKVNPFGGCLPVVIQIPVFISLYWVLLASVEMRGAPWVLWIHDLSQRDPFFILPVLMAVSMYVQTSLNPTPPDPVQAKMMKFMPIAFSVMFFFFPAGLVLYYVVNNVLSIAQQYYITRKLGGAKKKPA

SEQ ID NO: 33507 - protein, 719 aa, Isatis tinctoria
MMENWVVVALFTLCIVGFELRFIHGATDASDTSALNTLFTSMHSPAQLTQWTASAGDPCGQNWRGVTCSGTRVTQIKIPSLELSGTLGYMLDRLTNLTELDLSSNNLGGDLPYQLPPNLQRLNLAYNQFTGAAQYSISQMAPLKYLNLGHNQFKGQIAVDFSKLTSLTFADFSFNSFTNSLPGTFTSLTSLKSLYLQNNQFSGTVDVLAGLPLETLNIANNDFTGWIPSSLKGIHLIKDGNSFSTGPAPPPPPGTPPIRGSPSHKSGGGTNRSSGDSTSNGDSKKSGIGAGAIAGIIISLLVVTALVAFFLVKRKRRSKRSSSMDIEKTDNQPFTLAPSDFHENNSIQSSSSVETKKLDTSLSINLRPPPADRHKSFDDEEDSTRKPILVKKSAVVVPSNVRAYSVADLQIATGSFSVDNLLGEGTFGRVYRAEFDDGKVLAVKKIDSSALPHGMTNDFAGIVSKIAILDHPNVTKLIGYCSEHGQHLLVYEFHKNGSLHDFLHLSEEESKALVWNSRVKIALGTARALEYLHEVCSPSIVDKNIKSANILLDSELNPHLSDSGLASFLPTANELLNQTDEGYSAPEVSMSGQYSLKSDVYSFGVVMLELLTGRKPFDSTRSRSEQSLVRWATPQLHDIDALGKMVDPALEGLYPVKSLSRFADVIALCVQPEPEFRPPMSEVVQALVVLVQRANMSKRTVGVDPSQRSGSADTTSDYM

SEQ ID NO: 33508 - protein, 159 aa, Nicotiana plumbaginifolia
MSDEEHHFESKADAGASKTYPQQAGTIRKNGHIVIKNRPCKVVEVSTSKTGKHGHAKCHFVAIDIFTGKKLEDIVPSSHNCDVPHVNRTDYQLIDISEDGFVSLLTENGNTKDDLRLPTDDNLLALIKDGFAEGKDLVLSVMSAMGEEQICGIKDVGPK

SEQ ID NO: 33509 - protein, 528 aa, Stevia rebaudiana
MEFHLSLLTTVTAILVVTAFFLQISKRKKVDTTKNKLLPPKAKGAWPLIGHLPLLGKNRIAHRVLGDLADKYGPIFTIKLGVYQVLVVSSADAVKDCFTTSDKAFASRPKSTAVEIMGYNYAMFGLAPYGEYWRQVRKIAVLEILSQKRVDMLEWARVSEVRTSTNEVYDAWRVNKENEGSDMVLVDMKQWFTNLILNVLVRIISGKRFPFKSVEGIRFQKMEKKLFELLGAFVVSDLIPSMKRFDIGGYQKQMKMAAEEINDIMEGWLNNRKTQKESGEQKEGDQYFMDVLISVLKDASDADFPGYDHDTVIKATCMALLAAGSDTTSVTIIWALALLLNHPEKMKIAQDEIDKHVGRDRLVEESDLKNLVYINAIIKETMRLYPAAPLSVPHEAMEDCVVGGYHIPKGTRLLPNFWKIQHDPNIWPEPYEFKPERFLSTHKDVDVKGKHFELLPFGTGRRMCPAITFVLQILPLTLANLIQQFEIRKPSNDPIDMTESAGLTTKRATPLDVLIAPRLSLKMYPVDV

SEQ ID NO: 33510 - protein, 415 aa, Salmonella enterica subsp. enterica serovar Typhimurium
MRGSHHHHHHGMASNEFPVVLVINCGSSSIKFSVLDVATCDVLMAGIADGMNTENAFLSINGDKPINLAHSNYEDALKAIAFELEKRDLTDSVALIGHRIAHGGELFTQSVIITDEIIDNIRRVSPLAPLHNYANLSGIDAARHLFPAVRQVAVFDTSFHQTLAPEAYLYGLPWEYFSSLGVRRYGFHGTSHRYVSRRAYELLDLDEKDSGLIVAHLGNGASICAVRNGQSVDTSMGMTPLEGLMMGTRSGDVDFGAMAWIAKETGQTLSDLERVVNKESGLLGISGLSSDLRVLEKAWHEGHERARLAIKTFVHRIARHIAGHAASLHRLDGIIFTGGIGENSVLIRQLVIEHLGVLGLTLDVEMNKQPNSHGERIISANPSQVICAVIPTNEEKMIALDAIHLGNVKAPVEFA

SEQ ID NO: 33511 - protein, 386 aa, Solanum tuberosum
MADMNQHPTVFQKAANQLHLRSSLSQDVHARYGGVQPAIYRRHFAYGNYSNAGLQRGQATQDLSLITSNASPVFVQAPQEKGLAAFATDFLMGGVSAAVSKTAAAPIERVKLLIQNQDEMLKAGRLSEPYKGIGECFGRTIKEEGFGSLWRGNTANVIRYFPTQALNFAFKDYFKRLFNFKKDRDGYWKWFAGNLASGGAAGASSLFFVYSLDYARTRLANDAKASKKGGERQFNGLVDVYRKTLKSDGIAGLYRGFNISCVGIIVYRGLYFGMYDSLKPVLLTGNLQDSFFASFGLGWLITNGAGLASYPIDTVRRRMMMTSGEAVKYKSSLDAFSQIVKNEGPKSLFKGAGANILRAVAGAGVLAGYDKLQVLVLGKKYGSGGA

SEQ ID NO: 33512 - protein, 161 aa, Thinopyrum intermedium
MSDTDEHHFESKADSGASKTYPQQAGAIRKGGFIVIKARPCKVVEVSTSKTGKHGHAKCHFVAIDIFNGKKLEDIVPSSHNCDVPHVTRLDFQLIDITDDGYVSLLTESGSTKDDLKLPTDDALLAQIKAGFADGKDLILSVMSAMGEEQICAVKEVGGGK

SEQ ID NO: 33513 - protein, 161 aa, Secale sylvestre
MSDTDEHHFESKADSGASKTYPQQAGAIRKGGHIVIKARPCKVVEVSTSKTGRHGHAKCHFVAIDIFNGKKLEDIVPSSHNCDVPHVDRQDYQLIDITDDGYVSLLTESGNTKDDLKLPTDDVLLGQIKTGFADGKDLILSVMSAMGEEQICAVKEIGGGK

SEQ ID NO: 33514 - protein, 601 aa, Synechococcus sp. CC9605
MALLVQKFGGTSVGSVERIRAVADRIGRCREEGHDVVVVVSAMGHTTDELTGLANAITSAPTQREMDMLLASGEQVSIALLAMALNAQGVSATSMTGPQVGIATESTHGRARILGIRTDRIRNRLAAGQVVVVAGFQGTSTSSDGLNEITTLGRGGSDTSAVALAAALGADACEIYTDVPGVLSTDPRKVSDAQLMETISCDEMLELASLGASVLHPRAVEIARNYGVNLVVRSSWSDAPGTRITSRSARPISSSGLELGSPVDGMEEVDGQAVLALSQIPDQPGIAARLFETLSEAGINVDLIIQATHEGSSNDITFTVSEADLELARPVCQKVLDQLGGDLASEGGLTKLSISGAGIMGRPGIAAGLFKCLCQQGINLRLIATSEVKVSCVIDSGAGSKAVQAVQEAFALEDSQIRINPTDNGSGEPEVRGVALDRDQVQLSVRHVPDRPGTAAALCSALADNSISLDAIVQSERQHSDGSRDITFILRKDDRARADVALAPLLAQWPGAALEDGEAIARVSAVGAGMPATPGTAGRMFRALADAGINIGLIATSEIRTSCVVAEDAGVQALQVVHAGFGLGGEERHTAQGTASPHDPD

SEQ ID NO: 33515 - protein, 337 aa, Synechococcus sp. CC9605
MGRSSRIRSLSALTRCLEEEASAIATAAARLSSDQVEAALALLDRCANRKAKLVITGVGKSGIVARKIAATFSSIGLMALFLNPTDALHGDLGVVAAEDVCLLLSNSGETTELLEVLPHLTRRGTGRIAIVGRADSSLARGSDVVLEASVDREVCPLNLAPTASTAVAMAIGDALAAVWMERRGISPADFALNHPAGSLGKQLTLTASDLMVPASQLHPLQPHTPLPEVIGGLTRDGIGSGWVENPDSPGSLLGILTDGDLRRALQDHGAETWTHLTAKDLMTADPITVQTDVLVVKALEQMERNRRKPISVLPVVNQDKQLMGLLRLHDLVQAGLA

SEQ ID NO: 33516 - protein, 518 aa, Synechococcus sp. CC9605
MSDIPTNQRSWWRQPPLWVGAAPLLIFLLVSAIDLALAKQFTDNGKAVISDALGGVWQWMVVLLFLIALILAISPVGKLRLGGAEAKPSLKFFDWCAVLICTLLAGGGVFWSAAEPLYHFQTPSPVFEGVEGSTAAAVDPALAVSFLHWGFLAWALVATTTTITFSILERRGEPLRPRTLLVNIVPRSWVDGPLGHLADGLSVVAAIAGTVGPLGFLSLQLSNAAGQLPWLSDSAGLQSLVVVLLTAVFATSTVSGIQKGIKWLSELNVWLTLALAAGLLLLGPGLWLIQHFFSGFITYLIHLPQMALTPNAVPANWVNGWTVFYWGWFLGYAPLMGLFTAGVSRGRSIRELVLAVAILCPIVTNLWFTLLGGTGLHLELAGGVISDALAQNGAAAALLTILSQLPLAGLLIPIGLVLVVLFMCTSADSMSYAAAMVVSGRNEPPALLRLFWALMIGSLTLVLLRIGSGLGDSTSIDALQAFIVITAVPVTPLVLATLWSAPRLAWKEWHRTADQRRQ

SEQ ID NO: 33517 - protein, 490 aa, Synechococcus sp. CC9605
MTTAFHAPPQKRRKTLQEASLLEGPMLLLKSIRGFSSNRAMTWLACAPLALMGLGIFTLSAKAEELPELSAAFLANNLWLLVATILVIFMNAGFAMVEAGMCRQKNAVNILAKNLFVFALAVTAYWFVGYSLMYGDSVIDGWLYFGGLFFDPTVTAETISDAGLVPTVDFLFQAAFAGTAATIVSGLVAERIKFGEFVIFALVLTAFIYPVAGSWEWNGGWLNSVGSVEFIDFAGSSIVHSVGAWAGLVGAMLLGPRIGKYVDGKVQAIPGHNMSIATLGALILWIGWYGFNPGSQLAMDQWVPYVAVTTTLGAAGGAIGATVISTMTSKKPDLTMIINGILAGLVSVTAGCGNLTLTGSWVAGVVGGIIVVFSVAALDASGIDDPVGAFSVHGVCGVWGTIVIGLWGYDVQGDGSGLGLLVGGGVEQLGIQALGAAAYAIWTVVTCFIAWSIIGSLFGGIRVTEQEESEGLDIGEHGMEAYAGFSTTNN

SEQ ID NO: 33518 - protein, 238 aa, Synechococcus sp. CC9605
MTSSRGFSRYAPQMVAPSPSAEPANRSLLEIIRDLDGASSELVDRNKTIFFPGDPAERVYLIRRGAVRLSRVYESGEEITVALLRENSLFGVLSLLTGQRSDRFYHAVAFTRVEMVTAPATSVKAAIEADTSVGLRLLQGLSSRILQTETMIETLTHRDMSSRLVSFLLVLCRDFGVADELGITIDLRLSHQAIAEAIGSTRVTITRLLGDLRQSGLVQIDRKKITVLDPIALAKRFS

SEQ ID NO: 33519 - protein, 390 aa, Synechococcus sp. CC9605
MTARASAPAQRSVVIAPYGGTLVDLMVAEVDRAAVKATATKTIECSDRNACDVELLCVGGFSPLRGFMHQEDYDAVVSGHRLAAGQLFGLPIVMDTDRDDVVVGDKLLLTYKGQDLAVFEVEDKWEPNKVAEAKGCYGTTSIEHPAVRMITMERKRFYMGGSLQGLALPERVFPCKTPAEVRAGLPEGEDVVAFQCRNPIHRAHYELFTRALHAQNVSDNAVVLVHPTCGPTQQDDIPGAVRFQTYERLATEVNNDSIRWAYLPYAMHMAGPREALQHMIIRRNYGCTHFIIGRDMAGCKSSLTGDDFYGPYDAQNFAKECAPELTMETVPSLNLVYTQEEGYVTAEHAEARGLHVKKLSGTQFRKMLRGGEEIPEWFAFKSVVEVLRAA

SEQ ID NO: 33520 - protein, 1533 aa, Synechococcus sp. CC9605
MSDAIRSAVWPYCDSPAPQVVAGEKDACGVGFLAQLQGQASHWVLEQALRGLGCMEHRGGCGGDGDSGDGAGVLCEIPWSYLKAVWPEAAAARGLGMMFMPTDASRRAEVRGLCDEEARSLGMQPLGWRTVPVEPAVLGPLARATAPVIEQWVLNGDADDSTFDGQLLRLRRRIGARVRAALGAEVAQDVYVASLSSRTVVYKGMVRSEVLEQFYADLQDSRFEVSFAVYHRRFSTNTLPRWPLAQPMRLLGHNGEINTLLGNLNWAKASEASLENVWGEAADDLIPVVNPAFSDSANLDATLELMVRSGRSITDSLITLVPEAFRNQPDLDSRPDVTAMYEFNAGIQEPWDGPALLVFADGKRVGATLDRNGLRPARWCTTADGFVIMGSETGVVDLSGKTIVQKGRLGPGQMVAVDLERGELLDNWSVKEDAARRFPYADWLQKHRRGVPPQPWTQDRKVGELDLLRLQTAMGFTAEDFDLIIEDMAALGKEPTYCMGDDIPLAVLSDKPHLLYDYFKQRFAQVTNPPIDPLREKLVMSLEMHLGERRPALKPQPEAASVIHLETPVLNEAELAAISEQGLPVKTVSTQVAVESCAGGLQHAIAALCSVAEQAVRDGAQVLVLSDRVGGTGAAAPLTPTTVAMPALLAVGAVHHHLLRQKLRLQCSLVVDTAQCWSTHHMACLIGYGASAVCPWLTWETTRHWLDHPKTKKRIEQGKLPALDANQAQANVRESLENGLRKILSKIGISLLASYHGAQIFEAIGLGADVVETAFAGTTSRVAGMTLAELANETLSMHAKAFPELNRSKLEFMGFVQYRSGAEYHRNNPELSKALHKAVAQGPGYDHFSTYQDLLENRPVMALRDLLEFKLAPNPVPLDQVESVESICTRFCTGGMSLGALSREAHEVLAVAMNRIGGKSNSGEGGEDPARFQILKDVDGEGRSASFPSIGGLRNGDTACSAIKQVASGRFGVTAEYLRSGKQLEIKVAQGAKPGEGGQLPGPKVDKYIAWLRNSKPGVALISPPPHHDIYSIEDLAQLIHDLHQVHPAAPVSVKLVAEIGIGTIAAGVAKANADVIQISGHDGGTGASPLSSIKHAGSPWELGLTEVHRSLVENGLRDRVLLRADGGLKTGWDVMIAALLGAEEYGFGSIAMIAEGCVMARVCHTNNCPVGVATQKENLRKRFTGVPEHVVNFFWYVAEEVRQLMSLLGVSRLEELIGRTDLLQARSVDLAKTKGVDLSSLRAPISGAEDRSWLRHSDEAHGNGPILEDQLLADAELMAALENHGSLSRSIEIINTDRSVCARLAGEIAQRHGNRGFNGQLDLTFRGAAGQSFGAFLVQGMQVRLEGEANDYVGKGINSGCITLVPSDGCASPGDQVILGNTCLYGATGGELFANGRAGERFGVRNSGARAVVEGAGDHCCEYMTGGVVVVLGSTGRNVGAGMTGGVTFLLDEEGHVAPRVNPEIVEVCTITTHEQESLLKGLLERHVALTGSEKAAALLADWSAAKGRFKVLVPPSERESMGLADKQAVAA

SEQ ID NO: 33521 - protein, 329 aa, Synechococcus sp. CC9605
MQFIDQARITVRGGRGGDGIAAFRREKYVPAGGPSGGDGGCGAPVVLEADSNLQTLLDFKYKRLFAADDGRRGGPNKCTGASGKDLVIKVPCGTEVRHLRTGILLGDLTAPGERLTVAFGGRGGLGNAHYLSNRNRAPEKFTEGREGEEWPLQLELKLLAEVGIIGLPNAGKSTLIAVLSAARPKIADYPFTTLVPNLGVVRRPSGDGTVFADIPGLIEGAAQGSGLGHDFLRHIERTRLLIHLVDAGSEDPVADLNVVQQELEAYGHGLVDRPRLLVINKQELVSEDDLPKLQQELKEASGRPVLCISAAMGTNLDQLLAETWVELGV

SEQ ID NO: 33522 - protein, 376 aa, Synechococcus sp. CC9605
MIGYISDNLLIPILDFFYGLVPSYGLAIVALTLVIRIALYPLSAGSIRSARRMRIAQPVIQKRQAEIRSRYANNPQKLQEELGNVMKEFGSPLAGCLPLLVQMPILFALFATLRGSPFADVPYTLNMKVLPADQIAAVEPKPFNSASHSIFIGETDHVPVIASLPRGTKIGVGDSATVNLHTKDGRVFSDVLTDVENPGRFAPTWAVTKGDDIVSVSEDGTITALATGDATVEAKIPGLAARSGFLFIKALGQVGFYADGAINWDIAILVAGFGITLFISQLLSGMGMPANPQQATANKITPVMITGMFLFFPLPAGVLLYMLIANIFQGLQTFILTKEALPDNLQKILDQQMAQKTVTVSATSGGSRLPFEPKGK

SEQ ID NO: 33523 - protein, 574 aa, Synechococcus sp. CC9605
MSGATALMDALRRHGVDTIFGYPGGAILPIYDALHIAESEGWVKHILVRHEQAGTHAADAYARATGKVGVCFGTSGPGATNLVTGIATAQMDSVPMVVITGQVPRPAIGTDAFQETDIFGITLPIVKHSWVVRDPADLASIVAQAFLIAASGRPGPVLIDIPKDVGQEMFDYVPVEPGSIVPKGFRKPQPPRDEPILSALELIAEAERPLLYLGGGAISAGAHDSLRMIAERYQIPVTTTLMGKGAFDENDPLSVGMLGMHGTAYANFAVTECDLLIAVGARFDDRVTGKLDTFAPRAQVIHFEIDPAEIGKTRRPDVAVLGDLGLSVARLVELSLQQQVQPRTSAWLARIAEWKQTYPLTVPPTQGPLFPQEVLLAVRELAPNAIVTTDVGQHQMWAAQYLRNGPRGWISSAGLGTMGFGMPAAMGAQVACPDRQVVCIAGDASILMNIQELGTLAAYGLPVKVVIVNNHWQGMVRQWQESFYEERYSASDMLNGMPDFVALARSFGVDGVHIRERESLKRDLEAALKAPGPMLIDIHVRRGENCYPMVPPGKSNAEMVGLPAPMPVLNAPTS

SEQ ID NO: 33524 - protein, 311 aa, Synechococcus sp. CC9605
MHATPLPEDYRSGFIALIGRPNVGKSTLVNQLVGEKVAITSPVAQTTRNRLRAILTTEVAQMVLVDTPGIHKPHHLLGERLVKSARSAIGEVDLVVLLLEGCERPGRGDAFIVNLLQQQSLPVLVALNKWDKLAEEHRAEAEEAYAALLQETNWPVHRCSALSGDGCADLTAAMAAQLPLGPQLYPPEMVSDQPERVLLGELIREQVLLHTREEVPHSVAVTIDRVEELPAKGKGAGRTAVLATVLVERKSQKGILIGKGGAMLKTIGQGARLQMQVLIDGPVYLELFVKVVPDWRSKPARLAELGYTGNQ

SEQ ID NO: 33525 - protein, 396 aa, Synechococcus sp. CC9605
MSSPSDPSGAFQRSYPSEGMQALEKERKLPLTGWQQEVDQAKRFGLEAAESIVDRNISTFSRGELPHFAGINTFMKAPYLEDVNQVGNYDVAIVGVPHDCGTTYRPGTRFGPQGIRRISALYTPYNYEMGVDLREQITLCDVGDIFTIPANNEKSFDQISKGIAHVFSSGTFPIILGGDHSIGFPTVRGVCRHLGDKKVGIIHFDRHVDTQEIDLDERMHTCPWFHATNMANAPAENLVQLGIGGWQVPREGVKVCRERGTNVLTVTDITEMGLEAAAQYAIERATDGTDCVYISFDIDCIDAGFVPGTGWPEPGGLMPREALKLLELIVRNVPVCGLEIVEVSPPYDISDMTSLMATRVICDTMAHLVVSGQLPRKEKPEWISDTCNMNVDQKWR

SEQ ID NO: 33526 - protein, 392 aa, Synechococcus sp. CC9605
MPRPPELSDRAVALKPSLTLEISAKAKALRDSGKDICSLSAGEPDFATPPFIVEAAQHALGSGFTRYGPAAGDPDLRAALAHKLSVENGIPTQPEQVLVTNGGKQAIYNLFQVLLNPGDEVLLPAPYWLSYPEMAALAGASTRIIATKAEEGFRLDLDLLEQQITPRSRLLVINSPGNPSGKVMTRAELEALAALVARHPQLMVMSDEIYEYLLADGQQHCSFAAIAEEIRSRCFTVNGFAKGWAMTGWRLGYLAGDAAVIKAASALQSQSTSNVCSFAQRGALAAIEGPRDCVREMANSYNRRRTLLIEGLQALEGITLTPPQGAFYAFPRLPDGVPDSMEFCRQALEQEGLAVVPGLAFGDDRCIRLSCAVADETINDGLLRLKRLLRSF

SEQ ID NO: 33527 - protein, 390 aa, Synechococcus sp. CC9605
MERPELYLDAAATTPPLPAVIAVMQQVQQKAWANPSSLHGAGLAAAEALERARWRIAERFAVSPDQLIVTSGATESVHLALLGSAAGLVPGRLVISAVEHPAVVAAAHQLEALGWSIAEWPVDREGVVRLDQLDRLLSAPTRLVSLIAAQGEVGALQPVSKIAKACRERGIVIHSDATQLVPQGCFAFERLGVDLLTLSAHKFCGPRGVGLLIRAPGVELSPLQGGGGQEHGLRSGTEPVALVSGMADALMALPSFDPVSQPIPPGSSNQIRRQRDQLLERLLELPQLQLCGPHPDQRLPHHIALLAKTVDGQPLPGRDLVRRLAAAGVACSSGSACSSGSSADSAVLTAMGIPGTERQSGLRLTLGPWLSDQDLDAVPGRFASVFAAFS

SEQ ID NO: 33528 - protein, 496 aa, Synechococcus sp. CC9605
MGAGQSSFVILYHRTPFDESKDKNGKRIWVDQKSPNGIIPTLRNLFRSCEKGTWIAWRRVNDQSNEGTERFEMDNPSPFTLCRIPLEDEQISSFYHITSKECFWPILHTFPTYFNVNNANWKIFEEVNKRFAMAACAEAAEGATVWVHDYNLWLAPGYIRAERPDLKIAFFHHTPFPGNDVFAILPWREQILESLLCCDVVGFHIPRYTENFARAATTLVGAKRGPKVPVDEKFIEVGTALSEGTVTSHLEHNGRTIQLLSSPVGTSPDLIQELCWSPSVESHGELIVQDTKKGRKLILSASRVDYTKGNEELLLAFERLLERRKDLHGQVVLMLACVAAASGMKIYEDTQRSIEEMAGRINGRFSQIDWVPIRFSTRRIPYDEMIAWFCHADVCWITPLRDGLNLVAKEYAAARRNRGGVLVLSEFTGASVVLDGAVLTNPYSNRRMDEAIESALEMDEDEQRDRMSRMTDAVESYTVSDWADEQMSGLSPSTPQ

SEQ ID NO: 33529 - protein, 639 aa, Synechococcus sp. CC9605
MNQRWRLLALWLLPIGVVLLIGWQVVSNGGMNGLSQDSNGTTVAPRNAAVARMSYGRFLDYVEAGRVTAVDIYDGGRNAVIEAVDPDLDNRVQRLRVDLPGLAPELINTLKTEGISFDIHPPRTAPPALGVLGNLAFPLLLIGALIFLARRNSNMPGGPGQAMQFGKSKARFMMEAETGVMFDDVAGVTEAKQELQEVVTFLKQPERFTSVGAQIPRGLLLVGPPGTGKTLLAKAIAGEAGVPFFSLSGSEFVEMFVGVGASRVRDLFKKAKENSPCLIFIDEIDAVGRQRGAGIGGGNDEREQTLNQLLTEMDGFEGNSGIIIIAATNRPDVLDSALMRPGRFDRQVTVDAPDIKGRLAILDVHCRNKKLEEELSLESIARRTPGFTGADLANLMNEAAILTARRRKEAIGLSEIDDAVDRIIAGMEGRPLTDGRSKRLIAYHEVGHALIGTLVKDHDPVQKVTLVPRGQAQGLTWFSPDEEQTLVTRAQLKARIMGALGGRAAEDVVFGHQEVTTGAGGDIQQVASMARNMVTRLGMSDLGPVALEGGSQEVFLGRDLMSRSDVSESISQQIDIQVRNMVKRCYDETVEIVAANREAIDRLVELLIEKETMDGDEFKAVVAEFTAVPEKDRTVVTLD

SEQ ID NO: 33530 - protein, 331 aa, Synechococcus sp. CC9605
MTSFLTAARAEQEQLAPDSRRLRLFSGTSNPALAKEISAYLGVPDGPRVCKRFADGELYVQIQESIRGCDVFLIQPTCAPVNDHLMELLIMVDACRRASARQITAVVPYYGYARADRKTAGRESITAKLTANLLVTSGVDRVLAMDLHSAQIQGYFDIPCDHIYGSPVLVDYLSTQDLGDVVVVSPDVGGVARARAFAKQMNDAPLAIIDKRRTGHNMAESLTVIGDVAGRTAILIDDMIDTGGTICAGARLLREQGAKRVLACATHAVFSPPASERLSAEGLFEQVVVTNSIPIPQDRVFPQLKVLSVANMLGEAIWRIHEESSVSSMFR

SEQ ID NO: 33531 - protein, 468 aa, Synechococcus sp. CC9605
MMALLPQLTRRLGQPLFLPAHGRGAALPDGLRQLLRRRAGVWDLPELPALGGPLEADGAIADSQRSAAAQMGVARCWYGVNGATGLLQAALLAMVRPGERVLLPRNVHRSLIQACVLGDLRPVLFDLPFQSDRGQPAPADSAWIKRVLEALPRDGAPIRAAVLVHPTYQGYANDPTAVIQRLQQQGCCVLVDEAHGCHFATGVDHPLPPSALHCGADLVVHSLQKSAAALAQTAVLWLQGERLDPVRVERSLGLLQTTSPSALLLASCEEALQHWQRRKGRRQLLRRLQEAAALAEDLRNSGVPLLNNQDPLRLLLHTGQAGITGLDADDWFLPRGLVGELPEPASLTFCLGLARHRGLGRQMRHHWQNLLRSFPDRAPLPAFEAPPLPLVTTTAQPPSQAWTAAHHQVALKDAEGCIAAELLCPYPPGIPLLIPGERLDRQRQCWLERQQLFWRDQIPDRLSVVSGG

SEQ ID NO: 33532 - protein, 366 aa, Synechococcus sp. CC9605
MVRSISSHSIAPASVLRGDGVWDEALPQIKSLCSRPLVLGRSASTADQRQLLVSDLQAQGLNPLQAQLQFDCCEQDLQRVAAEAKVCDAVLAAGGGKVLDAGKLLAHRLSLPCVTVPLSASTCAGWTALSNIYSPQGAFEGDVALDRCPDLLVFDHGLVRQAPPRTLASGVADALAKWYEASVSSGDSSDGLVQQAVQMARVLRDQLLLDSPAALRDPDSAAWVRTAEACALTAGVMGGLGGARCRTVAAHAVHNGLTQLEACHHVLHGEKVGFGILVQLRLEERLGGNRLAGHAHRQLLPLLRQLGLPVSLDDLGLAQASLSQLQEVCRFACREGSDLHHLPFAVTPGALLEALVGAAELSPSSL

SEQ ID NO: 33533 - protein, 607 aa, Synechococcus sp. CC9605
MSLISEINQAKPPFMTEQQQQRDDSACAVDLSASELPEANSNAEVFTTTITSAEPESGFAGFGFSEALLRTLADKGYSEPSPIQKAAFPELMLGRDLVGQAQTGTGKTAAFALPLLERLESGQKTPQALVLAPTRELAMQVAESFKAYSAGHPHLKVLAVYGGTDFRSQISALRRGVDVVVGTPGRVMDHMRQGTLDTSGLRSLVLDEADEMLRMGFIDDVEWILDQLPEQRQVVLFSATMPPEIRRLSKRYLKDPAEVTIRTKDQEGKRIRQRSITVPMPHKLEALQRVLDACGSEGVIIFARTKAITLTVAETLEAGGHQVAVLNGDVPQNQRERTVERLRSGSVDILVATDVAARGLDVERIGLVINYDMPFDSEAYVHRIGRTGRAGRTGEAVLFVTPRERRFIRNLERATGQPIEAMEVPGNTAINQGRLDRLRKRLSDAAQSQRPDADEAALLQELMQRVATELELSPEQLAMAALNLAIGPDALLRKGDDDWIQNTRRNDRDRDRHSGDRRERRERPARAPEENMQRYRVEVGHRDRVKPGNLVGAIAGETGLQGRMIGRIQIFDNHSLVDLPKGMPEDVFNSLQRLRVMNRELQISKAS

SEQ ID NO: 33534 - protein, 107 aa, Synechococcus sp. CC9605
MDPSTKARIETLVASSPIFVFMKGSKLMPQCGFSNNVVQILHSLGVTFETFDVLSDPEIRQGIKEFSSWPTIPQVYVKGEFIGGSDILIEMYNSGELREKLEIALAS

SEQ ID NO: 33535 - protein, 353 aa, Synechococcus sp. CC9605
MFRTSSRVLIVALAGLSSFLASCASLDSAAGSRLDLVKARGELLCGVSGKIPGFSFLNPDGRYTGLDVDICRAMAAAFVGDAEKVQYRPLTAPERFTALRSGEIDLLSRNTTHTLSRDAMGGNGLRFGPVVFHDGQGLMVNAASGVRSLADLSGKSICVGSGTTTEQNLNDAFASQGLPYTPIKYQDLNQVVGGYLQGRCEAMTSDRSQLAAARSGFSDPQAHQILDDRISKEPLAPAVVGGDQPMGDAMTWVVNALIEAEERGITQANVDAVVKQAAADPSQTSLRRFLGVDPGLGRKLGLADDFVVQVIRATGNYGEIYNRHLGLDSAVAIPRGANRLAGEGGLMISPPFT

SEQ ID NO: 33536 - protein, 396 aa, Synechococcus sp. CC9605
MRVSNAATEHCNEALFTVVASGPHVGSQPSVVQTYTVGMNQFSALFKRLGASGAKILSVNGVEVERQASPVATTPAPAKKTAKKPAKKAVTSTAPKKKPHADVPVNTYKPKTPFMGTVTGNYSLLKDGAIGRVQHITFDLAGGEPQLKYIEGQSIGIIPEGEDANGKPHKLRLYSIASTRHGDNLEGNTVSLCVRQLEYKNDAGEQIYGVCSTYLCDIEPGTKVKITGPVGKEMLLPDDEDANIIMLATGTGIAPMRTYLRRMFEPREQEANGYKFRGKAWLFMGAPKTANLLYDEDFLHYEKEYPDNFRYTKAISREQQNAKGGRMYIQDRVLEHAEEIFAMIEDPKTHVYMCGLRGMEPGIDEAMTAAAAAKGLDWAELRPQLKKADRWHVETY

SEQ ID NO: 33537 - protein, 382 aa, Synechococcus sp. CC9605
MFALPRLLIPVESTPGENRVAATPDTVKKFISLGCSVAVEHGAGTPSGYLNEAYAEQGADLIGTGDSSAWSQADVLLCVQSPRAATLARLRQGALVVGLLSPYANEELTAALKRSGLSAMALELLPRISRAQSADALSSQANIAGYKSVLLASAALDRYFPMLMTAAGTVQPAKVVILGAGVAGLQAVATARRLGAVVYVSDIRPAVKEQVESLGARFIEPPEMEDKPSESGGYAKQASDAFLAAQRQQLSDQLAEADVAICTAQVPGRRAPRLISEDMLDRMRPGAVVVDLAVAQGGNCADTVPGQTVDRKGVKLIGGNDLPCSVPNHASALYARNLVALLEPTLKDGVLSIDLEDELIAGCLIAQDGTIRRGDVLTPGAN

SEQ ID NO: 33538 - protein, 121 aa, Synechococcus sp. CC9605
MADTKPAAEQSGTYAIVEASGTQIWLQPNRYYDIDRLQAEVDDTIKLENVLLVKDGKGTTLGQPYVKDATVSLKVMAHRRGPKVIVYKMRPKKKTRRKNGHRQELTRVMVESISVGGKAIS

SEQ ID NO: 33539 - protein, 528 aa, Synechococcus sp. CC9605
MTKVLVSDPIDQAGVDILDQVAQVDQRTGLSEEELIGIIGEYDGLMIRSGTQVTAAVIAAASRLKIIGRAGVGVDNVDVPAATQRGVLVVNSPEGNTIAAAEHALAMMLTLSRHIPQAHGGMRAGKWDRKKFVGNELYKKTLGVVGLGKIGSHVARVAQAMGMEVIAYDPFIAADRAQRMQVKLLELDELFRTADYVTLHIPRTKDTENLVNAELLRTMKPTARIVNCARGGVVDEAAIAEAINNGVIAGAGLDVYASEPLAEDSPLRAVERGLVLTPHLGASTEEAQENVAIDVAEQIRDVLLGLPARSAVNIPGLSAEIMERLKPHLQLAETVGLLVSQLAGGHVQEMELRLQGEFASHPSQPLVIAALKGLLSAGLGDSINFVNASLEAKARGIQVLEVKDESSRDFAGGSLQITTRGDQGSRSVTGAVFADGDLRITSIDAFPVNVTPSSHMLFTRHRDMPGIIGHLGSLLGEHNVNIASMQVGRKIVRGDAVMVLSIDDPIPADLLQTITAIDGIQEAHPVTL

SEQ ID NO: 33540 - protein, 379 aa, Synechococcus sp. CC9605
MAASVLSAPMASIGVPKEIKLDEQRVALTPDAVRELVSQGLEVRIETGAGAGAGIGDEAFAAAGAQMVSRDEAWGAHLVVKVKEPQAEEFAYLRKDMVLFTYLHLAAYPSVGEALLEAGTAAIAYETVQLENGSLPLLAPMSEIAGRLAAQVGAHLLEKPHGGRGVLMGGCTGVQPARVVVLGAGTVGWNAARTAAAMDAEVLLLDRSPQRLRSLEADRRGRLMSVVSSRGLLERLVPTADLVIGAVLTPGGRAPTLVDAEMVKQMRPGSVIVDVAIDQGGCIATSQETTHRDPTVTIHGVQHYAVGNMPGAVPFTSTEALVSVTLPYILGIAGRGLEEAVTERPELISGLNTVQGSVCHPGVAKALGVPPRHPMACLR

SEQ ID NO: 33541 - protein, 262 aa, Synechococcus sp. CC9605
MIRPDAELLLDIQDLHASVEDKPILKGVNLQVRAGEVHAVMGRNGSGKSTLSKVLAGHPAYRVTGGTVRYRGQGLFELEPEERARLGVFLGFQYPVEIPGVSNLEFLRVSTNARREKQGEEELDTFAFEDHVNDKLKVVQMDPAFLERSVNEGFSGGEKKRNEILQMALLEPVVAILDETDSGLDIDALRIVAGGVNQLATKDNATLLITHYQRLLDEITPDYVHVMAAGRILRTGGRELALELEQTGYDWVDQELAAQGAA

SEQ ID NO: 33542 - protein, 259 aa, Synechococcus sp. CC9605
MWREVTNASVPMTATAPTKETILVVDDEASIRRILETRLSMIGYNVVTACDGTEALELFPTCTPDLVVLDVMMPKLDGYGVCQELRKESDVPIVMLTALGDVADRITGLELGADDYVVKPFSPKELEARIRCLLRRVEKEQVAGIPNSGVIQVSDLRIDTNKRQVFRGDERIRLTGMEFSLLELLVSRSGEPFNRGEILKEVWGYTPERHVDTRVVDVHISRLRSKLEDDPANPELILTARGTGYLFQRIVDSVASEGP

SEQ ID NO: 33543 - protein, 354 aa, Synechococcus sp. CC9605
MAPFWSADWGNPSSRQHRLGLSASAAVKLARRQLAETLGVNPERLVFTSGATEANNLALLGHARALGKAHLISVATEHHAVLDPLQQLQREGFSVTLLTPGPYGLISPEQLEAAITPETRLVSVMAANNEIGVLQPLEQLGAVCRSHGITLHSDGAQAFGTWPLNPDAVGVDLLSLSAHKIYGPKGIGALVLREGIAIEPLQWGGGQEAGLRAGTLPTALIVGFAAAARLALQEQDQRNSRLQKLRDQLWEGLQRRLPGVLLNGALQPRLPHNLNISLPGVNGSRLHRALRPHLACSSGSACSNGAPSHVLQAIGRSRAEAEASLRLSLGRDTTATDVDQAIAAITDAVAATKA

SEQ ID NO: 33544 - protein, 295 aa, Synechococcus sp. CC9605
MTRCDLSLGFVGLGALGLPMAINLHRAGFPLRVHTRSRNAETSAGLEGAIRCSSPADASTGVDVLLLCVSDDAAVEEVLFGPNGAASQLSDGSVVLDCSTIAPATAQRCGERLAGQNVHYLDAPVTGGTEGAKRGSLTVLVGGASELLERVQPILEVIGGSIHHFGGVGRGQQVKAVNQVLVAGSYAAVAEAVALGQQLDLPMPQVIDALKTGAAGSWALEHRSTAMLNGSYPLGFRLSLHRKDLGIALDAAKAVQLDLPVTTLVEQLELDLITNGHGDEDVSALHRWNQTRQES

SEQ ID NO: 33545 - protein, 291 aa, Synechococcus sp. CC9605
MTAHPPSGLFDTDGTIFMGSRRNPADCRVGLFGVPYDGTTSFRPGTRFGPAAIREVSAGLETYCPQLNLDLEDLNFADLGAVEIPFGNPEPVLTKVKQATEAVLALGLRPLMLGGEHSISSGAVEAVAQRNPDLVLVQLDAHADLRDNWLGARHSHACAMRRCLEVLPSQTLFQLAIRSGTREEFTELHESGRLMPSIDALQQALAPLQGKPIYLTVDLDWFDPSVLPGTGTPEPGGYHWSDFASLIAMLQEHHLVAADVVELAPQLDTSGISSVLAAKVTRSLLLLLGAD

SEQ ID NO: 33546 - protein, 284 aa, Synechococcus sp. CC9605
MPRICLLGTGHLGTSICLRLLKQGFEIAVWNRSPKNVERLLNRGAKLINDLDGAANESDALITTLRDGTVTQKVVYELGDLSGHCVIPMGTMGVSEIRNLDQQIRRQNGKCLEAPVLGSKPQALNGTLLVMAGGEAQVFKEQQPLLAHLCQDPLLVGPVGSGAATKLALNQLIASLTHSFSLSLQLIQRAGVPVETFMAILRPSALYAPTFDKKLQRMLDHTYADPNFSTALLRKDLRLFLEEATTAGLQDQGLSGLLSLLEQAKDTDLDEQDYCALHELTVLR

SEQ ID NO: 33547 - protein, 674 aa, Synechococcus sp. CC9605
MCGIGGVFNADRQQTVDRQLLVNMAAIQAHRGPDGFGVEVLDQAGVGFCHARLSIIDLNESRARQPFLTDDGEVLMAHNGEFYDFQRIRADLTAQGVRFSSKSDSEILLRLYQRQGLEATLPLLRGEFAFALFDRSEDCLYLVRDRFGIKPQYWAITPEGLVFGSELKVLFAHPAVERRFTSEGLFHQLMQTMVPGTTAFAGVHQVKPGHVLKVQRVNGHLEVSESTYWDVDFPRKDERDPKRTEADYIAAVRAALLEAVELRMVADVPVGCYLSGGIDSCSILGLASAVSQAPVKAFTIGFDDARYDESPIAREMAEATGAEQDLMRLSGQELYGHMERTIWHAERTIYNTLAVAKFLMSRHVNDVDYKVVMTGEGSDELFGGYPAFRRDMFLHGLDDLPQEERASWESLLQQSNALVKGAMLAENQVDDPDLDAVVGFTPSCLQPWLACAPLVPELLAESHAAALEGYSPGKAIAEQLDADQLDGRHALDKAQYVWIKTMLEGQILTWGGDRVDMANSMEARPAFLDHHLAAVAVQVPPELRIKGKTEKYVLREAMAGLLPEVLYRREKFAFMAPPAHTEPEKWGQMKQLADDYLSDEAIDSAGLLSKAGVLALFERHEDPATTDAERVQMDAVINHLLGVQMLHRMFVAEDVPALARREADRLGWRVLMPV

SEQ ID NO: 33548 - protein, 513 aa, Synechococcus sp. CC9605
MTISSVSRPYLDGKKLNKIEQNKAAKDGLLVGSEIEKFAELGWEQVDETDLQLRLKWYGMFWRPKTPGKFMLRLRVPNGALTADQLRVIGSIVERYGENGSCDITTRQNLQLRGVLLDDLPEILKRLKEAGLSTIQSGFDNPRNVTGNPIAGIDPYEIIDTRPYTQELQNHLTNNSEGNPEYSNLPRKWNTAVAGAKDNFLLHNDIVFHPVERDGVMGFGVWIGGVLSSQINAYAIPLNAWVKPEEICKMTDAVIRLWRDNGERDKRPKGRFRFYLDQVGLDEFRKKVEGLFGPLVSDPGSVFDSSPRSHYGIHPQKQEGFSYAGLHVPVGRLKASDLQDLATASLNYGNGEVRLTEEQNAIIVGISNDKIESFKSDPLLKRFPIEPKNVSAGTVSCTGNTYCGFALTNTKDTAQMVAEKLDAELNLPKHVKIQWTGCPNNCGQADMGSIGLTGTKAKNSEGVMGEGYTMTLGGSQGQNPKLGEIHQKAIPADEIEDALKAVLIEKFGATPKA

SEQ ID NO: 33549 - protein, 275 aa, Synechococcus sp. CC9605
MDYVLPNELVDSMIGAGAKKSTLSPKQLLLRGFYSGSILGLAVILALTCGILTKLPFVGSLLFPFGFASIVLFGMELVTGNFALLPMACWAGKTSWKATFVNWGWVWLGNWAGTAAVALFMALSLTSGTMDAAADNIGPPIWDLVAQKIVALNQINVEKKYEALGGLGFFLAFLRGVIANWLVCLGVTMASVSKSVPGKIIGCWLPIVAFQSMGMEHIVVNQFLHTAGPILGSGVSMGKVFFWNFLPVTIGNIVGGMVFIGGMLYGSHKTKTSAT

SEQ ID NO: 33550 - protein, 637 aa, Synechococcus sp. CC9605
MGKVVGIDLGTTNSCVSVMEGGKPTVIANAEGFRTTPSVVAYTKNQDQLVGQIAKRQAVMNPDNTFYSVKRFIGRRVDEVNEESKEVSYGVEKAGSNVKVKCPVLDKQFAPEEVSAQVLRKLAEDAGKYLGETVSQAVITVPAYFNDSQRQATKDAGKIAGLEVLRIINEPTAAALAYGLDKKSNERILVFDLGGGTFDVSVLEVGDGVFEVLSTAGDTHLGGDDFDKVIVDHLAETFKSNEGIDLRQDKQALQRLTEAAEKAKVELSNATQSEINLPFITATPEGPKHLDLTLTRAKFEELASKLIDRCAMPVEQALKDAKLSSGELDEIVMVGGSTRIPAVLELVKRITGKDPNQTVNPDEVVAVGAAIQGGVLAGEVKDILLLDVTPLSLGVETLGGVMTKMITRNTTVPTKKTETYSTAVDGQTNVEIHVLQGEREMASDNKSLGTFRLDGIPPAPRGVPQIEVTFDIDANGILSVTAKDKGSGKEQSISITGASTLSDSEVDKMVKDAEANASADKEKREKIDLKNQAETLVYQAEKQMGELGDKVDADAKAKLEEKRLKLKEATEKDDYDAMKTLLEELQQELYTVGASVYQQEGAAAGAGAPGADAGAGANTGGGDASDDVIDAEFTETK

SEQ ID NO: 33551 - protein, 403 aa, Synechococcus sp. CC9605
MGRAKKVVLAYSGGVDTSVCIPYLKQEWGVEDVITFAADLGQGDELEPIRQKALDAGASQSLVGDLIEPFIKDFAFPAIRANALYEGRYPLSTALARPLIAKRLVEVAREVGADAVAHGCTGKGNDQVRFDVAIAALAPDLKVLTPAREWGMSREETIAYGERFGLPAPVSKKSPYSIDLNLLGRSIEAGPLEDPMVAPPEEVFAMTRSVEAAPDASEEIEIAFEAGNPVGINGQKLDPVALIREANRLAGIHGIGRLDMIENRVVGIKSREIYETPGLLLFIQAHQELESLTLAADVLRSKRQLEMQWADLVYQGLWFGPLKDALDGFMDRTQATVNGVVRLRLHKGTATVTGRGSADSSLYVPEMASYGSEDQFDHRAAEGFIYVWGLPTRLWSASQRRSS

SEQ ID NO: 33552 - protein, 275 aa, Desulfovibrio desulfuricans subsp. desulfuricans str. G20
MASISVRQAGCYYYPHRHAKSHTTSDHADIRGAACYAGSNIRHNSCPFHHAVRSVSKETYMEFFLDTADLDEIRLAGKQGLIDGVTTNPTLLSRQGGDWKKRMQQICDEVDGPVSLEVISPDAEGMLREAEELVRYGDNVVIKVPMTAEGLIATRTLTGKGIKTNVTLVFSAMQALLAAKAGATYVSPFLGRLDGIGHEGMEIVSQIRTIFDNYGYETKILAASIRHAQHVLDSALVGADVVTVPYSVLRQLMHHPLTDSGLDAFLADWNKLTQS

SEQ ID NO: 33553 - protein, 427 aa, Desulfovibrio desulfuricans subsp. desulfuricans str. G20
MRLSPYFSLGCRLQQLRAAIRRIRRAVSTRDALWHRWCTAGLFCCPSGRHVTTLFCSRQIFMRFVDEAVIKAISGNGGHGCVSFRREKFIPRGGPDGGDGGNGGNVVFKASTRLLSLYDFRLKRVYQAENGRPGQGSQMHGRGGKDLVVEMPVGTLVFERGENGAESLIADLSEPDVEVVIAHGGRGGKGNEHFKSSTMQAPRFSQPGEPGEEKSLRLELKILADAGLLGLPNAGKSTFISQVSAAKPKIAAYPFTTLVPNLGVMMDEFDPDRRMVIADIPGLIEGAHEGQGLGHRFLKHVERTRFLVHILSIEDVDMENPWAGFDLINDELQRFDETLGSREQIQVVNKIDLLPPEEVDGLRARAEADGRRIFFISALEGEGLDAVVSEMWRMLAELDRNVPLDSSRQIEPEPEEEFDVEVVWVRE

SEQ ID NO: 33554 - protein, 553 aa, Geobacter metallireducens GS-15
MSTETPHTANFLRTIVQEDLKGGKRETIVTRFPPEPNGYLHIGHAKSICLNFGLAKEFGGRCHLRFDDTNPVKEETEYVESIKESVRWLGFSWGTHLYYASEYFEQLYQWAEHLILQGKAYVDDLTAEEIRAHRGTLTEAGKESPWRNRSPEENLDLFRRMRAGEFPDGAKVLRAKIDMASPNMNLRDPVMYRIIHASHPHVGDAWRIYPMYDYAHGQSDAIEGITHSICTLEFEDHKPLYEWFLDNLPVPNRPRQYEFARLNLTYAVMSKRKLLQLVKDGDVSGWDDPRMPTIMGIRRRGYTPEAVRNFCETIGVGRSDSWIDMSILEESVRQDLNERAPRVMAVLKPLRLVIEDYPEGEAEELTIPYHPQKPELGSRVVPFCSELFIEQDDFAEVPPKGFKRLSPGEEIRLRGAYIIKCVDVEKDAEGAVTAVRCTYDPETRSGLPGSERKVKGVIHWVSARHAETAKVRLYDRLFTDPNPSGDDWKDHLNPASMEILADCRLEPSLATAQAEDRFQFERQGYFCVDLKDSRPGAPVFNRTVTLRDSWTKK

SEQ ID NO: 33555 - protein, 194 aa, Geobacter metallireducens GS-15
MTELVVKQSELPERIRTALANRKRVPMAPGPVPAAILVPLFLEGGEYHILFTKRAEHLNHHRGEISFPGGVRHPDDGGPRETALRETWEEVGIRPGDVDVLGELDDYFSIHNYLVTPVVGIFPPRYPLEVNPDEIERIITVPLTHLLRPEIFRVEDWNWKGRTHPVCFFTYEGDEIWGLTAAILKQFLDLTFQR

SEQ ID NO: 33556 - protein, 230 aa, Geobacter metallireducens GS-15
MELTEILKKSLLFSGLDGENLSDVAAIATRRPFARGESLFSEGEPASGFYLLAQGSMKLCKVSPDGKEKVLHFVHPGETFAEAAFFGDGKYPAEARATEKGEAIFFPREGFMGILERNPRFSLNLIVSLSLMLRRFARQIEELTFAEVPARLAAHLVELAERKSTAFQGKTYLDLDMKKGELASRLGTVSETLSRAFRKLKEEGLIEVEGSRVVIFDMEKLKDAAGRRPA

SEQ ID NO: 33557 - protein, 1510 aa, Geobacter metallireducens GS-15
MTNKTIDPSGLVPPERDACAIICYINKEARPTHGNVQRTIEALIKMGHRAGEINGEGDGCGVLTDIPRMIWREVLAGAGHDPNLAEMPGFAVGHLLLPKEATAADPQLQDKILARFATAGVQLLVERPGIVRSEVLSSRAREGEPLFWQVALLCPEKVAAPALLFELQTAIERDFPVHVASLSADVAAWKVHGSPEILSRYYPELKRREFLSSVTIGHSRYSTNTLPTVLRAQPFSLLGHNGEINTIARLREEARMMGIPLFADGSDSQDLNRTLEGLMFRYGLTLFEAMEVVFPPIFSAMDGMAPELKSMYTWFRRFLKASAQGPAAIIARHRELCVFSVDAMGLRPLWVGETTKEIFASSELGVVPHEEILADPKPLAPGEKVGVRIAAGRTVELVDHPALRQEIYQSFRKRTNLPAQEKALAAGAELQGGAPALAARFGRNSKLHQDNLMSAFAWKSSDLSNLREMAKNGSDPIASLGYDGPLASLSNQRQNLSDYFKEQVAVVTNPAIDREREAEHFSTRVYLGPRPQFRGPARPGVALEVPLLTGGRRTGTDPDDVAVAREFGTATLEGLVAAFGEGKGRCRVIPCFMGKDERLGDALARLTCEAVGAVTRGATMLLLDDSDCFGPGKSFIDPFLVTAVLHKGLKETTDSAGESQRRRASLVVRSGALRSLHDLIFALGMGADALCPYLMWEGAGDTAGVRNLLSVLAKGLEKVISTMGTHEIGGYGKYFASIGLCGHLAGIFETPNFCGSGQGGLTLERLEAENRSRSAVARSRQKQPVPVQFRLYPKIWKMVGAVAKMEETYADLSRLIQQLEAENPLAIRHLLDLRYTSELTVDPDEVDTSVGDHTLPILFSAMSFGSQGETPFRIYAEAAKRLNIVCMNGEGGEIADMLGQYRKNRGQQIASGRFGVNMAFLNSADFLEIKVGQGAKPGEGGHLPGFKVTAKIAAARHATPGVSLISPSNNHDIYSIEDLAQIVEELRTANPTARISVKVPAVAGIGTIALGVAKAGADIITISGYDGGTGAARKHAIKFVGLPAEIGVSEAHKALVSAGMRQKVEIWADGGARTGRDVVKLMLLGANRVGFGTMAMVVIGCTACRGCHLGTCHVGIATQIETTEEAEARGLKRFVPRVLENGVIYMCTFFRGMSREIRILTAKLGFRRTRDMVGRSDLLGQARGLDRLDLAELLRPAQSAEASSFEPEVRIIRKPLNYLTSLISGLVTDAFAAGEERVRYDDDNATSSDRAIGTHLAGAYVRGMAEGRFRPEQNALLQFHRDAIPGNGLAAFSINRINILVEGGAQDGVGKCASGGKIVILKGENREGRRVGGTVGKGLAYGAQGGTFLIQGDADSRACIRLSGADVVFGSRIREPLDDSRGDTACRANLKGFAFEYMTAGRVVVLGDPGPWICSGMTGGVVYCRLDGAMGLDREALRRRLARGAGVEIRDIGEEDVAAIGELLLKYHRELLHSHQEEEADAVERIIAAARSGFVKIVPEKNIVTPRSTE

SEQ ID NO: 33558 - protein, 404 aa, Geobacter metallireducens GS-15
MIILILNCRGFSIHFQLFDWSTRTILARGDVDRIELGDSFIVMEVPGRDPYHLDSDCSSFGAAVALILSTLTHPLEGPLDRVEQIAAVGHRVAHGGERFTSSVTINEEIIAAVRGFEELAPLHIPANLAGIEGAMATLPRTPHVAVFDSAFHQTMPLHAYIYPLPWEWYEKHGVRRYGFHGAPHCYAAQRGAALLGRDPAACNLVTVHIGNGTSLCAVEGGRSIDTSMGLTPLEGTMMGTRCGSIDPGIPPFMMQEEQLAPRDMDRILNQRSGAAGITGLKLDRAAFLARAAEGNERCLLALEMEAYRLKKHIGGYAAALGRLDAVVFSTASGEGEWLVREKTLADMEIFGIRLDRERNRAARSVEREERISADDSPVAVYVVHTEEEMVYAEEVAALLNGAGG

SEQ ID NO: 33559 - protein, 406 aa, Geobacter metallireducens GS-15
MAKVHKDVKKIVLAYSGGLDTSIILKWLKNEYGCEVIAFSADLGQGDELAPIRDKAFATGADKVYIDDLKEEFVRDFVFPMFRANAIYEGHYLLGTSIARPLIAKRQMEIAKIEGADAVSHGATGKGNDQVRFELAYYHFDPAITVVVPWREWKLNSRQALVNYAKKNGIPIPVTKKRPWSSDRNMLHISFEGGILEDTWAEPPENMYVLTKAPEKAPNKPQFVEIEFKNGNAVAVDGEKMSPAQLLAHLNYIGGEHGIGRVDLLENRSVGMKSRGVYETPGGTILREAHSAVEQITMDREVMRIRDSLIPEYARQVYSGYWFSPEREMLQTLIDDSQKCVNGVARVKLYKGHCRTVGRKSETNSLFNLDFATFEKDQVFNQADATGFIKINSLRLRIRALMQGKK

SEQ ID NO: 33560 - protein, 66 aa, Geobacter metallireducens GS-15
MVNGTVKWFNDSKGFGFLEQDNGEDVFCHFSAIAGDGFKSLTEGDRVTFEVTKGPKGLQAANVTRV

SEQ ID NO: 33561 - protein, 66 aa, Geobacter metallireducens GS-15
MANGTVKWFNDSKGFGFLEQENGEDVFVHFSAINGDGFKSLTEGDRVTFDVVKGPKGLQAANVTRV

SEQ ID NO: 33562 - protein, 214 aa, Geobacter metallireducens GS-15
MKFFIDTADVNEIREAHELGLVDGVTTNPSLIAKSGRKFEEVIKEITGIVDGPISAEVVSLDHDGMIREAEELAAIHKNIVIKLPMTPEGLKACTTLTKKGIKTNVTLIFTAMQALLAAKAGATYVSPFVGRLDDISQDGMGIIDDIKTIFDNYGYTAEIIVASVRNPIHVLNAALIGADIATIPYSVMLQLAKHPLTDAGIERFLKDWEKVPK

SEQ ID NO: 33563 - protein, 457 aa, Geobacter metallireducens GS-15
MRKTKILVVDDEHLIRWSLEQNLKKQGYEVVSAGNGEDALRLVRDEQPDLVLLDIQLPGISGLDVLEKIKEHDEEIIVIMVTAHGALETAVHAMRLGAFDYINKPFNLDEMAIVIRKALETSDLRREVQRLRGEQAKKFGTPDIIGASRHMKNVLDMMEKVAKSDASTVLVQGESGTGKELVAKWIHYKSARAERPFVAINCAAVPATLLESELFGHEKGAFTDAKAMKKGLFELADGGTVFLDEIGDMELGMQAKLLRFLEERTFRRIGGTKSFSVDVRIISATNRDLIKAIEEKSFRNDLYYRLQVIPIYLPPLRERREDILTLTSHFIELFNAEFNKHVTGISKMAEKLLLDYTWPGNIRELKNVIERAIILGNDETLLLEHLPLEIVAKASSQSVGLTTFKLPPEGIDIEEVEKELIRQALEISDWNQSKAARKLNLGIDAFRYRMKKFGYLK

SEQ ID NO: 33564 - protein, 488 aa, Geobacter metallireducens GS-15
MKFKLSFVALLATVALSLPVALLAEEVKTAAPAQAALSSAQTAALAPAVTAAPAAAPATPAAPKNVDPVLNTGDTAWMLVSAAMVLFMIPGLAFFYGGMVRGKNVLSTIMHSFVAMGIVGVQWAVIGYSLSFGPDIGGGLLGNLSKALLNGLITFKDGNPVYALFQNVPTAPGAIPEYVFAMFQCMFAMITVALISGALAERVKFSAYCVFVLLWTTLVYDPLAHWVWMSDGWLFKKGALDFAGGTVVHLSSGISALAFLIFLGKRHGFPHERMAPHSLPLTMLGVGMLWFGWFGFNAGSAIVGANCSDAAGGLAGLAFATTTIAPAAGGLSWMIAEWIHAGKPSALGFGSGVVAGLVVITPAAGFVQPGAAILMGLAAGVVCYGGVLLKAKLKYDDSLDAFGVHGVGGTFGALTTGIFATVGATGLLSGNVSQFLTQVIAVVAAGAYAFIVTLVIAFVLHKTIGLRVEKEDEIMGLDQTQHSESAYN

SEQ ID NO: 33565 - protein, 584 aa, Geobacter metallireducens GS-15
MVTIPIFLIIIAVTMAVVVWSAKRTKSAADFYTAGGGITGTQNGWAIAGDYMSAASFLGISGMISLYGYDGFMYSVGWLVAYITVLLIVAEPCRNAGKYTLGDILSFRTEPKVVRAVCALSVVAVSTFYLTAQMVGAGKLMQLLIGIPYKFAIIGVGILMVGYVVFGGMTATTWVQIIKAGLLMTGAFVLSILVGIKSGMNPFQFFNDIATSPNIIEHVQKVVLKDPVAVAGFDYGQRFLEPGLFMKNPLDQISLGMALVLGTAGMPHILMRFFTVPTAQAARKSVIVAMFIIGFFYILTTLLGFGAAIHVTPQGISAVDKGGNMAAMMLAQKLGGDISPFLGDLLLAFLCAVAFATILAVVSGLVLAASAAIAHDIYVNVIKDGHADQHEQVMAARITSLCVGAAGILIGIAAEKQNVAHLVALAFAVASSGNLPVVVMSLFWRKFNTAGVVSGLVVGTIASIALVMVSPNMTYPKKVAADAKKVVVKLEEKQATGALLSDKEMKDLDKAKKDYETNKDGKSFIGLDKPLIDLKNPGIISIPLGFIAAIIGCLAFPSRRSEEMFDEIYVRQNTGIGMAKAIDH

SEQ ID NO: 33566 - protein, 238 aa, Geobacter metallireducens GS-15
MNSKNPRTTIPAPLQSILSAIPLFAPLPPDDINTLSKLIEIQVFPKNRTILHEADTANYMYLVLAGKVRVVQHSNDGTEQVLAIHRKGAFFGEMALLDGRTSPATLIAHEDATVGLIARTAFENQILTNDRMLRQIISVLCSRLRESWFLMKLSRFSSAEQKVRGVLKYLGTQYGVDDSRGKILSIKLTHRTVAGYASVSRETASRILGRFSRAGEIELLASRRMLLKPTLFLNPPFL

SEQ ID NO: 33567 - protein, 380 aa, Geobacter metallireducens GS-15
MMIYLDHNATTPVHPDVVEALLPFLQGKFGNPSSIHWAGRAVKGAVEEAREQVSALVGCEPGEVVFTSSGTEADNMAIKGVAAALGGRGNHIVTTQVEHPGVANPCLYLESLGFEVTRVTVDRDGLLDLERLEAAITDRTILISAMAANNETGVLFPVREIGEIAACRRVYFHCDGVQAAGRIPLSVRDDSISFLALSGHKLYAPKGIGALVVRRGVKCHPLIHGGSQERNRRGGTENVAGIVAFGRACAIARETMNGEMGRIKGLRDRLEEGILSRVSGACVNGHREQRLPTTTNITIPGVEADSLLMALDLEGIAASSGSACSSGTLKLSPVLAAMGRTPEEAKGSVRFSLGKGNTVEEIDRVLAVLPAIVARLRGES

SEQ ID NO: 33568 - protein, 192 aa, Geobacter metallireducens GS-15
MVRSEEGRAAVFLDRDGTINVEKEYLHRAEEFEFVPGAPEAIRLLNEAGFLVVVVTNQSGVARGYYDEAAVHRLHRFVDNELAKAGASIDAYYLCPHHPRHGIGPYLTECACRKPLPGMLLAAARDLGIDLARSWIVGDKAADVEAGIAAGCRPLLVRTGYGISEAGQVPSDVTVCDDLLAAARVILARTQE

SEQ ID NO: 33569 - protein, 391 aa, Geobacter metallireducens GS-15
MKEIYMDNNATTKVDEAVFEEMRPYFCDLYGNPSSMHFFGGQVQKKVDEARNRVANLLGASPEEIVFTACGTESDNAAIRSAIEVHPERRHIITTRVEHPAVLTLCRNLSKRGYRVTELNVDGEGRLDLNELRAAVDEDTAIVSVMWANNETGVVFPIEEVGKIVKEKGKGAFFHTDAVQAVGKIPINMAASTVDMLSISGHKLHAPKGIGVLYVRKGVPFRPFMVGGHQEHNRRAGTENTAAIIALGKACELAGQWMEDENTRVKAMRDRLQTTLLELIPRSRINGGQAERLPNTLSIAFEFVEGEAILMLLSEKGICASSGSACTSGSLEPSHVLRAMGVPFTCAHGSIRFSLSRFNTDEDIETIIRELPPVVRRLREMSPFGREFLNA

SEQ ID NO: 33570 - protein, 421 aa, Geobacter metallireducens GS-15
MVILALNCGSSSVKYQLFDWEKKEVVAKGMVERVIIGDSFIMHEVPGRETYRKEYECPDHKVAIDLIIRTLVDGEHGVLKDINEISAVGHRVVHGGEMFTRSVLIDEKVLDAVKDVQHLAPLHNPPNIAGIEAAQAVLPSVPHVAIFDTAFHQTMPEHAYLYPLPYEWYEKYGVRRYGFHGTSHLFVSKRAAVLLGKKPSDCNIITMHIGNGVSHCAIRGGVSIDTSMGLTPLEGAVMGTRCGDIDPAIPAFMMQKENLSAKEIDSILNKKSGVLGVTGRFTDRRDVIENANNGDHRCKVALEIEAYRLKKYIGTYMAVLGRLDAVVFTAGVGEMGWPIREKTIEGLEGIGIKLDRERNKSAMTRKRETLITTDDSPIKVFVIPTDEELVFTEDVVAILDGTYTDHMNFDYSFARQDFVRS

SEQ ID NO: 33571 - protein, 333 aa, Geobacter metallireducens GS-15
MGLMDQIKAKARNKLQTIVLPESYDDRMYAAAQQIVEQGLARVVMLGNADAIAKKAADLGADISKVELIDPASSPKLSDYADALVELRKSKGLTKEEALKLLTAADNLYYAGMMVRQGDAGGEVAGATGTTGDVLRAAFQTVGPAPGIKTVSSFFFMVTKTPSFGENGIIFFADCAVNPNPDAQALADIAVATARNCKAFLDVDARVAMLSFSTKGSATHADVDKVLKAMELAKGIDPALQIDGELQADAALLPKVGERKAPGSAVAGKANVLVFPDLDAGNIAYKLVERVAGAEAIGPIIQGLAKPVNDLSRGCSVDDIVNVAAITAVQAQG

SEQ ID NO: 33572 - protein, 365 aa, Geobacter metallireducens GS-15
MIVGVPREIKTHEYRVGMTPAGIAELARGGHTVLVETGAGEGSGFADGEYLRVGARVCGREEVFGPAELLVKVKEPLPSEYGLLRQGQALFTYLHLAPNRPLAELLLERGVTGIGYETFEKGGTLPLLAPMSEVAGRMAPLVGGYHLQRVLGGTGVLPSGVPGVPAARALILGAGVVGSGAARVCAGLGMETVVMNRGIDRLQRLDEILAGRARTVALNRESLAEELSRADLVVGAVLVPGGRTPLLIDRSALGTMKRGSVIVDVSIDQGGCAETSRPTTHDDPVYIVDGVIHYTVANMPGAYPRTSTLALTNATLPCVKALADRGIEDALRADPALAGALNTWRGAVVHRALAQALDLPFSLFS

SEQ ID NO: 33573 - protein, 566 aa, Geobacter metallireducens GS-15
MKMTGARILLECLKREGVDTVFGYPGGTVINLYDELFSFKDIRHILPRHEQAGVHAADGFARATGRVGVAIATSGPGATNTVTGIATAYMDSIPLVVITGQVPTALIGNDAFQEVDIIGITRPCTKHNFLVKDVKDIATIIKKAFYIARTGRPGPVLVDLPKDVQIATAEFEYPEAIELRSYKPTVEGHPKQIEKAVSMLLAAKKPVMYVGGGAISGDAAGELTALATRLHIPVTTTLMGLGSFPEDNPLSLKLLGMHGTYFANMAVTNCDLLVAVGARFDDRVTGKIATFAPHAKIIHMDVDPTSIRKNVRVDLPIVGQVKEVLGRMLKSLDESGDKVAAFHTAIEPWLAEIEGWKQKHPITYKQASTVIKPQFVIQKLRELSDPDAIVATDVGQHQMWTAQFFGFREPRTLLSSGGLGTMGFGLPAAMGAQAAFPNRQVIAVCGDGGFQMNLQEVATLVQNRLPVKIVILNNNFLGMVRQWQELFFDKRYSQTCMELPIDFIKLAEAFGAKGFQATKSDEVEATIKKAFETPGPVIMEFKIAREEKVLPMVPAGASLNEMVLNA

SEQ ID NO: 33574 - protein, 66 aa, Geobacter metallireducens GS-15
MAQGKVKWFNDAKGFGFIEQENGEDVFVHFSAIQSDGFKTLAEGEAVTFDVVTGPKGLQAANVKKA

SEQ ID NO: 33575 - protein, 321 aa, Geobacter metallireducens GS-15
MIIEEARKVIRIEADALMALADSINGEFEQAVRRILSTKGRVVVTGMGKSGLIGQKIASTMASTGTPAFFLHPAEGIHGDLGMIMKGDVVIAISNSGETDEVVRILPIIKRLGASLISMSGNPKSSLAKAGDVFLDISVKEEACPLGLAPTASTTATLAMGDALAVALLLERGFRPEDFALFHPGGSLGKKLLLTVGDLMHAGDAVPIVTSDTPMRDALFVISSKGLGVTGVVDGSGALLGVITDGDLRRALSKGLAVLELPAGELMSRNPKRIKRGELAAKALQRMEQYSITSLFVFEGDDDAQPVGVIHLHDLLKAGLA

SEQ ID NO: 33576 - protein, 458 aa, Geobacter metallireducens GS-15
MEIRILVVDDELSMREFLAILLKREGYAVDQADCAEKALEFLDSITYDLVISDVKMPGLDGIALLGRIKENSPDTAVLMMTAFSTAEQAVEAMKLGAYDYIAKPFKVEEVKVLVRNALEKRDLKRENQRLRQEVQERYGFSGLIGKSKKMRELYSLIERVAPSIANVLILGESGTGKELVARAIHYNSPRKDKAFVAVNCGAIPETLMESELFGHKKGSFTGAINDRAGLFEQAGGGTLFLDEIGEVPLQLQAKLLRVLQEKEFRRVGGVADQKADVRIVAASNRNLEEQVREGSFREDLFYRLNVVQLQMPPLRERTEDIPLLVEHFYRKYVQSNRNGEIITPGALKILMSYPFPGNVRELENLVERCMVLGGGTISEESLPPQVRGSQKSATAPVGDFEIPSEGMDLEGYLDGIEKRILLQALERCGGVKKKAAELLGLTFRSFRYRLAKFGMDEE

SEQ ID NO: 33577 - protein, 752 aa, Geobacter metallireducens GS-15
MSKKQDALEYHSSGRKGKIEVVASKPCLTQRDLSLAYSPGVAEPCLEIEKNPEDAYKYTAKGNLVAVVSNGTAVLGLGNIGALAGKPVMEGKGVLFKRFADIDVFDIELNTENPDEVIKACQLLEPTFGGINLEDIKAPECFYIEEELKKTMNIPVFHDDQHGTAIISAAALTNALEIIDKKIEDIRIVVNGAGASAIACANLAISLGVKKENLVMCDTKGVIYKGRTEGMNKYKERFAVDTPLRTLEEAATGADVLYGLSSKGAFTPEIVRKLAKNPIIFAMANPDPEISPEEAHAVRGDVLIATGRSDYPNQVNNVLGFPFIFRGALDVRATTINEEMKKAAVFALAELAREECPDSVCRAYGNVKFSFGRDYIIPKPFDPRALLRVAPAVAKAAMESGVARQPIEDMEKYVEHLESLQGKAKEALRMIINKAKADPRKLVFPEGDNEKILRATQILIEEEIAKPILIGNQDKIREKMAELGLDFNGSVQIIDPATFERSEEYAQELFSLRQRKGLTLTEARRIMTRKSRTHFGCMMVHMGDADCLLSGIDTHYPETIRPALEVIGRQPGLSSVHGLYMMVFKKGIYFMADTTVCIEPTPEELAETAILAAEKVRMLDIEPTIAMLSFSNFGSVNHPQAQKVRRAVEIVKQKAPDLIVDGEMQSDTAVVSEMLQKSFSFASLKEAANVLIFPDLNSGNICYKLLHHLGGAEAIGPILMGMQKPVHVLQRGDDVSDIVNMAALAVVDAQNS

SEQ ID NO: 33578 - protein, 391 aa, Geobacter metallireducens GS-15
MQDVFVVDALRTPFGSFSGMLADVEAPKLAATVMKELLAKAGLAPDTVNEVIVGQVLSGGCGQAPARQAMRGAGIPDSAHALTINKVCGSGLKAIMLGADSIRLGESQIVIAGGMENMSLAPFFLKKARAGYRMGHSELLDLLIYDGLQDPYTGRHMGEIGEVSAERGGLTRKEQDAFARRSYELAQAAVTGGIFADEIVPVVKKGKKGDETIGTDEEPFKGDPSKLPSLRAAFKKDGTITAGNASTINDGAALALLTDADGLKKHNLTPKARIVASATESRHPDNFPEAPIGAIEKACAKAGLTVSDIDLFEINEAFASVALLAIKGLGLPLDKVNVNGGACAIGHPIGASGGRLAATVIRELHRRQKRYGLATLCIGGGEAVAVIFERV

SEQ ID NO: 33579 - protein, 247 aa, Geobacter metallireducens GS-15
MKTENSIFETSFTIRSFDVDPHGFVSPVTLLGYLQEAASEHMTLLGGTVRSLMAEGLTWVLSRVHLSIERYPRVRNEMTVRTWPSLREGRFTCREFELLDRTGAVMARATTSWAVIDFKTRRAVRVDRHPPYPLTPRRAIDDDFALLPALKGSQAEERFRVRRSDLDLNHHVNHMVYAGWALDAVPDEVAERHKLVSLEIGYRAEALAGEEVTVCCACAEDDNGILVIHRIASADCRELTRLRTRWR

SEQ ID NO: 33580 - protein, 406 aa, Geobacter metallireducens GS-15
MDQLSMATGLKNSTDVLFLMLGAVMVFAMHAGFAFLEVGTVRKKNQVNAFVKILTDWSVSTIAYFMVGFPIAYGISFLVPAGDLMGATQGYDLVHYFFLLCFSACIPAIISGGIAERAKFWPQVFAGALFAALTYPIFESLIWGKNASILQGFFKSIGGAEFHDYAGSVVVHSMGGWLALPAVLTLGPRMGRYIRSKSHPIPISNIPFLALGSWILAVGWFGFNVMSAGHLDKISGLVAVNSLLAMVGGVLAALLAGKNDPGFIHNGALAGLIAVCAGSDIIHPLGAFATGAIASVIFVYGFQIEQERLKIDDVLGVWPLHGIIGSWGGIAAGIFGQPLLGGIGGISFISQLLGTVAAILFALANGFLVYTVLSKTVGIRLSDEEEFAGADLSIHKIGAYPEDHVR

SEQ ID NO: 33581 - protein, 509 aa, Geobacter metallireducens GS-15
MLYKSVTESFNEFIIDRSDATCIRCKVCVRQCAYEVHAYEAKADALTEDNTLCIGCRRCSALCPTGAITIRSNEEVFKRNESWSNAHIRNLYAQADTGGILLAAMGNPAKYPIYWDHMLLDASQVTNPSIDPLREPMELRTYLGKKPHSIEVVRDEQTGKPKLATKLTPQIKMEYPFIFSAMSYGALNLNAHKAMAMAAKELGTLYNTGEGGLHRDLYQYGSNVMVQVASGRFGVSEAYLNAGVAIEIKVGQGAKPGIGGHLPGEKVNDQISETRMIPAGADAISPAPHHDIYSIEDLRQLIFALKEATNYTKPVSVKIAAVHHVAAIASGVARAGADIITIDGFRGGTGAAPQVIRDNVGIPMELALAAVDARLRDEGIRNQVSIVVGGGVRSSGDAIKAIALGADAINMGTSTLLALGCTLCQRCYTGKCPWGITTNNPYLAKRLNPELGAERLVNLVHAWGHEMKEILGGMGLNALESLRGNRYKLRALGLTEKDMNILGVMPAGE

SEQ ID NO: 33582 - protein, 328 aa, Geobacter metallireducens GS-15
MTKLRSFLKHEMVKFILFTILILFLPLAFKGGYLLNVFVFVGIHTLLAVALNLLLGYAGQISLGHAAFFGLGAYASGILTATHGQNPWLAMAVVAAAVGTLAFIIGFPILKLKGHYLAMATLGFGIIVYIAFNEAVELTGGPSGFSGIPNLSLGGFSFDTDFKNYYLIWGMTLVTILLSLNLVNSRIGRGLKAIHDSEVAARVMGVNVRFLKVQIFALSAVISSIAGSLYAHTMTFVSPTSFGFNFSVELVTMVIIGGLGSIYGSFLGAALLTFLPEILRAFQDYDIVVYGLLLIFMTLFMPGGLVRGIPALVGQIVSRAGAGSKADA

SEQ ID NO: 33583 - protein, 405 aa, Geobacter metallireducens GS-15
MALVVQKYGGTSMGSIERIRNVAKRVAKTYDAGNDMVVVVSAMSGETNKLVALANEVCEFPDNREYDVLVASGEQVSIALLAMCLKSMGYKAKSYHGWQVPIITDSVFSKARIEEIPDAKVRADLKDGTIVVVAGFQGIDKDGNVTTLGRGGSDTSAVAMAAAMKADVCEIYTDVDGVYTTDPNICEDARKIDKISYDEMLELASLGAKVLQIRSVEFAKKYNVDIHVRSSFNDNQGTMVTKEDKDMEAVLVSGIAYDKNEAKIAVLGVPDKPGIAAKILSSLSDANISVDMIVQNVSGGDLTDFTFTVTKADFKKALAITKEIATEIKATGVSADESISKVSIVGVGMRSHAGVATKMFQTLANEGINIQMISTSEIKVSVVIDAKYTELAVRVLHEAFGLSGK

SEQ ID NO: 33584 - protein, 608 aa, Geobacter metallireducens GS-15
MNQFYKNLALWLVISLMMILLFNLFNKPRTTSERLSYSDFITAVDAGKVNAVTIQGNEIIGKFADGKEFRSYKPLDATLSDKLLEKKISISAKPEEEKVSWFSIFISWFPLLFLVGVWIFFMRQMQGGGGKAMAFGKSRAKLLTEAQGRITFEDVAGVDEAKEELEEIIQFLKDPKKFTKLGGRIPKGVLLVGPPGTGKTLLARAVAGEAGVPFFSISGSDFVEMFVGVGASRVRDLFVQGKKNAPCIIFIDEIDAVGRHRGAGLGGGHDEREQTLNQLLVEMDGFESNEGVILIAATNRPDVLDPALLRPGRFDRQVVVPQPDVKGREMILKVHTKKTPLGPNVNLDVIARGTPGFSGADLANVVNEAALLAARKDKSVVDMQDFDDAKDKVLMGVERRSMVISEDEKKNTAYHEAGHTLVAKLIPGSDPVHKVSIIPRGRALGITMQLPSEDKHSYSKEALLNRIAVLMGGRAAEDIIFGSLTTGAGNDIERATDLARKMVCEWGMSDKMGPVSFGKKEESIFLGRDMSMHKNYSEATAVEIDGEIRKIVEDSYSRVTTLLRDNIDILHKLSLELIEKENLTGDEVEQIVRSVRGTVPASEEIPAS

SEQ ID NO: 33585 - protein, 321 aa, Geobacter metallireducens GS-15
MNRRDFLKTSGLALAAAATPFGRFAWAGGATLSLKIGYLPLTDHLLMIAAEREQFKNIRIKPVRFSSWPEIAEALKNGKIDGGFLLTPMGLALRQKGAPIKVVLLGHRNGSAITVKNSPDINRITDLRGKTVAIPSPFSTHNLLLRKALSEKGLVPGRDVKVIDMAPPEMPVALATGRIHGFMVAEPFGAQAEAQKVGKILVLSKDIWKDHICCTLNLQEKIIQSYPAEVQELVTGLIRTASFIESKPAEAARGSVKILGQRPEIVEKVLTTPQDRLTFRNLAPSRADFVAIQDYMVKFGVAKAKVDLTGYLDDRFAKRKG

SEQ ID NO: 33586 - protein, 288 aa, Geobacter metallireducens GS-15
MLKNVGFLGLGTVGRHMAINLLKGSYTLTVYDSDPEVVAELVKQGALGAGTPREAAKGQDIVIYIRPEKERLKPDIYGEDGIFAGIDPGTILVDMGTHSLESTKEMAEEAAKHRVMFLDAPVWGTKEHAANGLLTILAGGDPSLLGRCRELFSFFGLNIIHVGSIGDATRMKFVVNLVQAELMETLAEAIVFGEKMGFNVDKILEVLDSGGVASPLFHSKGRVIARGDFTRNLALKYVHEQLELVLEKSQKLGLDLPAAMVACKTYEQGVKDGRGEEDFSSVVKVLRK

SEQ ID NO: 33587 - protein, 656 aa, Geobacter metallireducens GS-15
MSQGIFGIIDFRNAIADRDVLGNAMAAYLKMSGSGEFSVSTGLGHLIGMRRSAADSPSRQTRIEHDPDAGLAAVIHGEVNNYRELLSQHPPSGRPCCGDLDLVLRMYRRSGASFARSINGLFTIGILDEREKTFRLMNDRFGLAHQLYWTVADGRLIFATHLKTLLACPGVRRELDHEGLNLFLKYAYITSPWSILKGINKLPPGHMLTFRDGKAEVAPYWQFDAVTRPGMTMEEAIPAYRDLLRGAIARRMGSDGSTGVMLSGGLDSSANAALAASCSSTPVKTFAIGFEDPRFDERPFARIVAKHFGTDHHEYTITGREIDDLPSLVWHLEEPYFEFGLFLTYMGLKSASGHVQAVIGGEGADQMYGTGGFAGGRPAAVHYLFRKSGMIGPARTVSSLLRGPLFYDRDNLGFQLRLFWNRAADLNDWYFYGYDGHELSQLYRNGNLARVPRIFGEPAGSPESFAQVYLETQIEQDMRHYVNENVMVKSGRMADMLGLVLRESFLDADVADFLVSLPMPVKRGGGLVDHLRGRFKSKLLHRKAMEGILPPEIMSKPKQGGFVPVMIFLNDPALRKRIYEKLLRSEVMGEYFRTDYLRTLFEKYESFQQGAVGWPNFLNSKANRILFLLTFDIWHHCYLANDPLGVTPPSLNEYLG

SEQ ID NO: 33588 - protein, 399 aa, Geobacter metallireducens GS-15
MREAVIVDAVRTPVGKFNGALKNVRSDDLAAHCISELVKRNNLDPNLVEDVVLGCTNQAGEDNRNVGRMAALLAGLPYSVAGQTINRLCASGLNAINSAAHAIKLGEGDVFIAGGTESMTRAPFVMAKSESPFSRDIRVFDSVIGWRFTNPKMTEPYAKEGMGETAENVAVRYGLTRQEQDEFALETQRKWAAADAAGKFNDEIVPVVIPQKKGDPIIVSRDEFPRGNDVTMEQLAKLPAAFRKEGTVTAGNSSGINDGAAALLLMEAETAKKLGYKPLARVVASAVAGCDPSYMGLGPIPAIQKVLQRSGLKIEDIDLFELNEAFAAQSIPCIRELGIDPAKVNVNGGSIAIGHPLGSTGARITATLVHEMKRRGSRYGLVSLCIGVGQGIATIFERV

SEQ ID NO: 33589 - protein, 391 aa, Geobacter metallireducens GS-15
MSDVYVIESLRTPLGSFGGELSDVEAPRLAATVIRELLQRSGLPAEGVDEVIVGQVLAGGTGQAPARQAMRYAELPDSIPAMTINKVCGSGLKALMLGADAIRLGDVGVVIAGGMENMSLAPYVLSKGRNGYRLGNGELIDLLVNDGLLDPYSGNHMGVIAEATTEKHGISRADQDAFAFRSYQKAQTAVKEGIFRDEIVPVVKKGRKGDVTVSDDEEPFKVDFTKLMGLKSAFKKEGTITAGNASTINDGAALTLLASGEAVKKYGLKPRARLVAYASNSLHPDQFTEAPVGAIEKACAKAGLKLEDIDLFEINEAFAAVTMLAIKQLGLDPEKVNVNGGAVAIGHPLGASGGRLAATLVRELHRRQARFGLATLCIGGGEAVAAIFERV

SEQ ID NO: 33590 - protein, 359 aa, Geobacter metallireducens GS-15
MNRDKTILIINPGSTSTKIGIFSAGEMKINVSVRHDDAELRKFATIWDQYDYRKDALLGFLRDHDLAMDDIDAIACRGGNVRPLPGGIYRLCPRMIADMKSGIYGGHPINVGGLVAYDLGNQYGIPVLTADPPMTDELCASARYSGIPQLTRTSSFHALNQKATARRIAAELGKRYDEVNLIVAHLGGGISVGAHQKGKIVDVNNALDGDGPFSPERAGTLPAGDLVKLCFSGDYTKAEVLKLLTGGGGLYAYLGTTNVIEIEKRITAGDGKAAEVFEAMIYQVAKEIGACAAVLEGTVDAIALTGSLVYSERLLESLKRKIAFIAPVHLNPGENEMEALADAAMRYFSQEEELSVYAA

SEQ ID NO: 33591 - protein, 362 aa, Geobacter metallireducens GS-15
MDDKKILIINPGSTSTKIGVFTEGKMIVNQSVKHDDEELRKFPTIWDQYDFRRDAIFKVLADNNLSMGEIDAIACRGGNVRPLPGGIYRVCPKMIEDMKSGIYGGHPINVGGLVAFDLGNQFNIPVLTADPPMTDELCASARYSGIPQITRQSSFHALNQKATARKIAAELGKKYDEINLIVAHLGGGISVGAHRRGKIIDVNNALDGDGPFSPERAGSLPAGDLVKLCFSGEYTKKEVLKLLTGKGGLFAYMGTTDAVEIEKRIAHGGQKAAEVYEAMIYQVAKEIGASAAVLEGDVDAIALTGSLAYSKKLVESLSRKISFIAPVLLNPGENEMEALADAAMRYFNNEEALSVYHQDKAA

SEQ ID NO: 33592 - protein, 665 aa, Geobacter metallireducens GS-15
MCGITGFMDFSLQCGPDAMRANARRMADALMHRGPDDSGAWCDQGAGVGLAHRRLSILDLTPAGHQPMESRSGRFTIVFNGEIYNHQALRKELAAFEPWRGHSDTETLLAGFEAWGIEATLKRTVGMFALAVWDNAERTLTLARDRMGEKPLYYGWNQGVFLFASELKALRAYPGFDAEINRDAIALLMRHSCIPTPHSIYRGIYKLWPGTILTLRNTGRGIAPWDAADPPFKLFQGEGVSLRPYWSLLEAAEQGHARPFEGTESEAIGELERVLTEAVLAQQISDVPLGAFLSGGVDSTAIVALMQAHSSRPVKTFTIGFHEDDCNEAKYAGEIASRLGTDHTELYVSPGDSLAVIPRLPQLYDEPFSDPSHIPTFLVSLLAREHVTVSLSGDGGDELFGGYVRHTLLHRIWNNIGWCPLPMRKALSDKIRFLSPGQLQAVLRNLPFIDRVHAPVYKAYRLAELIRADSPASMYEICISHWQQDDPVVVGGQSPFHASSGRMPRQLDSFSLPEKIMLMDSVTYLPDDILVKIDRAAMGVSLETRVPFLDHRVVEFAWRLPLGLKIRGGQSKWILRQVLNRHIPKELVERPKHGFGIPLGTWLRGPLREWAEELLNESRLLREGFLDPRPVRQKWLEHVSGRRDWEFHLWDVLMFQSWLEQERRP

SEQ ID NO: 33593 - protein, 392 aa, Geobacter metallireducens GS-15
MEEAVIVGAARTAIGDFMGALKDVSAVDLGIAAVQGALKKAGIGPELVEEVVGGMIYKAGAKGNPARQVQLKTGIPLEGAATTVEQLCGSAMRALEIASQQILLGKTSVGVAVGMESMSQAPYLLLNARQGLRLGSDSIEDHLLHDALIDAFSGTHMGITAENLAEKYGISREEQDDLALLSHQRAVAAAESGKFRAEIVPVEVKSRKGTIVIDTDEHPRADMSREKLAALRPAFKKDGTVTAGNASSINDGAAALVLMTARRARELGVSPIARIRATASFGVAPEIMGIGPAYAIPKALKYADLQMKDIDYFEINEAFAAQFLAVNRELNIDLSRVNANGSGIALGHPVGCTGIRIIVTMLEEMKRRQGRYGVASLCVGGGPAMATVIEMI

SEQ ID NO: 33594 - protein, 298 aa, Geobacter metallireducens GS-15
MSDNPFRSGFVSIIGRPNVGKSTLLNRILGEKIVITSDKPQTTRNRIQGIHNVPGAQIVFIDTPGIHQARSRLNKYMVEVALSAIREVDLVLFLVEANQKPGEQEQEIIDVLAGATAPVFLVINKVDLTEKGAVLERIAAYKDRYPFREIVPISAGTGDGVDHLVELVRKALPQGPVYFPDDILTDVPERFIAAEIIREKVFRMTRDEVPYATAVEVDSFKEREDGGLVSIAATITVERDSQKGIIIGKKGAMLKKIGSAARVEIEKLLNTKVFLELFVRVRKDWSEDERMLKELGYT

SEQ ID NO: 33595 - protein, 571 aa, Geobacter metallireducens GS-15
METFKRLLRYSKPYGWRIAISMVASLCVGGTDAAIAWLVEPLLKKIFTEKDMTIFILLPVAVMIVFILRGVARFVQQYYISTAGQLAIQDIRNEVYQKHMGLPLRYFADNPTGVLMSRVMSDVGQMQSGVANVVTGLLRDGVTAIGLLGVIFYRNWQLALITFIVLPLTAVPAQKIGKRIKNLAKQSLGQMGEITSILQETFTGIKVVKAFRLERRFIDRFSQTNLGLYHYLRKSIKYESLHTPIMEIITSLGVAGVIWFGGSQVMHGRMSASEFFSFLTAMVMLYGPVKKLLSSYNTVQQAVGAAERVFEVIDQRADIEDPAEPVEMGPPQGSVELRNVSFRYNDEEVLRNVSLSAGRGEVVALVGPSGAGKTTIMSLIPRFYDVTGGAVLVDGVDVRQARLDDLLSHVALVDQETVLFNDTIANNIRLGNSDAPMEAVERAARAAFAHDFIMDMPEGYDTNIGDRGVRLSGGQRQRLCIARAILKDAPILLLDEATSALDTESEHMVQQALANLMKNRTTLVIAHRLSTVLHADRIVVIDRGEVVEVGTNDELLARGGLYRKLYDMQFS

SEQ ID NO: 33596 - protein, 541 aa, Geobacter metallireducens GS-15
MKIIVTDEVAQEGLALLAQDPRVEINIKLGLKKEELLAIIGNYDAIITRSGTTVDKNLLDAGTKLRLIARAGVGIDNVDVDYASSRGVIVVNAPFGNTNSAAEHAMALLLSFCRNVPRANGSLKSGEWKRAPFTGYELKGKTAGVIGLGKVGGRVATRLKAFECEVLACDPYIAVKRAHDLGVKLVSHDEIYRNCDIITVHTPLTDETRNMIGERELAMMKDGVIIVNAARGGIIEEEALLKYLESGKITGAAIDVFSVEPPKTDVLQKLIAHERVIVTPHLGANTFEAQVNVAVDVSKEILNYLDDLPLENAVNIPRFDLALMDQMRPFLNLMSVMSDFVIQLVDANIDTVTFSYAGNIAHYDCTPLSVCGLSSILNRLVEQDVNMVNATLIADQMGITVEENKSTQSPSFSNMITLTIEGKGEKRTIAGTLFEGSPRIVKLRDYQVDFAPDEHMLSLTYEDRPGMIGKIGTIMGAHDINIASMNLGRREKRGEAMVILSLDSAVPPFVVEEVRKATDATFIKPIHMPGVKCSRGCGCGI

SEQ ID NO: 33597 - protein, 461 aa, Geobacter metallireducens GS-15
MANGEKKTVRVLIVDDDVSLRRVLEYNLQEEGYEVLTAGSGEEGLRLFEDGAPTLVVTDLKMPGMGGFQLLREVKERFPDTVVIVITAFGAVEAAVEAMKAGAYDFITKPFNREALKLTVRKALDMQGLSRENRRLREELSEREEFRSIIGISPPMEEVFRVIDRVADTDATVLITGESGTGKELVARAIHNRSSRRAAPFVAINCAAIPRDLLESELFGHVKGAFTGAVQDKEGKFRQAEAGTLFLDEVGELPVELQSKLLRALQEKEVQPVGGAHTIKLDVRVVAATNADLEEAIAEGRFREDLFYRLSVIPVHLPPLRERKEDIPLLVRHFAAKHGGASVTFSPEILAVMAAYGWPGNVRELENTVERILIMRNADTIHPDDLPEKVRRGRSPQRECRVINLPDEGYSLEQLEREIVVEALERNNWNQSSAARFLRIPRHTLIYRMEKYSITTPERKK

SEQ ID NO: 33598 - protein, 435 aa, Geobacter metallireducens GS-15
MMFDPQSVRIDGVYEQRQPGNFMLRIKVPAGIISTEQALRVAEIADRFAGGSVHLTTRGSIELHWLKQENLAEAWRMLASVGLTTRGACGGAVRGVVCAMPGDAGYGAAQLLARRLLAHFTHNPRFEGLPKKFKIGVFTGYGDGRHLIQDLSVILREGADGNSSYDVWIAGGLGREPHASFLLEEGVAGERLIPLAEAIISLYRELTPKGKRLKHLVRERGREEFVKLVRERVAAIPPLSLGAGLATPLTSAPREGAAERLTAGIFAGELGTKRFVDLAEIARQYAGGYMVVTGEQNVLFILDDGALRDDAARALAAAGFGCDSPAERVCFRICPGNHECKMGLSPTRDVARELAGTLGEAGERLSWSICGCPNSCSHPQLADVGIATVKSVKDEQGERHPLFDLYRRYGTDGFGVVVRHGIGIDELLEAVREIG

SEQ ID NO: 33599 - protein, 480 aa, Geobacter metallireducens GS-15
MLLHRILVADDEESMRWVLSKALRKKGFSVDLARDGEEALRLIQSGDYDLAILDIKMPGISGLDLLDRVKELKSDLLMVIMTAEASMKNAVEAMKRGAYDYITKPFDLDVIDAIIEKVNRAREITSQMSILREELKDRYLLEKNIVGNSPAMREVYKTIGKVAPSDVTVLVQGESGTGKELIARAIHFNSKRIGKPFIALNCAAIPKELLESELFGFEKGAFTGAAERKLGKFEQANGGTIFLDEIGDMPLDLQAKILRVLQEKEVTRTGGSQNIAVDVRIVAATNQNLEELARNKQFREDLYYRLNVVPIQLVPLRERKEDIPALVEYFLHKTCAELEVPGRTCSPETMALLTAYSWPGNVRELENTIKRAVILSSDPLLTPADFPGLRIQRTGEAVATDELSLEALVDMKLRASLTNLDKMETGDIYNLVLKQIERPLIRFVLEKTRGNQVKGAEILGINRNTLRKKIQELGIEIRRD

SEQ ID NO: 33600 - protein, 287 aa, Geobacter metallireducens GS-15
MTIAATMLRAITVLMALLLLVAAGPAAAADEGGDLLEQFLGRKYEPVLKPLEIPEGTPPSEALFLYLNQGYGDAGVIGDFLAKGADANYADKEYRITLLHNVAHYGHAEATRILLAAGARVNAVNGEGNTPLFAAVHEGHDDVARILLDAGADVTIANSYWYTPLREACRRGNTGMVRLLLEKGADVNITDNKGFTPLHAAVSAEALEAATLILDSGADINIAGRYGDTPLHYAVGLGYEEFVRLFLARGADPTIRNDRGLTPRQLAEERGFASIVELFRNWGKNTI

SEQ ID NO: 33601 - protein, 129 aa, Geobacter metallireducens GS-15
MAEQAKKRILVVDDEENARIGLSKLLEREGFEVESVSNGYEALNYLNQRQVNVIVTDINMPEMNGITFLKELNKNFPASNVIMITAYGGVESYIEAMNLGAFEYINKPIKIDELKSILKKIFKEKEHRH

SEQ ID NO: 33602 - protein, 330 aa, Geobacter metallireducens GS-15
MGERTRIVILDGYTINPGDNPWTPVEEYGDCTIHDRTPPELKLERARDAEIILTSKVKLDEATIAALPRLRYISLLATGYNNVDVAAAGRRGIPVSNVPAYSTESVAQTAFALLLELTTRVGLHDAAVRGGEWSHCPDHSFWKTSIVELDGLTLGIVGYGAIGRAVARIAQAFGMRTIAHAPRIPADPGPVPVRFVSLEELFATADVVTLNCPQTPENTEFVNEGLLSLMKRSAYLINVARGGLVNEADLARALRDGTLAGAGLDVVAHEPMLPDNPLLAAPNCIFTPHLAWASLAARRRLTGVVAANVAAFLAGSPINVVNGPWLAGGR

SEQ ID NO: 33603 - protein, 314 aa, Geobacter metallireducens GS-15
MNDKIKVFSGNSNRQLAEKICENLGLPLGKANVKNFSDGEIMVEIAENVRGRDIYVVQSTCAPTNNNLMELLIMNDALKRASAATITAVIPYYGYARQDRKAAPRTPITSKLVADLVTTSGADRVVTVDLHAGQIQGFFNIPVDNLYAAPVILENLKQRFPENGIVMVSPDAGGTERARAFAKRLGCTLAVIDKRRTGPNVAEVMHLIGDVKDKTAIILDDMIDTAGTLTQAAKALKEHGAKAIYACATHGVLSGPAIDRINGSDIEAVVITDTVPLGDKAERTNKIKVLTVADLLAEAIRRIHSDESVSSLFV

SEQ ID NO: 33604 - protein, 470 aa, Geobacter metallireducens GS-15
MENIDVLVVDDEAVIREGLRRILEKEGFHVETSASGQIALERMQEENFSLVITDLKMPGMSGMEVLKAIKVLQPEVPVIIITGFSTVDTAVEAMKNGAFDYIAKPFTPEQITEKVRKALDQRAVLIENIFLKKELGEHHGFDLFVGESKEIQKVYRRIIQVAPTDSTVLITGESGTGKELVARAIHNHSNRRENPFVAVDCTSLAENLLESELFGHVKGSFTGAIQTKTGLFKVADGGTLFLDEISNISLTTQAKLLRVLQEREITPIGGTQPVPIDIRLVAATNKNLRTLVPQGTFREDLFFRLNIIPIDLPPLRERKGDLPLLIAFFLKKFSEEMGREIRGLAPDAMALLEDYTFPGNVRELENIIERAVVLAEEDLIQKEDLELRLSGSEGTGVAAYVPQNVEELKETKRQIRERAVEPIEKAFVLQALKRNNWNITRAAEETGMLRPNFQALLKKLRISVRSQMNN

SEQ ID NO: 33605 - protein, 287 aa, Geobacter metallireducens GS-15
MQKFGFIGLGIMGSAMAKNLVKAGCSVTIWNRSPEKAEELAALGAERAATPCEVVESCPVTFAMLADPAAAEEVCFGKHGVLEGIGEGRGYVDMSTVDPATSQRIGVAVVAKGGRFLEAPVSGSKKPAEDGTLIILAAGDRNLYDEAMPGFEKMGKKIIHLGDVGKGAEMKLVVNMVMGGMMACFCEGLALGEKAGLATDAILDVIGAGAMANPMFALKGGLIRDRNFAPAFPLKHMQKDLRLAVALGDRVGQPLVASAAANELFKGARAAGFGDEDFSAIFKTIER

SEQ ID NO: 33606 - protein, 509 aa, Geobacter metallireducens GS-15
MTDAGPNLIPLIIVTLALASFIVAGLRARARSASDYGIGGRYIGRIGGGAAIASNWMSAASLLGMGGLLYLHGYYALAYVIGWTGGYVLLLVLMAGQIRRFGKYTAPDFVGDRYASPMAGLISAGISITISIIYCTAQFKGIGMLFGWLFGTGYRNGVILGAVVVVGYVIISGVLGVARNQQLQYTLLIVSFILPLMVLAYKLGYFWVLPQFGYGVAIQDLKREFGINFAAPFASGSLFQWISLCFTLMVGTAGLPHVLSRFYVVPNIRDARWSLVWGLFFIALIYWSAPAYAVFARLLEARAGMTLPPAAAEKMADLIVIRTAVMGGLPPWMIGILAAGAVSAAFFTVAGLLITGASSFSHDIYYRFINPRASETTKMALSKAAVVALAVVVLVIAMDPPGLIAEITAVAFALAGNTIFPAFLLGIWWGRANRHGVIAGMLTGVVITFSTPLFGRFLPVVADIFPLTSSAFFGAPAVIAVMVAVSLLTPPPPEEVRRFLAEQVHGHMD

SEQ ID NO: 33607 - protein, 638 aa, Geobacter metallireducens GS-15
MTKSKTNRNISELCDLSGCRPLLKWAGGKSQLLGQLLPKMPKKYGRYIEPFFGGGALFFAVKPEDAIIADSNPELVNLYQSVADNVDNVIRCLKRHNNTEDDFYKVRAQDWTKLSPASAAARTIFLNRTCFNGLYRVNKSGQFNSPYGRYVNPRILDEEGLRAASYLLSKATIVLGDYKDVLREHARSGDFVFLDPPYLPVSAYADFKRYTKEQFYEEDHVELATEIARLHELGCYVILTNSNNPLVHELYGRYEMYVVETKRHISCNGQGRTGQDVIVDIKPKARLNLKLVPEPLPEQALLYPPTRYMGSKNKLLKDIWAVASQFDFDTAVDLFSGSGIVGYMFKSHGKAVISNDYMHMSACFTKAMVENNSVILPLEEARRLLEPKHKSDGFVAEKFKGLYFEDADNRLIDVLRSNIWALKNQYKKAIALSALIRACTKKRPRGIFTYTGLGRYDDGRRDLHLSFADQFLEAVEAINSAVFDNGHENKSRHGDALTVPVVENALVYIDPPYYSPLSDNEYVRRYHFVEGLARNWKGVEIQEHTQTKKFKSYPTPFSTRKGAADAFDHLFKRFKNNILIVSYSSNSQPTQDEMLEIMGKYKTNVAVIPVDYKYSFGTHGHKVGDNNNDVQEYLFVGY

SEQ ID NO: 33608 - protein, 102 aa, Geobacter metallireducens GS-15
MYAVVRTGGKQYKVSEGDFLKVEKLEGAVGDTIELKDILMVGGETVKIGTPLVPSASVVGKIVEQGKDKKILVFKSKKRKDSKKLRGHRQPRTVLKIEKING

SEQ ID NO: 33609 - protein, 338 aa, Geobacter metallireducens GS-15
MQFIDEVKIHVQSGHGGAGCVSFRREKFIPFGGPDGGDGGKGGDVIFTVDPNLSTLMDLRYRPHLKAGRGKNGMGKDRHGANGDDLTIPVPPGTIVKDAETGEILADLTEPGQTVVLLKGGRGGQGNARFTTSTNRAPKFAQPGEDEEERWLRLELKLMADVGLLGFPNVGKSSFITKVSAARPKIADYPFTTIKPNLGVVSYKNYRSFVVADIPGIIEGASEGAGLGHRFLKHVERTNILLHLIDLSWIPDRDPIREYETLNRELALFSPELAGKEQIAVINKIDLPVVRENLPSVIDWFKERGIAVFPISAATGEGIPTLLDEIARHLWGQAEEEW

SEQ ID NO: 33610 - protein, 221 aa, Geobacter metallireducens GS-15
MKKDILEKGAIVQRDRETYAIAPHIPGGITDTATLRKICDVADRYGVKELKLTSAQRIALMGVKEEDLDTIWSDLDQQPGAAIGLCVRSVKICPGTTWCKRGVQDSVALGLKIDTIYHAMKLPNKMKMGISGCMVNCAETLLKDIGVVGTPKGWRIYVGGNAGARPRIGEVFTDTAPDDDEVLAVVARIVDYYKGSGSEQRLGRIVEQMGIETFRQAVLGT

SEQ ID NO: 33611 - protein, 391 aa, Geobacter metallireducens GS-15
MNEIFVVDALRTPFGSFSGMLADVDAPKLAATVMKELLAKAGLAPDTVNEVIVGQVLSGGCGQAPARQAMRGAGIPDTAHALTVNKVCGSGLKAIMLGADSIRLGESQIVIAGGMENMSLAPFFLKKARAGYRMGHSELLDLLIYDGLQDPYTGRHMGEIGEASAERGNLSREEQDAFARRSYELAQAAVTGRIFADEIVPVVKKGKKGDETIGTDEEPFKGDPSKLPSLRAAFKKDGTITAGNASTINDGAALALLTDADGLKKYNLTPKARIVASATESRHPDNFPEAPIGAIEKACAKAGLTVSDIDLFEINEAFASVALLAVKGLGLPLDKVNVNGGACAIGHPIGASGGRLAATVIRELHRRQKRYGLATLCIGGGEAVAVIFERV

SEQ ID NO: 33612 - protein, 602 aa, Geobacter metallireducens GS-15
MHFGGAYEDEIVGKAYDGRLMARFIRYVLPYRWLAVAALCLLPLSAAARLAQPWIMKVAIDEHIITGRMEGLPLVAAGFLALILAESLLTFFEVWLLQYLGQRVMFDLRMELFSHVQRLPVAFFDRTPTGSLVTRLTSDVEVLGEMFAAGIITVVGDILFLAGIVGVMLWMNLKLSLVTFAVLPVLIWVAFTFRVRMRKAFREVRARLANLNTFLAETIGGMAVVQLFNRQETERREFSRLNAAYRDANLPVITWDASLYALVETLSSIAVGLIIWYGGGEIVSGALTFGALVAFIQYTEKFFGPIRDLSAKYSIMQGAMAALERIFNLLDTEKDGYPSPGLRPPSPSRRGAGDEGAVNTIAFKDVWFAYKDEEYVLRGIDLTIRRGEKVALVGETGGGKTTVTRLLSRFYDVSRGSILFDGADIRELPLPDLRRRIGVVLQEPYLFTGTIGFNISLGDEGAAARMEEAARLVGAARFIEALPKKYDEEVRERGVNLSAGERQLISFARAVAFDPEILVLDEATSSVDSESERLIQEGLRALMAGRTSLVVAHRLSTVQDADRIVVIHRGEKVEEGTHRELLAAGGVYARLYQLQFREQDNP

SEQ ID NO: 33613 - protein, 638 aa, Geobacter metallireducens GS-15
MSKVIGIDLGTTNSCVAIMEGGEPVVIANSEGSRTTPSMVAFAESGERLVGQQAKRQAVTNPENTLFAIKRLIGRKFDTDEVRKDISISPFKIVKADNGDAWVDVRGKMYSPPEVSAIVLQKMKKTAEDYLGETVTDAVITVPAYFNDSQRQATKDAGKIAGLNVLRIINEPTAAALAYGLDKKKDEKIAVFDLGGGTFDISILELGDGVFEVKSTNGDTFLGGEDFDQRVIDWIADEFKKDQGIDLRGDKMALQRLKEAAEKAKCELSSSMETDINLPFITADATGPKHLTMKLSRAKLEALCAELLDKLEGPCRTALKDAGLSPSEVDEVILVGGMTRMPAVQKRVQEIFGKAPNKGVNPDEVVAIGAGIQGGVLRGDVKDVLLLDVTPLSLGIETLGSVMTKLIDKNTTIPCRKSQVFSTASDNQPAVTIHVLQGEREMASDNKTLGNFELTGIPPAPRGVPQIEVTFDIDANGIVHVSAKDLGTGKEQSIRITASSGLSKEEIDKMVREAESHAADDKKKRELIEARNHADTLAYSTEKSLKEYGDKIGDDEKKKIEEAVAALKKAMEGDDVDAIKQATDALTQASHKLAEAVYAKTQTEGGAQPGAEADGDTGAKGGEKVVDADFEEVKDDKK

SEQ ID NO: 33614 - protein, 536 aa, Geobacter metallireducens GS-15
MEKRALIAVILSIVFFYGYSALFPPPKKEAPAPSAQQAVTGSQPGAPQASVAAVPAPSPVPAAAVKAQQKEIAVETPDYTAVFSTQGGSLTRLVLKKYRETADLTGKHVTLVDERDPSAYTLSTRAAGIGLDPSALFVSSADSLTVEAGEEKKELAFTWISPAGVTVRKIYTFQGGNYGIDMVYQTANSGTARVGAAFQTVMTYPAVPRVKESRLETFGPVTFAQDKLTEEKVKDLVGQGKSYSAPLWSGFADKYFLSAVVGQGGSIATAAVRSTPRGMLEDTITAPETSLNPGESKSVAYRLYFGPKDLDILKAQGNSLERAIDLGWFAMLAKPLLHSLKFFYKYVHNYGIAIIIITVILKIIFYPLTHSSYKSMKQMQKLQPKMQEVREKYKNDRDAMNKAIMELYQTHKVNPVGGCLPMLVQIPVFFALYKALMFSIELRHAPFMLWIQDLAGKDPYYVTPIIMGITMVIQQKMTPSQMDPMQQKMMMALPVVFTFMFLNFPSGLVLYWLVNNVLTIIQQSYINKSIAAAEAK

SEQ ID NO: 33615 - protein, 872 aa, Tetragenococcus halophilus
MNIEKMTTTLQSAIAEAQQVAVTRKQQEIDIAHLWKIFLQPKQFARNFYKDLGVDLNAFEHEIDQTIDSLPSVEGGNVQYGQNISQNISQNLYHLLNEADQLAKDFKDEFLSTEIVLLALMKLKNYRLTKFLKNQGVNEKQIKQSIENIRQGDRVTSQNQEEQYEALEKYGTDLVQEVKNGEMGPIIGRDEEIRDVIRILSRKTKNNPVLIGEAGVGKTAIVEGLAQRIVKKDVPENLKDKTVFSLDMGALIAGAKYRGEFEERLKAVLKEVKKADGRIILFIDEIHNIVGAGKTEGSMDAGNLLKPMLARGELHTIGATTLDEYRENIETDKALERRFQRVSVQEPSVEDTISILRGLKERFEIHHGVNIHDNALVAAATLSDRYITDRYLPDKAIDLVDEACANIRVEMNSMPTELDQVTRRLMQLEIEEAALKKEIDDASMKRLASLQEELAELREEVNSMKLQWETEKEEVNAVSNKRAEIDKAKHELEDAENNYDLERAAVLRHGTVPQLEKELKELEDKDDQTVLKMVQESVTANEIAVVVGRLTGIPVTKLVEGEREKLLNLNETLHKRVIGQDEAVNAVSDAVIRSRAGLQNPDRPLGSFLFLGPTGVGKTELAKALAENLFDSEDHMVRIDMSEYMEKHTVSRLVGAPPGYVGYEEGGQLTEAVRRNPYTIILLDEIEKAHPDVFNILLQVLDDGRLTDSKGRVVNFKNTVLIMTSNIGSQILLEGVSDQGEISAETRSQVMNMLQAAFKPEFLNRIDDTIVFTPLNIEDMKGIVEKIIEELSQRLMQQEIFLEISDEAKAWIAQNAYEPAYGARPLRRYITREVETPLAKEIVSGRVMPKTKVTIELLDNHLVFQNEPMEEE

SEQ ID NO: 33616 - protein, 425 aa, Hordeum vulgare subsp. vulgare
MAAAMAATTMVTKNNGGSLAMDKKNWFFRPAPEVAFSWSSQPESRSLEFPRRALFASVGLSLSHDGKARPADDVAHQLAAAGDAGVQQAQKAKKAKKQQLGLRKVRVKIGNPHLRRLVSGAIAGAVSRTFVAPLETIRTHLMVGSSGADSMGGVFRWIMRTEGWPGLFRGNAVNVLRVAPSKAIEHFTYDTAKKYLTPEAGEPAKVPIPTPLVAGALAGVASTLCTYPMELVKTRLTIEKDVYDNLLHAFVKIVRDEGPGELYRGLAPSLIGVVPYAAANFYAYETLRGAYRRASGKEEVGNVPTLLIGSAAGAIASTATFPLEVARKQMQVGAVGGRQVYKNVLHAMYCILNKEGAAGLYRGLGPSCIKLMPAAGISFMCYEACKKILVDDKQDGEPQDQEETETGHTQGQAAPKSPNANGDRP

SEQ ID NO: 33617 - protein, 322 aa, Desulfovibrio desulfuricans subsp. desulfuricans str. G20
MNRRYAMYMVAAAAFATMPAFINPYWTDVLNTVGLYAVLALSLNIILGHAGMFHMGHAAFYAVGAYTTAVLNVTFHVPVLWAMPAAGVLAALFALVVARPIIHLRGDYLLIVTIGIVEIVRIALVNNIFDMTGGANGIFGIARPELFGFKIRKPVHFFYLIWGFCAVTILLFHWLENSRFGRALNYIREDEVAAEGSGVNTAAYKLGAFVLGAFWAGMAGTLFAAKMTIISPESFSFWESVVMFTIVILGGMGSIRGVLLGAFLIVGLPEVFRELASARMLVFGAAMVAMMIFRTQGLLPPAPRHYDLRGIMSGTQTREERA

SEQ ID NO: 33618 - protein, 122 aa, Desulfovibrio desulfuricans subsp. desulfuricans str. G20
MSELKVLLVDDEIEFAGTLAERLRLRGLQADVTTDGEEALRLVTAHRPDVMVVDVMMPGMNGLDVLRQVRTNMPDLPVILLTGKGSTRDGIEGMRLGAFDYLVKPISIDDLIGKIHEAVNGA

SEQ ID NO: 33619 - protein, 334 aa, Desulfovibrio desulfuricans subsp. desulfuricans str. G20
MTQDAQCTRRTDWIPLAREVLDIEIEGIAAMRDRLNGGFVDALTLMARCTGRVVITGLGKSGLVGRKLAATLSSTGTPAFFLHPVEGAHGDMGMLRSDDVIIAISNSGETDELNAILPALRSLGASLIAMTGGLESTLAKSADVVLDTGVRREACPLNLAPTASTTAVLAMGDALAVCLIHWKSFTENDFLRFHPGGSLGHRLSMRVESLMHTENLPVVRETVRTGEALRVLDEGRLGTVLVTDGQGRLSGILTDGDVRRMVCREAGVETASPVANVMVRSPLTARKEFSVAQLIDMMEERAITVLPITGDDGLLLGVVHLHDLLGKGGVKFSR

SEQ ID NO: 33620 - protein, 605 aa, Desulfovibrio desulfuricans subsp. desulfuricans str. G20
MSRSRSRDHAAEARPSAGKAAMHGSKTQCPAPEKQQPAARPERMTGAAAVVRMLERQGVRHVAGIPGGASLPLYDALAARGSIRHILTRHEQAAGFIAQGMARATGVPAVCLATSGPGATNILTALADAKLDSVPVVCITGQVPTTLIGTDAFQEVDTYGMSIPVTKHNFLVRTAQELLSVIPEAFRIAASGRPGPVLVDIPRDVQLATLEIDSWPGPGLPDAPLMPDMEDVVGAAAMIDEAERPLMYLGGGVISSGAAPAARRIAEKAGIPVAMTLMGLGAVPSEHPLSLGMLGMHAARCTNMAMEECDLLIVAGARFDDRATGRVDSFCPRARVIHIDIDASELDKIRSAHLGIQGDVRATLEALEPLVAPCARENWLHRVEELRNGWGLDLPRTDDPVSPYGMILRTAEIVGPEAVVTTDVGQHQMRTAQAYPFSRPRQWLTSGGLGTMGFGLPAAIGAALACPERTVVCFTGDGSLQMNIQELATAVEQRCNIKIILANNNALGLVQQLQNLFFERRVFATDYSVQVDFVRIAEGFGMPAVDLGASRDPLGMLEAALTTAGPCLVNIPVAVSESVFPMVPPGAANTEMIEGDGHDRTEAAA

SEQ ID NO: 33621 - protein, 392 aa, Desulfovibrio desulfuricans subsp. desulfuricans str. G20
MTQTRRVARRVQQIRISATKLMPMLAARIGGCVSLGQGVPSFSTPPHIVDAVCRVLRDDPSAGKYSLQPGMPALRQAIAEHLTAAKGFAADPDSEVAVTVGAMEALLMALLTVVDRGDEVIIPSPGYASHAEQVLMAEGVPVHVPLRPADWGLDVEAVRAAVTERTRAVIVCNPGNPTGTVYADEDVRALCRLALEHNLVLISDETYDYMVFGGHAAPLSPASLPEMRENVIVINSFSKKYALTGWRVGYAAASAGWMGEMLKVHDATAICAPTVSQHAALAALTGPQDCVEQMCAALEKRRSLTMDRMAALAPAFTCVPPRGAFYVMARYSCTPEPSPEVARRILEEARVITVPGASFGPAGENHLRLSFGADEAELTECFDRLQRWAERQ

SEQ ID NO: 33622 - protein, 299 aa, Desulfovibrio desulfuricans subsp. desulfuricans str. G20
MSLCEHEERFLDSELEPVAPGKARFHIIPAGYEASVSYGGGTFRGPAAILAASRQLELWDGLSDPSRLGLFTHCPVDCDAETAEVLMRIEASVQAALDAAPENPPVPVLLGGEHTVTLGALRALYKRYGSFGVVQFDAHADLRERYDGTPYSHACVMRRALEMGLPLVQVGVRACSEEEVRVRTAHGVTCWDARQLAEHGLPEHILPPDFPSRVYVTFDVDGLDPAVIRATGTPVPGGLGWWDAQHMLRQAVEGRHVLGMDVVELAPDLGDIASDFAAAQLVYNMMGMVQRHAAAKGRV

SEQ ID NO: 33623 - protein, 389 aa, Desulfovibrio desulfuricans subsp. desulfuricans str. G20
MDKIKQSLLICFWFMFMTFPLVVIRVDTINDTVTWRWLNMVYIGAGSFVLSFVWRWAMARRNSKRASGSPAASPATGMVHRLGQDRRFSAAFYCAVLGLGIVLPWLVSTYQTNIMISFLLYVILGLGLNIVVGVAGMLFLGYAAFYAIGAYSYALLNTYFGLGFWTVLPVGGILAAAAGVALAFPVLRLRGDYLAIVTLGFGEIVRLVLENWSDFTQGPSGISNIPRPSLFGAELGVAETGIYIYYIVLVMAVLTVAAVQRIKDSRIGRALQALREDEIACQAMGIDRVNVKLTAFGVGTAWAGFAGVIFAAKTTFINPASFTFMESAIILSIVVLGGMGSRRGFSHPAARIPARICRIPHAHVRIGHGTDDGLPSAGADHAQKTQVRN

SEQ ID NO: 33624 - protein, 568 aa, Desulfovibrio desulfuricans subsp. desulfuricans str. G20
MSINPADTDKKKEAGVDFIRAIVNEDMKTGKYQGRVHTRFPPEPNGYLHLGHAKSICLNFGLAQEYGGKCNLRLDDTNPLKETPEYVESIKTDVRWLGFDWEDRMFHASDYFERLFELAVQLIKAGKAYVDDLTPEQIREYRGTLKEPGKNSPYRDRSAEENLDLFMRMRNGEFEDGSRVLRAKIDMASPNMVMRDPTIYRIRRAHHHRTGDAWCIYPMYDFTHCISDSIEGITHSICTLEFENNRELYDWMLNTLELYHPQQIEFARLNLTHTVLSKRKLIQLVEEGHVNGWDDPRMPTLSGVRRRGITPEALREFCARIGVAKADSMVDYGLLEFCAREHLNRIAPRLMAVLDPVKVVIENYPEGQVEEFEMPLNPEDESQGTRMVPFSRELYIERDDFREQAPNKKFFRLAIGKEVRLRYAYYITCNDVVKDEHGNITELRCTYDPATRGGWSDDGRKVKGTLHWVSAAHAVPAQVRLYDKLFTVENPNAAEEGKTFVDYLNPDSLSVVTGYLEPALKNMEHGSRVQFERIGYFCVDPDSTADAPVFNRTVTLKDSWAKIANKQD

SEQ ID NO: 33625 - protein, 637 aa, Desulfovibrio desulfuricans subsp. desulfuricans str. G20
MGKIIGIDLGTTNSCVYIMEGKDPKCITNPEGGRTTPSVVGFTDKERLVGDIAKRQAVTNPERTVFAIKRLMGRKADAPEVARWKEHSPYQIVAGPNGDAYVEIEGRKYSPAEVSAMVLAKLKADAEAYLGETVTEAVITVPAYFNDSQRQSTKDAGRIAGLDVKRIINEPTAASLAYGFDKKANEKIAVFDLGGGTFDISILEVGDNVVEVRATNGDTFLGGEDFDQRVINYLVEEFRRENGIDLSRDRMALQRLKEAAEKAKKDLSTSMETEINLPFITADQTGPKHLMIKLSRAKLEKLVEDLVERTIEPCRKALSDAGLSASEVDEVVLVGGMTRMPLVQKKVADFFGKEPNRSMNPDEVVSMGAAIQGGILAGDVKDVLLLDVTPLSLGIETLGGVFTRLIERNTTIPTKKSQTFTTAADNQPSVSIHVMQGERPMASDNMTLGRFELTGIPAAPRGMPQIEVSFDIDANGIVNVSAKDLGTGKEQSIRITASSGLSEDEIQNLVKEAEAHADEDKKKKELIEARNQADSLIYTTEKSLSDLGDKLEADLKKEIEDKTAALKTAMEGSDVDAIKKATDELSQASHKLAEKLYAQQQAGAQGAAGAEAGAGDAGAKASQDEDVVDADYTEVKN

SEQ ID NO: 33626 - protein, 584 aa, Desulfovibrio desulfuricans subsp. desulfuricans str. G20
MKTGIAAFFPFMHWLPGVTARTLRADLLAGLTGAIIVLPQGVAFATLAGLPPEYGIYTAVVPAIIAALFGSSMHLVSGPTTAISLVIFSNVSTLAPAGTPDYICLVLSLTLMAGLIQLALGLARLGSVVNFVSHSVLTGFTTGAAILIASSQLGGFAGLSVPRSGFLPRDMATFVSMLPQASWHAVAIAAVTFVTALLVRRVDKRLPAMLIAMAAGGLLCLVIDGAANGVRMVGALHAGLPPFSVPVFDPERLGILMPGALAVAMLGLAEAVSIARSVGALSHQRIDNNREFIGQGLSNMVGCFFSAYASSGSFTRTGVNYATGARTPLSAIFAAVLLVGMVSVMGGLAAYLPLPAMAGVIMLVAWNLIDIEHIRRIMSAGSGEPLVFAVTLLSTLTVKLEFALIAGVALSLLIYLHRTMHPHFMPMAPVLIDGMRHIIRQENRNLPECPQLKILRLDGSLFFGAAEHVAEELENIVAANPGQNHILIVASGINFIDYSGCETIFEERKLLQAAGVRLYMCSANPGVRAAMERLQCGPIIPIYEDKAEAIATITPQLDMNRCAVCRLRVFHECAGLPGPEMTAE

SEQ ID NO: 33627 - protein, 474 aa, Desulfovibrio desulfuricans subsp. desulfuricans str. G20
MTSTFYVILAYMACMIGIGLWVAKRKIRQSEDFLLAGRQLGPAMMAGTLAAAEIGGGSTLGVAAKAYGEWGFSAGWYVVSAGIGIFLVSFVAPYLRRSMATTVPEILARRYGRTSHIITTFLSISALFFATAAQVIATSSVIHVVTGADLPMVIILSGCVVTAYTLMGGLMSVAFTDIVHIFFITVGMAVAMPIILHNSGGWDHLVATLPPSQMSLTNVGWKTIFGLILMYFMTFSTGQEAVQRYFAARNAKVAKMGSFMCSCLMALYGFIPAVIGLVALAHFPGIEPNSALPTAAQHFAPTIIAGVVLASVVAATMSSASGNMLAVSTLFTKDVFQKYIRPDATDKQLMTWSKGAILFVGMCAVGIALGNYSIISLLILAFTMRAAGPFAAFVFGLIYEKATVNAGLYSIILGSVAAIGWQQAGEPYGIMAIVFGALVSTVSFFAISKIEIAMGVAPAPLAITEEHRKASGEE

SEQ ID NO: 33628 - protein, 259 aa, Desulfovibrio desulfuricans subsp. desulfuricans str. G20
MRCIQRDHMIPFAGHTGTETFPVRTYDADSTGRAGIRAIADYFQEAASGHARTLGFPAERLRTEQLAWVLARLQITVNRFPPAGETVTAVTWPAAHERHMAYRCYELYTQDGELLAAGTSAWVTIHLADRSMVPLPDFIRDGYPQDNPPCRPFETRTLPRLREEAAGVRIRTRRADLDINGHVNNGHYLQWLLECMPCDRQNELRAVDISFRAECFADTEIVSARGALTGEHTVLHCIRTADDAKELCRARSRWAAPLG

SEQ ID NO: 33629 - protein, 307 aa, Desulfovibrio desulfuricans subsp. desulfuricans str. G20
MRSRSLYNRVQNTASWCKSNTFFPDFSFPASCGGWTPPPRWFTIKKTNPHHDSHGERMSDTGKNKLGVIVDTVRENDDTTSIFFRPEDDERFKAFRPGQFASIRVMTEEGWSEPHPFTISGAPGDTLRMTIKRNGRFTGEIIPALKAGVPIQCAGPFGAFCRDIEGEEQIVFVAGGVGITPFLSVLRHFRNTDAANSIVLFWCNKTYADAFAAQELEEIADTIDLTVVHVLSREHKPDLYEEEDKPRIRFEKGHFSRHMLERHIRSTTASFYLCGPGPMQEHVLDEMAAYGIDPAGVNKEQFVFTGK

SEQ ID NO: 33630 - protein, 271 aa, Desulfovibrio desulfuricans subsp. desulfuricans str. G20
MKFVKALVLLLVTVMAVPAFAGDIDLAKKSVLNDILKRGELRVGFDAGYPPFEMTDKSGNFVGFDIDLGKELAKSMGVKFVPVNTDFDGMIPSLLSGKFDVIISGMTLTQERNMKIGFSEPYLVMGQTVLVAAKHKGTVKSYKDLNDPKFIVVSRMGTTGEEATKKYLPKATYKSFDKEVDCAMEVVNGRADAFVYDLPVNEVFQAQQGKDKTYLLNEPFTFEPMAVGYKQGDPDFANFINHFLRQLKNDGRYERMYNKWLRSDAWQSQLK

SEQ ID NO: 33631 - protein, 271 aa, Desulfovibrio desulfuricans subsp. desulfuricans str. G20
MKRLLLIAVALGMIFSAATASAGKIEEIKDRGVLVAGVKDSVVPFGFVDENSKQLVGFDVDICRYIAGQLGVELELKTVTSATRIPMVTQGSVDIAAATMTHKHERDNVIDFSITYFMDGQKILVAKDSGINSVADLKGKKVATVKGSTSEKNIKAAQPDCRVLSFDEYPQAMLALKQGKASAVTTDSTILLGLKNSDPEPEKWVIAGDYISAEPYGLGLPENDSDFRDFVNKALNDMWRSGEYEKVYNKWFGPDSRYYLPLTWTMELWPN

SEQ ID NO: 33632 - protein, 260 aa, Desulfovibrio desulfuricans subsp. desulfuricans str. G20
MLEIKNLRVKIGDVEVLKGINLHINDGETFILFGPNGSGKTTLLMTLMGFGNYTVTGGQILFKGHDITHMPMYERARLGIGMSFQRPPTIHGLKTRHMVRMCGQGREVDVDGLARKVNFENFLERDINAGFSGGEIKRSELLQLMAQQPDLVLFDEPESGVDLENMALIGKTARQLLDGVPPASCSMKEHRARCKTAGLIITHTGYILEYVNADRGQVMYNGQLCCEARPRDILDHISKHGYEECLRCLTPTEGTIRETM

SEQ ID NO: 33633 - protein, 226 aa, Desulfovibrio desulfuricans subsp. desulfuricans str. G20
MLSAAIQFVSPLTQLHEGGSVPRIDCILLDRDGTVIVDKHYLSDPQGVELLPGAGEALAGACAEGRKLFIVTNQSGIGRGMFSENDYEACRMQLDAMLQSCGASVTASRHCPHAPDSSCICRKPETGLWQTLRDAYGLKAERCVMVGDKLADVGFGRNACLAASVLVLTGKGRAEAEKAGLKAEADMALREDGWVEVHKRSGVLPDVVACDVRAALDWVRTVLEEK

SEQ ID NO: 33634 - protein, 665 aa, Desulfovibrio desulfuricans subsp. desulfuricans str. G20
MNQFSRNLVLWAVISLLMVVLFNLFSQPPGPQAQMSYTEFLNKVTQGEVVQVTIQGEKLKGQTAEGQSFQTIAPNDPDLVNRLLEKGVQVKAEPKEEAPWYMTLLVSWFPMLLLIGVWIFFMRQMQGGGGKAMSFGRSRARMISHESAKVTFDDVAGVDEAKEELTEVVDFLSNPKKFTRLGGRIPKGVLLVGPPGTGKTLLARAVAGEAGVPFFSISGSDFVEMFVGVGASRVRDLFVQGKKNAPCLIFIDEIDAVGRQRGAGLGGGHDEREQTLNQLLVEMDGFESNEGVILIAATNRPDVLDPALLRPGRFDRQVVVPTPDLRGRKRILEVHSKRTPLARDVDMEMLAKGTPGFSGADLENLVNEAALQAAKMNKDQVNMLDFETAKDKLLMGKERRSLVMSDKEKRVTAYHEGGHALTARLLPGTDPVHKVSIIPRGRALGVTMQLPDEDRHGYSRTYLLNNLVVLLGGRLAEEVVFGEITTGAGNDIERATKMARKMVCEWGMSDAIGPMNIGEQGEEVFIGREWAHSRNYSEETARMVDAEVKRIIDEAREKARTLLQENLDTLHRIAEALLERETINADDLERLIEGRPLLPVPEITATHPEGDAENAGPEDSVAAAPAEHAGDEFLLESDEAARPAAKDGEDAPDGQEEDTTDRREK

SEQ ID NO: 33635 - protein, 370 aa, Desulfovibrio desulfuricans subsp. desulfuricans str. G20
MIVGILKEIKSEENRVSMTPAGAEVMVHHGHTVLVEKNAGTGSGFLDEAYTRAGAEIVETPAEIYARADMVMHVKEPLPSEYGLIREGQIVFTYLHLAADEKLTRALVDSKAVCIAYETIQKPDGSLPLLTPMSEVAGRMAIQQGAKYLEMTQGGHGVLLGGVPGVDPGTVVVIGGGVVGTNAAKMACGLGAKVYILDMNLDRLRHLSDIMPANCFPLMSSPATLRKLVREADVVVGAVLVAGAKAPRLVTREMIKTMKRGSVLVDVAIDQGGCFETSHPTTHKDPTFVVDDVVHYCVANMPGAVAKTSTLALTNATLPYAVTLADKGWKKAMQDSREIALGANVIDGEITYKGVAEAFDMPYAGVEKFL

SEQ ID NO: 33636 - protein, 322 aa, Desulfovibrio desulfuricans subsp. desulfuricans str. G20
MRITVLDGYTLNPGDLSWAEIEKLGEVTVHDRTHGQDIVKRGGQAQILLTNKVRLTAETLAMLPQLRFISVLATGYDVVDIAAAAARGIPVSNAPGYGVEAVAQHTMALLLELCRKTARHDTLVKQGAWSQAPDWCFWEGTQQQLTGKTMGIVGFGNSGRRVAVLADAFGMDVIAYAPRPKEAPALRNFRFAPLEELTAQADVISLHCPLTADNRHLINAQRIASMKDGALLLNTARGPLVDETALAQALVSGKLGGAGLDVLETEPPLPDNPLFRAPNCLITPHIAWATQTARQSLMSITARNIEMFKHGTPQNVVNAHML

SEQ ID NO: 33637 - protein, 507 aa, Desulfovibrio desulfuricans subsp. desulfuricans str. G20
MPFKPISQKFTDFVIVRDDSRCINCEVCVRQCSYEAHYWDDTRQRVSFDSSKCTGCHRCAAQCPTSCLTIRRNPSEFRENAFWTPAFIKHIYKQSDTGGILLSGSGSPADKPVYWDNLQLDASQVTNPSIDPLREPMELRTYLGAKPDIAAFEETAGTFRLKGEMPPQIRLEYPLMFAAMSFGSINFNLHKAMAQAATELGIVYNTGEGGLHPSLYGYGANTIVQVASGRFGVHKDYLNAGAAVEIKVGQGAKPGIGGHLPGEKIDEEVSRTRMVPLGSDAISPAPHHDIYSIEDLLQLIYAIKEATRYRVPVSVKIAAVHNAPAIASGIVRAGADIVVIDGFRGGTGAAPTMIRDNVGIPIELALAAVDNRLRDEGIRNHASLVVSGGMRCSADVVKAIALGADAVYIGTAALVAVGCTLCGRCYTGKCPWGIATNEARLKKRQNPDVAARRLANLIRAWGHEIQEMLGGMGLNSIESLRGNRDKLRGIGLNQVELDILGVKHAGR

SEQ ID NO: 33638 - protein, 602 aa, Desulfovibrio desulfuricans subsp. desulfuricans str. G20
MSTAQREQHTKKSEGRILFRRILGYFSSYKLHITIATLGMLSVAACTGAAAYLVKPALDDIFISKNETMLLLVPFAYIVIITIKGLGRYVQNYFMRYCGLMVLERLRNELYRKIICLPTRFYEENQVGMLMSRIINDVMLIRASLPSVVMIVRQVITMCCLIGVVFYQDWFLAIWAVLVLPLAAFPFIYFGRKLRKLSRRNQNKLSDISIFLQEIFSGIRVVKAFATEDKEAARFKQENNRLVKIAIKETVFSELSSPVMELIGAVGIGLVIWYGGKQVIDGVSTPGTFFSFVAGLVMLYDPVKSLNSANMDIQRALAGAERVFEILDSKDIVVEKDGTVPFSGSFEEIRFENLTFHYEGCPAPVLDNINLTVRQGERVAIVGPSGAGKTTFVNLIPRFYEQTEGRILLNGTDIREYTLATLRRNVAMVSQDSFLFNIPVMENIAYGMESTSEEAVYEAARAAYAHDFILQLKDGYQTVIGERGVKLSGGQKQRLTIARAILKDAPLLILDEATSALDSESERIVQKALENLMAHRTSIVIAHRLSTILGADRILVMEKGRIVSQGRHEDLLGSCPLYTRLYNMQFQTEHTTEDNGCALPQA

SEQ ID NO: 33639 - protein, 409 aa, Desulfovibrio desulfuricans subsp. desulfuricans str. G20
MRILVQKFGGTSVANLECMQQVKQKVLHARENGYKVIAVLSAMSGETNRLLNMAGQWSQCPDEAEVDALISTGEQVSVSLFAMLLQNEGIKARSVLGFQIPLKTNTAYSRARILDIRKDTLVELLEAHDVLAVAGFQGINDDNRITTLGRGGSDTSAVALAAALGCECEIYTDVDGVYTTDPNMCSAARKLDRISYDEMLEMASMGAKVLQIRSVEFAKKYKVPVRVRSTFTNDSGTLLTQEDSQMEAVMVSGIAYDKDQARITLRGVPDTPGVAASLFCPLADAGIVVDMIVQNPSLDGVTDMTFTVPRKDLTRALELVEKTRAEVGAKEVLHDLNVCKVSAIGVGMRNHSGVASKTFATLRRENINILMISTSEIKITCLIEEKYTELAVRTLHDAFGLDKDQSQAG

SEQ ID NO: 33640 - protein, 484 aa, Desulfovibrio desulfuricans subsp. desulfuricans str. G20
MTPAKGLIVVSNRLPVVLSRNEDGWGITTGAGGLVSAMAPVLRDRGGTWVGWTGASGEHEAESLLGEFSREAGYSLKPVRLEKEDVADFYYGFANEVIWPLFHDFQSLCNFFPKYWKSYLRVNELYARAVMDSGDPEAYVWVHDYHLMHVGEMLKSMGSRRRAGFFLHIPFPPMDNYLKLPWRRRLLSALLEYDLVGFQTYRDRRNFMQSVQVLLPHVKPQGRGPVIELLLDGRKVRLGAFPISIDYRSFVRTARSPAVSGRVNELKSAMDGRRMLLAVDRLDYSKGITFRLEAFREALEKYPGLRGNVTLMQIMVPSRQEVPRYNALKQEIERLVGEINGLFSRPGWNPVQYQYRSLGREELVAYYRAASMAIVTPLRDGMNLVAKEYCACNVNRRGVLLLSEFAGAAAQLQNGAVLVNPFDREGMAQSIKEALDMPAEEARRRMDRMRDVIRKNDIFRWVDMFLLAAFSRHLDDFPPTYARK

SEQ ID NO: 33641 - protein, 313 aa, Desulfovibrio desulfuricans subsp. desulfuricans str. G20
MHGDLKIITGTANPELASAICNHLGCHLTPTLCETFSDGEIRIEIGDNVRGDDVFIVQPTCAPVNDNLIQLSLMLDALKRASVGRVTAVVPYYGYARQDRKVSPRAPISARLMADLLEAAGMHRLVTVDLHAGQIQGFFNCPVDNLYAAPVILDYLRQTVTNDIVIVSPDAGGVERARAYAKRLGASLAIIDKRRDKPNQAEAMNVIGEVKGKTAIVVDDMIDTAGTMVAAGNVLLTKGAKEVMACTTHPVLSGPAIERLCESSFSQVVVTDTIPLGSKLQACSKLKVLSVAGLLAKAIHNIHTESSVSVLFV

SEQ ID NO: 33642 - protein, 562 aa, Desulfovibrio desulfuricans subsp. desulfuricans str. G20
MESSGARILLECLKKEGVDVIFGYPGGAVIDIYDELPRHDLRHVLVRHEQAAVHAADGYARASGRVGVCLVTSGPGATNTVTGIATAYCDSIPLVVLTGQVPRALIGNDAFQEVDIVGITRPCTKHNYLVKELSDLPRIIREAFYLARSGRPGPVLVDLPKDIMVARAEFQIPEEVKLRSYNPTYRPNLNQLRRAAELVLSARRPLLFAGGGVVGSDASEELGWLARTLQIPVTSSLMGLGSFPGDDPLFLGMLGMHGTFAANKAVNSCDVLIAAGARFDDRVTGKLSAFAAGAKIIHIDIDPTSIRKNVGVEVPVVGDCRMALAGMREILSARFEENIPVPRWTEWLATVHDWAQSHPLGYVPSEGIKPQQVVETVFGITRGECIVTTEVGQNQMWAAQFFKYRKPRTLLTSGGLGTMGYGFPAAIGAQMAFPGHLVIDFAGDGSIQMNIQELATAVCNKLPVKIIILNNGYLGMVRQWQELFYQRNYCSTCMEAQPDFVKLAEAYGAEGYRITAQADLEPVLRQALQSPAPAIVDVRVEREENVYPMVPAGAALDEMLLV

SEQ ID NO: 33643 - protein, 385 aa, Desulfovibrio desulfuricans subsp. desulfuricans str. G20
MKETGRTAGIKPFYAMDVLERAQELERQGADVIHLALGEPDFDVPEPVRQALVQAVEGGHTHYTGSMGMLELRQAIAKDYRRRYGVDVSPERIAVTSGTSPAMFMLFGALLQQGDEVIISDPHYACYPSFISFAGGVPVKVRVYEEDGFQYRLDAIKAKLTGRTRAIFINSPSNPTGNQLPADRMRRIASLGIPVISDEIYHGLEYGEKEHTILEFTDNAFVFNGFSKLYAMTGLRLGYVIAPDAWVPVLRKLCQNFFISPNSVSQHAGVAALTQCDADVARMRIIYDERRKFMIRRLREMGFGITVEPTGAFYVLANARFLSADSYALAFEILEQAHVGVTPGIDFGEGAEGYLRFSYASSLEKIHEAMNRLEQFVRSRTGCAC

SEQ ID NO: 33644 - protein, 427 aa, Desulfovibrio desulfuricans subsp. desulfuricans str. G20
MSNLVPPHGGKGLVCCLLEGAEKEAELKKAAGLKQIEISSRAKGDLIMMGTGGFSPLSGFMKKADWKSVCEKMTLADGTFWPVPVTLDVSKEEAASMKEGDEIALVRGGEVFATMKVEELYEMTDADKKWECELVFKGEGPDSEKFWDIAEEDHPGVKMVMAQKEFNVAGPVKVLSEGDFPTKFAGVYKRPAELRAELEERGWSNVAALQLRNPMHRSHEYLAKIAVEVCDGVVIHSLVGSLKPGDIPAEVRVKCIDTLVEKYFVKENVIQAGYPLDMRYAGPREGLLHATFRQNYGVSRMIIGRDHAGVGDFYGMFEAQTIFDKIPYAKEACPEPGKALLCEPLKIDWTFYCFKCDGMASLRTCPHSKEDRVLLSGTKLRKALSEGSDVPDHFGREEVLDILREYYGGLTEKVEVKMQRAASGSQM

SEQ ID NO: 33645 - protein, 555 aa, Desulfovibrio desulfuricans subsp. desulfuricans str. G20
MNLTEALLHALKERGAKEVYGIPGDFALPYFKIIESTGILPLVTLSHEPAVGFAADASARFRGGLGVAAVTYGAGALNMVNAIAQAYAEKSPVVVISGAPGTHEGGHGLLLHHQAKHLDSQYRMYKEVTCDQAVLDDPATAPETIARVLQSCIEHSRPVYLEIPRDLPAAPCAPVPAFAASGTDADAVDACARDVLQRVQSAALPMMMVGVEVRRYGIEDKVALLAERLGVPVVTSFMGRGLLASASCLEGTYLGMAGDETLSEAVESSDGLLLLGVIMSDTNFGVSGSQLDRRRVMHAEDRQVRVGYHVYHDIPLGALVDRLLALLDDGQEADMALSGCGGSSDDRALQGAGLAVNPRGFMADAADITPTDIAALLNDFFASHGAMPVASDIGDCLFTMLSVDAIPMVAPGYYASMGFGVPAGMGLQITTKERSLILVGDGAFQMTGMELGNCTRLGIDPIVLVFNNSSWEMLHVFQPETAYSNLGEWDFAAVADGLGGRGHRAATRAELARALTQAHAERGRFQLIDARLAPHSLSPTLARFVEGVRRFSSGQ

SEQ ID NO: 33646 - protein, 536 aa, Desulfovibrio desulfuricans subsp. desulfuricans str. G20
MENKRPIIAVVLSLFVLIGWSYLSEFMGWTPAPAPVEQNATAVQQKASEPVAQPVQTASAPAASSFAPTEGREVKVDTPLYTAVFQSQGGVLKHFRLKKYTESIEEGAPLVELVTPEAAGKAPMGLLLNGQPTWKLAAWQFEGDDLKLDGSGKGELVFVGEMDGVRFERTLSFDPETYLISEKVRLTDTAGVSRDVRLGMTLSTTSLSPEGGAYNLTRMAWYQDGFHQETSADDLRETGVKVDEGVNWGGVMCNYFMAVMAPAEGALPFKGVLEGGVYRSVVENSSLSIASGSSAEFGIGYYIGPKESDRLAAMPYHLDEALNYGWFTFLAKPLVSGLKFFYSYAGNYGVAIIILTILVKLLFWPLSQKSYKSMEQMKKLQPMVQKIKEKYGDDRQRMNQEVMELYKTYKVNPAGGCLPMLLQIPVFLGLYQGLLNAIELRHAPFIAHLPFTDIVWLADLSAKDPFYITPVVMGATMLLQQRLTPAPADPTQAKIMMFMPVVFTFMFLNFPAGLVVYWLVNNVLSIGQQWWMLRKS

SEQ ID NO: 33647 - protein, 400 aa, Desulfovibrio desulfuricans subsp. desulfuricans str. G20
MGKEIKKVVLAYSGGLDTSVILKWIAKTYDCEVVTLTADLGQEEDLDGVDEKALRTGATRAYVEDLREEFARDFIFPMMRACAIYEGRYLLGTSIARPLITRRLVEIAHAEGAQAVAHGATGKGNDQVRFELASAALDPSLKVIAPWREWDFRSRTDLLNFAAENDIPVISAGNRKLYSMDRNMLHCSFEGGELEDPWNEPGPGSYIMAVPVEQAPDEPEYITIDFEKGNAVAINGQAMSPAAIIKTLNTLGGKHGVGRLDMVENRFVGMKSRGVYETPGGTVLHAAHRDLEGICLDREALHLRDSLIPRYAAAVYNGFWYSPEREALQALVDKTQENVTGTVRVKLYKGNVVPVGRKSPYSLYRMDLATFEEDEVYNQADAAGFIRLNSLRIQGYGRRS

SEQ ID NO: 33648 - protein, 248 aa, Desulfovibrio desulfuricans subsp. desulfuricans str. G20
MNHGVIIVGFVGKVPHGAENRMENSLFLGRIPLFSGLSAQQLESMASIAVDRPVDKGQIIFVEGTRAEGLYIVLDGRVKIFKTAPDGREAVMHVFGAGEPFGEVAVFQNDVFPANAMAVEQSRVLFLPRRGIVDRIAQDPSLAMNMLAALSRKLRMFTRQVEALTLKEIPQRLAAYLLHLSVKKGHKDVIRLDVSKSLLAGVLGTARETLSRALAKLVETGAITMEGRTITITDREYLTALAEGHESL

SEQ ID NO: 33649 - protein, 149 aa, Desulfovibrio desulfuricans subsp. desulfuricans str. G20
MADACKYIRRRIWEGVGWRRVWLRKLLLTPAEKEDNSASPHFIGGFEMYAIIETGGKQFRVEEGCKIFVEKLAADAGSEIAIDKVLMLGGDKFAVGAPYVENAKVTAEVIEHGRGEKVITFRKWRRNDSRKKQGHRQDYTALKIKTITA

SEQ ID NO: 33650 - protein, 275 aa, Desulfovibrio desulfuricans subsp. desulfuricans str. G20
MRMAKIVALAVAMTMFVASAAFAGPVYDKIMQTKKVRVGIMTDSIPGAFYNEKGEWVGFDYDIATEVAKRMGVEIDRVAVNNQTRISFLQQGRIDISVANMTHTRERDKSIDFSITYFFDGQKVLAKKGQFTSLNDMVGKKIATMQGTTSELNLKAALKAAGDPDYDKNVISYQKESQCFQALQSGRVAGWSTDATILLGYASKTPGAYELVGDFLSDEPYGMGLPQDDSALRDAVNMAIQDMWRDGTYMEIYNKWYGPGTPFEMPMSDQIELWP

SEQ ID NO: 33651 - protein, 618 aa, Desulfovibrio desulfuricans subsp. desulfuricans str. G20
MCGIFGIISQLVPPSKRELETSCELLAHRGPDGYGYFIKGPVGFAHRRLSIIDIAQGSQPMSTQEGELTITYNGEIYNFRHIKASLVAKGYSFQTNSDTEVILAAYKEWGTECVQHLRGMFAFAIADHIRQTVFLARDPFGIKPLVYRESSLGFAFSSELPALVRLKKWPSVTVSPKAVSLFFRHQYIPAPYTIYNETQKLPPAHAMLVDFNGCIQQKWRYWTPAFHPSVTYSLQDAIKDAHNSVTESIDAHTLSDVPIGVFLSGGIDSTLVAARLAQRHSRSIPAFTIGYKESDFSELPYAQHAADKLGLKLYAQTLDEKALKFAPEILSHYGEPFGDSSVIPTWHVCKLASEHVPVCLSGDGADELFGGYQKYQIWSESTPWRQLQLAGSAIAKRKLRTAWWMLRRASRSFCDDKAFWLDHVQYYPPQGIRQLTHPDMHPYANAFAPAFDEPFLNIDKLGRFEYAQRMDLLSYLPDCLLAKVDLASMAHGLEVRPALLDKYVFQLAATLPTDVKLHPQKGGKVVLKELLLRQGFSEEFVYRPKQGFALPLRHWFISGQPANNMLCELVSSYKRELSEHLTVSDIERMLTAHSPACDYSGPLWLAFAFTCWVANTSK

SEQ ID NO: 33652 - protein, 273 aa, Desulfovibrio desulfuricans subsp. desulfuricans str. G20
MKRMLTAAVAAVLLLGLAAGAWADVRQELTRQSTIARAVDRGVLKVGFSTFVPWAMKDKQGEFIGFEVDVARRLAADLGLEVQFVPTKWSGIIPALLTGKFDVIIGGMSVKPDRNISVNFTIPYDYAGMAVMAHKGKAAGFSRLEDFDREDVVVVARIGTTAASVAKKYFPAAQVRLFDDEAQAVQELLNGRAHAMVSSAPLPAFTVLEHPDTLFMPVEGTFTREPVGFAVRKGDIDTLNVFNNWIRMVESEGWLKERKHYWFETKDWESRIK

SEQ ID NO: 33653 - protein, 396 aa, Desulfovibrio desulfuricans subsp. desulfuricans str. G20
MRTIYMDNNATTAVDPAVLDEMLPYLKDLYGNPSSMHTFGGQVGRQVAEARERVARALGAQPEEILFTSCGTESDNTAIMSALQAQPEKKHIITTRVEHPAVLNLVQHLEKKGYEATYLSVDEKGRLDLDELRGALRKDTAIVSVMYANNETGTIFPIKEIAAIVKEKGALFHTDAVQAVGKLHINVQEVPVDFLALSGHKLHAPKGVGALYVRRGTPYRPFLRGGHQERGRRAGTENVAGIIALGKACELASLNMETERTTVKALRDRLENGLLNAIPEAIINGDTDNRLPNTTNIAFKYVEGEAILLLMDGHGICASSGSACTSGSLEPSHVLRAMGVPFTYAHGSIRFSLSRFNTQADVDYVVDELPRIIARLREISPYRSGEDAQAKPACTC

SEQ ID NO: 33654 - protein, 372 aa, Desulfovibrio desulfuricans subsp. desulfuricans str. G20
MSLILTINPGSTSTKIAVFAAEEELFERTVEHPHDAFSGLAGVYGQLEARRHAVQTMLSRAGYADARFDIVVGRGGLLAPMHGGAWRVNQTMLDILESAAHGEHPCNLGAPLALAFARSHGAHRNVQAIIVDPVVTDELDPVARIGGLPELPRRSVFHALSQRAAARRAAAQLGIRYEDGRFLVGHFGGGISVGAHRHGRVVDVNNALEGEGPFSPERTGGLPVMPALELVRRGVYSFERMRSIVQREGGMWAHLGTNDLREVQRRMDAGDTAAAQIFDALAYNSAKALCALLPALTGAGQDVPSAPPVDAVVLTGGMARSGRFMQAVSDRLRYLGPVIVLPRLEEMQALAMGGLRVLRGEETPAEYGGGMS

SEQ ID NO: 33655 - protein, 307 aa, Desulfovibrio desulfuricans subsp. desulfuricans str. G20
MKMTCMEDLLAAAARTGTMPRVAVAASAQDVALLAALDAHARGIAEPVLVGDLEETRRIAGRAGVDISALESHHVPDKAGAVQHALALFRAGDVSMLMKGNVNTDVLLKGVLNKETGVPPAGILSHVAVFCLPGEHRLRLLTDAGVNIAPNLQRKAEIVRNALHVARSLGLERPRAAMLAATEKVMYPAMPATLDAQMVARMSAEGAFGDAVVSGPMALDLAVSPAAVARKGFEDPVAGNADVLVAPDIESGNVLYKTLTTLLDLPVAGIVAGSRIPLIVPSRGDSDRSKLYALALAAYMTRKECTG

SEQ ID NO: 33656 - protein, 719 aa, Desulfovibrio desulfuricans subsp. desulfuricans str. G20
MPDPGQMKWICKESNVSKNLYITATESKSGKSAIVLGMMQLLLRDVRKVAFFRPIINNTSKEVRDHDINLILTRFGLDIPYEKTYAYSLHEARELINNGQHATLLENILNKYKALEAEYDFVLCEGTDFLGKDAAFEFDLNADIAANLGCPVLVVANGLDKNSEEIIGSTQLTIDQLDEKSLDVVAAVVNRASVTPAEKDNIIKSLECKVNCANPLAVYVVPEEPTLGKPTMGDVKKWLGASVLYGHGRLDTLVDDYIIAAMQVGNFLDYLGQGTLIITPGDRSDIILASLASRLSSSYPDISGILLTGGLEPAANVHRLIEGWTGVPVPVLCAKEHTYLTTQILNDLYGKIDPEDDRKIATALGVFEQNVDTAEISNRIISRRSSRITPKMFEYNLIEQAKKHKMRIVLPEGAEERILRAADILVRRGVADLILLGNADEVGKKIGDLGLDLDGVTIIQPELAPNFEDYVQTYYEARKKKGISMEQARDIMSDPTYYGTMMVHKNDADGMVSGAINTTAHTIRPAFEFIKTKPTASIVSSVFLMCLKDRVHVFGDCAVNPNPSAEQLAEIALNSSDTARIFGIEPKVAMLSYSTGSSGKGADVEKVIEATRIAKERAPELALEGPLQYDAAIDADVARTKMPDSNVAGQATVFIFPDLNTGNNTYKAVQRAAGAVAIGPVLQGLNKPVNDLSRGCLVPDIVNTVAITAIQAQAEKGLR

SEQ ID NO: 33657 - protein, 402 aa, Desulfovibrio desulfuricans subsp. desulfuricans str. G20
MNVLVINAGSSSCKYQLINMESEGVLCAGLVERIGEATGKLAHKIAPDTDSEEKIVLEQPFPNHVEAMKKVVELITDPEKGVIKDKSEIYAIGHRVLLGGEEIKESVKIDEWAKGVIRDYIPLGPLHNPANLAGIEVAEELFPGVPSVGVFDTEFHQTMPAKAYLYPLPLELYEEMKIRRYGFHGTSHRYVTKKTAEFLGKPLDEVNIITCHLGNGCSMAAVKNGKCVDTTMGITPLEGLMMGTRCGDIDPAIVPFLMEKKGLTTAEADTLMNKQSGLKGVCGMNDMRDIHAAVEKGDEKAKLALDMFVYRIKKYIGAFYAALGRVDAVVFTAGIGENDDIVRAEVCENMDVFGIALDAEKNKIRSGEPRNIAAENSKVAVLVVPTNEELEIAQAAVNVLKG

SEQ ID NO: 33658 - protein, 545 aa, Desulfovibrio desulfuricans subsp. desulfuricans str. G20
MNEQSNKNSTPEADTKPSWFHLEVHPWVFFGSAGLIFLFVGITLVFQHFLGDVFQTMQSYMSTYTGWFFIATMNIVLLFVLLLTVSRYGDIRLGGPDAEPEFSTMAWFAMLFSAGMGIGLLFYGVAEPMFHYVANPLTEPGTTEAARKAMDITFLHWGLHPWAVYSVVALSLAFFSFNKGLPLSIRTAFYPVLGERIYGPVGNAIDIMATVATLFGVATSLGLGVKQVNAGLDHLWGIGQSTGIQVILIAAITAVATWSVVAGLDKGIRRLSEINIVLAGMLALFVLFLGPTLFILNATLENIGYYIQFLPQLSTWNETYEHTEWQHGWTIFYWAWWIAWSPFVGMFIARVSFGRTIREFIMGVMLVPTFITFLWITIFGNTALNIEMFGAGGIATAVQENLPVSLFVMLENFPLSSVTCFLGIVVVITFFVTSSDSGSMVIDIITSGGDPNPPVLSRLFWALLEGVVAAVLLMGGGLVALQTATITTGLPFAVILLGMCYSLHKGLKEYSGPQEFTLGIPKQQVRFRVKRKPVLDRTFGRRKFW

SEQ ID NO: 33659 - protein, 629 aa, Desulfovibrio desulfuricans subsp. desulfuricans str. G20
MCGIAGYCGACGVADTTEKECAGRLEALLAGIVHRGPDDAGITCAHNVAIGMRRLSIIDLAGGHQPMLSGDGRYALVFNGEIYNFRELRSELAEAGYSFATNSDSEVLLKGYMAWGRGVLDRLDGMFAFAVHDRHAGTVFLARDHLGIKPLYYIHLGGVFAFCSEPAPLLELPQVRRRLDHDALAAFLSFKYVPAPDTFIKDIKKLAAGHTLEYSPRGDMLRTERYWQLQGREGSSDAGELAERLTRAVDSQMVSDVPLGVFLSGGIDSGLLTWAAAGQGGEHFTGGYTVAFDETGRKKGLRAGGSFDESRLAALSAAHLGVPLSSTTLASPAQATLDDWIRRFQEPFANTSIPANFLLCQWVARHVKVALNGSGADELFGGYDRYYAVHPPAALRALHCAAPLLRRVADMLPVGGGKNSLVHRARRYLAGCALAPAQKHAGSIRLFTDTQLAAIAPGVVPATFVQDAFAGAPQGSLLYKATWTDMQTMLPDDYLTLVDRTSMAASLEVRVPFLARDFVQYAFSLPPAAKIAGWKKKTALRALAAKHLPEDIARQPKMGFESPVGRWFRDGLGEALCRQLAQSPLQNIISVRGVQALAQSHSAGQVDAAKPLLALYTLVRWMDMYRVEL

SEQ ID NO: 33660 - protein, 494 aa, Desulfovibrio desulfuricans subsp. desulfuricans str. G20
MSAPLMTAIPVVLYLAFSFAVALWARRKADSQATSQGVLEEYYIGGRTMGGFVLAMTIIASYTSASSFVGGPGVAYRLGLSWVLLAMIQVPTTFLTLGVLGKRFAIVARRTGSVTLTDYLRARYASNTVVNLCSLALLVFFMAAMLAQFIGGARLFQAVTGYPYVVGLALFGITVVLYTSVGGFRAVVVTDAVQGIVMVIAVVVVLLAVVDAGGGMAQCVATLKAIDPGLITPSGPDNAVPKPFILSFWVLVGLGVIGLPQTAQRCMGYKDARAMHNAMVIGTLLIGFMILCAHLAGTLGRAVRPDLPAGDLAIPTLIVDLLPPFWAGVFIAGPLAAIMSTVDSMLLLASAAIVKDLYVHYRLQGDASRLKPVTMKKMSLASTGVIGVLVFLAAVEPPDLLVWINLFAFGGLEAVFLWPIVLGLYWKKANAAGAVASIVTGVSVFISLTLLKPDMGGIHAIVPTTLAALAAFIAGACCGRAPDSRVVSVFWDER

SEQ ID NO: 33661 - protein, 461 aa, Desulfovibrio desulfuricans subsp. desulfuricans str. G20
MHAPVSSPRHPAKRFARTAALWLVVATLLHASPALAEDAPAMLSQQHGNILWTLIAAILVMLMQAGFAMVECGFTRAKNAGNILMKNFVDFAAGSLVFFLVGYAFMFGADAGGFIGTSGFALAHVDPATEGGMWDLTFWFFQSVFAATAATIVSGGIAERTRFASYIIVSVLVTGIIYPVSGHWAWGGLAGNAGWLEGLGFADFAGSTVVHSVGGWVALAGAIVVGPRAGKYGPDGSVRAIPGHNIPLAALGVFILWFGWFGFNPGSTTTADGTIGYIAVNTSLAACAGTVTAMLTAWIRFGKPDASITMNGALAGLVGITAGCYELSPSGAIIVGIICGFVVVLSIEFLDKILKIDDPVGAVSVHGVCGAIGTLMVGLLAHPSYGGSTGLVYGGDASLLMVQALGVAVVFAWAFGMGLVVFRIVAAVAGLRVSPEEELKGLDITEHGSESYNGFQIFTVE

SEQ ID NO: 33662 - protein, 308 aa, Desulfovibrio desulfuricans subsp. desulfuricans str. G20
MTHSSEHRCGWVALMGPPNAGKSTMMNSLLGQKVAIVTPKPQTTRNQIVGILTQPDAQVVFMDTPGIHQLRGKMNRLLLQAAWQSMDGADVIMVVLDSNLYVRKPDFLDNDIEPLIEVIRHEKRPVVVALNKVDMFADKSRMLPLLEKLAEMWPAAEIFPVSALNDDGLRQMLAFIKGHLPVADPVFPDDQVSTAPLRFMAAEIIREKLFLELRQELPYNSAVSVEKWEDLEEEGRVVIHAVIHVARKNHKGMVIGRQGQTLKKIGTDARKEIEALVDRKVFLDLWVRVTDDWMDNEQFMVEIGMGAR

SEQ ID NO: 33663 - protein, 390 aa, Desulfovibrio desulfuricans subsp. desulfuricans str. G20
MKISDRLMQVKPSATLAVNAKALELKAQGREIISLSVGEPDVPPPAHIGAAAKKAIDENFTRYTAVPGIPELRDAVAGYFRRFYGVDAAAEHTIVTNGGKQALYNLFQALLNPGDEVLIPAPYWVSYPAMVQLAGGTPVPVASGPETGFKTCVEELQRHMTPRTRVLLLNSPSNPTGACYTRHEIDTIAAWAIENGLFIISDEIYDQLVYAPASPAGLAPWWQSNPEQVCVVNGLAKSFSMTGWRVGYVLAHPDLIKALGKIQGQSTSNVCSIAQKAALAALTGPFDALDTLRESYARRRDIALDIISGWKNVVCPRPDGAFYLFPDVHRLYTDATPDSATLCTRLMESAGVALVPGAAFGDDRCVRISYAVSEQTLRDALSKISNVLFS

SEQ ID NO: 33664 - protein, 708 aa, Desulfovibrio desulfuricans subsp. desulfuricans str. G20
MLTRVFPFLGWFKGYTGESLRADLISGLTVALVLIPQSMAYAQLAGLPPYYGLYASFLPPLVAALFGSSRQLATGPVAVVSLMTSASLAPLATQGSEAYIAYAIMLALMVGLFQLALGVLRLGLVVNFLSHPVVNGFTNAAAIIIATSQLSKLFGVYVDKAEHHYETIIRVIESAMNFTHWPTLVMGVLAFAIMYLLKRYMPKVPNVLVAVALTTTISWGIGFQHDAKAPVTALKAPAASELIAAFNQKVNAIPAQGEKRAELGRKLEEAKGMADDNAHLELEYRIKEVGLAMDRLKGGIHNDRAALRDMLFDGVVMADGSMLFYQQGQTPDGMQTDGRVWRLKVGNRPLDVNALPMMGGGAVVGTVPSGLPTLSIPTLDISVMLQLLPYAAIISLLGFMEAISIAKAMAAKTGQRLDPNQELVGQGLANILGAVGKSYPASGSFSRSAVNLASGAVSGLSSVFTSMAVVIVLLFFTPLLYHLPQSVLAAVIMMAVIGLINAQGFRHAWKAQWYDGAISIVSFLCTLAFAPHLDKGIFVGVVLSLGVFLYKSMRPRVANLSRDENLDMRDAEARGLRQCEYMAVVRFDGPLFFANASFLEDQIMERMEAMPRLRHILIVCNGINDIDASGEEALGLLIDRVRSAGIDLSFSGMNEAVTAVLKRTHVWERIGEDHIYATMDAALCEIHEKAHKNGAEDNCPLTTYCALT

SEQ ID NO: 33665 - protein, 632 aa, Desulfovibrio desulfuricans subsp. desulfuricans str. G20
MCGIAGYIGRRCLPDDAVRRCHAAMRHRGPDGSGTFRRCTADGRHVLLLHARLSILDPDPRSGQPMQRGGGVLAFNGELYNFSEVRERLERGGLAFDTTGDTEVLLRALDPQGRSLLCGGHAAEDLLHGMAGALDACEGMWAFAYFDASRGTLVLGRDRFGEKPLYYLRDDDGGLYFGSEPKLLAALTGRPLRPDTEHLRRYLVNGYKSLYKTRQTFFAGLRQVPAGTMLAADAGGLRGLCYWERPHAAHDPVQEDMSFADAVRGTRERLIRSVELRLRADVPLAFCMSGGIDSNSLICIARRVFGYDVHGFTVMNTDARYEERECVEHVVRELGLRHTSVSPSVAGFLDGLRTLVRAHDAPVLTISYYVHWLLMQRIRQQGYAISISGTAADELFTGYYDHHNLYLAAMYGSGALYDKALENWRRHVAPVVRNPYLQDPEVFVHAPQERGHIYLHNDRFAGALRQPFDEPFTEHAYHAVPLRNRMLNELFHEAVPVILHEDDLNAMYHSVENRSPFLDRDLFDFSLRIPVRHLVRDGMAKAVLREAMRGIVPDMILDNRRKVGFNAPVLDFLDVRDSAVRAQVLADSPVWDFVRRDAVAQLLDGRSLGNSESKFLFNILCCKMFLEDCADA

SEQ ID NO: 33666 - protein, 305 aa, Desulfovibrio desulfuricans subsp. desulfuricans str. G20
MKIAITTSSFARFSEAPLQLLRQEHIDYVLNPLGRKLTENETIDLLQDCVAVAAGTEPLTARVMDALPGLKVISRCGTGMDNVDMEAARARGIAVRNTPDGPTQAVAELTLGLALDLMRQVSRMDRELRSGVWKKRMGNLLGGKRLGIVGMGRIGRAVADIFTPLGVQVAFNDPVSCCGDYPCMPVEELLGWADILSLHCSMTGGECSLFTAEHLRRMKRGSWVINVARGGLIDEQALYEALADGHLAGAAVDVFGNEPYTGPLSSLDNVILTPHIGSYAKEARIRMETDTIANLIDALRAAGVK

SEQ ID NO: 33667 - protein, 504 aa, Pericallis cruenta
MSILTLICTFITGLMFYGLVNLLSRRASRLPPGPTPWPIIGNLMHLGKLPHHSLADLAKKYGPLIHVRLGSVDVVVASSASVAGQFLKVHDANFANRPPNSGAKHMAYNYHDMVFAPYGPRWRMLRKMCSMHLFSAKALTDFRQVRQEEVTILTRVLARTGQSAVKLDQQLNVCFANTLSRMMLDRRVFGDGDPKADDYKDMVVELMTLAGQFNIGDYIPWLDLLDLQGIVKRMKKVHSQFDSFLDTIIDEHTIGTGRHVDMLSTMISLKDNADGEGGKLSFIEIKALLLNLFSAGTDTSSSTVEWGIAELIRHPQLMKQAQEEMDIVVGKNRLVTEMDISQLTFLQAIVKETFRLHPATPLSLPRIASESCEVKGYHVPKGSILFVNVWAIARQSELWTDPLEFRPGRFLIPGEKPNVEVKPNDFEIVPFGGGRRICAGMSLGLRMVNLLIATLVQAFDWELANGLEPEKLNMEEVFGISLQRVQPLLVHPRPRLARHVYGTG

SEQ ID NO: 33668 - protein, 647 aa, Psychrobacter sp. St1
MGKVIGIDLGTTNSCVAVMEGDKVKVIENAEGTRTTPSIVAYKNDEILVVQSAKRQAVTNPNNTLFAIKRLIGRRFDDKVVQKDIGMVPYKIVKADNGDAWVEINGKKLAPPQVSAEILKKMKKTAEDYLGETVTEAVVTVPAYFNDSQRQATKDAGKIAGLDVKRIINEPTAAALAYGMDKKQGDSTVAVYDLGGGTFDVSIIEIADVDGEQQFEVLATNGDTFLGGEDFDSALIDYLVDEFKKDQDVNLKGDSLAMQRLKEAAEKAKIELSSAQSTEVNLPYITADSNGPKHLVVTISRSKLESLTEELVQRTMGPCKIALEDAGIKIGDIDDVILVGGQTRMPLVQQKVQEFFGQEPRKDVNPDEAVAAGAAIQGAVLSGEKTDVLLLDVTPLTLGIETMGGVMTPVIEKNTMIPTKKSQVFSTAEDNQPAVTIQVYQGERKIANQNKQLGRFDLTDIPPAPRGLPQIEVTFDINADGIMNISATDKGTGKAQSIQIKADSGLTDEEIEQMVRDAEANAAEDEKFANLAQVRNEADGRIHAVQKALKDAEDKVTAEEKSTVETAISELEAVMKEDDHDDIKAKLEALDNAFLPVSQKIYADAGAGSEGMDPSQFQQGADNAADSNQADDDVADAEFTEVDEDKK

SEQ ID NO: 33669 - protein, 417 aa, Thiomicrospira crunogena XCL-2
MCQYCNCDQESSELDYQFNPAKGRREFILDSLATAGGLAAAMSLPSQAFANMTPPEDEVVRIGYLPITDASALLVAHAMGFFEDEGLKAEKPTLIRGWSPLIEGFAAHKFNLVHFLKPIPIWMRYNNNFPVKITGWAHTNGSGLVVGRHTGVNSFEELGGMQIAVPYWYSMHNIVLQMALKNAGLEPVIQDQTDPLKPNQVNLQIMPPPDMPPALAAKKIDAYIVAEPFNAAGEVLAGAKMLRFTGDIWQNHPCCVVCMHDNDVDKRPEWSQKVMNAVVRGALYAQENKEEVAKMLSREGKRYLPMKAKVVLKAMTDYSPAHYEDPKAIKHPDWDVGRIDFNPYPYPSATKFIVDQLKETLVTGDKTFLNNLDTDFVTKDLVNYDYVKNAMDKYDVWDKVRGVNMDDPTHREEVFKL

SEQ ID NO: 33670 - protein, 547 aa, Thiomicrospira crunogena XCL-2
MKASNLFVQCLENEQVEYVFGIPGEENMDMMDALLDSDIEFITCRHEQGAAFMADVYGRLTGKAGVCLSTLGPGATNLVTGVADANMDNSPVVAIAGQAATTRLHKESHQVVDLVNLFKPISKYATQILEPETIPEVIRKAFKLAQAEKPGAAFIDFPENVSEMLTPEKPLPVIQSRLSLADHKLIEKAASIIQQAKKPLILVGNGAVRANASRQLEAFSKHYQIPLVNTFMAKGAVPHYKNPLSVGTTGLQKGDYENGGFAESDLVICIGFDMVEYHPHLWNPNREHTIIHIDTCPAEVDYSYIPDVELIGNIGRNLSALMEKLPHKEYEPIPFPLREAMIQEMERCSDSDAWPMKPQKIIWDLRTAMNREDIAICDVGAHKMWMARFFRSELPNTCIISNGFASMGIAVPGAIGAKLAFPEKAIVAVTGDAGFMMNSQEIETALRCNTPIVILIWNDNQYGLINWKQKRRYGRSAYIDFQNPDFVKYAESFGATGVRINSANELLPALKTALKANTVTIIDCPVDYSENDRLTELLGNVLSEIES

SEQ ID NO: 33671 - protein, 104 aa, Thiomicrospira crunogena XCL-2
MYAVIKTGGKQYRVREGQILRVESLGANEGDKVEFDQVMMVGEGADVKLGAPLVEGAKVAATVTANGRGKKVTIIKFRRRKNRSRTKQGHRQNYTEVEITGISA

SEQ ID NO: 33672 - protein, 346 aa, Thiomicrospira crunogena XCL-2
MQFVDEANIRVEAGRGGNGVASFRREKYIPFGGPNGGDGGDGGSIYLIADRNINTLIDFRYTRDYKAQNGQAGMGQQKTGRAGQDLIIPVPEGTIVRDLDTQEMIGDLVEHGQKLLVAQGGRHGLGNVHFKSSTNRTPRQCTPGEPGDERNLGLELSVLADVGLLGMPNAGKSSLITAVSAARPKVANYPFTTLYPNLGVVRVSPESSFVIADIPGLIEGASEGAGLGVQFLKHLSRTGLLLHVVDIAPMDGVDPVESVHVIEKELEKYSDALAGKERWLVLNKTDLLLEEEASELCDQIVERLNWTGPVFAISAVNRVGTDDLVKEVAYGLEQNRLKAQEESVEE

SEQ ID NO: 33673 - protein, 178 aa, Thiomicrospira crunogena XCL-2
MKIIVLDRDGVINEDSDAYIKHPDEWHPVEGSLEAIAKLKRAGWTVAVATNQSGVRRGYYSRETLHAMHMKLVALLAEHDVTVDWINYSPYIAEDQSPCRKPSVGMLQAIENRFQCSLVGQPMIGDTVADIAVAKAKGMTPILVKTGKGERTLAKQDPMLQGVPVYDNLLAAVEALLQ

SEQ ID NO: 33674 - protein, 321 aa, Thiomicrospira crunogena XCL-2
MAYKNVRLFAGNANVSLAESISSSIEIPLGKADVGRFSDGEIMVQINESVRGKDVYVLQPTCTPEPAVNLMELLVMIDALKRASAKRITAVVPYYGFARQDRRPHSARVPITARLAADMITVAGADRVITVDLHADQIQGFFDIPVDNIYGSPTLVADMRASGHIAEDNMMVVSPDMGGVVRARAVAKALGCEMAIIDKRRPKANVAQIMNIIGDVSGRDCILVDDMVDTAGTLCKAAEALKEHGANSVTAYVVHAVLSGPAVDNINKSCLTELVVTDTIPLSEAGLASEKIRRVSVASVLGETIRRVHQEESVSELMPIR

SEQ ID NO: 33675 - protein, 311 aa, Thiomicrospira crunogena XCL-2
MDTLTIAKRVFDIEAEAVYHLKTLLDENFSQSVDAILATEGRVVICGMGKSGLIGKKIMATLASTGTPCFFMHPGEAFHGDLGMVSPKDVFIALSNSGETEEVIKLIPFLKDNGNTIISMTGRPDSTLAKNSNFHLNIAVPQEACPHQLAPTSSTTATLVMGDALAVALMEKRDFQPQDFARFHPGGSLGRKLLTRVKHEMKSENLPFVEKSASMKDVIHTMTDGRLGLCIVNQGEGIITDGDLRRQMEEDPANFMQKTAGDIMGTHPKMIDSEARLSDAEEMMTQKKITSLLVSDQNQVVGVIQIYDLNN

SEQ ID NO: 33676 - protein, 261 aa, Thiomicrospira crunogena XCL-2
MLLKVENLHAQVAEDESKQILKGLNLEVKPGEVHAIMGPNGAGKSTLSSVLAGREDYEVTEGSAIFNGEDLLELDPEDRARKGVFLAFQYPVEIPGVSNKLFMQTAVNAIREENGLPVLDMFDFDEYAQAKIDLLNMRKDLLDRSVNVGFSGGEKKRNDIFQMALLEPKLCILDETDSGLDIDAMKVVANGVNSLRTKDRSFIVVTHYQRLLDYIKPDYVHVLYDGKIIKSGGFELVHELEEKGYDDIIQAHDDTTQTNSK

SEQ ID NO: 33677 - protein, 602 aa, Thiomicrospira crunogena XCL-2
MCGICGEIYWDGQMASETKLVPMLAELEKRGPDDGGTWVQNHVGLGHRRLSIIDLSDGGHQPMLDDEISLVFNGCIYNYETLSAELIELGHEFRSHSDTEVILKAYRQWGMECVSRFEGMFAFAIWDDHQHQLLLARDRFGIKPLYYAPVEGGVRFASNTQALLASGGINTDIDPVGLHHQFTLHAVVPAPHTILKGIRKLEPGHWMIVNPDGQMYKKSYWHLEAKRPTADNAPQTEKEWIDAIHESLKQAVHKRLTAADVPVGVLLSGGLDSSLIVALLAEAGVEDIRTFSIGFEDVPEEKGSEFEYSDLVVEQYQTAHQKYLIPNETVLPRLTEAVDAMAEPMFGQDAIAFYLLSEKVSEDVKVVMSGQGADEVFAGYFWYPMMAKAAESLKDASRPVDAFAPYYFDRSHEEWLEMIEDEFHVYDVTSELINDRLSDKGADSYLDQVLRLDTTTLIVDDPVKRVDNMTMAWGLEARVPFLDHHLVELAMSAPTDLKLKDFKYILKKIARGIVPNEVIDRPKGYFPMPALKYVRGPFYEMMKSILTSPQAKARGIFKPAYIQKLLDHPEADESFTAIKGSKLWHAALLELWLQRHVDPYVQ

SEQ ID NO: 33678 - protein, 115 aa, Thiomicrospira crunogena XCL-2
MDNQEKETLDRIHEQVTNNPVVIYMKGTPQMPSCGFSSRTAQAMVETGEKFAFVNVLADPLIFEYLPKYQDWPTFPQVYIGGELQGGCDITLELAESGELKTLMAKANEAVSEEA

SEQ ID NO: 33679 - protein, 409 aa, Thiomicrospira crunogena XCL-2
MNDKSLAKDKIKILLLEGLHQSAVEVFNENGYNNIEYVKGSLSDKDLKEKIADVHFVGIRSRTNLTEDVFKVAKKLVGVGCFCIGTNQVDLKAAQKRGIPVFNAPFSNTRSVAELVLGEILLLLRDIPAKNAKVHRGEWDKSATGSVEARGKTLGIVGYGHIGIQLSIMAENIGMKVRFHDIETKLPLSNASQVKSLEELLKISDIVSLHVPETEETQNMMGAEQFALMKKGSIFINAARGTVVDVNALADAIKSGHLSGAAVDVFPVEPKSNNEEFVSPLRGLDNVILTPHIGGSTEEAQENIGQEVATKLVRYSDTGTTLSAKNFPEVSLPEHKDRSRLLHIHKNQPGIMTKINEAFAHKGINVAAQYLQTNAEIGYVVIDINSEDREAGLKELKAIEGTIRTRVLH

SEQ ID NO: 33680 - protein, 567 aa, Thiomicrospira crunogena XCL-2
MELTGAQILVHYLEDEGVEHIWGYPGGAALPIYDALDTDAKKLKHVLVRHEQAAVHAADGFSRSTGLPGVALVTSGPGATNTVTGIATAYMDSIPLIVITGQVATNMIGLDAFQEIDTVGITRPIVKHNFLVKDVNDLAMTLKKAFYIATTGRPGPVVVDIPKDVQNAKSSYEYPQEVSLRSYVPVTKGHSGQIKKAIDMMLAAKKPIIYTGGGVVLGGASEALTDLARQLGYPVTNTLMGLGAYPAEDKQFVGMLGMHGTYEANLTMHNSDLIIAIGARFDDRVTGNLEKFCPDAKVIHVDIDPASISKNVVVDIPIVGPVKQVLNEMLSLLAKTKKRPDQEALASWWEQIESWRSTNCLRYEQLGHKIKPQAAMETVWQVTNGDAYVTSDVGQHQMFAAQYYKFNKPRRWINSGGLGTMGFGLPAAMGVQAAFPDATVVCVTGEGSIQMNIQELSTCLQYGLPIKVLCLNNGFLGMVRQWQEFFYDRRYSMSYMDSLPDFVKLAEAYGHVGIRIDNPETMKEQLEEAFSDKYKDRFVFIDVITDQQENVYPMIPAGAGLDEMILV

SEQ ID NO: 33681 - protein, 314 aa, Thiomicrospira crunogena XCL-2
MTDETKIPEVTSTNTSYHAGFVAVIGRPNVGKSTIMNGLLGQKLSITSPKPQTTRHRIHGIHTTEHFQIVFVDTPGMHLGASKSINRYMNRAANSAFGDVDAILFVVEAGRWSKEDQAVADKCQNLEVPVIVLVNKIDKFKKKEELFPFLQKVGEKVPFEALIPVSAYTKSGFDAIEAEILKHIPEQPAIFPEDYITDRSTRFLASEIVREKLMRTLGDEVPYGATVEIEQFKFDEEENRWHINALILVERPGQKQIVIGKKGEQIKQMGIQARKDLMHLLDSRVHLELWVKVKENWSDDERALASLGYTEDHR

SEQ ID NO: 33682 - protein, 638 aa, Thiomicrospira crunogena XCL-2
MGKIIGIDLGTTNSCVAVMEGKETKVIPNAEGARTTPSIVAYADDGEVLVGDSAKRQAVTNPENTLFAIKRLIGRRADDAVVEKDKDMVSYKIIAADNGDAWVQVGDKKLSPQEVSARTLMKMKKTAEDYLGHEVTEAVITVPAYFNDSQRQATKDAGKIAGLEVKRIINEPTAAALAYGMDKVKADSKIAVYDLGGGTFDISIIEVADLDGEKQVEVLSTNGDTFLGGEDFDNVIVDYIATEFKKDQNVDLKLDKLALQRVREAAEKAKIELSSREQTDINLPYVTADATGPKHLNMKITRAKFESLIEGLVQRSIDPCKTALKDAGLSASEIDDVILVGGSTRVPMVQAAVKEFFGKEPRKDVNPDEAVAMGAAIQGGVLSGDVNDVLLLDVTPLSLGIETMGGVMTKLIEKNTTIPTRKSQTFSTAEDNQSAVTIHVLQGEREVSSGNKSLGQFNLDEIPPAPRGTPQIEVTFDIDANGILNVSAKDKATNKEQHITIQASSGLSEDEIEAMVKDAEAHAAEDAKLKELVEARNQADAMVHGTKKLLDEQGEGVEAAEKEAIEKAIADLEEAIKGDDKAVIDEKTQALATASQKLAEKAYAQPGAEAGAEQQGSANNADDDIVDAEFEEVNDDKK

SEQ ID NO: 33683 - protein, 402 aa, Thiomicrospira crunogena XCL-2
MSQIKKVVLAYSGGLDTSIIAKWLQEEYQCEVVTFTADIGQGEEVAPARAKAEAMGIKEIYIEDLREEFARDFVFPMMRANAIYEGEYRLGTSIARPLISKRLVEIAQETGADAISHGATGKGNDQVRFELNAYALMPDVKVIAPWREWDLLSREKLMAYAEEHNIAIEKKKGKKSPYSMDANLLHISYEGGIIEDPANEPEEDMWLWSVSPENAPDQPTYIDISYEKGDIVAINGEAMSPATVMEYLNKVGGENGIGRDDIVENRFVGMKARGCYETPAGTIMLKAHRAIESLTLDRNAAHLKDELMPKYAEMIYNGFWFSPEREMLQALIDQSQDYVSGDVRLKLYKGNVIVVGRTSENSLFDEDIATFEDDGGAYNHKDAEGFIKLNALRLRTAAKKRR

SEQ ID NO: 33684 - protein, 559 aa, Thiomicrospira crunogena XCL-2
MSQNTTVAVDKPTNFIRNIIDEDLATHKYNTVHTRFPPEPNGYLHIGHAKSICLNFGLAEDYHGGCNLRFDDTNPAKEDVEYVEAIKQDVAWLGFKWAGEPCYSSNYFQQFHDYAVELISKGLAYVCFLNAEETRAYRGTLTEPGKDSPYRETSVEENLALFAKMKNGEFKEGECVLRAKIDMASSFMCMRDPTLYRVRYAEHHQTGNAWCIYPMYDFAHCISDAIEGVTHSLCTLEFQDNRRLYDWVLEHLNDFNKPDRPFQYEFSRLNLEYTVMSKRKLHQLVEDQLVLGWNDPRMPTISGLRRRGVTPAAIRDFADRIGISKVDSMTEMGILEAAIRDDLNVVAPRTMGVIDPIKLVIENYPENEVESINAPVHPQNEAMGKREIFFGKELYIDRADFVEEAPNRKWQRLALDKEVRLRNAYIVKAERVETDAQGNVTTVYCSYDPDTLGKNPADGRKVKGVIHFVEASKALPAEFRLYDRLFTVPNPAKEDDFEAVINPDSLIIKQGFVEPSMQSAEKETAYQFEREGYFCRDSESDEVLIFNKTVGLRDTWSQK

SEQ ID NO: 33685 - protein, 405 aa, Thiomicrospira crunogena XCL-2
MEQLTASLDVMFILLGAILVLFMHAGFAFLEVGTVQHKNQVNALVKIMTDLGVSTVAYFFIGYGVAYGVFLGFNLDGQLTQAMTEKSGYELVKFFFLMTFAAAIPAIVSGGIAERARFYPVLLATFLTVAFIYPFFEGMAWNGNFGMQSWLEASYGAPFHDFAGSIVVHAVGGWIALAAIIVLGSRTGRYDSNGNMRHVYPPSSIPFLALGAWILSVGWFGFNVMSAQAIEGIQGLVAMNSLMAMVGGIIAATFIGDKDPGFIHNGPLAGLVAICAGSDVVSPLGALVIGLVAGALFVKAFTWTQKSLKIDDVLGVWPLHGLCGVWGAIAVGIFGSTALGGLGGVSMMSQILGTLAGVGVALIGGFLVYILVDKLMGLRMSDEDQYEGADLSIHKIHANPPREEF

SEQ ID NO: 33686 - protein, 68 aa, Thiomicrospira crunogena XCL-2
MSNTTGTVKWFNESKGFGFIEQESGPDVFAHFSAIVSSGFKTLAEGQKVEFTVTDGPKGPQAENIVAL

SEQ ID NO: 33687 - protein, 425 aa, Thiomicrospira crunogena XCL-2
MTQSKTKLGFNGTWSMAVGGMIGGGIFSTLGVVVAIAGAWAWLSFLAAGLIALAAGYSYVKLATFYNEGGGAFTFLRKIHADGFAGSLAWVLIIGYVLTNAVYAFTFGQYLGNLLELNSWFPRASAVAIIALFIALNLKGVAEASGVEIFLVWFKLVVLVGLSAWGLSHWDIPMLSQGVSVPDAGLGAALFGAAAVFMAYEGFQLLTYDYNDIETPKKILPRAVLSAIIVVILVYILVALGTAMLIGADEIVKHEEVALAIAGEKAFGITGLVVVTIAAAFSTGSAINATLFATARLAHKVAKAHELPADMGHKNAAGIPDRALIWLGSLAALLAAIGNLTSLVEAASLAFLFTFTVVCGLAFKQDAGSRWITGFGALSAAAASIALIVQLIQTDLSALLFLLALIAIAVFGRPTILRYFKNSRF

SEQ ID NO: 33688 - protein, 382 aa, Thiomicrospira crunogena XCL-2
MKNVNIGFIPLTDSAPLIIAKEQGFFEKQGLNVHLQREVSWSNIRDKLIFGEVDAAHMLAPMLMATTLGVGGLKKHLVTAYSFGLNGNAVGVSNTLFDEMKQHDPDLLLNPRGSAYALKKMIQKRSSDQQEPLRFAVVFPFSMHHYLLRHWLKSAGVDADRDVQIVVVPPSSVVKALEEKLIDGYCVGEPWSTHAVKCGTAVTLITGYEIWNNAPEKVLGVTKQWADDNKTTHQKLITALYQASEWIDKIEHKEQLIKYLAQPGYVGAPEASLRNAIDGDIYHPDTQFCRKVANFSVPFKYLANFPWQSHAEWILQQMKESNQIDGNIDVQKTAASIYLTDLYRETISSQGVVLPNVNRKKEGFHTQPWVLEGVELGADCLI

SEQ ID NO: 33689 - protein, 461 aa, Thiomicrospira crunogena XCL-2
MTNLKTGRRSFIKKTTLAIASAMAFSSGSTYALGYPEKEDLKFGFIKLTDMAPLAIAYEKRFFEDEGLYVQLEAQANWKVLLDRVIDGQLDGAHMLAGQPIAATIGYGTKSNVITPISMDLNGNAITVSNKTWAAMKPNVEMENGKPKHPISASALKPVVESYKNAGKAFKMGMVFPVSTHNYELRYWLAAGGLKPGYYAPHKGDTAGTLNADVLLSVTPPPQMPSTMEAGTIEGYCVGEPWNQQAVFKGIGVPVISDNSIQTNNPEKVFGLREDFYEQYPNTTIRIVKAMIRAAKWLDEKNNKNRPEAVKILSKSSYVGADYKVIANSMTGTFEYEKGDKRSEPDFNVFFRYNATYPYYSDAIWYMTQMRRWGQISEYKPDTWYQDMAKKVYRPDIYKKAVEALIEDGVMKKSDFDEAVFTTNGYRGVQDDFMDGIPYDGSKPNAYIDSLKIGLKGKEKL

SEQ ID NO: 33690 - protein, 396 aa, Thiomicrospira crunogena XCL-2
MTGDFQRIKRLPPYVFNIVGDLKAEARRRGEDIIDFGMGNPDQDTPKHIVDKLIEVVQREGTHRYSVSQGIPRLRKAICNWYKTRYDVDLDMDTEAVVTIGSKEGLAHLALATVEKGDTVLVPNPAYPIHPYGFVIAGADIRHVRMTPDVDFFEELEKAIKESWPTPKMLVLNFPGNPTTQTVDLEFFEKVIAIAKEHDIWVIHDLAYADIVFDGYKAPSILQVEGAKDIAVEFYTLSKSYNMPGWRVGFMVGNPTLVHALKRMKSYLDYGTFTPIQVAAIAALEGPQECVQEICEMYKVRRDVLCQGLNSIGWEVEPPKATMFVWAPIPEAYRELGSLEFSKKLLTEAKVAVSPGIGFGDYGDDYVRFGLIENEHRTRQAIRGIRDMFRKDGLIG

SEQ ID NO: 33691 - protein, 687 aa, Thiomicrospira crunogena XCL-2
MSVSKNALKSTLLLPVFIPAVSVIFLMIIGTLSNPELAGEFFADVLSSITQNFGWFYMLAVAIFLIFIFSIAISPWGKIKLGPDHIEADYSFTAWFAMLFSAGYGIALLFFGVAEPVLHYASPPEGSPETVAAAKQAMQIAFFHWGFHIWAIYGLVGLTLAYFAFRHNLPLSMRSTLFPLIGDRIYGPIGHTVDTFAILGTVFGLATTLGLSVTQINAGIHYLIPSIPISTTVQILALAIITGLAIFSVVAGMDKGIRRLSLLNITLAIALMAFVFLSGPSVFILEAFLQNTGSYLSNIVERTFNLQAYSSSDWIGHWTLFIFGWTIAWAPFVGLFIAKISRGRTIRQFVFGVMFVPTIFTFFWFSVFGDTALHLIMQEGYHGFIQAVQNDHAIALFKLFEHLPLSGLLSTLAVILIITFFVTSADSGALVVDSLASGGSITTPVWQRIFWATLLGTVAAVLLLAGGLKALQTASIVSALPFAVIMLIATVGMWRALIIESHREVSLKSAMRNSGKTLTQHGANWKDRLAKLVEYPDKEEVSSFIKKVAHESMKTVQIELKRRGWESQVYMDDSPLRTRIEVIKSEQMAFIYEVRLCEFIIPGFAFPERGSEESKEEHYYYRAEVFLRDGGEAYDVYGYSRHNMITDILDHFERYLHKLHHSAELLPWDIEQHEKQLQPNQNLAEKP

SEQ ID NO: 33692 - protein, 417 aa, Thiomicrospira crunogena XCL-2
MEGNFLQLSYALDTFYFLMSAVLVMWMAAGFAMLEAGLVRSKNTVEILTKNALLYSVACSMYLIVGYNVMYPGDPISAYLPNLSFFLGADNTVEAVIAGGDGAPYYSGMSDFIFQAVFAAATMSIVSGAIAERMKLWPFLVFAVVMTSFIYPMEGYWKWGGGWLDQLGFQDFAGSVVVHMAGAAAALAAVIMVGARKGKYGPNGEVHPIPGANLPMATLGMFILWMGWFGFNGGSELMVSNVEEANAVATIFVNTNAAAAAGMIAAALLSKYMFGKTDLTMVLNGALAGLVSITAEPLAPTPGLAMFIGAVGGLIVVLSVVFMDKLKLDDPVGAISVHGTAGIWGIFAVLFSNADATFFGQFVGTVATFAWMFITSIIVLYIIDKTMGLRPTEEEEMEGMDMKECGMEAYPEFDHKS

SEQ ID NO: 33693 - protein, 441 aa, Thiomicrospira crunogena XCL-2
MTDKQPGLIESATFSRDVINEIQRAADTGIYDIRGFGAKRKVPHFDDLLFLGASMSRYPLEGYREKCGTDVTLGTRFAKKPIKLDTVVTIAGMSFGALSANAKEALGRGANLAGTSTTTGDGGMTPEERKTSKTLVYQYLPSRYGMNPDDLRKADAIEVVLGQGAKPGGGGMLLGQKISDRVAQMRNLPKGIDQRSACRHPDWTGPDDLAIKIQELREITDWNVPIYIKIGATRTYYDVKLAVKAGADVIVLDGMQGGTAATQDVFIEHVGIPTMAALPQAVRALQEMGMHRKVQLIVSGGIRSGADVAKCMALGADAVAIGTAALVALGCNHPKWDEEYQKIGSAAGYYDDYHEGKCPAGISTQDDDLAARLDPEDAGRRLANYLHVLTLEAQTLARACGKSHLHNLEPEDLVALNVEAAAMAQVPLAGTDWIPGKQGYS

SEQ ID NO: 33694 - protein, 414 aa, Thiomicrospira crunogena XCL-2
MEQILELSYALDTFYFLMSGALVMWMAAGFAMLEAGLVRTKNTTEILAKNVGLFAIACIMYMLVGYNIMYGDAINSVIPGLSFLLGGDNATAAVVAGGDGAPYYSNMSDFFFQVVFVATAMSVVSGAVAERMKLMSFFVFAIVLTSVIYPVQGYWKWGGGFLDQLGFLDFAGSGIVHMTGAAAALAGVLLLGARKGKYGPNGESKAIPGANLPLATLGTFILWLGWFGFNGGSELKISNVEEANAVSMIFVNTLLAAAAGVVGALLASKIKFGKADLTMMLNGALAGLVAITAEPLTPSALEATLIGLVGGIIVVAAILILDNKFKIDDPVGAISVHGVVGIYGLLAVTFTNPDSSLVAQLIGIAAIFSWVFITSLIVWAIIKAVMGIRISEEDEFEGADQSECGMEAYPEFTK

SEQ ID NO: 33695 - protein, 129 aa, Thiomicrospira crunogena XCL-2
MQITLLKSKLHRVTTTHSELDYEGSCAIDGHFLEVAGIREYEQIQIYNVNNGNRFTTYAIRAEENTGIISVNGAAAHKAAPGDLLIIATYASMDEKEAEEFKPIMVYFDEKNQITHTRNTIPKQMQQLA

SEQ ID NO: 33696 - protein, 408 aa, Thiomicrospira crunogena XCL-2
MALIVQKYGGTSVGNVERIQNVADKVAKFIDEGHQVVVTLSAMSGETNRLTALAKEVQEQPSRREMDVLLTTGEQVTIALLSMALQQKGYDSISYTGWQVPIKTNDIHSKARIEEIDSDKIRNQLDQGKVVVVAGFQGVTPEGDITTLGRGGSDTTAVALAAALKADECQIYTDVDGVYTTDPRVVPEAKRLDVVTFDEMLELASLGAKVLQIRSVEFASKYKVPLRVLSSMKEGGGTLLISEEDFEDLDMEKPLISGIAFSRDEAKLMILGVPDKPGVAYQILGPISDANIEIDMIIQNQSVDGTTDFTFTVARGDLHAAQKILEKTAESLGAREVICDDTIVKISMVGVGMKSHSGIASTMFKTLADHNINIQMIGTTEIKISVVIEESYLEEAVQALHAAFELDK

SEQ ID NO: 33697 - protein, 394 aa, Thiomicrospira crunogena XCL-2
MSRLSNRVNRVKPSLTLVISAKAAELKRAGKDIISLGAGEPDFDTPDHIKAAGISAIQNGQTRYTAVDGTPELKSAIIEKFKRDNNLTYEMDQILVSSGGKQSFYNLCQGLLNDGDEVVIPAPYWVSYPDMALLAGGKPIIIEADIEQGFKITPEQLKAAITPKTKMVVINSPSNPTGAVYTASELKALGEVLQQHPDIVIASDDMYEHILLDDTPFTNILEVCPELTDRTVVMNGVSKAYSMTGWRIGYAGGPKDLIAAMRKVQSQSTSNPCSISQAASTEALNGPQDCIDTMLTEFKKRHEFVVERINEIPGFKCIPAAGAFYAFMDVKAAMKQKGYQTDTDFATAILEEVEVAAVPGSGFGAEGHLRISFATSMVNLINALDRIDSFMKDA

SEQ ID NO: 33698 - protein, 69 aa, Thiomicrospira crunogena XCL-2
MSELVTGTVKWFNDEKGFGFIEQEGGKDVFVHFSAINGAGRKSLMEGQSVTMEVTQGQKGPQAENVTAQ

SEQ ID NO: 33699 - protein, 396 aa, Thiomicrospira crunogena XCL-2
MTDFIPSIADHAKTIQPFRVMKILGEAKALERQGKDIIHMEIGEPDFESLECVHDAVKTALDQGKTHYTPTLGLPELRHKLSEFYADFYRANVKSDNIMLTPGASSALQLALTALLNPGDKVLMSDPTYPCNRQFVQLLHGELVLLPVDADSDYQLTLAHLKRHWQDGIKVVMVASPSNPSGTVIEQDELIKMAEFAATKNAYFLVDEIYQGLVYDRPAESILSHDHPPDNVIVINSFSKFFNMTGWRLGWMVAPSHLMSVLERLGQNLFLSAPTPSQYGALRVLEKEALMQLEGRRKIFERRRNTLFHAMQDAGIPPKVLPQGAFYLYWDVSDYTDDAEQFCSRLLAETGVAITPGTDFGTHKAHQHVRLAYTTSEDQLKQAVLKIRAFIDTLSL

SEQ ID NO: 33700 - protein, 440 aa, Thiomicrospira crunogena XCL-2
MEHSKMKSTHYQSNSLTLTGAVAMGTGVMIGAGIFALTGQVAELAKSWFPLAFLVAAIVAGFSAYSYVKMANAYPSAGGIAMFLKKAYGKTVMTGAGALLMYFSMVINESLVARTFGTYTMELFDTSQYAEWLIPALGVGLLLVAFFINILSNRFIERFSFFMAFIKIGGLVVFALAGLWVSGLSFESISVSPPEASSGGDFLGAVALAVLAYKGFTTITNSGGEINHPHKNVGRAIIISITLCLVLYMLVTFAIGANLSIDEIVQAKDYALAEAAKPAFGNGGLWFTVVFAIVATVSGVIASVFAVSRMLAMLTEMNLVPHRHFGMPGDLQKHTLVYTIVIAMLLTVFFDLSRIAALGAIFYILMDIAIHWGVLRFLREDVKANAAILITAIVLDIIILVALIAVKVQTDPLVIYVALIGLGVIFIGERLFLKQQRTAD

SEQ ID NO: 33701 - protein, 660 aa, Thiomicrospira crunogena XCL-2
MNQSPTSEPARLNPPVFFTASGLVILLLLYAAIFPKQADGAFSHLQNVIVDNGSWFYVLTVAIILITVVFLGLSRYGDIKLGPDHASPDYSKITWFSMLFSAGMGIGLMFFGVAEPVMHFLSPPVGDAGTVEAARQAMKITFFHWGLHAWAIYAIVALILAFFSYRHGLPLTMRSALYPLIGERIYGPIGHAVDVFAVIGTVFGIATSLGYGVLQMNTGLNYLFEVPVGVITQVILIAAVTALAGVSVVTGLDKGIRRLSELNMSLAVILMLLVLFLGSTIFLMQALIQNAGSYLSDIVRVTFNLFAYEKTDWIGGWTIFYWAWWLAWAPFVGLFIARVSRGRSIREFVTGVLFVPVGFSMMWFTFFGNSAIDMILNGGLDSLGKAVSNDVAIALFAFLDQFPFGAVLSFIAILMVIIFFVTSADSGALVVNMLCSNGRDDTPIWQRLYWVIGVGLIAAILLLAGGLGALQTLTIASALPFSIVLLIATYGLIMALRVDIAKRDSLQMNVAPTPPASADGNWKERLHNIVDYPTKSVVSRYIQSVARPACEEVAEELKAEDLDALVENEKDNDRVRLIVRHGEEADFIYEIRSRSHLKPEFTQVETAIDEMDESARYYRAEIHLREGGQDYDVMGWSKQAIIHDIIDHYHKHMHFLHVLR

SEQ ID NO: 33702 - protein, 1493 aa, Thiomicrospira crunogena XCL-2
MNSLNSLQGLYSPEFERENCGFGMIAQMDDKPSHWAVQTAIESLANMTHRGGVAADCCTGDGCGLLIKKPNTFLRQEAKDLGFTLSENYASGMIFLNQEANKAAFARAELEKALESKGLSIAGWRKVPVASEVLGAQAAGMEPLIEQVYINAPVEMSDGEFNRALFVARRKTEMAVEPNDETFYIASLHSQLISYKGLVMPKELPEFYLDLKDERFESSLISYHQRFSTNTLPQWRLAQPFRFLAHNGELNTIKGNRNWALARQSKFETPLIPELSDLKPLVAQEGSDSNSLDNMLEVLMMGDMPVFQALRLLIPPAWQNMPHMDPDLKAFLEYNSMHMEPWDGPAGMVINTGKYAICGVDRNGLRPTRYVITKDRHITFASEIGVYNYAPEDVVEKGRLKPGQVIAVDLEAGKLLKPEDIDAGLKAAKPYREWMDKGYMHLEERLDTEDHTFDWDSNEADIYQKYYQVTFEERDQVIRVLAEAGQEATGSMGDDAPLPVFSHKERSVFDYFRQMFAQVTNPPIDPLRENIVMSLNTCFGRELNMFDEGEDHARRLESQSPILSPSMMKHLTSIVDDNYRNQRISLHYNPENTDLKAATIAVCDQAVEAVKSGVTLLILSDLNIEKGLITVPAAMATGAVHHRLISEGLRPEANIIVETGTARDPHHFAVLFGYGATAVYPYLAYESLQDMIRTKELDEKVGISKYIKNYRKGINKGLFKILSKMGISTITSYRGSQLFEAVGLSKEIVDLCFKGTPTRIEGTRFEHLQADLIKTSKYAFNPRKFLQPGGLLKYIHGGEYHAYNPDVVNFLREAVQKGDQIAYNKFAKLVNERPAMTVRDLITFKDGLKPINLSEVEPVESIYKRFDSAGISLGALSPEAHEALAIAMNRIGARSNSGEGAEDPARYGTEKMSKIKQIASGRFGVTAHYLRNAEVLQIKVAQGAKPGEGGQLPGHKVDATIAKLRHSVEGVTLISPPPHHDIYSIEDLAQLIFDLKQVNPNALVSVKLVAEPGVGTIAAGVAKAYADLITISGYDGGTGASPLTSVKYAGNPFEMGLAEAHQVLRANDLRGQVILQADGGLKTGLDVVKAAILGAESFGFGTAPMVALGCKYLRICHLNTCAVGVATQDERLRKEHFIGMPEMVINYFRFVAEETREWLAKLGVARLEDLVGRVDLLKMIDKPLTDKQTSIDLTPFITDGGVPKDKPQTVQVTRNNPWDDGHIAEEMVKTVLPAIENKTGGEFGFHLVNTGRSIGARIAGEIAQRYGNHGMKDAPITLSLTGIAGQSFGVFNVDGLNLYLEGDANDYVGKGMSGGEIVVRPVKEHGFDPHSTPIVGNTCLYGATGGKLFANGTGGERFAVRNSGATAVVEGLGDHGCEYMTGGCVVSLGQVGVNFGAGMSGGMAFILDLDRTLPDRLNTEMVEAVRIDTESTEAYRVYLQELLTEYVEKTGSQFGQEVIDNFSRYLHNFWLVKSRAINVDKLLDLFAHGGDGE

SEQ ID NO: 33703 - protein, 558 aa, Thiomicrospira crunogena XCL-2
MKASDLFVKSLEAEGVEYIFGIPGEENLDLINSLKDSKIKLIVTRHEQAAGFMAATYGRLTGNAGVCLSTLGPGATNLVTAAAYAQLGAMPMVMITGQKPIKTSKQGQFQIIDVVDMMHPITKYSCQIQSGQNIPARIREAFRSAHTERPGTSHLELPEDIAAEETDAVVIQKGMHRRPLAEEKAVRTAVDMIQKAKRPLILVGAAANRKTAGKMLRQFIDKTGIPFFTTQMGKGVVDERHHLYLGCAALSDHDFVHCAIRYTDLIINIGHDVVEKPPFFMKPNGFKVIHINFTNAVIDPVYFPQAEVVGDIGNGIYQIKERIERQETWDFGCFMEAKRLIDKQIMEGANDGRFPMYPQRVVADIRKIMPDTGMIALDNGIYKIWFARNYLAYHHNTILLDNALATMGAGLPSAIAAKLVHPERRVIAICGDGGFMMNSQEMETAVRLKLDLVVLLLNDNAFGMIKWKQANMGFDDFGLDVGNADFVMYAQSYGAHGHRITKADDLKPTMEACFEAGGVHLVEVPMDYSENDRILNHEIKQRSQIVYNKMAETLGEST

SEQ ID NO: 33704 - protein, 611 aa, Thiomicrospira crunogena XCL-2
MSEQLIDILWVLISAVLVALMQPGFTALEAGATRTKNSISTAIKNVSDFLIAFMIFVVVGASIMLGTSHHGLFGWSPIFFYETSLSELVLTLFHAMFVSTAVTIISGSIAERTKYTSYLIIAVIVSLFIYPVQAHWIWNADGWLAQLGFIDFAGSTVVHSVGGWAALAAILIIGPRLGRFETKESPFEQANLAYSALGVFLIWLGWIGFNGGSVLALNFETGKVVLNTLIAGAIGGITGLIISRLYTGYYQVIDIINGILAGLVAITASAHLASPDAAILVGMLGYLAYLAGKILLVKWKIDDALEAVPVHLFAGVAGTLLVAFLADDVGFWQQLKIQLLGIIVVGLLTFLVSYTLLSIINRFYPLRVSESKEILGLNISEHQASTSMFDLAQAMNNQAQQQDFSKKIMVEPYSDASLIATYYNHVTQAFNQLNDEKEALIEESYQMANYDQLTGLAKRRLLVNELGRSIARLDRHTQSNAILFIDLDGFKSINDRYGHNAGDALLKESAARIQKIIRKTDLAARFGGDEFVVLLEDIQNESFAAQVADKIIAALRSPILLSNNSEGQISASIGLKIFSQSGKQHVDDILNQADKAMYEAKRRGKGQWVLA

SEQ ID NO: 33705 - protein, 551 aa, Thiomicrospira crunogena XCL-2
MNMRSFWWLALAFTLLWIWMQWTQFQHKASLPPQTAAVTQQTDKGMETPEINPDVPTAHQTMEDVPTAKAKIKQAQRISVKTDVLDIVIDTQGGDIRDVKLLKYAATDDRSQPFRLMGDTGQMMYVAQNGIALQSKAVLPAPTHKSLYQASQTHYEMTGDTLTVPLTWEQDGVKVTKTYVFTKGKYVIGLNYKIDNTTQKEWAGGLYSQLVRNTYDPDHNAMMYTYTGPVLYDGHAESKYNKHSFDDLSKQPIQGIQTTGGWAAMIQHYFMSAVIPDQESQNRYYAKPLNDGEYVAGVVEPMETVAAGQSQTLSSELYIGPIIQDNLEKIAPGLELTVDYGVLTIIAEPIFWVLEKIHALVGNWGWSIILLTVLIKLLFYKLSETSYRSMARLKKFQPKLKQLKENYGDDKVIFQQKMMKLYKEEKINPLGGCLPILVQMPVFIALYWVLLYSAEMRQAPWILWIDDLSVKDPYFILPVLMGISMWVQQKLNPSAMMDEMQQKVMKALPFIFTIFFMFFPAGLVLYWVVNNILSVSQQWYITRKIEAGEEK

SEQ ID NO: 33706 - protein, 305 aa, Thellungiella halophila
MAAPWQWENATAGAVAGFATVAAMHPLDVVRTRFQVNDGRRSILPTYKNTAHAVFTIARLEGLRGLYAGFFPAVIGSTVSWGLYFFFYGRAKQRHARGREEEKLSPGLHLASAAEAGALVCLCTNPIWLVKTRLQLQTPLHQTRPYSGLLDAFRTIMKEEGPRALYKGIVPGLVLVSHGAIQFTAYEELRKVIVDLKERRRKSESADKILNSVDYAALGGSSKVAAVILTYPFQVIRARLQQRPSTNGIPRYIDSLHVIRETARFEGLRGFYRGLTANLLKNVPASSITFIVYENVLKLLKRPPT

SEQ ID NO: 33707 - protein, 133 aa, Thellungiella halophila
MGSQHRRRLAIAAVPVLLLLVVVSELSDSAGAANSVSAFVQNAILSNKIVIFSKSYCPYCLRSKRIFSELKEQPFVVELDQREDGDQIQYELLEFVGRRTVPQVFVNGKHIGGSDDLGAAVENGQLQKLLAAS

SEQ ID NO: 33708 - protein, 429 aa, Thellungiella halophila
MAVSQHISPSLSRYKFFSTSVVENPNFSTYHIYSRRSRVTKSHLQAHSSTSSYGRTELAASAKKLWIRQRSFSETEVEQGQFEDEEEQEDIDISDEASLLSLSMKPDRNMALLDDYEMEELGHTPDTNHRSGYVAVLGMPNVGKSTLSNQMIGQKISIVTDKPQTTRHRILGICSSPEYQMILYDTPGVIEKKMHRLDTMMMKNVRDAAINADCVVVLVDACKMPANIEEVLKEGLGNLEKRPPMLLVMNKKDLIKPGEIAKKLEWYEKFTDVDEVIPVSAKYGHGVEDVKEWILSKLPFGPPYYPKDIVSEHPERFFVAEIVREKIFMQYRNEVPYACQVNVLSYKTRPAAKDFIQVEVVVDKNSQKIILIGKEGKALKTLATAARLDIEDFLQKKVFLEVEVKVKENWRQDEGLLKYYGYGGQIRAM

SEQ ID NO: 33709 - protein, 285 aa, Hordeum vulgare
APEYYFPTLVSSAEENMASFAATQLGLNLGYRTYFPPRGGYTYGHHPPRCQAEGCKADLSGAKRYHRRHKVCEHHSKAPVVVTAGGLHQRFCQQCSRFHLLDEFDDAKKSCRKRLADHNRRRRKSKPSDADAADKRRTQASKAAASTKGKAAGSSSKSTGTGDGMDIQVQLGSGDLSKDQDETMGQGEVVKEMQVDPKGKASMQLQQQQQQGHHVHGLHLQSQHGFPFPSTSAGSCFPQSQAVSSTDNTSNIGQVQQEQLGSLGFHQHSNILQLGQAMFDLDFDH

SEQ ID NO: 33710 - protein, 1146 aa, Populus tremula
MASQSQRQSNQPAHNQAQSSGTSNMRQHHHPTESVSKAIAQYTVDAQLHAVFEQSGGTGKSFDYSKSVRTPNQSVPEEQITAYLSKIQRGGHIQPFGCMIAADEQSFRLIAYSENAKDMLGLTPQSVPSLEKQEILFVGADVRILFRPSSAVLLEKAFGAREITLLNPIWIHSKNSGKPFYAILHRIDVGIVIDLEPARTEDPALSIAGAVQSQKLAVRAISQLQSLPGGDIKLLCDTVVDSVRELTGYDRVMVYKFHEDEHGEVVAENKRVDLEPYIGLHYPSTDIPQASRFLFKQNRVRMIVDCHAIPVSVIQDEGLMQPLCLVGSTLRAPHGCHAQYMENMGSIASLAMAVIIYGNDEEAIGGRNSMRLWGLVVCHHTSARCIPFPLRYACEFLMQAFGLQLNMELQLASQLLEKHVLRTQTLLCDMLLRDSPTGIVTQSPSIMDLVKCDGAALYYQGQYYPLGVTPTEAQIKDIVEWLLTLHGDPTGLSTDSLADAGYPGAAFLGDAVCGMAVAYIAERDFLFWFRSHTAKEVKWGGAKHHPEDKDDGQRMHPRSSFKAFLEVVKSRSLPWENAEMDAIHSLQLILRDSFRDAEATNSKAVVHTQLKDMELQGMDELSSVAREMVRLIETATAPIFAVDVEGRINGWNAKVAELTGLSVEEAMGKSLVHDLVYKEYEEIVDKLIHRAVKGEEDKNVEIKLRTFCSEHQKKAVFVVVNACSSKDYMDNIVGVCFVGQDVTGQKVVMDKYVLIQGDYKAIVHSPNPSIPPIFASDENTCCLEWNTALEKLTGWSRGEVVGKMLVGEVFGSCCRLKGPDALTKFMIALHNAIGGIDTDKLPFSFFDRNEKNVQTLLTANKRVNMKGDIIGAFCFLQIASPELQPSLKVQKQQEKKSFARMKELAYICQEIKNPLSGIHFTNSLLENTDLTEDQQQFLETSAACEKQILKIIRDIDLESIENGSLELEKAEFLLGSVINAVVSQAMLLLRERNLQLLRDIPEEIKTLAVYGDQARIQQVLADFLLNMVRYAPSSAGWVEIHVCPTLKQISDGHTLVHTEFRYLERVLQTRMLGLQHPLRSFLNCKLTLVMLHREGMVPKIQFQGLSVCQGRLIWLSFPENTTVALYPLTIWFLLLHRHQSRSITHT

SEQ ID NO: 33711 - protein, 1146 aa, Populus tremula
MASQSQRQSNQPAHNQAQSSGTSNMRQHHHPTESVSKAIAQYTVDAQLHAVFEQSGGTGKSFDYSKSVRTPNQSVPEEQITAYLSKIQRGGHIQPFGCMIAADEQSFRVIAYSENAKDMLGLTPQSVPSLEKQEILFVGADVRILFRPSSAVLLEKAFGAREITLLNPIWIHSKDSGKPFYAILHRIDVGIVIDLEPARTEDPALSIAGAVQSQKLAVRAISQLQSLPGGDIKLLCDTVVDSVRELTGYDRVMVYKFHEDEHGEVVAENKRVDLEPYIGLHYPSTDIPQASRFLFKQNRVRMIVDCHAIPVSVIQDEGLMQPLCLVGSTLRAPHGCHAHYMENMGSIASLAMAVIIYGNDEEAIGGRNSMRLWGLVVCHHTSARCIPFPLRYACEFLMQAFGLQLNMELQLASQLLEKHVLRTQTLLCDMLLRDSPAGIVTQSPSIMDLVKCDGAALYYQGQYYPLGVTPTEAQIKDIVEWLLTLHGDPTGLSTDSLADAGYPGAAFLGDAVCGMAVAYIAERDFLFWFRSHTAKEVKWGGAKHHPEDKDDGQRMHPRSSFKAFLEVVKSRSLPWENAEMDAIHSLQLILRDSFRDAEATNSKAVVHNQLKDMELQGMDELSSVAREMVRLIETATAPIFAVDVEGRINGWNAKVAELTGLSVEEAMGKSLVHDLVYKEYEEIVDKLIHRAVKGEEDKNVEIKLRTFCSEHQKKAVFVVVNACSSKDYMDNIVGVCFVGQDVTGQKVVMDKYVLIQGDYKAIVHSPNPSIPPIFASDENTCCLEWNTAMEKLTGWSRGEVVGKMLVGEVFGSCCRLKGPDALTKFMIALHNAIGGIDTDKLPFSFFDRNEKNVQTLLTANKRVNMKGDIIGAFCFLQIASPELQPSLKVQKQQEKKSFARMKELAYICQEIKNPLSGIHFTNSLLENTDLTEDQQQFLETSAACEKQILKIIRDIDLESIENGSLELEKAEFLLGSVINAVVSQAMLLLRERNLQLLRDIPEEIKTLAVYGDQARIQQVLADFLLNMVRYAPSSAGWVEIHVCPTLKQISDGHTLVHTEFRYLERVLQTRMLGLQHPLRSFLNCKLTLVMLHREGMVPKIQFQGLSVCQGRLIWLSFPENTTVALYPLTIWFLLLHRHQSRSITHT

SEQ ID NO: 33712 - protein, 1144 aa, Populus tremula
MASQSQRQSNQPAHNQAQSSGTSNMRQHHHPTESVSKAIAQYTVDAQLHAVFEQSGGTGKSFDYSKSVRTPNQSVPEEQITAYLSKIQRGGHIQPFGCMIAANEQSFRVIAYSENAKDMLGLTPQSVPSLEKQEILFVGADVRILFRPSSAVLLEKAFGAREITLLNPIWIHSKNSGKPFYAILHRIDVGIVIDLEPARTEDPALSIAGAVQSQKLAVRAISQLQSLPGGDIKLLCDTVVDSVRELTGYDRVMVYKFHEDEHGEVVAENKRVDLEPYIGLHYPSTDIPQASRFLFKQNRVRMIVDCHAIPVSVIQDEGLMQPLCLVGSTLRAPHGCHAQYMENMGSIASLAMAVIIYGNDEEAIGGRNSMRLWGLVVCHHTSARCIPFPLRYACEFLMQAFGLQLNMELQLASQLLEKHVLRTQTLLCDMLLRDSPTGIVTQSPSIMDLVKCDGAALYYQGQYYPLGVTPTEAQIKDIVEWLLTLHGDPTGLSTDSLADAGYPGAAFLGDAVCGMAVAYIAERDFLFWFRSHTAKEVKWGGAKHHPEDKDDGQRMHPRSSFKAFLEVVKSRSLPWENAEMDAIHSLQLILRDSFRDAEATNSKAVVHTQLKDMELQGMDELSSVAREMVRLIETATAPIFAVDVDGRINGWNAKVAELTGLSVEEAMGKSLVHDLVYKEYEEIVDKLIHRAVKGEEDKNVEIKLRTFCSEHQKKAVFVVVNACSSKDYMDNIVGVCFVGQDVTGQKVVMDKYVLIQGDYKAIVHSPNPSIPPIFASDENTCCLEWNTAMEKLTGWSRGEVVGKMLVGEVFGSCCRLKGPDALTKFMIALHNAIGGIDTDKLPFSFFDRNEKNVQTLLTANKRVNMNIIGAFCFLQIASPELQPSLKVQKQQEKKSFARMKELAYICQEIKNPLSGIHFTNSLLENTDLTEDQQQFLETSAACEKQILKIIRDIDLESIENGSLELEKAEFLLGSVINAVVSQAMLLLRERNLQLLRDIPEEIKTLAVYGDQARIQQVLADFLLNMVRYAPSSAGWVEIHVCPTLKQISDGHTLVHTEFRYLERVLQTRMLGLQHPLRSFLNCKLTLVMLHREGMVPKIQFQGLSVCQGRLIWLSFPENTTVALYPLTIWFLLLHRHQSRSITHT

SEQ ID NO: 33713 - protein, 1144 aa, Populus tremula
MASQSQRQSNQPAHNQAQSSGTSNMRQHHHPTESVSKAIAQYTVDAQLHAVFEQSGGTGKSFDYSKSVRTPNQSVPEEQITAYLSKIQRGGHIQPFGCMIAADEQSFRVIAYSENAKDMLGLTPQSVPSLEKQEILFVGADVRILFRPSSAVLLEKAFGAREITLLNPIWIHSKNSGKPFYAILHRIDVGIVIDLEPARTEDPALSITGAVQSQKLAVRAISQLQSLPGGDIKLLCDTVVDSVRELTGYDRVMVYKFHEDEHGEVVAENKRVDLEPYIGLHYPSTDIPQASRFLFKQNRVRMIVDCHAIPVSVIQDEGLMQPLCLVGSTLRAPHGCHAQYMENMGSIASLAMAVIIYGNDEEAIGGRNSMRLWGLVVCHHTSARCIPFPLRYACEFLMQAFGLQLNMELQLASQLLEKHVLRTQTLLCDMLLRDSPTGIVTQSPSIMDLVKCDGAALYYQGQYYPLGVTPTEAQIKDIVEWLLTLHGDPTGLSTDSLADAGYPGAAFLGDAVCGMAVAYIAERDFLFWFRSHTAKEVKWGGAKHHPEDKDDGQRMHPRSSFKAFLEVVKSRSLPWENAEMDAIHSLQLILRDSFRDAEATNSKAVVHNQLKDMELQGMDELSSVAREMVRLIETATAPIFAVDVDGRINGWNAKVAELTGLSVEEAVGKSLVHDLVYKEYEEIVDKLIHRAVKGEEDKNVEIKLRTFCSEHQKKAVFVVVNACSSKDYMDNIVGVCFVGQDVTGQKVVMDKYVLIQGDYKAIVHSPNPSIPPIFASDENTCCLEWNTAMEKLTGWSRGEVVGKMLVGEVFGSCCRLKGPDALTKFMIALHNAIGGIDTDKLPFSFFDRNEKNVQTLLTANKRVNINIIGAFCFLQIASPELQPSLKVQKQQEKKSFARMKELAYICQEIKNPLSGIHFTNSLLENTDLTEDQQQFLETSAACEKQILKIIRDIDLESIENGSLELEKAEFLLGSVINAVVSQAMLLLRERNLQLLRDIPEEIKTLAVYGDQARIQQVLADFLLNMVRYAPSSAGWVEIHVCPTLKQISDGHTLVHTEFRYLERVLQTRMLGLQHPLRSFLNCKLTLVMLHREGMVPKIQFQGLSVCQGRLIWLSFPENTTVALYPLTIWFLLLHRHQSRSITHT

SEQ ID NO: 33714 - protein, 1144 aa, Populus tremula
MASQSQRQSNQPAHNQVQSSGTSNMRQHHHPTESVSKAIAQYTVDAQLHAVFEQSGGTGKSFDYSKSVRTPNQSVPEEQITAYLSKIQRGGHIQPFGCMIAADEQSFRVIAYSENAKDMLGLTPQSVPSLEKQEILFVGADVRILFRPSSAVLLEKAFGAREITLLNPIWIHSKNSGKPFYAILHRIDVGIVIDLEPARTEDPALSIAGAVQSQKLAVRAISQLQSLPGGDIKLLCDTVVDSVRELTGYDRVMVYKFHEDEHGEVVAENKRVDLEPYIGLHYPSTDIPQASRFLFKQNRVRMIVDCHAIPVSVIQDEGLMQPLCLVGSTLRAPHGCHAQYMENMGSIASLAMAVIIYGNDEEAIGGRNSMRLWGLVVCHHTSARCIPFPLRYACEFLMQAFGLQLNMELQLASQLLEKHVLRTQTLLCDMLLRDSPTGIVTQSPSIMDLVKCDGAALYYQGQYYPLGVTPTEAQIKDIVEWLLTLHGDPTGLSTDSLADAGYPGAAFLGDAVCGMAVAYIAERDFLFWFRSHTAKEVKWGGAKHHPEDKDDGQRMHPRSSFKAFLEVVKSRSLPWENAEMDAIHSLQLILRDSFRDAEATNSKAVVHTQLKDMELQGMDELSSVAREMVRLIETATAPIFAVDVEGRINGWNAKVAELTGLSVEEAMGKSLVHDLVYKEYEEIVDKLIHRAVKGEEDKNVEIKLRTFCSEHQKKAVFVVVNACSSKDYMDNIVGVCFVGQDVTGQKVVMDKYVLIQGDYKAIVHSPNPSIPPIFASDENTCCLEWNTAMEKLTGWSRGEVVGKMLVGEVFGSCCRLKGPDALTKFMIALHNAIGGIDTDKLPFSFFDRNEKNVQTLLTANKRVNINIIGAFCFLQIASPELQPSLKVQKQQEKKSFARMKELAYICQEIKNPLSGIHFTNSLLENTDLTEDQQQFLETSAACEKQILKIIRDIDLESIENGSLELEKAEFLLGSVINAVVSQAMLLLRERNLQLLRDIPEEIKTLAVYGDQARIQQVLADFLLNMVRYAPSSAGWVEIHVCPTLKQISDGHTLVHTEFRYLERVLQTRMLGLQHPLRSFLNCKLTLVMLHREGMVPKIQFQGLSVCQGRLIWLSFPENTTVALYPLTIWFLLLHRHQSRSITHT

SEQ ID NO: 33715 - protein, 1144 aa, Populus tremula
MASQSQRQSNQPAHNQAQSSGTSNMRQHHHPTESVSKAIAQYTVDAQLHAVFEQSGGTGKSFDYSKSVRTPNQSVPEEQITAYLSKIQRGGHIQPFGCMIAADEQSFRVIAYSENAKDMLGLTPQSVPSLEKQEILFVGADVRILFRPSSAVLLEKAFGAREITLLNPIWIHSKNSGKPFYAILHRIDVGIVIDLEPARTEDPALSIAGAVQSQKLAVRAISQLQSLPGGDIKLLCDTVVDSVRELTGYDRVMVYKFHEDEHGEVVAENKRVDLEPYIGLHYPSTDIPQASRFLFKQNRVRMIVDCHAIPVSVIQDEGLMQPLCLVGSTLRAPHGCHAQYMENMGSIASLAMAVIIYGNDEEAIGGRNSMRLWGLVVCHHTSARCIPFPLRYACEFLMQAFGLQLNMELQLASQLLEKHVLRTQTLLCDMLLRDSPTGIVTQSPSIMDLVKCDGAALYYQGQYYPLGVTPTEAQIKDIVEWLLTLHGDPTGLSTDSLADAGYPGAAFLGDAVCGMAVAYIAERDFLFWFRSHTAKEVKWGGAKHHPEDKDDGQRMHPRSSFKAFLEVVKSRSLPWENAEMDAIHSLQLILRDSFRDAEATNSKAVVHTQLKDMELQGMDELSSVAREMVRLIETATAPIFAVDVEGRINGWNAKVAELTGLSVEEAMGKSLVHDLVYKEYEEIVDKLIHRAVKGEEDKNVEIKLRTFCSEHQKKAVFVVVNACSSKDYMDNIVGVCFVGQDVTGQKVVMDKYVLIQGDYKAIVHSPNPSIPPIFASDENTCCLEWNTAMEKLTGWSRGEVVGKMLVGEVFGSCCRLKGPDALTKFMIALHNAIGGIDTDKLPFSFFDRNEKNVQTLLTANKRVNINIIGAFCFLQIASPELQPSLKVQKQQEKKSFARMKELAYICQEIKNPLSGIHFTNSLLENTDLTEDQQQFLETSAACEKQILKIIRDIDLESIENGSLELEKAEFLLGSVINAVVSQAMLLLRERNLQLLRDIPEEIKTLAVYGDQARIQQVLADFLLNMVRYAPSSAGWVEIHVCPTLKQISDGHTLVHTEFRYLERVLQTRMLGLQHPPRSFLNCKLTLVMLHREGMVPKIQFQGLSVCQGRLIWLSFPENTTVALYPLTIWFLLLHRHQSRSITHT

SEQ ID NO: 33716 - protein, 1144 aa, Populus tremula
MASQSQRQSNQPAHNQAQSSGTSNMRQHHHPTESVSKAIAQYTVDAQLHAVFEQSGGTGKSFDYSKSVRTPNQSVPEEQITAYLSKIQRGGHIQPFGCMIAADEQSFRVIAYSENAKDMLGLTPQSVPSLEKQEILFVGADVRILFRPSSAVLLEKAFGAREITLLNPIWIHSKNSGKPFYAILHRIDVGIVIDLEPARTEDPALSIAGAVQSQKLAVRAISQLQSLPGGDIKLLCDTVVDSVRELTGYDRVMVYKFHEDEHGEVVAENKRVDLEPYIGLHYPSTDIPQASRFLFKQNRVRMIVDCHAIPVSVIQDEGLMQPLCLVGSTLRAPHGCHAQYMENMGSIASLAMAVIIYGNDEEAIGGRNSMRLWGLVVCHHTSARCIPFPLRYACEFLMQAFGLQLNMELQLASQLLEKHVLRTQTLLCDMLLRDSPTGIVTQSPSIMDLVKCDGAALYYQGQYYPLGVTPTEAQIKDIVEWLLTLHGDPTGLSTDSLADAGYPGAAFLGDAVCGMAVAYIAERDFLFWFRSHTAKEVKWGGAKHHPEDKDDGQRMHPRSSFKAFLEVVKSRSLPWENAEMDAIHSLQLILRDSFRDAEATNSKAVVHTQLKDMELQGMDELSSVAREMVRLIETATAPIFAVDVDGRINGWNAKVAELTGLSVEEAMGKSLVHDLVYKEYEEIVDKLIHRAVKGEEDKNVEIKLRTFCSEHQKKAVFVVVNACSSKDYMDNIVGVCFVGQDVTGQKVVMDKYVLIQGDYKAIVHSPNPSIPPIFASDENTCCLEWNTALEKLTGWSRGEVVGKMLVGEVFGSCCRLKGPDALTKFMIALHNAIGGIDTDKLPFSFFDRNEKNVQTLLTANKRVNMNIIGAFCFLQIVSPELQPSLKVQKQQEKKSFARMKELAYICQEIKNPLSGIHFTNSLLENTDLTEDQQQFLETSAACEKQILKIIRDIDLESIENGSLELEKAEFLLGSVINAVVSQAMLLLRERNLQLLRDIPEEIKTLAVYGDQARIQQVLADFLLNMVRYAPSSAGWVEIHVCPTLKQISDGHTLVHTEFRYLERVLQTRMLGLQHPLRSFLNCKLTLVMLHREGMVPKIQFQGLSVCQGRLIWLSFPENTTVALYPLTIWFLLLHRHQSRSITHT

SEQ ID NO: 33717 - protein, 1144 aa, Populus tremula
MASQSQRQSNQPAHNQAQSSGTSNMRQHHHPTESVSKAIAQYTVDAQLHAVFEQSGGTGKSFDYSKSVRTPNQSVPEEQITAYLSKIQRGGHIQPFGCMIAADEQSFRVIAYSENAKDMLGLTPQSVPSLEKQEILFVGADVRILFRPSSAVLLEKAFGAREITLLNPIWIHSKNSGKPFYAILHRIDVGIVIDLEPARTEDPALSIAGAVQSQKLAVRAISQLQSLPGGDIKLLCDTVVDSVRELTGYDRVMVYKFHEDEHGEVVAENKRVDLEPYIGLHYPSTDIPQASRFLFKQNRVRMIVDCHAIPVSVIQDEGLMQPLCLVGSTLRAPHGCHAQYMENMGSIASLAMAVIIYGNDEEAIGGRNSMRLWGLVVCHHTSARCIPFPLRYACEFLMQAFGLQLNMELQLASQLLEKHVLRTQTLLCDMLLRDSPTGIVTQSPSIMDLVKCDGAALYYQGQYYPLGVTPTEAQIKDIVEWLLTLHGDPTGLSTDSLADAGYPGAAFLGDAVCGMAVAYIAERDFLFWFRSHTAKEVKWGGAKHHPEDKDDGQRMHPRSSFKAFLEVVKSRSLPWENAEMDAIHSLQLILRDSFRDAEATNSKAVVHNQLKDMELQGMDELSSVAREMVRLIETATAPIFAVDVDGRINGWNAKVAELTGLSVEEAMGKSLVHDLVYKEYEEIVDKLIHRAVKGEEDKNVEIKLRTFCSEHQKKAVFVVVNACSSKDYMDNIVGVCFVGQDVTGQKVVMDKYVLIQGDYKAIVHSPNPSIPPIFASDENTCCLEWNTAMEKLTGWSRGEVVGKMLVGEVFGSCCRLKGPDALTKFMIALHNAIGGIDTDKLPFSFFDRNEKNVQTLLTANKRVNINIIGAFCFLQIASPELQPSLKVQKQQEKKSFARMKELAYICQEIKNPLSGIHFTNSLLENTDLTEDQQQFLETSAACEKQILKIIRDIDLESIENGSLELEKAEFLLGSVINAVVSQAMLLLRERNLQLLRDIPEEIKTLAVYGDQARIQQVLADFLLNMVRYAPSSAGWVEIHVCPTLKQISDGHTLVHTEFRYLERVLQTRMLGLQHPLRSFLNCKLTLVMLHREGMVPKIQFQGLSVCQGRLIWLSFPENTTVALYPLTIWFLLLHRHQSRSITHT

SEQ ID NO: 33718 - protein, 1144 aa, Populus tremula
MASQSQRQSNQPAHNQAQSSGTSNMRQHHHPTESVSKAIAQYTVDAQLHAVFEQSGGTGKSFDYSKSVRTPNQSVPEEQITAYLSKIQRGGHIQPFGCMIAADEQSFRVIAYSENAKDMLGLTPQSVPSLEKQEILFVGADVRILFRPSSAVLLEKAFGAREITLLNPIWIHSKNSGKPFYAILHRIDVGIVIDLEPARTEDPALSIAGAVQSQKLAVRAISQLQSLPGGDIKLLCDTVVDSVRELTGYDRVMVYKFHEDEHGEVVAENKRVDLEPYIGLHYPSTDIPQASRFLFKQNRVRMIVDCHAIPVSVIQDEGLMQPLCLVGSTLRAPHGCHAQYMENMGSIASLAMAVIIYGNDEEAIGGRNSMRLWGLVVCHHTSARCIPFPLRYACEFLMQAFGLQLNMELQLASQLLEKHVLRTQTLLCDMLLRDSPTGIVTQSPSIMDLVKCDGAALYYQGQYYPLGVTPTEAQIKDIVEWLLTLHGDPTGLSTDSLADAGYPGAAFLGDAVCGMAVAYIAERDFLFWFRSHTAKEVKWGGAKHHPEDKDDGQRMHPRSSFKAFLEVVKSRSLPWENAEMDAIHSLQLILRDSFRDAEATNSKAVVHTQLKDMELQGMDELSSVAREMVRLIETATAPIFAVDVDGRINGWNAKVAELTGLSVEEAMGKSLVHDLVYKEYEEIVDKLIHRAVKGEEDKNVEIKLRTFCSEHQKKAVFVVVNACSSKDYMDNIVGVCFVGQDVTGQKVVMDKYVLIQGDYKAIVHSPNPSIPPIFASDENTCCLEWNTAMEKLTGWSRGEVVGKMLVGEVFGSCCRLKGPDALTKFMIALHNAIGGIDTDKLPFSFFDRNEKNVQTLLTANKRVNINIIGAFCFLQIASLELQPSLKVQKQQEKKSFARMKELAYICQEIKNPLSGIHFTNSLLENTDLTEDQQQFLETSAACEKQILKIIRDIDLESIENGSLELEKAEFLLGSVINAVVSQAMLLLRERNLQLLRDIPEEIKTLAVYGDQARIQQVLADFLLNMVRYAPASAGWVEIHVCPTLKQISDGHTLVHTEFRYLERVLQTRMLGLQHPPRSFLNCKLTLVMLHREGMVPKIQFQGLSVCQGRLIWLSFPENTTVALYPLTIWFLLLHRHQSRSITHT

SEQ ID NO: 33719 - protein, 1144 aa, Populus tremula
MASQSQRQSNQPAHNQAQSSGTSNMRQHHHPTESVSKAIAQYTVDAQLHAVFEQSGGTGKSFDYSKSVRTPNQSVPEEQITAYLSKIQRGGHIQPFGCMIAADEQSFRVIAYSENAKDMLGLTPQSVPSLEKQEILFVGADVRILFRPSSAVLLEKAFGAREITLLNPIWIHSKNSGKPFYAILHRIDVGIVIDLEPARTEDPALSIAGAVQSQKLAVRAISQLQSLPGGDIKLLCDTVVDSVRELTGYDRVMVYKFHEDEHGEVVAENKRVDLEPYIGLHYPSTDIPQASRFLFKQNRVRMIVDCHAIPVSVIQDEGLMQPLCLVGSTLRAPHGCHAQYMENMGSIASLAMAVIIYGNDEEAIGGRNSMRLWGLVVCHHTSARCIPFPLRYACEFLMQAFGLQLNMELQLASQLLEKHVLRTQTLLCDMLLRDSPTGIVTQSPSIMDLVKCDGAALYYQGQYYPLGVTPTEAQIKDIVEWLLTLHGDPTGLSTDSLADAGYPGAAFLGDAVCGMAVAYIAERDFLFWFRSHTAKEVKWGGAKHHPEDKDDGQRMHPRSSFKAFLEVVKSRSLPWENAEMDAIHSLQLILRDSFRDAEATNSKAVVHTQLKDMELQGMDELSSVAREMVRLIETATAPIFAVDVDGRINGWNAKVAELTGLSVEEAMGKSLVHDLVYKEYEEIVDKLIHRAVKGEEDKNVEIKLRTFCSEHQKKAVFVVVNACSSKDYMDNIVGVCFVGQDVTGQKVVMDKYVLIQGDYKAIVHSPNPSIPPIFASDENTCCLEWNTAMEKLTGWSRGEVVGKMLVGEVFGSCCRLKGPDALTKFMIALHNAIGGIDTDKLPFSFFDRNEKNVQTLLTANKRVNMNIIGAFCFLQIASPELQPSLKVQKQQEKKSFARMKELAYICQEIKNPLSGIHFTNSLLENTDLTEDQQQFLETSAACEKQILKIIRDIDLESIENGSLELEKAEFLLGSVINAVVSQAMLLLRERNLQLLRDIPEEIKTLAVYGDQARIQQVLADFLLNMVRYAPSSAGWVEIHVCPTLKQISDGHTLVHTEFRYLERVLQTRMLGLQHPPRSFLNCKLTLVKLHREGMVPKIQFQGLSVCQGRLIWLSFPENTTVALYPLTIWFLLLHRHQSRSITHT

SEQ ID NO: 33720 - protein, 1146 aa, Populus tremula
MASQSQRQSNQPAHNQAQSSGTSNMRQHHHPTESVSKAIAQYTVDAQLHAVFEQSGGTGKSFDYSKSVRTPNQSVPEEQITAYLSKIQRGGHIQPFGCMIAADEQSFRVIAYSENAKDMLGLTPQSVPSLEKQEILFVGADVRILFRPSSAVLLEKAFGAREITLLNPIWIHSKNSGKPFYAILHRIDVGIVIDLEPARTEDPALSIAGAVQSQKLAVRAISQLQSLPGGDIKLLCDTVVDSVRELTGYDRVMVYKFHEDEHGEVVAENKRVDLEPYIGLHYPSTDIPQASRFLFKQNRVRMIVDCHAIPVSVIQDEGLMQPLCLVGSTLRAPHGCHAQYMENMGSIASLAMAVIIYGNDEEAIGGRNSMRLWGLVVCHHTSARCIPFPLRYACEFLMQAFGLQLNMELQLASQLLEKHVLRTQTLLCDMLLRDSPTGIVTQSPSIMDLVKCDGAALYYQGQYYPLGVTPTEAQIKDIVEWLLTLHGDPTGLSTDSLADAGYPGAAFLGDAVCGMAVAYIAERDFLFWFRSHTAKEVKWGGAKHHPEDKDDGQRMHPRSSFKAFLEVVKSRSLPWENAEMDAIHSLQLILRDSFRDAEATNSKAVVHNQLKDMELQGMDELSSVAREMVRLIETATAPIFAVDVEGRINGWNAKVAELTGLSVEEAMGKSLVHDLVYKEYEEIVDKLIHRAVKGEEDKNVEIKLRTFCSEHQKKAVFVVVNACSSKDYMDNIVGVCFVGQDVTGQKVVMDKYVLIQGDYKAIVHSPNPSIPPIFASDENTCCLEWNTAMEKLTGWSKGEVVGKMLVGEVFGNCCKLKGPNALTKFMIALHNAIGGIDTDKLPFSFFDRNEKNVQTLLTANKRVNMKGDIIGAFCFLQIASPELQPSLKVQKQQEKKSFARMKELAYICQEIKNPLSGIHFTNSLLENTDLTEDQQQFLETSAACEKQILKIIRDIDLESIENGSLELEKPEFLLGSVINAVVSQAMLLLRERNLQLLRDIPEEIKTLAVYGDQARIQQVLADFLLNMVRYAPSSAGWVEIHVCPTLKQISDGHTLVHTEFRYLERVLQTRMLGLQHPLRSFLNCKLTLVKLHREGMVPKIQFQGLSVCQGRLIWLSFPENTTVALYPLTIWFLLLHRHQSRSITHT

SEQ ID NO: 33721 - protein, 1146 aa, Populus tremula
MASQSQRQSNQPAHNQAQSSGTSNMRQHHHPTESVSKAIAQYTVDAQLHAVFEQSGGTGKSFDYSKSVRTPNQSVPEEQITAYLSKIQRGGHIQPFGCMIAADEQSFRVIAYSENAKDMLGLTPQSVPSLEKQEILFVGADVRILFRPSSAVLLEKAFGAREITLLNPIWIHSKNSGKPFYAILHRIDVGIVIDLEPARTEDPALSIAGAVQSQKLAVRAISQLQSLPGGDIKLLCDTVVDSVRELTGYDRVMVYKFHEDEHGEVVAENKRVDLEPYIGLHYPSTDIPQASRFLFKQNRVRMIVDCHAIPVSVIQDEGLMQPLCLVGSTLRAPHGCHAQYMENMGSIASLAMAVIIYGNDEEAIGGRNSMRLWGLVVCHHTSARCIPFPLRYACEFLMQAFGLQLNMELQLASQLLEKHVLRTQTLLCDMLLRDSPTGIVTQSPSIMDLVKCDGAALYYQGQYYPLGVTPTEAQIKDIVEWLLTLHGDPTGLSTDSLADAGYPGAAFLGDAVCGMAVAYIAERDFLFWFRSHTAKEVKWGGAKHHPEDKDDGQRMHPRSSFKAFLEVVKSRSLPWENAEMDAIHSLQLILRDSFRDAEATNSKAVVHTQLKDMELQGMDELSSVAREMVRLIETATAPIFAVDVDGRINGWNAKVAELTGLSVEEAMGKSLVHDLVYKEYEEIVDKLIHRAVKGEEDKNVEIKLRTFCSEHQKKAVFVVVNACSSKDYMDNIVGVCFVGQDVTGQKVVMDKYVLIQGDYKAIVHSPNPSIPPIFASDENTCCLEWNTAMEKLTGWSRGEVVGKMLVGEVFGSCCKLKGPNSLTKFMIALHNAIGGIDTDKLPFSFFDRNEKNVQTLLTANKRVNMKGDIIGAFCFLQIASPELQPSLKVQKQQEKKSFARMKELAYICQEIKNPLSGIHFTNSLLENTDLTEDQQQFLETSAACEKQILKIIRDIDLESIENGSLELEKAEFLLGSVINAVVSQAMLLLRERNLQLLRDIPEEIKTLAVYGDQARIQQVLADFLLNMVRYAPSSAGWVEIHVCPTLKQISDGHTLVHTEFRYLERVLQTRMLGLQHPLRSFLNCKLTLVKLHREGMVPKIQFQGLSVCQGRLIWLSFPENTTVALYPLTIWFLLLHRHQSRSITHT

SEQ ID NO: 33722 - protein, 1146 aa, Populus tremula
MASQSQRQSNQPAHNQVQSSGTSNMRQHHHPTESVSKAIAQYTVDAQLHAVFEQSGGTGKSFDYSKSVRTPNQSVPEEQITAYLSKIQRGGHIQPFGCMIAADEQSFRVIAYSENAKDMLGLTPQSVPSLEKQEILFVGADVRILFRPSSAVLLEKAFGAREITLLNPIWIHSKNSGKPFYAILHRIDVGIVIDLEPARTEDPALSIAGAVQSQKLAVRAISQLQSLPGGDIKLLCDTVVDSVRELTGYDRVMVYKFHEDEHGEVVAENKRVDLEPYIGLHYPSTDIPQASRFLFKQNRVRMIVDCHAIPVSVIQDEGLMQPLCLVGSTLRAPHGCHAQYMENMGSIASLAMAVIIYGNDEEAIGGRNSMRLWGLVVCHHTSARCIPFPLRYACEFLMQAFGLQLNMELQLASQLLEKHVLRTQTLLCDMLLRDSPTGIVTQSPSIMDLVKCDGAALYYQGQYYPLGVTPTEAQIKDIVEWLLTLHGDPTGLSTDSLADAGYPGAAFLGDAVCGMAVAYIAERDFLFWFRSHTAKEVKWGGAKHHPEDKDDGQRMHPRSSFKAFLEVVKSRSLPWENAEMDAIHSLQLILRDSFRDAEATNSKAVVHTQLKDMELQGMDELSSVAREMVRLIETATAPIFAVDVEGRINGWNAKVAELTGLSVEEAMGKSLVHDLVYKEYEEIVDKLIHRAVKGEEDKNVEIKLRTFCSEHQKKAVFVVVNACSSKDYMDNIVGVCFVGQDVTGQKVVMDKYVLIQGDYKAIVHSPNPSIPPIFASDENTCCLEWNTAMEKLTGWSRGEVVGKMLVGEVFGSCCRLKGPDALTKFMIALHNAIGGIDTDKLPFSFFDRNEKNVQTLLTANKRVNMKGDIIGAFCFLQIASPELQPSLKVQKQQEKKSFARMKELAYICQEIKNPLSGIHFTNSLLENTDLTEDQQQFLETSAACEKQILKIIRDIDLESIENGSLELEKAEFLLGSVINAVVSQAMLLLRERNLQLLRDIPEEIKTLAVYGDQARIQQVLADFLLNMVSYTQSSAGWVEIHVCPTLKQISDGHTLVHTEFRYLERVLQTRMLGLQHPPRSFLNCKLTLVKLHREGMVPKIQFQGLSVCQGRLIWLSFPENTTVALYPLTIWFLLLHRHQSRSITHT

SEQ ID NO: 33723 - protein, 1146 aa, Populus tremula
MASQSQRQSNQPAHNQAQSSGTSNMRQHHHPTESVSKAIAQYTVDAQLHAVFEQSGGTGKSFDYSKSVRTPNQSVPEEQITAYLSKIQRGGHIQPFGCMIAADEQSFRVIAYSENAKDMLGLTPQSVPSLEKQEILFVGADVRILFRPSSAVLLEKAFGAREITLLNPIWIHSKNSGKPFYAILHRIDVGIVIDLEPARTEDPALSIAGAVQSQKLAVRAISQLQSLPGGDIKLLCDTVVDSVRELTGYDRVMVYKFHEDEHGEVVAENKRVDLEPYIGLHYPSTDIPQASRFLFKQNRVRMIVDCHAIPVSVIQDEGLMQPLCLVGSTLRAPHGCHAQYMENMGSIASLAMAVIIYGNDEEAIGGRNSMRLWGLVVCHHTSTTCIPFPLRYACEFLMQAFGLQLNMELQLASQLLEKHVLRTQTLLCDMLLRDSPTGIVTQSPSIMDLVKCDGAALYYQGQYYPLGVTPTEAQIKDIVEWLLTLHGDPTGLSTDSLADAGYPGAAFLGDAVCGMAVAYIAERDFLFWFRSHTAKEVKWGGAKHHPEDKDDGQRMHPRSSFKAFLEVVKSRSLPWENAEMDAIHSLQLILRDSFRDAEATNSKAVVHTQLKDMELQGMDELSSVAREMVRLIETATAPIFAVDVEGRINGWNAKVAELTGLSVEEAMGKSLVHDLVYKEYEEIVDKLIHRAVKGEEDKNVEIKLRTFCSEHQKKAVFVVVNACSSKDYMDNIVGVCFVGQDVTGQKVVMDKYVLIQGDYKAIVHSPNPSIPPIFASDENTCCLEWNTALEKLTGWSRGEVVGKMLVGEVFGSCCRLKGPNALTKFMIALHNAIGGIDTDKLTFSFFDRNEKNVQTLLTANKRVNIKGDIIGAFCFLQIASLELQPSLKVQKQQEKKSFARMKELAYICQEIKNPLSGIHFTNSLLENTDLTEDQQQFLETSAACEKQILKIIRDIDLESIENGSLELEKAEFLLGSVINAVVSQAMLLLRERNLQLLRDIPEEIKTLAVYGDQARIQQVLADFLLNMVRYAPSSAGWVEIHVCPTLKQISDGHTLVHTEFRYLERVLQTRMLGLQHPLRSFLNCKLTLVMLHREGMVPKIQFQGLSVCQGRLIWLSFPENTTVALYPLTIWFLLLHRHQSRSITHT

SEQ ID NO: 33724 - protein, 1146 aa, Populus tremula
MASQSQRQSNQPAHNQAQSSGTSNMRQHHHPTESVSKAIAQYTVDAQLHAVFEQSGGTGKSFDYSKSVRTPNQSVPEEQITAYLSKIQRGGHIQPFGCMIAADEQSFRVIAYSENAKDMLGLTPQSVPSLEKQEILFVGADVRILFRPSSAVLLEKAFGAREITLLNPIWIHSKNSGKPFYAILHRIDVGIVIDLEPARTEDPALSIAGAVQSQKLAVRAISQLQSLPGGDIKLLCDTVVDSVRELTGYDRVMVYKFHEDEHGEVVAENKRVDLEPYIGLHYPSTDIPQASRFLFKQNRVRMIVDCHAIPVSVIQDEGLMQPLCLVGSTLRAPHGCHAQYMENMGSIASLAMAVIIYGNDEEAIGGRNSMRLWGLVVCHHTSARCIPFPLRYACEFLMQAFGLQLNMELQLASQLLEKHVLRTQTLLCDMLLRDSPTGIVTQSPSIMDLVKCDGAALYYQGQYYPLGVTPTEAQIKDIVEWLLTLHGDPTGLSTDSLADAGYPGAAFLGDAVCGMAVAYIAERDFLFWFRSHTAKEVKWGGAKHHPEDKDDGQRMHPRSSFKAFLEVVKSRSLPWENAEMDAIHSLQLILRDSFRDAEATNSKAVVHTQLKDMELQGMDELSSVAREMVRLIETATAPIFAVDVDGRINGWNAKVAELTGLSVEEAMGKSLVHDLVYKEYEEIVDKLIHRAVKGEEDKNVEIKLRTFCSEHQKKAVFVVVNACSSKDYMDNIVGVCFVGQDVTGQKVVMDKYVLIQGDYKAIVHSPNPSIPPIFASDENTCCLEWNTAMEKLTGWSRGEVVGKMLVGEVFGNCCRLKGPDALTKFMIALHNAIGGIDTDKLPFSFFDRNEKNVQTLLTANKRVNMKGDIIGAFCFLQIASPELQPSLKVQKQQEKKSFARMKELAYICQEIKNPLSGIHFTNSLLENTDLTEDQQQFLETSAACEKQILKIIRDIDLESIENGSLELEKAEFLLGSVINAVVSQAMLLLRERNLQLLRDIPEEIKTLAVYGDQARIQQVLADFLLNMVRYAPSSAGWVEIHVCPTLKQISDGHTLVHTEFRYLERVLQTRMLGLQHPLRSFLNCKLTLVMLHREGMVPKIQFQGLSVCQGRLIWLSFPENTTVALYPLTIWFLLLHRHQSRSITHT

SEQ ID NO: 33725 - protein, 1146 aa, Populus tremula
MASQSQRQSNQPAHNQAQSSGTSNMRQHHHPTESVSKAIAQYTVDAQLHAVFEQSGGTGKSFDYSKSVRTPNQSVPEEQITAYLSKIQRGGHIQPFGCMIAADEQSFRVIAYSENAKDMLGLTPQSVPSLEKQEILFVGADVRILFRPSSAVLLEKAFGAREITLLNPIWIHSKNSGKPFYAILHRIDVGIVIDLEPARTEDPALSIAGAVQSQKLAVRAISQLQSLPGGDIKLLCDTVVDSVRELTGYDRVMVYKFHEDEHGEVVAENKRVDLEPYIGLHYPSTDIPQASRFLFKQNRVRMIVDCHAIPVSVIQDEGLMQPLCLVGSTLRAPHGCHAQYMENMGSIASLAMAVIIYGNDEEAIGGRNSMRLWGLVVCHHTSTRCIPFPLRYACEFLMQAFGLQLNMELQLASQLLEKHVLRTQTLLCDMLLRDSPTGIVTQSPSIMDLVKCDGAALYYQGQYYPLGVTPTEAQIKDIVEWLLTLHGDPTGLSTDSLADAGYPGAAFLGDAVCGMAVAYIAERDFLFWFRSHTAKEVKWGGAKHHPEDKDDGQRMHPRSSFKAFLEVVKSRSLPWENAEMDAIHSLQLILRDSFRDAEATNSKAVVHNQLKDMELQGMDELSSVAREMVRLIETATAPIFAVDVDGRINGWNAKVAELTGLSVEEAMGKSLVHDLVYKEYEEIVDKLIHRAVKGEEDKNVEIKLRTFCSEHQKKAVFVVVNACSSKDYMDNIVGVCFVGQDVTGQKVVMDKYVLIQGDYKAIVHSPNPSIPPIFASDENTCCLEWNTAMEKLTGWSRGEVVGKMLVGEVFGSCCRLKGPDALTKFMIALHNAIGGIDTDKLPFSFFDRNEKNVQTLLTANKRVNIKGDIIGPFCFLQIASPELQPSLKVQKQQEKKSFARMKELAYICQEIKNPLSGIHFTNSLLENTDLTEDQQQFLETSAACEKQILKIIRDIDLESIENGSLELEKAEFLLGSVINAVVSQAMLLLRERNLQLLRDIPEEIKTLAVYGDQARIQQVLADFLLNMVRYAPSSAGWVEIHVCPTLKQISDGHTLVHTEFRYLERVLQTRMLGLQHPLRSFLNCKLTLVMLHREGMVPKIQFQGLSVCQGRLIWLSFPENTTVALYPLTIWFLLLHRHQSRSITHT

SEQ ID NO: 33726 - protein, 1146 aa, Populus tremula
MASQSQRQSNQPAHNQAQSSGTSNMRQHHHPTESVSKAIAQYTVDAQLHAVFEQSGGTGKSFDYSKSVRTPNQSLPEEQITAYLSKIQRGGHIQPFGCMSAADEQSFRVIAYSENAKDMLGLTPQSVPSLEKQEILFVGADVRILFRPSSAVLLEKAFGAREITLLNPIWIHSKNSGKPFYAILHRIDVGIVIDLEPARTEDPALSIAGAVQSQKLAVRAISQLQSLPGGDIKLLCDTVVDSVRELTGYDRVMVYKFHEDEHGEVVAENKRVDLEPYIGLHYPSTDIPQASRFLFKQNRVRMIVDCHAIPVSVIQDEGLMQPLCLVGSTLRAPHGCHAQYMENMGSIASLAMAVIIYGNDEEAIGGRNSMRLWGLVVCHHTSARCIPFPLRYACEFLMQAFGLQLNMELQLASQLLEKHVLRTQTLLCDMLLRDSPTGIVTQSPSIMDLVKCDGAALYYQGQYYPLGVTPTEAQIKDIVEWLLTLHGDPTGLSTDSLADAGYPGAAFLGDAVCGMAVAYIAERDFLFWFRSHTAKEVKWGGAKHHPEDKDDGQRMHPRSSFKAFLEVVKSRSLPWENAEMDAIHSLQLILRDSFRDAEATNSKAVVHTQLKDMELQGMDELSSVAREMVRLIETATAPIFAVDVDGRINGWNAKVAELTGLSVEEAMGKSLVHDLVYKEYEEIVDKLIHRAVKGEEDKNVEIKLRTFCSEHQKKAVFVVVNACSSKDYMDNIVGVCFVGQDVTGQKVVMDKYVLIQGDYKAIVHSPNPSIPPIFASDENTCCLEWNTAMEKLTGWSRGEVVGKMLVGEVFGSCCRLKGPDALTKFMIGLHNAIGGIDTDKLPFSFFDRNEKNVQTLLTANKRVNMKGDIIGAFCFLQIASLELQPSLKVQKQQEKKSFARMKELAYICQEIKNPLSGIHFTNSLLENTDLTEDQQQFLETSAACEKQILKIIRDIDLESIENGSLELEKAEFLLGSVINAVVSQAMLLLRERNLQLLRDIPEEIKTLAVYGDQARIQQVLADFLLNMVRYAPSSAGWVEIHVCPTLKQISDGHTLVHTEFRYLERVLQTRMLGLQHPLRSFLNCKLTLVMLHREGMVPKIQFQGLSVCQGRLIWLSFPENTTVALYPLTIWFLLLHRHQSRSITHT

SEQ ID NO: 33727 - protein, 1146 aa, Populus tremula
MASQSQRQSNQPAHNQVQSSGTSNMRQHHHPTESVSKAIAQYTVDAQLHAVFEQSGGTGKSFDYSKSVRTPNQSVPEEQITAYLSKIQRGGHIQPFGCMIAADEQSFRVIAYSENAKDMLGLTPQSVPSLEKQEILFVGADVRILFRPSSAVLLEKAFGAREITLLNPIWIHSKNSGKPFYAILHRIDVGIVIDLEPARTEDPALSIAGAVQSQKLAVRAISQLQSLPGGDIKLLCDTVVDSVRELTGYDRVMVYKFHEDEHGEVVAENKRVDLEPYIGLHYPSTDIPQASRFLFKQNRVRMIVDCHAIPVSVIQDEGLMQPLCLVGSTLRAPHGCHAQYMENMGSIASLAMAVIIYGNDEEAIGGRNSMRLWGLVVCHHTSARCIPFPLRYACEFLMQAFGLQLNMELQLASQLLEKHVLRTQTLLCDMLLRDSPTGIVTQSPSIMDLVKCDGAALYYQGQYYPLGVTPTEAQIKDIVEWLLTLHGDPTGLSTDSLADAGYPGAAFLGDAVCGMAVAYIAERDFLFWFRSHTAKEVKWGGAKHHPEDKDDGQRMHPRSSFKAFLEVVKSRSLPWENAEMDAIHSLQLILRDSFRDAEATNSKAVVHNQLKDMELQGMDELSSVAREMVRLIETATAPIFAVDVDGRINGWNAKVAELTGLSVEEAMGKSLVHDLVYKEYEEIVDKLIHRAVKGEEDKNVEIKLRTFCSEHQKKAVFVVVNACSSKDYMDNIVGVCFVGQDVTGQKVVMDKYVLIQGDYKAIVHSPNPSIPPIFASDENTCCLEWNTALEKLTGWSRGEVVGKMLVGEVFGSCCKLKGPDALTKFMIALHNAIGGIDTDKLPFSFFDRNEKNVQTLLTANKRVNMKGDIIGAFCFLQIASPELQPSLKVQKQQEKKSFARMKELAYICQEIKNPLSGIHFTNSLLENTDLTEDQQQFLETSAACEKQILKIIRDIDLESIENGSLELEKAEFLLGSVINAVVSQAMLLLRERNLQLLRDIPEEIKTLAVYGDQARIQQVLADFLLNMVRYAPSSAGWVEIHVCPTLKQISDGHTLVHTEFRYLERVLQTRMLGLQHPLRSFLNCKLTLVMLHREGMVPKIQFQGLSVCQGRLIWLSFPENTTVALYPLTIWFLLLHRHQSRSITHT

SEQ ID NO: 33728 - protein, 1146 aa, Populus tremula
MASQSQRQSNQPAHNQAQSSGTSNMRQHHHPTESVSKAIAQYTVDAQLHAVFEQSGGTGKSFDYSKSVRTPNQSVPEEQITAYLSKIQRGGHIQPFGCMIAADEQSFRVIAYSENAKDMLGLTPQSVPSLEKQEILFVGADVRILFRPSSAVLLEKAFGAREITLLNPIWIHSKNSGKPFYAILHRIDVGIVIDLEPARTEDSALSIAGAVQSQKLAVRAISQLQSLPGGDIKLLCDTVVDSVRELTGYDRVMVYKFHEDEHGEVVAENKRVDLEPYIGLHYPSTDIPQASRFLFKQNRVRMIVDCHAIPVSVIQDEGLMQPLCLVGSTLRAPHGCHAQYMENMGSIASLAMAVIIYGNDEEAIGGRNSMRLWGLVVCHHTSARCIPFPLRYACEFLMQAFGLQLNMELQLASQLLEKHVLRTQTLLCDMLLRDSPTGIVTQSPSIMDLVKCDGAALYYQGQYYPLGVTPTEAQIKDIVEWLLTLHGDPTGLSTDSLADAGYPGAAFLGDAVCGMAVAYIAERDFLFWFRSHTAKEVKWGGAKHHPEDKDDGQRMHPRSSFKAFLEVVKSRSLPWENAEMDAIHSLQLILRDSFRDAEATNSKAVVHNQLKDMELQGMDELSSVAREMVRLIETATAPIFAVDVEGRINGWNAKVAELTGLSVEEAMGKSLVHDLVYKEYEEIVDKLIHRAVKGEEDKNVEIKLRTFCSEHQKKAVFVVVNACSSKDYMDNIVGVCFVGQDVTGQKVVMDKYVLIQGDYKAIVHSPNPSIPPIFASDENTCCLEWNTAMEKLTGWSRGEVVGKMLVGEVFGSCCRLKGPDALTKFMIALHNAIGGIDTDKLPFSFFDRNEKNVQTLLTANKRVNMKGDIIGAFCFLQIASPELQPSLKVQKQQEKKSFARMKELAYICQEIKNPLSGIHFTNSLLENTDLTEDQQQFLETSAACEKQILKIIRDIDLESIENGSLELEKAEFLLGSVINAVVSQAMLLLRERNLQLLRDIPEEIKTLAVYGDQARIQQVLADFLLNMVRYAPSSAGWVEIHVCPTLKQISDGHTLVHTEFRYLERVLQTRMLGLQHPLRSFLNCKLTLVMLHREGMVPKIQFQGLSVCQGRLIWLSFPENTTVALYPLTIWFLLLHRHQSRSITHT

SEQ ID NO: 33729 - protein, 1146 aa, Populus tremula
MASQSQRQSNQPAHNQAQSSGTSNMRQHHHPTESVSKAIAQYTVDAQLHAVFEQSGGTGKSFDYSKSVRTPNQSVPEEQITAYLSKIQRGGHIQPFGCMIAADEQSFRVIAYSENAKDMLGLTPQSVPSLEKQEILFVGADVRILFRPSSAVLLEKAFGAREITLLNPIWIHSKNSGKPFYAILHRIDVGIVIDLEPARTEDPALSIAGAVQSQKLAVRAISQLQSLPGGDIKLLCDTVVDSVRELTGYDRVMVYKFHEDEHGEVVAENKRVDLEPYIGLHYPSTDIPQASRFLFKQNRVRMIVDCHAIPVSVIQDEGLMQPLCLVGSTLRAPHGCHAQYMENMGSIASLAMAVIIYGNDEEAIGGRNSMRLWGLVVCHHTSARCIPFPLRYACEFLMQAFGLQLNMELQLASQLLEKHVLRTQTLLCDMLLRDSPTGIVTQSPSIMDLVKCDGAALYYQGQYYPLGVTPTEAQIKDIVEWLLTLHGDPTGLSTDSLADAGYPGAAFLGDAVCGMAVAYIAERDFLFWFRSHTAKEVKWGGAKHHPEDKDDGQRMHPRSSFKAFLEVVKSRSLPWENAEMDAIHSLQLILRDSFRDAEATNSKAVVHTQLKDMELQGMDELSSVAREMVRLIETATAPIFAVDVEGRINGWNAKVAELTGLSVEEAMGKSLVHDLVYKEYEEIVDKLIHRAVKGEEDKNVEIKLRTFCSEHQKKAVFVVVNACSSKDYMDNIVGVCFVGQDVTGQKVVMDKYVLIQGDYKAIVHSPNPSIPPIFASDENTCCLEWNTAMEKLTGWSRGEVVGKMLVGEVFGSCCRLKGPDALTKFMIALHNAIGGIDTDKLPFSFFDRNEKNVQTLLTANKRVNMKGDIIGAFCFLQIASPELQPSLKVQKQQEKKSFARMKELAYICQEIKNPLSGIHFTNSLLENTDLTEDQQQFLETSAACEKQILKIIRDIDLESIENGSLELEKAEFLLGSVINAVVSQAMLLLRERNLQLLRDIPEEIKTLAVYGDQARIQQVLADFLLNMVRYAPSSAGWVEIHVCPTLKQISDGHTLVHTEFRYLERVLQTRMLGLQHPLRSFLNCKLTLVMLHREGMVPKIQFQGLSVCQGRLIWLSFPENTTVALYPLTIWFLLLHRHQSRSITHT

SEQ ID NO: 33730 - protein, 1146 aa, Populus tremula
MASQSQRQSNQPAHNQAQSSGTSNMRQHHHPTESVSKAIAQYTVDAQLHAVFEQSGGTGKSFDYSKSVRTPNQSVPEEQITAYLSKIQRGGHIQPFGCMIAADEQSFRVIAYSENAKDMLGLTPQSVPSLEKQEILFVGADVRILFRPSSAVLLEKAFGAREITLLNPIWIHSKNSGKPFYAILHRIDVGIVIDLEPARTEDPALSIAGAVQSQKLAVRAISQLQSLPGGDIKLLCDTVVDSVRELTGYDRVMVYKFHEDEHGEVVAENKRVDLEPYIGLHYPSTDIPQASRFLFKQNRVRMIVDCHAIPVSVIQDEGLMQPLCLVGSTLRAPHGCHAQYMENMGSIASLAMAVIIYGNDEEAIGGRNSMRLWGLVVCHHTSARCIPFPLRYACEFLMQAFGLQLNMELQLASQLLEKHVLRTQTLLCDMLLRDSPTGIVTQSPSIMDLVKCDGAALYYQGQYYPLGVTPTEAQIKDIVEWLLTLHGDPTGLSTDSLADAGYPGAAFLGDAVCGMAVAYIAERDFLFWFRSHPAKEVKWGGAKHHPEDKDDGQRMHPRSSFKAFLEVVKSRSLPWENAEMDAIHSLQLILRDSFRDAEATNSKAVVHTQLKDMELQGMDELSSVAREMVRLIETATAPIFAVDVDGRINGWNAKVAELTGLSVEEAMGKSLVHDLVYKEYEEIVDKLIHRAVKGEEDKNVEIKLRTFCSEHQKKAVFVVVNACSSKDYMDNIVGVCFVGQDVTGQKVVMDKYVLIQGDYKAIVHSPNPSIPPIFASDENTCCLEWNTAMEKLTGWSRGEVVGKMLVGEVFGSCCRLKGPDALTKFMIALHNAIGGIDTDKLPFSFFDRNEKNVQTLLTANKRVNIKGDIIGAFCFLQIASPELQPSLKVQKQQEKKSFARMKELAYICQEIKNPLSGIHFTNSLLENTGLTEDQQQFLETSAACEKQILKIIRDIDLESIENGSLELEKAEFLLGSVINAVVSQAMLLLRERNLQLLRDIPEEIKTLAVYGDQARIQQVLADFLLNMVRYAPSSAGWVEIHVCPTLKQISDGHTLVHTEFRYLERVLQTRMLGLQHPLRSFLNCKLTLVMLHREGMVPKIQFQGLSVCQGRLIWLSFPENTTVALYPLTIWFLLLHRHQSRSITHT

SEQ ID NO: 33731 - protein, 1146 aa, Populus tremula
MASQSQRQSNQPAHNQAQSSGTSNMRQHHHPTESVSKAIAQYTVDAQLHAVFEQSGGTGKSFDYSKSVRTPNQSVPEEQITAYLSKIQRGGHIQPFGCMIAADEQSFRVIAYSENAKDMLGLTPQSVPSLEKQEILFVGADVRILFRPSSAVLLEKAFGAREITLLNPIWIHSKNSGKPFYAILHRIDVGIVIDLEPARTEDPALSIAGAVQSQKLAVRAISQLQSLPGGDIKLLCDTVVDSVRELTGYDRVMVYKFHEDEHGEVVAENKRVDLEPYIGLHYPSTDIPQASRFLFKQNRVRMIVDCHAIPVSVIQDEGLMQPLCLVGSTLRAPHGCHAQYMENMGSIASLAMAVIIYGNDEEAIGGRNSMRLWGLVVCHHTSARCIPFPLRYACEFLMQAFGLQLNMELQLASQLLEKHVLRTQTLLCDMLLRDSPTGIVTQSPSIMDLVKCDGAALYYQGQYYPLGVTPTEAQIKDIVEWLLTLHGDPTGLSTDSLADAGYPGAAFLGDAVCGMAVAYIAERDFLFWFRSHTAKEVKWGGAKHHPEDKDDGQRMHPRSSFKAFLEVVKSRSLPWENAEMDAIHSLQLILRDSFRDAEATNSKAVVHTQLKDMELQGMDELSSVAREMVRLIETATAPIFAVDVDGRINGWNAKVAELTGLSVEEAMGKSLVHDLVYKEYEEIVDKLIHRAVKGEEDKNVEIKLRTFCSEHQKKAVFVVVNACSSKDYMDNIVGVCFVGQDVTGQKVVMDKYVLIQGDYKAIVHSPNPSIPPIFASDENTCCLEWNTAMEKLTGWSRGEVVGKMLVGEVFGSCCRLKGPDALTKFMIALHNAIGGIDTDKLPFSFFDRNEKNVQTLLTANKRVNIKGDIIGAFCFLQIASPELQPSLKVQKQQEKKSFARMKELAYICQEIKNPLSGIHFTNSLLENTDLTEDQQQFLETSAACEKQILKIIRDIDLESIENGSLELEKAEFLLGSVINAVVSQAMLLLRERNLQLLRDIPEEIKTLAVYGDQARIQQVLADFLLNMVRYAPSSAGWVEIHVCPTLKQISDGHTLVHTEFRYLERVLQTRMLGLQHPLRSFLNCKLTLVMLHREGMVPKIQFQGLSVCQGRLIWLSFPENTTVALYPLTIWFLLLHRHQSRSITHT

SEQ ID NO: 33732 - protein, 1146 aa, Populus tremula
MASQSQRQSNQPAHNQAQSSGTSNMRQHHHPTESVSKAIAQYTVDAQLHAVFEQSGGTGKSFDYSKSVRTPNQSVPEEQITAYLSKIQRGGHIQPFGCMIAADEQSFRVIAYSENAKDMLGLTPQSVPSLEKQEILFVGADVRILFRPSSAVLLEKAFGAREITLLNPIWIHSKNSGKPFYAILHRIDVGIVIDLEPARTEDPALSIAGAVQSQKLAVRAISQLQSLPGGDIKLLCDTVVDSVRELTGYDRVMVYKFHEDEHGEVVAENKRVDLEPYIGLHYPSTDIPQASRFLFKQNRVRMIVDCHAIPVSVIQDEGLMQPLCLVGSTLRAPHGCHAQYMENMGSIASLAMAVIIYGNDEEAIGGRNSMRLWGLVVCHHTSARCIPFPLRYACEFLMQAFGLQLNMELQLASQLLEKHVLRTQTLLCDMLLRDSPTGIVTQSPSIMDLVKCDGAALYYQGQYYPLGVTPTEAQIKDIVEWLLTLHGDPTGLSTDSLADAGYPGAAFLGDAVCGMAVAYIAERDFLFWFRSHTAKEVKWGGAKHHPEDKDDGQRMHPRSSFKAFLEVVKSRSLPWENAEMDAIHSLQLILRDSFRDAEATNSKAVVHNQLKDMELQGMDELSSVAREMVRLIETATAPIFAVDVDGRINGWNAKVAELTGLSVEEAMGKSLVHDLVYKEYEEIVDKLIHRAVKGEEDKNVEIKLRTFCSEHQKKAVFVVVNACSSKDYMDNIVGVCFVGQDVTGQKVVMDKYVLIQGDYKAIVHSPNPSIPPIFASDENTCCLEWNTAMEKLTGWSRGEVVGKMLVGEVFGSCCRLKGPDALTKFMIALHNAIGGIDTDKLPFSFFDRNEKNVQTLLTANKRVNMKGDIIGAFCFLQIASPELQPSLKVQKQQEKKSFARMKELAYICQEIKNPLSGIHFTNSLLENTDLTEDQQQFLETSAACEKQILKIIRDIDLESIENGSLELEKAEFLLGSVINAVVSQAMLLLRERNLQLLRDIPEEIKTLAVYGDQARIQQVLADFLLNMVRYAPSSAGWVEIHVCPTLKQISDGHTLVHTEFRYLERVLQTRMLGLQHPPRSFLNCKLTLVMLHREGMVPKIQFQGLSVCQGRLIWLSFPENTTVALYPLTIWFLLLHRHQSRSITHT

SEQ ID NO: 33733 - protein, 1146 aa, Populus tremula
MASQSQRQSNQPAHNQAQSSGTSNMRQHHHPTESVSKAIAQYTVDAQLHAVFEQSGGTGKSFDYSKSVRTPNQSVPEEQITAYLSKIQRGGHIQPFGCMIAADEQSFRVIAYSENAKDMLGLTPQSVPSLEKQEILFVGADVRILFRPSSAVLLEKAFGAREITLLNPIWIHSKNSGKPFYAILHRIDVGIVIDLEPARTEDPALSIAGAVQSQKLAVRAISQLQSLPGGDIKLLCDTVVDSVRELTGYDRVMVYKFHEDEHGEVVAENKRVDLEPYIGLHYPSTDIPQASRFLFKQNRVRMIVDCHAIPVSVIQDEGLMQPLCLVGSTLRAPHGCHAQYMENMGSIASLAMAVIIYGNDEEAIGGRNSMRLWGLVVCHHTSARCIPFPLRYACEFLMQAFGLQLNMELQLASQLLEKHVLRTQTLLCDMLLRDSPTGIVTQSPSIMDLVKCDGAALYYQGQYYPLGVTPTEAQIKDIVEWLLTLHGDPTGLSTDSLADAGYPGAAFLGDAVCGMAVAYIAERDFLFWFRSHTAKEVKWGGAKHHPEDKDDGQRMHPRSSFKAFLEVVKSRSLPWENAEMDAIHSLQLILRDSFRDAEATNSKAVVHNQLKDMELQGMDELSSVAREMVRLIETATAPIFAVDVDGRINGWNAKVAELTGLSVEEAMGKSLVHDLVYKEYEEIVDKLIHRAVKGEEDKNVEIKLRTFCSEHQKKAVFVVVNACSSKDYMDNIVGVCFVGQDVTGQKVVMDKYVLIQGDYKAIVHSPNPSIPPIFASDENTCCLEWNTALEKLTGWSRGEVVGKMLVGEVFGSCCRLKGPDALTKFMIALHNAIGGIDTDKLPFSFFDRNEKNVQTLLTANKRVNMKGDIIGAFCFLQIASLELQPSLKVQKQQEKKSFARMKELAYICQEIKNPLSGIHFTNSLLENTDLTEDQQQFLETSAACEKQILKIIRDIDLESIENGSLELEKAEFLLGSVINAVVSQAMLLLRERNLQLLRDIPEEIKTLAVYGDQARIQQVLADFLLNMVRYAPSSAGWVEIHVCPTLKQISDGHTLVHTEFRYLERVLQTRMLGLQHPPRSFLNCKLTLVMLHREGMVPKIQFQGLSVCQGRLIWLSFPENTTVALYPLTIWFLLLHRHQSRSITHT

SEQ ID NO: 33734 - protein, 1146 aa, Populus tremula
MASQSQRQSNQPAHNQAQSSGTSNMRQHHHPTESVSKAIAQYTVDAQLHAVFEQSGGTGKSFDYSKSVRTPNQSVPEEQITAYLSKIQRGGHIQPFGCMIAADEQSFRVIAYSENAKDMLGLTPQSVPSLEKQEILFVGADVRILFRPSSAVLLEKAFGAREITLLNPIWIHSKNSGKPFYAILHRIDVGIVIDLEPARTEDPALSIAGAVQSQKLAVRAISQLQSLPGGDIKLLCDTVVDSVRELTGYDRVMVYKFHEDEHGEVVAENKRVDLEPYIGLHYPSTDIPQASRFLFKQNRVRMIVDCHAIPVSVIQDEGLMQPLCLVGSTLRAPHGCHAQYMENMGSIASLAMAVIIYGNDEEAIGGRNSMRLWGLVVCHHTSARCIPFPLRYACEFLMQAFGLQLNMEFQLASQLLEKHVLRTQTLLCDMLLRDSPTGIVTQSPSIMDLVKCDGAALYYQGQYYPLGVTPTEAQIKDIVEWLLTLHGDPTGLSTDSLADAGYPGAAFLGDAVCGMAVAYIAERDFLFWFRSHTAKEVKWGGAKHHPEDKDDGQRMHPRSSFKAFLEVVKSRSLPWENAEMDAIHSLQLILRDSFRDAEATNSKAVVHNQLKDMELQGMDELSSVAREMVRLIETATAPIFAVDVDGRINGWNAKVAELTGLSVEEAMGKSLVHDLVYKEYEEIVDKLIHRAVKGEEDKNVEIKLRTFCSEHQKKAVFVVVNACSSKDYMDNIVGVCFVGQDVTGQKVVMDKYVLIQGDYKAIVHSPNPSIPPIFASDENTCCLEWNTALEKLTGWSRGQVVGKMLVGEVFGSCCRLKGPDALTKFMIALHNAIGGIDTDKLPFSFFDRNEKNVQTLLTANKRVNIKGDIIGAFCFLQIASPELQPSLKVQKQQEKKSFARMKELAYICQEIKNPLSGIHFTNSLLENTDLTEDQQQFLETSAACEKQILKIIRDIDLESIENGSLELEKAEFLLGSVINAVVSQAMLLLRERNLQLLRDIPEEIKTLAVYGDQARIQQVLADFLLNMVRYAPSSAGWVEIHVCPTLKQISDGHTLVHTEFRYLERVLQTRMLGLQHPPRSFLNCKLTLVKLHREGMVPKIQFQGLSVCQGRLIWLSFPENTTVALYPLTIWFLLLHRHQSRSITHT

SEQ ID NO: 33735 - protein, 1146 aa, Populus tremula
MASQSQRQSNQPAHNQAQSSGTSNMRQHHHPTESVSKAIAQYTVDAQLHAVFEQSGGTGKSFDYSKSVRTPNQSVPEEQITAYLSKIQRGGHIQPFGCMIAADEQSFRVIAYSENAKDMLGLTPQSVPSLEKQEILFVGADVRILFRPSSAVLLEKAFGAREITLLNPIWIHSKNSGKPFYAILHRIDVGIVIDLEPARTEDPALSIAGAVQSQKLAVRAISQLQSLPGGDIKLLCDTVVDSVRELTGYDRVMVYKFHEDEHGEVVAENKRVDLEPYIGLHYPSTDIPQASRFLFKQNRVRMIVDCHAIPVSVIQDEGLMQPLCLVGSTLRAPHGCHAQYMENMGSIASLAMAVIIYGNDEEAIGGRNSMRLWGLVVCHHTSARCIPFPLRYACEFLMQAFGLQLNMELQLASQLLEKHVLRTQTLLCDMLLRDSPTGIVTQSPSIMDLVKCDGAALYYQGQYYPLGVTPTEAQIKDIVEWLLTLHGDPTGLSTDSLADAGYPGAAFLGDAVCGMAVAYIAERDFLFWFRSHTAKEVKWGGAKHHPEDKDDGQRMHPRSSFKAFLEVVKSRSLPWENAEMDAIHSLQLILRDSFRDAEATNSKAVVHTQLKDMELQGMDELSSVAREMVRLIETATAPIFAVDVDGRINGWNAKVAELTGLSVEEAMGKSLVHDLVYKEYEEIVDKLIHRAVKGEEDKNVEIKLRTFCSEHQKKAVFVVVNACSSKDYMDNIVGVCFVGQDVTGQKVVMDKYVLIQGDYKAIVHSPNPSIPPIFASDENTCCLEWNTALEKLTGWSRGEVVGKMLVGEVFGSCCRLKGPDALTKFMIALHNAIGGIDTDKLPFSFFDRNEKNVQTLLTANKRVNIKGDIIGAFCFLQIASPELQPSLKVQKQQEKKSFARMKELAYICQEIKNPLSGIHFTNSLLENTDLTEDQQQFLETSAACEKQILKIIRDIDLESIENGSLELEKAEFLLGSVINAVVSQAMLLLRERNLQLLRDIPEEIKTLAVYGDQARIQQVLADFLLNMVRYAPSSAGWVEIHVCPTLKQISDGHTLVHTEFRYLERVLQTRMLGLQHPPRSFLNCKLTLVMLHREGMVPKIQFQGLSVCQGRLIWLSFPENTTVALYPLTIWFLLLHRHQSRSITHT

SEQ ID NO: 33736 - protein, 1146 aa, Populus tremula
MASQSQRQSNQPAHNQAQSSGTSNMRQHHHPTESVSKAIAQYTVDAQLHAVFEQSGGTGKSFDYSKSVRTPNQSVPEEQITAYLSKIQRGGHIQPFGCMIAADEQSFRVIAYSENAKDMLGLTPQSVPSLEKQEILFVGADVRILFRPSSAVLLEKAFGAREITLLNPIWIHSKNSGKPFYAILHRIDVGIVIDLEPARTEDPALSIAGAVQSQKLAVRAISQLQSLPGGDIKLLCDTVVDSVRELTGYDRVMVYKFHEDEHGEVVAENKRVDLEPYIGLHYPSTDIPQASRFLFKHNRVRMIVDCHAIPVSVIQDEGLMQPLCLVGSTLRAPHGCHAQYMENMGSIASLAMAVIIYGNDEEAIGGRNSMRLWGLVVCHHTSARCIPFPLRYACEFLMQAFGLQLNMELQLASQLLEKHVLRTQTLLCDMLLRDSPTGIVTQSPSIMDLVKCDGAALYYQGQYYPLGVTPTEAQIKDIVEWLLTLHGDPTGLSTDSLADAGYPGAAFLGDAVCGMAVAYIAERDFLFWFRSHTAKEVKWGGAKHHPEDKDDGQRMHPRSSFKAFLEVVKSRSLPWENAEMDAIHSLQLILRDSFRDAEATNSKAVVHTQLKDMELQGMDELSSVAREMVRLIETATAPIFAVDVDGRINGWNAKVAELTGLSVEEAMGKSLVHDLVYKEYEEIVDKLIHRAVKGEEDKNVEIKLRTFCSEHQKKAVFVVVNACSSKDYMDNIVGVCFVGQDVTGQKVVMDKYVLIQGDYKAIVHSPNPSIPPIFASDENTCCLEWNTALEKLTGWSRGEVVGKMLVGEVFGSCCRLKGPDALTKFMIALHNAIGGIDTDKLPFSFFDRNEKNVQTLLTANKRVNMKGDIIGAFCFLQIASPELQPSLKVQKQQEKKSFARMKELAYICQEIKNPLSGIHFTNSLLENTDLTEDQQQFLETSAACEKQILKIIRDIDLESIENGSLELEKAEFLLGSVINAVVSQAMLLLRERNLQLLRDIPEEIKTLAVYGDQARIQQVLADFLLNMVRYAPSSAGWVEIHVCPTLKQISDGHTLVHTEFRYLERVLQTRMLGLQHPLRSFLNCKLTLVKLHREGMVPKIQFQGLSVCQGRLIWLSFPENTTVALYPLTIWFLLLHRHQSRSITHT

SEQ ID NO: 33737 - protein, 1146 aa, Populus tremula
MASQSQRQSNQPAHNQAQSSGTSNMRQHHHPTESVSKAIAQYTVDAQLHAVFEQSGGTGKSFDYSKSVRTPNQSVPEEQITAYLSKIQRGGHIQPFGCMIAADEQSFRVIAYSENAKDMLGLTPQSVPSLEKQEILFVGADVRILFRPSSAVLLEKAFGAREITLLNPIWIHSKNSGKPFYAILHRIDVGIVIDLEPARTEDPALSIAGAVQSQKLAVRAISQLQSLPGGDIKLLCDTVVDSVRELTGYDRVMVYKFHEDEHGEVVAENKRVDLEPYIGLHYPSTDIPQASRFLFKQNRVRMIVDCHAIPVSVIQDEGLMQPLCLVGSTLRAPHGCHAHYMENMGSIASLAMAVIIYGNDEEAIGGRNSMRLWGLVVCHHTSARCIPFPLRYACEFLMQAFGLQLNMELQLASQLLEKHVLRTQTLLCDMLLRDSPTGIVTQSPSIMDLVKCDGAALYYQGQYYPLGVTPTEAQIKDIVEWLLTLHGDPTGLSTDSLADAGYPGAAFLGDAVCGMAVAYIAERDFLFWFRSHTAKEVKWGGAKHHPEDKDDGQRMHPRSSFKAFLEVVKSRSLPWENAEMDAIHSLQLILRDSFRDAEATNSKAVVHTQLKDMELQGMDELSSVAREMVRLIETATAPIFAVDVEGRINGWNAKVAELTGLSVEEAMGKSLVHDLVYKEYEEIVDKLIHRAVKGEEDKNVEIKLRTFCSEHQKKAVFVVVNACSSKDYMDNIVGVCFVGQDVTGQKVVMDKYVLIQGDYKAIVHSPNPSIPPIFASDENTCCLEWNTALEKLTGWSRGEVVGKMLVGEVFGSCCRLKGPDALTKFMIALHNAIGGIDTDKLPFSFFDRNEKNVQTLLTANKRVNMKGDIIGAFCFLQIASPELQPSLKVQKQQEKKSFARMKELAYICQEIKNPLSGIHFTNSLLENTDLTEDQQQFLETSAACEKQILKIIRDIDLESIENGSLELEKAEFLLGSVINAVVSQAMLLLRERNLQLLRDIPEEIKTLAVYGDQARIQQVLADFLLNMVRYAPSSAGWVEIHVCPTLKQISDGHTLVHTEFRYLERVLQTRMLGLQHPLRSFLNCKLTLVMLHREGMVPKIQFQGLSVCQGRLIWLSFPENTTVALYPLTIWFLLLHRHQSRSITHT

SEQ ID NO: 33738 - protein, 1146 aa, Populus tremula
MASQSQRQSNQPAHNQAQSSGTSNMRQHHHPTESVSKAIAQYTVDAQLHAVFEQSGGTGKSFDYSKSVRTPNQSVPEEQITAYLSKIQRGGHIQPFGCMIAADEQSFRVIAYSENAKDMLGLTPQSVPSLEKQEILFVGADVRILFRPSSAVLLEKAFGAREITLLNPIWIHSKNSGKPFYAILHRIDVGIVIDLEPARTEDPALSIAGAVQSQKLAVRAISQLQSLPGGDIKLLCDTVVDSVRELTGYDRVMVYKFHEDEHGEVVAENKRVDLEPYIGLHYPSTDIPQASRFLFKQNRVRMIVDCHAIPVSVIQDEGLMQPLCLVGSTLRAPHGCHAQYMENMGSIASLAMAVIIYGNDEEAIGGRNSMRLWGLVVCHHTSARCIPFPLRYACEFLMQAFGLQLNMELQLASQLLEKHVLRTQTLLCDMLLRDSPTGIVTQSPSIMDLVKCDGAALYYQGQYYPLGVTPTEAQIKDIVEWLLTLHGDPTGLSTDSLADAGYPGAAFLGDAVCGMAVAYIAERDFLFWFRSHTAKEVKWGGAKHHPEDKDDGQRMHPRSSFKAFLEVVKSRSLPWENAEMDAIHSLQLILRDSFRDAEATNSKAVVHTQLKDMELQGMDELSSVAREMVRLIETATAPIFAVDVDGCINGWNAKVAELTGLSVEEAMGKSLVHDLVYKEYEEIVDKLIHRAVKGEEDKNVEIKLRTFCSEHQKKAVFVVVNACSSKDYMDNIVGVCFVGQDVTGQKVVMDKYVLIQGDYKAIVHSPNPSIPPIFASDENTCCLEWNTALEKLTGWSRGEVVGKMLVGEVFGSCCRLKGPDALTKFMIALHNAIGGIDTDKLPFSFFDRNEKNVQTLLTANKRVNIKGDIIGAFCFLQIASPELQPSLKVQKQQEKKSFARMKELAYICQEIKNPLSGIHFTNSLLENTDLTEDQQQFLETSAACEKQILKIIRDIDLESIENGSLELEKAEFLLGSVINAVVSQAMLLLRERNLQLLRDIPEEIKTLAVYGDQARIQQVLADFLLNMVRYAPSSAGWVEIHVCPTLKQISDGHTLVHTEFRYLERVLQTRMLGLQHPLRSFLNCKLTLVMLHREGMVPKIQFQGLSVCQGRLIWLSYPENTTVALYPLTIWFLLLHRHQSRSITHT

SEQ ID NO: 33739 - protein, 1146 aa, Populus tremula
MASQSQRQSNQPAHNQAQSSGTSNMRQHHHPTESVSKAIAQYTVDAQLHAVFEQSGGTGKSFDYSKSVRTPNQSVPEEQITAYLSKIQRGGHIQPFGCMIAADEQSFRVIAYSENAKDMLGLTPQSVPSLEKQEILFVGADVRILFRPSSAVLLEKAFGAREITLLNPIWIHSKNSGKPFYAILHRIDVGIVIDLEPARTEDPALSIAGAVQSQKLAVRAISQLQSLPGGDIKLLCDTVVDSVRELTGYDRVMVYKFHEDEHGEVVAENKRVDLEPYIGLHYPSTDIPQASRFLFKQNRVRMIVDCHAIPVSVIQDEGLMQPLCLVGSTLRAPHGCHAQYMENMGSIASLAMAVIIYGNDEEAIGGRNSMRLWGLVVCHHTSTRCIPFPLRYACEFLMQAFGLQLNMELQLASQLLEKHVLRTQTLLCDMLLRDSPTGIVTQSPSIMDLVKCDGAALYYQGQYYPLGVTPTEAQIKDIVEWLLTLHGDPTGLSTDSLADAGYPGAAFLGDAVCGMAVAYIAERDFLFWFRSHTAKEVKWGGAKHHPEDKDDGQRMHPRSSFKAFLEVVKSRSLPWENAEMDAIHSLQLILRDSFRDAEATNSKAVVHTQLKDMELQGMDELSSVAREMVRLIETATAPIFAVDVDGCINGWNAKVAELTGLSVEEAMGKSLVHDLVYKEYEEIVDKLIHRAVKGEEDKNVEIKLRTFCSEHQKKAVFVVVNACSSKDYMDNIVGVCFVGQDVTGQKVVMDKYVLIQGDYKAIVHSPNPSIPPIFASDENTCCLEWNTAMEKLTGWSRGEVVGKMLVGEVFGNCCRLKGPDALTKFMIALHNAIGGIDTDKLPFSFFDRNEKNVQTLLTANKRVNMKGDIIGAFCFFRIASPELQPSLKVQKQQEKKSFARMKELAYICQEIKNPLSGIHFTNSLLENTDLTEDQQQFLETSAACEKQILKIIRDIDLESIENGSLELEKAEFLLGSVINAVVSQAMLLLRERNLQLLRDIPEEIKTLAVYGDQARIQQVLADFLLNMVRYAPSSAGWVEIHVCPTLKQISDGHTLVHTEFKYLERVLQTRMLGLQHPLRSFLNCKLTLVMLHREGMVPKIQFQGLSVCQGRLIWLSYPENTTVALYPLTIWFLLLHRHQSRSITHT

SEQ ID NO: 33740 - protein, 1146 aa, Populus tremula
MASQSQRQSNQPAHNQAQSSGTSNMRQHHHPTESVSKAIAQYTVDAQLHAVFEQSGGTGKSFDYSKSVRTPNQSVPEEQITAYLSKIQRGGHIQPFGCMIAADEQSFRVIAYSENAKDMLGLTPQSVPSLEKQEILFVGADVRILFRPSSAVLLEKAFGAREITLLNPIWIHSKNSGKPFYAILHRIDVGIVIDLEPARTEDPALSIAGAVQSQKLAVRAISQLQSLPGGDIKLLCDTVVDSVRELTGYDRVMVYKFHEDEHGEVVAENKRVDLEPYIGLHYPSTDIPQASRFLFKQNRVRMIVDCHAIPVSVIQDEGLMQPLCLVGSTLRAPHGCHAQYMENMGSIASLAMAVIIYGNDEEAIGGRNSMRLWGLVVCHHTSARCIPFPLRYACEFLMQAFGLQLNMELQLASQLLEKHVLRTQTLLCDMLLRDSPTGIVTQSPSIMDLVKCDGAALYYQGQYYPLGVTPTEAQIKDIVEWLLTLHGDPTGLSTDSLADAGYPGAAFLGDAVCGMAVAYIAERDFLFWFRSHTAKEVKWGGAKHHPEDKDDGQRMHPRSSFKAFLEVVKSRSLPWENAEMDAIHSLQLILRDSFRDAEATNSKAVVHTQLKDMELQGMDELSSVAREMVRLIETATAPIFAVDVEGRINGWNAKVAELTGLSVEEAMGKSLVHDLVYKEYEEIVDKLIHRAVKGEEDKNVEIKLRTFCSEHQKKAVFVVVNACSSKDYMDNIVGVCFVGQDVTGQKVVMDKYVLIQGDYKAIVHSPNPSIPPIFASDENTCCLEWNTALEKLTGWSRGEVVGKMLVGEVFGSCCRLKGPDALTKFMIALHNAIGGIDTDKLPFSFFDRNEKNVQTLLTANKRVNMKGDIIGAFCFLQIASPELQPSLKVQKQQEKKSFARMKELAYICQEIKNPLSGIHFTNSLLENTDLTEDQQQFLETSAACEKQILKIIRDIDLESIENGSLELEKAEFLLGSVINAVVSQAMLLLRERNLQLLRDIPEEIKTLAVYGDQARIQQVLADFLLNMVRYAPSSAGWVEIHVCPTLKQISDGHTLVHTEFRYLERVLQTRMLGLQHPLRSFLNCKLTLVKLHREGMVPKIQFQGLSVCQGRLIWLSFPENTTVALYPLTIWFLLLHRHQSRSITHT

SEQ ID NO: 33741 - protein, 1146 aa, Populus tremula
MASQSQRQSNQPAHNQAQSSGTSNMRQHHHPTESVSKAIAQYTVDAQLHAVFEQSGGTGKSFDYSKSVRTPNQSVPEEQITAYLSKIQRGGHIQPFGCMIAADEQSFRVIAYSENAKDMLGLTPQSVPSLEKQEILFVGADVRILFRPSSAVLLEKAFGAREITLLNPIWIHSKNSGKPFYAILHRIDVGIVIDLEPARTEDPALSIAGAVQSQKLAVRAISQLQSLPGGDIKLLCDTVVDSVRELTGYDRVMVYKFHEDEHGEVVAENKRVDLEPYIGLHYPSTDIPQASRFLFKQNRVRMIVDCHAIPVSVIQDEGLMQPLCLVGSTLRAPHGCHAQYMENMGSIASLAMAVIIYGNDEEAIGGRNSMRLWGLVVCHHTSARCIPFPLRYACEFLMQAFGLQLNMELQLASQLLEKHVLRTQTLLCDMLLRDSPTGIVTQSPSIMDLVKCDGAALYYQGQYYPLGVTPTEAQIKDIVEWLLTLHGDPTGLSTDSLADAGYPGAAFLGDAVCGMAVAYIAERDFLFWFRSHTAKEVKWGGAKHHPEDKDDGQRMHPRSSFKAFLEVVKSRSLPWENAEMDAIHSLQLILRDSFRDAEATNSKAVVHNQLKDMELQGMDELSSVAREMVRLIETATAPIFAVDVDGRINGWNAKVAELTGLSVEEAMGKSLVHDLVYKEYEEIVDKLIHRAVKGEEDKNVEIKLRTFCSEHQKKAVFVVVNACSSKDYMDNIVGVCFVGQDVTGQKVVMDKYVLIQGDYKAIVHSPNPSIPPIFASDENTCCLEWNTAMEKLTGWSRGEVVGKMLVGEVFGSCCRLKGPDALTKFMIALHNAIGGIDTDKLPFSFFDRNEKNVQTLLTANKRVNMKGDIIGAFCFLQIASPELQPSLKVQKQQEKKSFARMKELAYICQEIKNPLSGIHFTNSLLENTDLTEDQQQFLETSAACEKQILKIIRDIDLESIENGSLELEKAEFLLGSVINAVVSQAMLLLRERNLQLLRDIPEEIKTLAVYGDQARIQQVLADFLLNMVRYAPSSAGWVEIHVCPTLKQISDGHTLVHTEFRYLERVLQTRMLGLQHPLRSFLNCKLTLVMLHREGMVPKIQFQGLSVCQGRLIWLSFPENTTVALYPLTIWFLLLHRHQSRSITHT

SEQ ID NO: 33742 - protein, 1146 aa, Populus tremula
MASQSQRQSNQPAHNQAQSSGTSNMRQHHHPTESVSKAIAQYTVDAQLHAVFEQSGGTGKSFDYSKSVRTPNQSVPEEQITAYLSKIQRGGHIQPFGCMIAADEQSFRVIAYSENAKDMLGLTPQSVPSLEKQEILFVGADVRILFRPSSAVLLEKAFGAREITLLNPIWIHSKNSGKPFYAILHRIDVGIVIDLEPARTEDPALSIAGAVQSQKLAVRAISQLQSLPGGDIKLLCDTVVDSVRELTGYDRVMVYKFHEDEHGEVVAENKRVDLEPYIGLHYPSTDIPQASRFLFKQNRVRMIVDCHAIPVSVIQDEGLMQPLCLVGSTLRAPHGCHAQYMENMGSIASLAMAVIIYGNDEEAIGGRNSMRLWGLVVCHHTSARCIPFPLRYACEFLMQAFGLQLNMELQLASQLLEKHVLRTQTLLCDMLLRDSHTGIVTQSPSIMDLVKCDGAALYYQGQYYPLGVTPTEAQIKDIVEWLLTLHGDPTGLSTDSLADAGYPGAAFLGDAVCGMAVAYIAERDFLFWFRSHTAKEVKWGGAKHHPEDKDDGQRMHPRSSFKAFLEVVKSRSLPWENAEMDAIHSLQLILRDSFRDAEATNSKAVVHNQLKDMELQGMDELSSVAREMVRLIETATAPIFAVDVEGRINGWNAKVAELTGLSVEEAMGKSLVHDLVYKEYEEIVDKLIHRAVKGEEDKNVEIKLRTFCSEHQKKAVFVVVNACSSKDYMDNIVGVCFVGQDVTGQKVVMDKYVLIQGDYKAIVHSPNPSIPPIFASDENTCCLEWNTALEKLTGWSRGEVVGKMLVGEVFGSCCRLKGPDALTKFMIALHNAIGGIDTDKLPFSFFDRNEKNVQTLLTANKRVNMKGDIIGAFCFLQIASPELQPSLKVQKQQEKKSFARMKELAYICQEIKNPLSGIHFTNSLLENTDLTEDQQQFLETSAACEKQILKIIRDIDLESIENGSLELEKAEFLLGSVINAVVSQAMLLLRERNLQLLRDIPEEIKTLAVYGDQARIQQVLADFLLNMVRYAPSSAGWVEIHVCPTLKQISDGHTLVHTEFRYLERVLQTRMLGLQHPPRSFLNCKLTLVKLHREGMVPKIQFQGLSVCQGRLIWLRFPENTTVALYPLTIWFLLLHRHQSRSITHT

SEQ ID NO: 33743 - protein, 1146 aa, Populus tremula
MASQSQRQSNQPAHNQAQSSGTSNMRQHHHPTESVSKAIAQYTVDAQLHAVFEQSGGTGKSFDYSKSVRTPNQSVPEEQITAYLSKIQRGGHIQPFGCMIAADEQSFRVIAYSENAKDMLGLTPQSVPSLEKQEILFVGADVRILFRPSSAVLLEKAFGAREITLLNPIWIHSKNSGKPFYAILHRIDVGIVIDLEPARTEDPALSIAGAVQSQKLAVRAISQLQSLPGGDIKLLCDTVVDSVRELTGYDRVMVYKFHEDEHGEVVAENKRVDLEPYIGLHYPSTDIPQASRFLFKQNRVRMIVDCHAIPVSVIQDEGLMQPLCLVGSTLRAPHGCHAQYMENMGSIASLAMAVIIYGNDEEAIGGRNSMRLWGLVVCHHTSARCIPFPLRYACEFLMQAFGLQLNMELQLASQLLEKHVLRTQTLLCDMLLRDSPTGIVTQSPSIMDLVKCDGAALYYQGQYYPLGVTPTEAQIKDIVEWLLTLHGDPTGLSTDSLADAGYPGAAFLGDAVCGMAVAYIAERDFLFWFRSHTAKEVKWGGAKHHPEDKDDGQRMHPRSSFKAFLEVVKSRSLPWENAEMDAIHSLQLILRDSFRDAEATNSKAVVHNQLKDMELQGMDELSSVAREMVRLIETATAPIFAVDVEGRINGWNAKVAELTGLSVEEAMGKSLVHDLVYKEYEEIVDKLIHRAVKGEEDKNVEIKLRTFCSEHQKKAVFVVVNACSSKDYMDNIVGVCFVGQDVTGQKVVMDKYVLIQGDYKAIVHSPNPSIPPIFASDENTCCLEWNTALEKLTGWSRGEVVGKMLVGEVFGSCCRLKGPDALTKFMIALHNAIGGIDTDKLTFSFFDRNEKNVQTLLTANKRVNIKGDIIGAFCFLQIASPELQPSLKVQKQQEKKSFARMKELAYICQEIKNPLSGIHFTNSLLENTDLTEDQQQFLETSAACEKQILKIIRDIDLESIENGSLELEKAEFLLGSVINAVVSQAMLLLRERNLQLLRDIPEEIKTLAVYGDQARIQQVLADFLLNMVRYAPSSAGWVEIHVCPTLKQISDGHTLVHTEFRYLERVLQTRMLGLQHPPRSFLNCKLTLVMLHREGMVPKIQFQGLSVCQGRLIWLSFPENTTVALYPLTIWFLLLHRHQSRSITHT

SEQ ID NO: 33744 - protein, 1146 aa, Populus tremula
MASQSQRQSNQPAHNQAQSSGTSNMRQHHHPTESVSKAIAQYTVDAQLHAVFEQSGGTGKSFDYSKSVRTPNQSVPEEQITAYLSKIQRGGHIQPFGCMIAADEHSFRVIAYSENAKDMLGLTPQSVPSLEKQEILFVGADVRILFRPSSAVLLEKAFGAREITLLNPIWIHSKNSGKPFYAILHRIDVGIVIDLEPARTEDPALSIAGAVQSQKLAVRAISQLQSLPGGDIKLLCDTVVDSVRELTGYDRVMVYKFHEDEHGEVVAENKRVDLEPYIGLHYPSTDIPQASRFLFKQNRVRMIVDCHAIPVSVIQDEGLMQPLCLVGSTLRAPHGCHAHYMENMGSIASLAMAVIIYGNDEEAIGGRNSMRLWGLVVCHHTSTRCIPFPLRYACEFLMQAFGLQLNMELQLASQLLEKHVLRTQTLLCDMLLRDSPTGIVTQSPSIMDLVKCDGAALYYQGQYYPLGVTPTEAQIKDIVEWLLTLHGDPTGLSTDSLADAGYPGAAFLGDAVCGMAVAYIAERDFLFWFRSHTAKEVKWGGAKHHPEDKDDGQRMHPRSSFKAFLEVVKSRSLPWENAEMDAIHSLQLILRDSFRDAEATNSKAVVHNQLKDMELQGMDELSSVAREMVRLIETATAPIFAVDVEGRINGWNAKVAELTGLSVEEAMGKSLVHDLVYKEYEEIVDKLIHRAVKGEEDKNVEIKLRTFCSEHQKKAVFVVVNACSSKDYMDNIVGVCFVGQDVTGQKVVMDKYVLIQGDYKAIVHSPNPSIPPIFASDENTCCLEWNTALEKLTGWSRGEVVGKMLVGEVFGSCCRLKGPDALTKFMIALHNAIGGIDTDKLPFSFFERNEKNVQTLLTANKRVNIKGDIIGPFCFFQIASPEFQPSLKVQKQQEKKSFARMKELAYICQEIKNPLSGIHFTNSLLENTDLTEDQQQFLETSAACEKQILKIIRDIDLESIENGSLELEKAEFLLGSVINAVVSQAMLLLRERNLQLLRDIPEEIKTLAVYGDQARIQQVLADFLLNMVRYAPSSAGWVEIHVCPTLKQISDGHTLVHTEFRYLERVLQTRMLGLQHPPRSFLNCKLTLVMLHREGMVPKIQFQGLSVCQGRLIWLSFPENTTVALYPLTIWFLLLHRHQSRSITHT

SEQ ID NO: 33745 - protein, 1146 aa, Populus tremula
MASQSQRQSNQPAHNQAQSSGTSNMRQHHHPTESVSKAIAQYTVDAQLHAVFEQSGGTGKSFDYSKSVRTPNQSVPEEQITAYLSKIQRGGHIQPFGCMIAADEQSFRVIAYSENAKDMLGLTPQSVPSLEKQEILFVGADVRILFRPSSAVLLEKAFGAREITLLNPIWIHSKNSGKPFYAILHRIDVGIVIDLEPARTEDPALSITGAVQSQKLAVRAISQLQSLPGGDIKLLCDTVVDSVRGLTGYDRVMVYKFHEDEHGEVVAENKRVDLEPYIGLHYPSTDIPQASRFLFKQNRVRMIVDCHAIPVSVIQDEGLMQPLCLVGSTLRAPHGCHAQYMENMGSIASLAMAVIIYGNDEEAIGGRNSMRLWGLVVCHHTSARCIPFPLRYACEFLMQAFGLQLNMELQLASQLLEKHVLRTQTLLCDMLLRDSHTGIVTQSPSIMDLVKCDGAALYYQGQYYPLGVTPTEAQIKDIVEWLLTLHGDPTGLSTDSLADAGYPGAAFLGDAVCGMAVAYIAERDFLFWFRSHTAKEVKWGGAKHHPEDKDDGQRMHPRSSFKAFLEVVKSRSLPWENAEMDAIHSLQLILRDSFRDAEATNSKAVVHNQLKDMELQGMDELSSVAREMVRLIETATAPIFAVDVEGRINGWNAKVAELTGLSVEEAMGKSLVHDLVYKEYEEIVDKLIHRAVKGEEDKNVEIKLRTFCSEHQKKAVFVVVNACSSKDYMDNIVGVCFVGQDVTGQKVVMDKYVLIQGDYKAIVHSPNPSIPPIFASDENTCCLEWNTALEKLTGWSRGEVVGKMLVGEVFGSCCKLKGPDALTKFMIALHNAIGGIDTDKLPFSFFDRNEKNVQTLLTANKRVNIKGDIIGAFCFLQIASPELQPSLKVQKQQEKKSFARMKELAYICQEIKNPLSGIHFTNSLLENTDLTEDQQQFLETSAACEKQILKIIRDIDLESIENGSLELEKAEFLLGSVINAVVSQAMLLLRERNLQLLRDIPEEIKTLAVYGDQARIQQVLADFLLNMVIYTQSSAGWVEIHVCPTLKQISDGHTLVHTEFRYLERVLQTRMLGLQHPPRSFLNCKLTLVKLHREGMVPKIQFQGLSVCQGRLIWLSFPENTTVALYPLTIWFLLLHRHQSRSITHT

SEQ ID NO: 33746 - protein, 1146 aa, Populus tremula
MASQSQRQSNQPAHNQAQSSGTSNMRQHHHPTESVSKAIAQYTVDAQLHAVFEQSGGTGKSFDYSKSVRTPNQSVPEEQITAYLSKIQRGGHIQPFGCMIAADEQSFRVIAYSENAKDMLGLTPQSVPSLEKQEILFVGADVRILFRPSSAVLLEKAFGAREITLLNPIWIHSKNSGKPFYAILHRIDVGIVIDLEPARTEDPALSIAGAVQSQKLAVRAISQLQSLPGGDIKLLCDTVVDSVRELTGYDRVMVYKFHEDEHGEVVAENKRVDLEPYIGLHYPSTDIPQASRFLFKQNRVRMIVDCHAIPVSVIQDEGLMQPLCLVGSTLRAPHGCHAQYMENMGSIASLAMAVIIYGNDEEAIGGRNSMRLWGLVVCHHTSTTCIPFPLRYACEFLMQAFGLQLNMELQLASQLLEKHVLRTQTLLCDMLLRDSHTGIVTQSPSIMDLVKCDGAALYYQGQYYPLGVTPTEAQIKDIVEWLLTLHGDPTGLSTDSLADAGYPGAAFLGDAVCGMAVAYIAERDFLFWFRSHTAKEVKWGGAKHHPEDKDDGQRMHPRSSFKAFLEVVKSRSLPWENAEMDAIHSLQLILRDSFRDAEATNSKAVVHNQLKDMELQGMDELSSVAREMVRLIETATAPIFAVDVDGRINGWNAKVAELTGLSVEEAMGKSLVHDLVYKEYEEIVDKLIHRAVKGEEDKNVEIKLRTFCSEHQKKAVFVVVNACSSKDYMDNIVGVCFVGQDVTGQKVVMDKYVLIQGDYKAIVHSPNPSIPPIFASDENTCCLEWNTAMEKLTGWSRGEVVGKMLVGEVFGSCCRLKGPDALTKFMIALHNAIGGIDTDKLPFSFFDRNEKNVQTLLTANKRVNIKGDIIGPFCFFQIASPEFQPSLKVQKQQEKKSFARMKELAYICQEIKNPLSGIHFTNSLLENTDLTEDQQQFLETSAACEKQILKIIRDIDLESIENGSLELEKAEFLLGSVINAVVSQAMLLLRERNLQLLRDIPEEIKTLAVYGDQARIQQVLADFLLNMVRYAPSSAGWVEIHVCPTLKQISDGHTLVHTEFRYLERVLQTRMLGLQHPPRSFLNCKLTLVMLHREGMVPKIQFQGLSVSQGRLIWLSFPENTTVALYPLTIWFLLLHRHQSRSITHT

SEQ ID NO: 33747 - protein, 1146 aa, Populus tremula
MASQSQRQSNQPAHNQAQSSGTSNMRQHHHPTESVSKAIAQYTVDAQLHAVFEQSGGTGKSFDYSKSVRTPNQSVPEEQITAYLSKIQRGGHIQPFGCMIAADEQSFRVIAYSENAKDMLGLTPQSVPSLEKQEILFVGADVRILFRPSSAVLLEKAFGAREITLLNPIWIHSKNSGKPFYAILHRIDVGIVIDLEPARTEDPALSIAGAVQSQKLAVRAISQLQSLPGGDIKLLCDTVVDSVRELTGYDRVMVYKFHEDEHGEVVAENKRVDLEPYIGLHYPSTDIPQASRFLFKQNRVRMIVDCHAIPVSVIQDEGLMQPLCLVGSTLRAPHGCHAQYMENMGSIASLAMAVIIYGNDEEAIGGRNSMRLWGLVVCHHTSARCIPFPLRYACEFLMQAFGLQLNMELQLASQLLEKHVLRTQTLLCDMLLRDSPTGIVTQSPSIMDLVKCDGAALYYQGQYYPLGVTPTEAQIKDIVEWLLTLHGDPTGLSTDSLADAGYPGAAFLGDAVCGMAVAYIAERDFLFWFRSHTAKEVKWGGAKHHPEDKDDGQRMHPRSSFKAFLEVVKSRSLPWENAEMDAIHSLQLILRDSFRDAEATNSKAVVHTQLKDMELQGMDELSSVAREMVRLIETATAPIFAVDVEGRINGWNAKVAELTGLSVEEAVGKSLVHDLVYKEYEEIVDKLIHRAVKGEEDKNVEIKLRTFCSEHQKKAVFVVVNACSSKDYMDNIVGVCFVGQDVTGQKVVMDKYVLIQGDYKAIVHSPNPSIPPIFASDENTCCLEWNTALEKLTGWSRGEVVGKMLVGEVFGSCCRLKGPDALTKFMIALHNAIGGIDTDKLTFSFFDRNEKNVQTLLTANKRVNIKGDIIGAFCFLQIASPELQPSLKVQKQQEKKSFARMKELAYICQEIKNPLSGIHFTNSLLENTDLTEDQQQFLETSAACEKQILKIIRDIDLESIENGSLELEKAEFLLGSVINAVVSQAMLLLRERNLQLLRDIPEEIKTLAVYGDQARIQQVLADFLLNMVRYAPSSAGWVEIHVCPTLKQISDGHTLVHTEFRYLERVLQTRMLGLQHPPRSFLNCKLTLVKLHREGMVPKIQFQGLSVSQGRLIWLSFPENTTVALYPLTIWFLLLHRHQSRSITHT

SEQ ID NO: 33748 - protein, 1146 aa, Populus tremula
MASQSQRQSNQPAHNQAQSSGTSNMRQHHHPTESVSKAIAQYTVDAQLHAVFEQSGGTGKSFDYSKSVRTPNQSVPEEQITAYLSKIQRGGHIQPFGCMIAADEQSFRVIAYSENAKDMLGLTPQSVPSLEKQEILFVGADVRILFRPSSAVLLEKAFGAREITLLNPIWIHSKNSGKPFYAILHRIDVGIVIDLEPARTEDPALSIAGAVQSQKLAVRAISQLQSLPGGDIKLLCDTVVDSVRELTGYDRVMVYKFHEDEHGEVVAENKRVDLEPYIGLHYPSTDIPQASRFLFKHNRVRMIVDCHAIPVSVIQDEGLMQPLCLVGSTLRAPHGCHAHYMENMGSIASLAMAVIIYGNDEEAIGGRNSMRLWGLVVCHHTSARCIPFPLRYACEFLMQAFGLQLNMELQLASQLLEKHVLRTQTLLCDMLLRDSPTGIVTQSPSIMDLVKCDGAALYYQGQYYPLGVTPTEAQIKDIVEWLLTLHGDPTGLSTDSLADAGYPGAAFLGDAVCGMAVAYIAERDFLFWFRSHTAKEVKWGGAKHHPEDKDDGQRMHPRSSFKAFLEVVKSRSLPWENAEMDAIHSLQLILRDSFRDAEATNSKAVVHNQLKDMELQGMDELSSVAREMVRLIETATAPIFAVDVDGRINGWNAKVAELTGLSVEEAMGKSLVHDLVYKEYEEIVDKLIHRAVKGEEDKNVEIKLRTFCSEHQKKAVFVVVNACSSKDYMDNIVGVCFVGQDVTGQKVVMDKYVLIQGDYKAIVHSPNPSIPPIFASDENTCCLEWNTALEKLTGWSRGEVVGKMLVGEVFGSCCRLKGPDALTKFMIALHNAIGGIDTDKLPFSFFERNEKNVQTLLTANKRVNMKGDIIGAFCFLQIASPELQPSLKVQKQQEKKSFARMKELAYICQEIKNPLSGIHFTNSLLENTDLTEDQQQFLETSAACEKQILKIIRDIDLESIENGSLELEKAEFLLGSVINAVVSQAMLLLRERNLQLLRDIPEEIKTLAVYGDQARIQQVLADFLLNMVRYAPSSAGWVEIHVCPTLKQISDGHTLVHTEFRYLERVLQTRMLGLQHPPRSFLNCKLTLVMLHREGMVPKIQFQGLSVCQGRLIWLSFPENTTVALYPLTIWFLLLHRHQSRSITHT

SEQ ID NO: 33749 - protein, 1146 aa, Populus tremula
MASQSQRQSNQPAHNQAQSSGTSNMRQHHHPTESVSKAIAQYTVDAQLHAVFEQSGGTGKSFDYSKSVRTPNQSVPEEQITAYLSKIQRGGHIQPFGCMIAADEQSFRVIAYSENAKDMLGLTPQSVPSLEKQEILFVGADVRILFRPSSAVLLEKAFGAREITLLNPIWIHSKNSGKPFYAILHRIDVGIVIDLEPARTEDPALSIAGAVQSQKLAVRAISQLQSLPGGDIKLLCDTVVDSVRELTGYDRVMVYKFHEDEHGEVVAENKRVDLEPYIGLHYPSTDIPQAPRFLFKQNRVRMIVDCHAIPVSVIQDEGLMQPLCLVGSTLRAPHGCHAQYMENMGSIASLAMAVIIYGNDEEAIGGRNSMRLWGLVVCHHTSARCIPFPLRYACEFLMQAFGLQLNMELQLASQLLEKHVLRTQTLLCDMLLRDSPTGIVTQSPSIMDLVKCDGAALYYQGQYYPLGVTPTEAQIKDIVEWLLTLHGDPTGLSTDSLADAGYPGAAFLGDAVCGMAVAYIAERDFLFWFRSHTAKEVKWGGAKHHPEDKDDGQRMHPRSSFKAFLEVVKSRSLPWENAEMDAIHSLQLILRDSFRDAEATNSKAVVHNQLKDMELQGMDELSSVAREMVRLIETATAPIFAVDVDGRINGWNAKVAELTGLSVEEAMGKSLVHDLVYKEYEEIVDKLIHRAVKGEEDKNVEIKLRTFCSEHQKKAVFVVVNACSSKDYMDNIVGVCFVGQDVTGQKVVMDKYVLIQGDYKAIVHSPNPSIPPIFASDENTCCLEWNTAMEKLTGWSRGEVVGKMLVGEVFGSCCRLKGPDALTKFMIALHNAIGGIDTDKLPFSFFDRNEKNVQTLLTANKRVNIKGDIIGPFCFLQIASPEFQPSLKVQKQQEKKSFARMKELAYICQEIKNPLSGIHFTNSLLENTDLTEDQQQFLETSAACEKQILKIIRDIDLESIENGSLELEKAEFLLGSVINAVVSQAMLLLRERNLQLLRDIPEEIKTLAVYGDQARIQQVLADFLLNMVRYAPSSAGWVEIHVCPTLKQISDGHTLVHTEFRYLERVLQTRMLGLQHPPRSFLNCKLTLVMLHREGMVPKIQFQGLSVCQGRLIWLSFPENTTVALYPLTIWFLLLHRHQSRSITHT

SEQ ID NO: 33750 - protein, 1146 aa, Populus tremula
MASQSQRQSNQPAHNQVQSSGTSNMRQHHHPTESVSKAIAQYTVDAQLHAVFEQSGGTGKSFDYSKSVRTPNQSVPEEQITAYLSKIQRGGHIQPFGCMIAADEQSFRVIAYSENAKDMLGLTPQSVPSLEKQEILFVGADVRILFRPSSAVLLEKAFGAREITLLNPIWIHSKNSGKPFYAILHRIDVGIVIDLEPARTEDPALSIAGAVQSQKLAVRAISQLQSLPGGDIKLLCDTVVDSVRELTGYDRVMVYKFHEDEHGEVVAENKRVDLEPYIGLHYPSTDIPQASRFLFKHNRVRMIVDCHAIPVSVIQDEGLMQPLCLVGSTLRAPHGCHAQYMENMGSIASLAMAVIIYGNDEEAIGGRNSMRLWGLVVCHHTSARCIPFPLRYACEFLMQAFGLQLNMELQLASQLLEKHVLRTQTLLCDMLLRDSPTGIVTQSPSIMDLVKCDGAALYYQGQYYPLGVTPTEAQIKDIVEWLLTLHGDPTGLSTDSLADAGYPGAAFLGDAVCGMAVAYIAERDFLFWFRSHTAKEVKWGGAKHHPEDKDDGQRMHPRSSFKAFLEVVKSRSLPWENAEMDAIHSLQLILRDSFRDAEATNSKAVVHNQLKDMELQGMDELSSVAREMVRLIETATAPIFAVDVDGRINGWNAKVAELTGLSVEEAMGKSLVHDLVYKEYEEIVDKLIHRAVKGEEDKNVEIKLRTFCSEHQKKAVFVVVNACSSKDYMDNIVGVCFVGQDVTGQKVVMDKYVLIQGDYKAIVHSPNPSIPPIFASDENTCCLEWNTALEKLTGWSRGEVVGKMLVGEVFGSCCKLKGPNSLTKFMIALHNAIGGIDTDKLPFSFFDRNEKNVQTLLTANKRVNMKGDIIGAFCFLQIASPELQPSLKVQKQQEKKSFARMKELAYICQEIKNPLSGIHFTNSLLENTDLTEDQQQFLETSAACEKQILKIIRDIDLESIENGSLELEKAEFLLGSVINAVVSQAMLLLRERNLQLLRDIPEEIKTLAVYGDQARIQQVLADFLLNMVIYTQSSAGWVEIHVCPTLKQISDGHTLVHTEFRYLERVLQTRMLGLQHPPRSFLNCKLTLVMLHREGMVPKIQFQGLSVCQGRLIWLSFPENTTVALYPLTIWFLLLHRHQSRSITHT

SEQ ID NO: 33751 - protein, 1146 aa, Populus tremula
MASQSQRQSNQPAHNQAQSSGTSNMRQHHHPTESVSKAIAQYTVDAQLHAVFEQSGGTGKSFDYSKSVRTPNQSVPEEQITAYLSKIQRGGHIQPFGCMIAADEQSFRVIAYSENAKDMLGLTPQSVPSLEKQEILFVGADVRILFRPSSAVLLEKAFGAREITLLNPIWIHSKNSGKPFYAILHRIDVGIVIDLEPARTEDPALSIAGAVQSQKLAVRAISQLQSLPGGDIKLLCDTVVDSVRELTGYDRVMVYKFHEDEHGEVVAENKRVDLEPYIGLHYPSTDIPQASRFLFKQNRVRMIVDCHAIPVSVIQDEGLMQPLCLVGSTLRAPHGCHAQYMENMGSIASLAMAVIIYGNDEEAIGGRNSMRLWGLVVCHHTSARCIPFPLRYACEFLMQAFGLQLNMELQLASQLLEKHVLRTQTLLCDMLLRDSPTGIVTQSPSIMDLVKCDGAALYYQGQYYPLGVTPTEAQIKDIVEWLLTLHGDPTGLSTDSLADAGYPGAAFLGDAVCGMAVAYIAERDFLFWFRSHTAKEVKWGGAKHHPEDKDDGQRMHPRSSFKAFLEVVKSRSLPWENAEMDAIHSLQLILRDSFRDAEATNSKAVVHTQLKDMELQGMDELSSVAREMVRLIETATAPIFAVDVEGRINGWNAKVAELTGLSVEEAMGKSLVHDLVYKEYEEIVDKLIHRAVKGEEDKNVEIKLRTFCSEHQKKAVFVVVNACSSKDYMDNIVGVCFVGQDVTGQKVVMDKYVLIQGDYKAIVHSPNPSIPPIFASDENTCCLEWNTALEKLTGWSRGEVVGKMLVGEVFGSCCRLKGPDALTKFMIALHNAIGGIDTDKLTFSFFDRNEKNVQTLLTANKRVNMKGDIIGAFCFLQIASPELQPSLKVQKQQEKKSFARMKELAYICQEIKNPLSGIHFTNSLLENTDLTEDQQQFLETSAACEKQILKIIRDIDLESIENGSLELEKAEFLLGSVINAVVSQAMLLLRERNLQLLRDIPEEIKTLAVYGDQARIQQVLADFLLNMVRYAPSSAGWVEIHVCPTLKQISDGHTLVHTEFRYLERVLQTRMLGLQHPPRSFLNCKLTLVKLHREGMVPKIQFQGLSVCQGRLIWLSFPENTTVALYPLTIWFLLLHRHQSRSITHT

SEQ ID NO: 33752 - protein, 1146 aa, Populus tremula
MASQSQRQSNQPAHNQAQSSGTSNMRQHHHPTESVSKAIAQYTVDAQLHAVFEQSGGTGKSFDYSKSVRTPNQSVPEEQITAYLSKIQRGGHIQPFGCMIAANEQSFRVIAYSENAKDMLGLTPQSVPSLEKQEILFVGADVRILFRPSSAVLLEKAFGAREITLLNPIWIHSKNSGKPFYAILHRIDVGIVIDLEPARTEDPALSIAGAVQSQKLAVRAISQLQSLPGGDIKLLCDTVVDSVRELTGYDRVMVYKFHEDEHGEVVAENKRVDLEPYIGLHYPSTDIPQAPRFLFKQNRVRMIVDCHAIPVSVIQDEGLMQPLCLVGSTLRAPHGCHAHYMENMGSIASLAMAVIIYGNDEEAIGGRNSMRLWGLVVCHHTSARCIPFPLRYACEFLMQAFGLQLNMELQLASQLLEKHVLRTQTLLCDMLLRDSPTGIVTQSPSIMDLVKCDGAALYYQGQYYPLGVTPTEAQIKDIVEWLLTLHGDPTGLSTDSLADAGYPGAAFLGDAVCGMAVAYIAERDFLFWFRSHTAKEVKWGGAKHHPEDKDDGQRMHPRSSFKAFLEVVKSRSLPWENAEMDAIHSLQLILRDSFRDAEATNSKAVVHNQLKDMELQGMDELSSVAREMVRLIETATAPIFAVDVDGRINGWNAKVAELTGLSVEEAMGKSLVHDLVYKEYEEIVDKLIHRAVKGEEDKNVEIKLRTFCSEHQKKAVFVVVNACSSKDYMDNIVGVCFVGQDVTGQKVVMDKYVLIQGDYKAIVHSPNPSIPPIFASDENTCCLEWNTALEKLTGWSRGEVVGKMLVGEVFGSCCKLKGPNSLTKFMIALHNAIGGIDTDKLPFSFFDRNEKNVQTLLTANKRVNMKGDIIGAFCFLQIASPELQPSLKVQKQQEKKSFARMKELAYICQEIKNPLSGIHFTNSLLENTDLTEDQQQFLETSAACEKQILKIIRDIDLESIENGSLELEKAEFLLGSVINAVVSQAMLLLRERNLQLLRDIPEEIKTLAVYGDQARIQQVLADFLLNMVRYAPSSAGWVEIHVCPTLKQISDGHTLVHTEFRYLERVLQTRMLGLQHPPRSFLNCKLTLVMLHREGMVPKIQFQGLSVCQGRLIWLSFPENTTVALYPLTIWFLLLHRHQSRSITHT

SEQ ID NO: 33753 - protein, 1144 aa, Populus tremula
MASQSQRQSNQPAHNQAQSSGTSNMRQHHHPTESVSKAIAQYTVDAQLHAVFEQSGGTGKSFDYSKSVRTPNQSVPEEQITAYLSKIQRGGHIQPFGCMIAADEQSFRVIAYSENAKDMLGLTPQSVPSLEKQEILFVGADVRILFRPSSAVLLEKAFGAREITLLNPIWIHSKNSGKPFYAILHRIDVGIVIDLEPARTEDPALSIAGAVQSQKLAVRAISQLQSLPGGDIKLLCDTVVDSVRELTGYDRVMVYKFHEDEHGEVVAENKRVDLEPYIGLHYPSTDIPQASRFLFKHNRVRMIVDCHAIPVSVIQDEGLMQPLCLVGSTLRAPHGCHAQYMENMGSIASLAMAVIIYGNDEEAIGGRNSMRLWGLVVCHHTSARCIPFPLRYACEFLMQAFGLQLNMELQLASQLLEKHVLRTQTLLCDMLLRDSPTGIVTQSPSIMDLVKCDGAALYYQGQYYPLGVTPTEAQIKDIVEWLLTLHGDPTGLSTDSLADAGYPGAAFLGDAVCGMAVAYIAERDFLFWFRSHTAKEVKWGGAKHHPEDKDDGQRMHPRSSFKAFLEVVKSRSLPWENAEMDAIHSLQLILRDSFRDAEATNSKAVVHNQLKDMELQGMDELSSVAREMVRLIETATAPIFAVDVDGRINGWNAKVAELTGLSVEEAMGKSLVHDLVYKEYEEIVDKLIHRAVKGEEDKNVEIKLRTFCSEHQKKAVFVVVNACSSKDYMDNIVGVCFVGQDVTGQKVVMDKYVLIQGDYKAIVHSPNPSIPPIFASDENTCCLEWNTALEKLTGWSRGEVVGKMLVGEVFGSCCKLKGPDALTKFMIALHNAIGGIDTDKLPFSFFDRNEKNVQTLLTANKRVNMNIIGAFCFLQIASPELQPSLKVQKQQEKKSFARMKELAYICQEIKNPLSGIHFTNSLLENTDLTEDQQQFLETSAACEKQILKIIRDIDLESIENGSLELEKAEFLLGSVINAVVSQAMLLLRERNLQLLRDIPEEIKTLAVYGDQARIQQVLADFLLNMVRYAPSSAGWVEIHVCPTLKQISDGHTLVHTEFRYLERVLQTRMLGLQHPPRSFLNCKLTLVMLHREGMVPKIQFQGLSVCQGRLIWLSFPENTTVALYPLTIWFLLLHRHQSRSITHT

SEQ ID NO: 33754 - protein, 1146 aa, Populus tremula
MASQSQRQSNQPAHNQAQSSGTSNMRQHHHPTESVSKAIAQYTVDAQLHAVFEQSGGTGKSFDYSKSVKTPNQSVPEEQITAYLSKIQRGGHIQPFGCMIAANEQSFRGIAYSENAKNMLGLTPQSVPSLEKQEILFVGGDVRIFFRPSSAVLLEKTFGAREITLLNPIWIHSKNSGKPFYAILHRIDVGIVIDLEPARTEDPALSIAGAVQSQKLAVRAISQLQSLPGGDIKLLCDTVVDSVRELTGYDRVMVYKFHEDEHGEVVAENKRVDLEPYIGLHYPSTDIPQASRFLFKQNRVRMIVDCHAIPVSVIQDEGLMQPLCLVGSTLRAPHGCHAQYMENMGSIASLAMAVIIYGNDEEAIGGRNSMRLWGLVVCHHTSARCIPFPLRYACEFLMQAFGLQLNMELQLASQLLEKHVLRTQTLLCDMLLRDSPTGIVTQSPSIMDLVKCDGAALYYQGQYYPLGVTPTEAQIKDIVEWLLTLHGDPTGLSTDSLADAGYPGAAFLGDAVCGMAVAYIAERDFLFWFRSHTAKEVKWGGAKHHPEDKDDGQRMHPRSSFKAFLEVVKSRSLPWENAEMDAIHSLQLILRDSFRDAEATNSKAVVHNQLKDMELQGMDELSSVAREMVRLIETATAPIFAVDVDGRINGWNAKVAELTGLSVEEAMGKSLVHDLVYKEYEEIVDKLIHRAVKGEEDKNVEIKLRTFCSEHQKKAVFVVVNACSSKDYMDNIVGVCFVGQDVTGQKVVMDKYVLIQGDYKAIVHSPNPSIPPIFASDENTCCLEWNTALEKLTGWSRGEVVGKMLVGEVFGSCCRLKGPDALTKFMIALHNAIGGIDTDKLPFSFFDRNEKNVQTLLTANKRVNIKGDIIGAFCFLQIASPELQQSLKVQKQQEKKSFARMKELAYICQEIKNPLSGIHFTNSLLENTDLTEDQQQFLETSAACEKQILKIIRDIDLESIENGSLELEKAEFLLGSVINAVVSQAMLLLRERNLQLLRDIPEEIKTLAVYGDQARIQQVLADFLLNMVIYTQSSAGWVEIHVCPTLKQISDGHTLVHTEFRYLERVLQTRMLGLQHPPRSFLNCKLTLIKLHREGMVPKIQFQGLSVCQGRLIWLSFPENTTVALYPLTIWFLLLHRHQSRSITHT

SEQ ID NO: 33755 - protein, 1146 aa, Populus tremula
MASQSQRQSNQPAHNQVQSSGTSNMRQHHHPTESVSKAIAQYTVDAQLHAVFEQSGGTGKSFDYSKSVRTPNQSVPEEQITAYLSKIQRGGHIQPFGCMIAADEQSFRVIAYSENAKDMLGLTPQSVPSLEKQEILFVGADVRILFRPSSAVLLEKAFGAREITLLNPIWIHSKNSGKPFYAILHRIDVGIVIDLEPARTEDPALSIAGAVQSQKLAVRAISQLQSLPGGDIKLLCDTVVDSVRELTGYDRVMVYKFHEDEHGEVVAENKRVDLEPYIGLHYPSTDIPQAPRFLFKQNRVRMIVDCHAIPVSVIQDEGLMQPLCLVGSTLRAPHGCHAQYMENMGSIASLAMAVIIYGNDEEAIGGRNSMRLWGLVVCHHTSARCIPFPLRYACEFLMQAFGLQLNMELQLASQLLEKHVLRTQTLLCDMLLRDSPTGIVTQSPSIMDLVKCDGAALYYQGQYYPLGVTPTEAQIKDIVEWLLTLHGDPTGLSTDSLADAGYPGAAFLGDAVCGMAVAYIAERDFLFWFRSHTAKEVKWGGAKHHPEDKDDGQRMHPRSSFKAFLEVVKSRSLPWENAEMDAIHSLQLILRDSFRDAEATNSKAVVHTQLKDMELQGMDELSSVAREMVRLIETATAPIFAVDVDGRINGWNAKVAELTGLSVEEAMGKSLVHDLVYKEYEEIVDKLIHRAVKGEEDKNVEIKLRTFCSEHQKKAVFVVVNACSSKDYMDNIVGVCFVGQDVTGQKVVMDKYVLIQGDYKAIVHSPNPSIPPIFASDENTCCLEWNTALEKLTGWSRGEVVGKMLVGEVFGSCCRLKGPDALTKFMIALHNAIGGIDTDKLPFSFFDRNEKNVQTLLTANKRVNIKGDIIGPFCFLQIASPELQQSLKVQKQQEKKSFARMKELAYICQEIKNPLSGIHFTNSLLENTDLTEDQQQFLETSAACEKQILKIIRDIDLESIENGSLELEKAEFLLGSVINAVVSQAMLLLRERNLQLLRDIPEEIKTLAVYGDQARIQQVLADFLLNMVRYAPSSAGWVEIHVCPTLKQISDGHTLVHTEFRYLERVLQTRMLGLQHPPRSFLNCKLTLVMLHREGMVPKIQFQGLSVCQGRLIWLSFPENTTVALYPLTIWFLLLHRHQSRSITHT

SEQ ID NO: 33756 - protein, 1144 aa, Populus tremula
MASQSQRQSNQPAHNQAQSSGTSNMRQHHHPTESVSKAIAQYTVDAQLHAVFEQSGGTGKSFDYSKSVRTPNQSVPEEQITAYLSKIQRGGHIQPFGCMIAADEQSFRGIAYNENAKNMRGLTPQSVPSLEKQEILFVGGDVRILFRPSSAVLLEKTFGAREITLLNPIWIHSKNSGKPFYAILHRIDVGIVIDLEPARTEDPALSIAGAVQSQKLAVRAISQLQSLPGGDIKLLCDTVVDSVRELTGYDRVMVYKFHEDEHGEVVAENKRVDLEPYIGLHYPSTDIPQASRFLFKQNRVRMIVDCHAIPVSVIQDEGLMQPLCLVGSTLRAPHGCHAQYMENMGSIASLAMAVIIYGNDEEAIGGRNSMRLWGLVVCHHTSARCIPFPLRYACEFLMQAFGLQLNMELQLASQLLEKHVLRTQTLLCDMLLRDSPTGIVTQSPSIMDLVKCDGAALYYQGQYYPLGVTPTEAQIKDIVEWLLTLHGDPTGLSTDSLADAGYPGAAFLGDAVCGMAVAYIAERDFLFWFRSHTAKEVKWGGAKHHPEDKDDGQRMHPRSSFKAFLEVVKSRSLPWENAEMDAIHSLQLILRDSFRDAEATNSKAVVHNQLKDMELQGMDELSSVAREMVRLIETATAPIFAVDVDGCINGWNAKVAELTGLSVEEAMGKSLVHDLVYKEYEEIVDKLIHRAVKGEEDKNVEIKLRTFCSEHQKKAVFVVVNACSSKDYMDNIVGVCFVGQDVTGQKVVMDKYVLIQGDYKAIVHSPNPSIPPIFASDENTCCLEWNTALEKLTGWSRGEVVGKMLVGEVFGSCCRLKGPDALTKFMIALHNAIGGIDTDKLPFSFFDRNEKNVQTLLTANKRVNINIIGAFCFLQIASPELQPSLKVQKQQEKKSFARMKELAYICQEIKNPLSGIHFTNSLLENTDLTEDQQQFLETSAACEKQILKIIRDIDLESIENGSLELEKAEFLLGSVINAVVSQAMLLLRERNLQLLRDIPEEIKTLAVYGDQARIQQVLADFLLNMVRYAPSSAGWVEIHVCPTLKQISDGHTLVHTEFRYLERVLQTRMLGLQHPLRSFLNCKLTLVMLHREGMVPKIQFQGLSVCQGRLIWLSFPENTTVALYPLTIWFLLLHRHQSRSITHT

SEQ ID NO: 33757 - protein, 1144 aa, Populus tremula
MASQSQRQSNQPAHNQAQSSGTSNMRQHHHPTESVSKAIAQYTVDAQLHAVFEQSGGTGKSFDYSKSVRTPNQSVPEEQITAYLSKIQRGGHIQPFGCMIAADEQSFRGIAYNENAKNMRGLTPQSVPSLEKQEILFVGGDVRILFRPSSAVLLEKTFGAREITLLNPIWIHSKNSGKPFYAILHRIDVGIVIDLEPARTEDPALSIAGAVQSQKLAVRAISQLQSLPGGDIKLLCDTVVDSVRELTGYDRVMVYKFHEDEHGEVVAENKRVDLEPYIGLHYPSTDIPQASRFLFKQNRVRMIVDCHAIPVSVIQDEGLMQPLCLVGSTLRAPHGCHAQYMENMGSIASLAMAVIIYGNDEEAIGGRNSMRLWGLVVCHHTSARCIPFPLRYACEFLMQAFGLQLNMELQLASQLLEKHVLRTQTLLCDMLLRDSPTGIVTQSPSIMDLVKCDGAALYYQGQYYPLGVTPTEAQIKDIVEWLLTLHGDPTGLSTDSLADAGYPGAAFLGDAVCGMAVAYIAERDFLFWFRSHTAKEVKWGGAKHHPEDKDDGQRMHPRSSFKAFLEVVKSRSLPWENAEMDAIHSLQLILRDSFRDAEATNSKAVVHNQLKDMELQGMDELSSVAREMVRLIETATAPIFAVDVDGCINGWNAKVAELTGLSVEEAMGKSLVHDLVYKEYEEIVDKLIHRAVKGEEDKNVEIKLRTFCSEHQKKAVFVVVNACSSKDYMDNIVGVCFVGQDVTGQKVVMDKYVLIQGDYKAIVHSPNPSIPPIFASDENTCCLEWNTAMEKLTGWSRGEVVGKMLVGEVFGSCCKLKGPDALTKFMIALHNAIGGIDTDKLPFSFFDRNEKNVQTLLTANKRVNINIIGAFCFLQIASPELQPSLKVQKQQEKKSFARMKELAYICQEIKNPLSGIHFTNSLLENTDLTEDQQQFLETSAACEKQILKIIRDIDLESIENGSLELEKAEFLLGSVINAVVSQAMLLLRERNLQLLRDIPEEIKTLAVYGDQARIQQVLADFLLNMVRYAPSSAGWVEIHVCPTLKQISDGHTLVHTEFRYLERVLQTRMLGLQHPLRSFLNCKLTLVMLHREGMVPKIQFQGLSVCQGRLIWLSFPENTTVALYPLTIWFLLLHRHQSRSITHT

SEQ ID NO: 33758 - protein, 432 aa, Schizophyllum commune
MSGAATNTRPSLANAAPRLGSISLPRRESQVVPDAPITPPLSPGHSELSIDDVEMVDRVLPSPGPAHHQLHQPTQHDMQVDEERPQPPLRLLEDEKVHLQKVGIKLTDFEVRGTLGTGTFARVLIVRHRGRESNNYFAMKVLRKSEIVRLRQVEHVNAERYILSRIQHPFIVDLFATFQDSLNVYMLMSYVPGGELFTHLRRAQRFTPDVTRFYLATIILALRYLHSFNIIYRDLKPENLLLDSRGYLRLTDFGFAKIVDDRTWTLCGTPEYLAPEIIQSDGHGKAADWWAVGVLCYEMLVGYPPFFDESPYGIYEKILDGHIHWPRSMDPLSRSLIRAFLNPDRTKRLGNMIGGPQDVLEHPWFRGVDWDALERREIMAPIIPHTSSGDDTRHFLRLPLPPAEDMPGLFHEEQPPALEQRFDPTAYQFLEF

SEQ ID NO: 33759 - protein, 427 aa, Schizophyllum commune
MSVIKRMTERFHIGSSKGYQYPDVDVGGSPYSTAPTPSLVSANTTLFDHRGSLSTQRTSFSELSGHRQGLGAIPEQEDMEARLNRLHLFSRNKGIYRLQDFLIQRTLGTGSFGRVLLVRSKHNLRFYAIKVLNKEKVLRMKQVEHTNNERNMLHRVNHNFIINLWGAFQDGNNLYMVMDFVPGGELFNLLRRSIRFPEPVAKFYAAEVSLALRYLHSNNIIYRDLKPENILLNADGHIKVADFGFAKIVDTVAYTLCGTPDYLAPEIIWGGRYNKSVDWYALGVLCYEMLSGLPPFHTPDGNPQTLYAKIREGPTSLPWNSPNFTLYSIDLIRRLMEGEPSKRYGNMRHGAGDVFAHPWFAEVDWEKLEDREVSPPYIPNIGGAGDASAFDIYHEDGMEELFRPPPLDTLADQFPDFDYTYDDSVAP

SEQ ID NO: 33760 - protein, 499 aa, Schizophyllum commune
MGAQQSRRSGHGSRPCSTMKHDSSRSSSEASDSKGSRSLKTVSVASASAFAAIAAVTPSSSSSAEDISRLSERTRVEKREVQKPPPPRPKSYLEMPQTTVPCQYRTGKTLGSGTYAIVKEAIHIHTGKYYACKVINKKLMQGREHMVRNEIAVLKRISSGHKNIVTLHDYFETTHNLYLCFDLCTGGELFDRICAKGNYYEADAANLVRTILQAVKYIHDCGIVHRDLKPENLLFRTQAEDADIMIADFGLSRVMEEEKLNMLTEICGTPGYMAPEIFKKTGHSKPVDIWAMGVITYFLLAGYTPFDRDSQQLEMEAIIAGDYKFEPEEYWENVSSTAKDFVTQCLTIDPTNRPTAAEALQHKWLSDPTAHFVTDKEGPVDLLPHVKKAFNAKQLWKKAAFSIKALNRMTMLASSGLDKDAAELSENLKKYKEESAREIMEESTITHSHNMETESTTDLTLKEKEVRDAVKASDDISAHDHEDISSKLASVSLDEGQKK

SEQ ID NO: 33761 - protein, 551 aa, Schizophyllum commune
MSWKSLTRSKKSIPDMRSDTPTPANPNGGSGNDSPYRTGLLAIRVLWAEDVNLPDGKAVPPAVESALSSQAAKVASAVDPLSVSQQQQRLAKTKGHGYKDSVQRTQCWWLPYLVMEYEVNQVLITALGGDLEKPVFMYQANFDVSRNSELSLQCYLRTEEPTRGGDGIADDMGNDIFLGGLKFVPDFDNMGNEDQWYEFDAGKGKIKIGVSYKPNFGHHLSIDDFELITVIGKGSFGKVMQVRKRDTGRIYALKTIRKQHIVTRNEITHTLAERMVLTQVHSPFIVPLKFSFQSEQKLYLVLAFVNGGELFHHLQREQRFNEERARFYSAELLLALEHLHELDVVYRDLKPENILLDYTGHIALCDFGLCKLNMKGDEKTNTFCGTPEYLAPEILNGHGYSKTIDWWTLGVLLYEMMSGLPPFYDENTDTMYQKILNDPLVFGPEISAPAQSILSGLLNRDPTKRLGVNGAEEIKKHPFFESIDWTQLKEKKIHPPFKPSVASPVDVSCFDTVFTAEQPIDSVVENSNLSETVQAQFSGFSYNSSHIVSPA

SEQ ID NO: 33762 - protein, 383 aa, Oryza sativa Japonica Group
MAAVREVGSKAELEAAAGGARAAAVHFWAAWCEASKQMDEVFAHLAVDFSHAVFLRVEAEEQPEISEAYGVTAVPYFVFLKEGKTVDTLEGANPASLANKVAKLAGPASVAESAVPASLGVAAGPAVLEKVQEMAQQNGASATSSAEDALNKRLEQLVNSHPVFLFMKGTPEQPRCGFSRKVVDVLKQEGVEFGSFDILTDNDVREGMKKFSNWPTFPQLYCKGELLGGCDIVIAMHESGELKDVFKEHNIPLQPQGSKNEEAVKAKPDTEKSGAVSEPALLTAAQKERLESLVNFSTVMAFIKGTPEEPKCGFSGKLVHILKQEKIPFSSFDILTDDEVRQGLKLLSNWPSYPQLYINELIGGCDIVLELEKSGELKSTLSE

SEQ ID NO: 33763 - protein, 261 aa, Prochlorococcus marinus str. MIT 9312
MQSNMKESDPILEVRNLFASTDNLPILKGVSITVYPGEIHAIMGRNGCGKSTLSKIIAGHPLYNITNGDIKLSGENINSLEPEERAQSGIFLGFQYPIEIPGVSNLEFLRVSTNARRKFLNKEELDTFDFEELVKEKLELVKMDNAFLSRSVNQGFSGGEKKRNEILQMALLEPKIAILDETDSGLDIDALRIVASGIKKISNAQTGIILITHYQRLLDEIEPNYVHVMADGQIIKTGGSDLALELERKGYEWTDNFVKET

SEQ ID NO: 33764 - protein, 248 aa, Prochlorococcus marinus str. MIT 9312
MAGSSQTKETILVADDEASIRRILETRLSMIGYKVVTASDGKEALKLFKDYEPDLVVLDVMMPKLDGYGVCQELRKDSDVPIVMLTALGDVADRITGLELGADDYVVKPFSPKELEARIRCVLRRIDKDQIPGMPNSGLILVTDIKIDTNRRQVFKSDERIRLTGMEFSLLELLVSRSGEPFSRGEILKEVWGYTPERHVDTRVVDVHISRLRSKLEADPANPELILTARGTGYLFQRIVDIAPFDGK

SEQ ID NO: 33765 - protein, 381 aa, Prochlorococcus marinus str. MIT 9312
MLSTPILLDYQSSTPCSKDVVDSMKPFWSEIFSNPSSKSNLAGINASAILEASRESIEKTLFLHNKKVVFTSGATESNNLALIGFARNYYKKTRHYGHIITLKTEHKAVLEPLNQLKKEGFMVTEITPERDGLISEEKFKKNIREDTFMVSVMLANNEIGVIQPIKNISKICNSRGIAFHSDFAQCLGYIELNDLLSNVNMITMSSHKIYGPKGIGLLLIDEEINLEPLIVGGGQEYGLRSGTLPLPLVVGFAKAIEIAVLNQKKNAEKLLLYRNNLLKGLLENNSGLLINGSIKKRLPHNLNLTVLDLNGANFHKLLKSKIICSSGSACSNGEPSHVLLALGRSFKEAQSSIRLSIGLSTSSKDIKQAIQILTNTIKALR

SEQ ID NO: 33766 - protein, 327 aa, Prochlorococcus marinus str. MIT 9312
MQFIDQANIILKAGKGGNGIVSFRREKFVPAGGPSGGNGGRGGSIILVADNNLQTLLDFKFKREIIAEDGCKGGPNKRSGASGEDTILKVPCGTEIRDFKTGIILGDLTKNKESLTIAIGGRGGHGNAYYLSNQNRAPESFTEGQDGEIWEVQLELKLLAEVGIIGLPNAGKSTLISVLSSARPKIANYPFTTLIPNLGVVRKVDGNGCLFADIPGLISGAADGVGLGHDFLRHIQRTKILVHLIDSIAENPIHDFEIIEQELRKYGKGLIDKERIIVLNKMELVDDDYLQIITKKLEELSKKKVLAISSSLKKGLSSLLFEVWKRI

SEQ ID NO: 33767 - protein, 391 aa, Prochlorococcus marinus str. MIT 9312
MELQQKTTRYPNGLIPPYGGELKNLIIKDNNLKNNLISKVTYEFECSERNACDVELLMVGAFSPLEGFMDENNYKSVIQNNRDTTGLLFGLPIVFDSNNEEVKAGETILLTYKKQNIAVLEVSSIWEPDKSLEAELCYGTNSLDHPAVKMIFNERGRFYIGGRVYGFELPIREFPCKTPEEVRATLPSNYDVVAFQCRNPIHRAHYELFTNALLSDNVSPNSVVLVHPTCGPTQQDDIPGKVRYLTYKELEEEISDERIRWAFLPYSMHMAGPREALQHMIIRRNYGCTHFIIGRDMAGCKSSSTGEDFYGPYDAQNFANKCSKELMMQTVPSKNLVYTKEKGYITAEEAKESNYQIMKLSGTEFRKKLRNGEPIPEWFAFKSVVDVLRRS

SEQ ID NO: 33768 - protein, 244 aa, Prochlorococcus marinus str. MIT 9312
MIPSSRGFSRFNSQQSGQSKINSVGERFPINRTLMEVIRGLEGASTEMVERSKTIFFPGDPAERVYLIRRGAVRLSRVYESGEEITVALLRENSLFGVLSLLTGHRSDRFYHSIAFTRVEMITAPANSVLRAIEEDASVGLLLLQGLSSRILQTETMIETLTHRDMSSRLVSFLMVLCRDFGVASEKGITIDLRLSHQAIAEAIGSTRVTITRLLGDLKDSGLLNIERKKITVFDPIALSKRFN

SEQ ID NO: 33769 - protein, 487 aa, Prochlorococcus marinus str. MIT 9312
MTTALQTPQRRSRTRLQDASLVNGPMLLLRSIRGFSSNRSMLWLATVPLALFGLGLFNVAAHATELPDLNAAFLANNLWLFVATILVIFMNAGFAMVEAGMCRSKNAVNILAKNLFVFALAVTSYWFIGFGIMYYGKEIIPGILYFNSLFFDPTVTAEMIEGAELVPTVDFLFQAAFAGTAATIVSGLVAERVKFGEFVVFAIVLTAFIYPIAGSWKWNGGWLDQLGFIDFAGSSIVHSVGAWAGLVGAMLLGPRIGKYSDGKPQAMPGHNMAIATLGALVLWIGWYGFNPGSQLAMDQWVPYVAVTTTLAAAAGAIGATIVSTLTSGKPDLTMIINGILAGLVSITAGCGDMTLVGAWFAGLVGGIIVVFSVAALDAAEIDDPVGAFSVHGVCGVWGTIVIGLWGTEMQGSGLGIGLLNGGGIKLLLVQALGAAAYAIWTLVTCWIAWSVIGGLFGGIRVSEEEETQGLDIGEHGMEAYPDFASAK

SEQ ID NO: 33770 - protein, 587 aa, Prochlorococcus marinus str. MIT 9312
MTLTSRSLLKDSSKNENSVWITGADALMDALKINGVKVIFGYPGGAILPIYDSVHKAEQDGWLKHYMVRHEQGGSHAADGYARSTGEVGVCFGTSGPGATNLVTGIATAQMDSIPLVVVTGQVPRPAIGTDAFQETDIFGITLPIVKHSWVIRDPANIAKVVSEAFFIASSGRPGPVLIDIPKDVGQEFFHYQRVLPGEIIPKGFKRNGDINDSDIKKAIKLIEDSERPLLYVGGGAISSGSHDEIRTLAKNYQIPVTTTLMGKGAFDEKDNLSVGMLGMHGTAYANFAVTECDLLIAIGARFDDRVTGKLDTFAPNAKVIHIDIDPAEVNKNRRVDVAIVSDVSKAVRKINEKSRDNKFACQTKKWLEKIDFWKNKHPLYEPPQEGEIYPQEVLLKVRELLPEAYVTTDVGQHQMWAAQYLRNSPRKWISSAGLGTMGFGLPAAIGVKAALPNSDVICIAGDASVLMNIQELGTLSQYGLNVKLIIINNRWQGMVRQWQESFYNERYSSSDMSCGEPDFVKLAESFGVKGYLISDRKQLQNELQHALNHDGPALINILVRRGENCYPMVPPGKSNAQMVGYVNCEE

SEQ ID NO: 33771 - protein, 860 aa, Prochlorococcus marinus str. MIT 9312
MKIVPSEFSNSAWNCFIFAKEIAYKNHQQDVDSDNLLLALIKQDNLTKKILKKNNVNIKEFEKEIMSSLNSKAKMKNKQDNLYIGDTLYKIFLKANDIKNTFDDVVISTEHLVYGFTYDNKYGFQILNQKGIPEFLETIKKMKSDPAVKNDFGTSNESLDKYGIDLTQSARDGILDPVIGRDEEIRRTIQILSRRTKNNPVLIGEPGVGKTAIVEGLAQRIINGDVPSALQNRQLISLDMGSLLAGAKYRGEFEERIKNVLKKVKGSDGKIILFIDEIHTVVGAGASGGSLDASNLLKPMLARGELRCIGATTINEHKQNIEKDPALERRFQKIKIDAPSIDDTVSILRGLRERYEVHHSVRISDNALVAAATLSERYINDRFLPDKAIDLIDEAASRLNMIITSKPEEIDEIDRKVLQFEMEKLSLKRETDNFSIERLNKINNELISLKDRQAELGDQWKKEKDEIDEISTIKEEIESIQLQIDQAKRSFDLNKAAELEFGTLNSLQKKLKGKSESLVNSHKKGETSLLRQEVTFDDIAEVVSKWTSIPVQNLNQSEKNKLLSLESILKEKIIGQDSAIRAVADSIKRSRTGLNDPNKPLASFLFLGPTGVGKTELSKVTAKIIFDSNSSITRLDMSEYMEKHSVSKIIGAPPGYLGFESGGQLTEAVRKNPYSLILLDEIEKAHKDILDILLQVLDDGIITDGQGRTINFKNSIIVLTSNLGSQSINDLSVRKEDTNEIKKVVDTELKKFFKPEFLNRLDEIVIFNNLELNDIKEISKIQLQNLENRLNKKNLNFKITDDAINQLVQNSFDNAYGARPLKRIIQKQIETKIANNILNNHYLNKKEVNIYLVNGEIIVD

SEQ ID NO: 33772 - protein, 392 aa, Prochlorococcus marinus str. MIT 9312
MSQVNLSERALSIEPSLTLQISAKANQLSAEGVDICNLSAGEPDFNAPKEVIEATSKAIFDGFTKYGPAAGNLDLRKAIANKLRIQNNLNYEFENVMVTNGAKQAIYNLFQVLLNIGDEVIIPSPYWLSYPQMVRLAGGKPIFTNSSAEDGFKIDIKDLKSKISSKTKFIIINSPNNPTGRVMSKEELLQIADIVRENPNINILSDEIYELILKKEFKHYSISSQANDLKDRIFIINGFAKGWAMTGWRIGYLVGPKDVIKASSALQSQSTSNVCSFVQKGALEALKINNEFFSMINSHYDQRRSLLYEGLKNINGIYIEEPNGAFYAFPRLPNSSITSVDFCNKALQDYGLVVVPGKAFGADECIRISCATSEIKIKDGLERFKKAISKYF

SEQ ID NO: 33773 - protein, 637 aa, Prochlorococcus marinus str. MIT 9312
MNQKLKTIILWALPILLIIALSYQFLSSSNVDSLKSNGTTIAPRNSAVARVSYGRFLDYINSGKVTSVDIFEGGRNAVIETIDSDLDNKVQRLRVDLPGLTPELINNLKNEGISFDVHPVKTAPPALGILGNLLFPAILIGGLILLARRSNGMPGGPGQAMQFGKTKARFAMEAETGVVFDDVAGVNEAKQDLQEVVTFLKKPEKFTSVGARIPKGVLLVGPPGTGKTLLAKAIAGEAGVPFFSLSGSEFVEMFVGVGASRVRDLFKRAKENSPCLIFIDEIDAVGRQRGAGIGGGNDEREQTLNQLLTEMDGFEGNSGIIIIAATNRPDVLDSALMRPGRFDRQVTVDAPDIKGRLSILEVHARNKKLQEDLTLESIARRTPGFTGADLANLLNEAAILTARRRKDSISISEIDDSVDRIVAGMEGSPLTDGRSKRLIAYHEVGHALIGSLVKAHDPVQKVTVIPRGQAKGLTWFTPDDEQTLVSRAQLKARIMGALGGRAAEDVVFGKGEITTGAGGDFQQVASMARQMVTRFGMSNLGPIALEGGNQEVFVGRDLMTRSEVSDSISKQIDESVRVMVKECYKETYSIVSKNREAMDRIVDLLIEKETLDGEEFTRILSEFTTIPEKERTPQLLN

SEQ ID NO: 33774 - protein, 390 aa, Prochlorococcus marinus str. MIT 9312
MENNFIYLDNASTTPLSKNVLNIINSTYRNYWHNPSSTYELGIKCSTYLEKIRSKIAHIFEADPEDIIFTSGSSESTNIVFNNIYENFKNGRVVISNVEHQATTICANKLRKQNWDIYEWTVNNDGILNISNIDEILTNETKIVSIIWGQSEIGTIQPVQFIGSKCEELNIMFHLDGTQILSNGIFSWKDLKCDLLSLSAHKFGGPKGIGILLTKEKSRQILKNKDISLTQEFSIRQGTQALPLIAGMYESLKNIKGKIKLCDYITEFPSNNINKLKNYFFKKIKDNNHIKITGSINHRLPNHISFLLLNKLFEPIRAYKIVNFMSENKIAISSGSACSSSSGKPSSTLKNIGLKDDELYSNIRVTLGSINNKSEIDKFLELIQICIDKF

SEQ ID NO: 33775 - protein, 370 aa, Prochlorococcus marinus str. MIT 9312
MYSQSTVIAGGLAHIPVVIGVFYFILKTFSKRASNFPQDTEPKKSQVKSVEQKSVPKPAPVAKGVTNNVVKKKKHADVPVNIYRPKTPYEGTVIENYSLLKEGAIGRVNHITFDLKDSDPFLNYVEGQSIGIMPAGEDANGKPHKLRLYSIASTRHGDDYKGNTVSLCVRQLQYEKDGETINGVCSTYLCDIKPGDKVKITGPVGKEMLLPDEEDANIVMLATGTGIAPMRAYLRRMFEATEKEKNKWNFKGKAWLFMGAPKSANLLYEEDLQRYLTDYPDNFTYTKAISREQQNTKGGRMYIQDRVLESANELFNMIEDEKTHIYLCGLKGMEPGIDEAMTKAAEEKGLNWSELRPQLKKAGRWHVETY

SEQ ID NO: 33776 - protein, 331 aa, Prochlorococcus marinus str. MIT 9312
MTSFITAVQNKESNFNLTNSRLRLVSGTTNPKLAEEIASYLGIENVPLISKRFADGELYVQIQQSIRGCDVFLIQPTSAPVNDSLMELMIMVDACKRASARQITAVIPYFGYARADRKTSGRESITAKLTANLLEKSGVDRVLAMDLHSAQIQGYFDIPCDHIYGSPVLIDYLESLNLEEVVVVSPDVGGVSRARAFAKLMKDAPLAIIDKRRSAHNIAESLTVIGEVKGKTAILIDDMIDTGGTICSGAHLLKKEGANRIFACASHAVFSPPSYERLSTKDLFEQVIVTNSIPVIVKDDFPQLKVLSVANMLGEAIWRIHEESSVSSMFR

SEQ ID NO: 33777 - protein, 463 aa, Prochlorococcus marinus str. MIT 9312
MSISSFLTKKFFKSFFFPAHNRGAALPKKLVKLLKNPPGYWDLPELPEIGSPLSQSGLIAKSQREFSEKFGAKGCFYGVNGASGLIQSAIIAMANPGETILMPRNVHISVIKTCAMQNILPIFFDLEFSSETGHYKPITKIWLEKVFKKLNFNENKIVGIILVSPSYHGYAGDLEPLIDLCHQKNLPVLVDEAHGSYFLFCENLNLPKSALSSNADLVVQSLHKSLNGLTQTAVLWYKGDLVNEYNLIKSINLLQTTSPSSLLLSSCEESIKDWLNKKSLSKYQKRISEAKSIYKKLMHKNIPLIETQDPLKIVVNTSKAGIDGFTADKFFYRNGLIAELPEMMTLTFCLGFANQKDFINLFENLWNKLLLNSNKLKSLEVLQSPFKLVQAPEIEIGIAWRSETRSIPFSQSLNKISGDIICPYPPGIPLLVPGEKIDKDRFNWINNQSLCNKDLVNFNIRVI

SEQ ID NO: 33778 - protein, 363 aa, Prochlorococcus marinus str. MIT 9312
MQLISPEIVFRGKDAWEKALPQITKLTKSPLILGRGIHTNNLRNKIFNDLKNQNLIVNSANLQFDCCYEDISRVKNIILKNNNDSVIAAGGGKVLDSGKYIAECLNIPCITVPLSASTCAGWTALSNIYTKDGQFIKDVALGSCPRILVYDHKFIQKAPSRTLASGIADALAKWYESSITSSTIDDGLVQQAIQISRVLRDQLLIDGEKAFKGQFENNPSWRNTVEACGLTAGLIGGIGGEKCRTAAAHAIHNAITQIITPNKFLHGEIVGVGLLLQLRLEEIKNNNKLADQSIKQLLVLMKELKLPTTIAQLGINVFENNNLEKIADFTCRDKSEIHFLPFEIFKQDIIEVITNFEQQKIKI

SEQ ID NO: 33779 - protein, 593 aa, Prochlorococcus marinus str. MIT 9312
MALKKDGNSVDNGQEKSQHDDASLLEIKNLENKTDIKSQPLEISIGNDNENGFLDFGFNQSILNSLSNKGYKNPTPIQKAAIPELMLGRDLLGQAQTGTGKTAAFALPLIEKLADNKELNAKVLVMTPTRELATQVAESFKSYSSESTNFKTIAIYGGTDYRNQIYALKRKVDVVVGTPGRIMDHIRQGTFKVNSINCLVLDEADEMLNMGFLEDIEWIIDQLPKNKQMVLFSATMPNEIRNIAKKYLNDPAEILIKSVKKETQLISQKFLYVQRHHKLDALKRILELNNEGVIIFVRTKLLTTSIAEALENLGHSVAVLNGDIPQNQRENTVDRLKKGFIDILVATDVAARGLDVERIKLVVNYDFPFDKETYTHRIGRTGRAGRSGEAILFVNHREKHFLRNLENSTRTKIEEINIPSNKIINEKRMEKLIENVNESSLAKEDNEENKALIIDVLDNLKEKHSMDDSNIAMAAINLVIGNKAFFVNEDDSWIHKQNNTDRNRSNRNGNNRMRNSNRRNNFQNDSFETYKFDFGKFDGVRVANIISSICNSTNINGRSIGKIQIFNDYSLVDLPRDLHRETKNKLKKIKVRN

SEQ ID NO: 33780 - protein, 107 aa, Prochlorococcus marinus str. MIT 9312
MDNLTKDKIQKLIDSNPVMVFMKGTKLMPQCGFSNNVVQILNSLGIEFGTFDVLSDFEVREGIKKYSDWPTIPQVYLKGEFLGGSDILIEMYNSGALKEKIEIELAS

SEQ ID NO: 33781 - protein, 349 aa, Prochlorococcus marinus str. MIT 9312
MMNRLFFGIAAFGLLLTGCASNQNDNISRLSLIQERDELICGVSGKIPGFSFIERDGSYKGLDVDICKAFAAAIIGDSEKIQFRPLTAAERFLAIKTGDIDLLSRNTTLTLSRDSFGGNGLTFAPVVFHDGQGLMVKKNSGIESIQELANKSICVGSGTTTEQNINDTFESLSLPYVPIKYQDLNQVVAGYLQGRCQAMTSDRSQLAAARSGFKNAKDHIILDDVLSKEPLAPASDGSEQKLADAMRWTVFALIAAEEQGITQSNIADRLQLAKNNPQLKSLRRFLGVDGGLGEKIGLRNDFVVNVIKATGNYGEIYDRNLGIDSDVPIPRGLNEIYSKGGLHISPPFN

SEQ ID NO: 33782 - protein, 391 aa, Prochlorococcus marinus str. MIT 9312
MTFFNLYLVCKKINKLTKILIPSETSSGERRVSATPEAVKKLKSHGCDVYIESSAGKLSGFSDLSYEESGGTIISNLDQNIWGEADMIFCVQTPSEDNLIKLKNGAVLLGLLNPYGNKDLLKIINSNKISALSLELLPRISRAQSSDVLSSQANIAGYKAVLLAASELDRYFPMLMTAAGTVQPAKVVVLGGGVAGLQAVATAKRLGAIVFVSDIRPAVKEQVESLGARFIELPEVDEKPGEAGGYAKAVTPEFLSKQKATLTKYLSEADVAICTAQVLGKKAPVLIDSPMLEKMRPGAVVIDLAVSQGGNCEGTKSNETIIKDGVKLIGAGELPSSVPYDASSLYAKNLTSLITPFIKDGVIKLDKEDELISGCLLSDEGVVLQNKVFEN

SEQ ID NO: 33783 - protein, 380 aa, Prochlorococcus marinus str. MIT 9312
MIGFISEKLLIPILDFFYGLVPSYGLAIVALTVVIRIALFPLSAGSIRSARRMKIAQPVMKTRQAEIKSKFSGDPKKQQEELGKLMNEFGSPLAGCLPLIVQMPILFALFATLRGSPFADVPYNINLKVVPQDQIAAIDPKPYKSPRHSIFITEKSHFPVIATIPNGTKLGTEESIKINLQTTNGNSYSEVLSKYDNGSKFLPSWKVSKGSENIKVSQDGTVTAIKPGDATIEAKIPGLAAKSGFLFIKALGQVGFYVDGAINWDIATLVGAFGLTLLLSQVLSSQGMPANPQQSTANKITPIMITGMFLFFPLPAGVLLYMVVANIFQAFQTFLLNKETLPENLQKILDQQLLAKDEVITTSASTISEKRLPFEPNSKK

SEQ ID NO: 33784 - protein, 622 aa, Prochlorococcus marinus str. MIT 9312
MCGITGIISFQSSIDPQNIHNMNETLMHRGPDHRDIWINEYSTVFLGHTRLSILDLSDNGNQPFHSKDGRFHLTFNGEIYNYKNLKDYLKTNGISNFKSNSDTEVLIELIALRGITNASKMLNGMFAFAVWDSLEKKIHLVRDRFGEKPLFYTLQKDTLYFGSEIKSILKIPTISKIINKEALSHYLRFNYIKNPLTIYKDIYKLEPGHILSIDQNITYKKYSYKNKNKKTIKLANQKEAEDLLQNQIIKSCLSRTISDVPIACFLSGGIDSSLVTSIIQRNSKQRIKTFTIGFDDQSIDESNYAEKIANFLGTDHTTINIEEKELLNNIDLQSEIYGEPFADQSSIATNILCKYASRDVKVCLSGDGGDEMFIGYDRYYKVNQLRLFLKAIKFYKKFKTIDRILEVLIHKIESNKNFSIKIDKIIKLISLLSDANDDNIYEKFNSLYRDQYFPLTPQNNQKHYIYKDLKNIQEMCEYDFETYLPDCILTKVDRASMHNSLEVRAPFLDHEIPEIIDSINPTYKKKLLNRKFILKKLLNKYLPKNIYERPKKGFSAPLNNWIKGPLKELTLDYLSIESLKKHNLLDIDIIERIKYEHYSGIRSWHNQIWNLLIFQQWYNKNF

SEQ ID NO: 33785 - protein, 303 aa, Prochlorococcus marinus str. MIT 9312
MANYRSGFVTLLGRPNVGKSTLINKLIGEKITITSPIAQTTRNKLKGILTTKNGQIIFVDTPGVHKPHHRLGEILVKNAKSAINGVDMVIVVVDSSEEPGRGDEYIMNFLVANQTEFIVALNKWDLVNEEFRKLRLDQYRKFFGINRNFQILSASQGEGCSELVNMLLTFLPEGPKLYDEDMICDQPLDNLLSDLVREQVLINTREEVPHSVAVRIEKIEEMKRKNGKSFTAILATIIVERSTQKGILIGKKGSMLKIIGQSARSNMSKLINGPVYLELFVKVVPNWRKKESRLLEFGYEEDF

SEQ ID NO: 33786 - protein, 146 aa, Prochlorococcus marinus str. MIT 9312
MTNSKNSSNNSTNGNELYAIAETSGQQFWFEVNRYYDIDRLNAKEKDKITLEKILLLKDKNSITIGKPYVKDAKIELEVVSHKRDKKILVYKMRPKKKTRRKMGHRQELTRVMVKSISLGKSAPKSSAKKETVKKETKPKSEKSTN

SEQ ID NO: 33787 - protein, 528 aa, Prochlorococcus marinus str. MIT 9312
MTKVLITDPIDQTGIDILSQVAQVDQRIGISNSELASIIKEYDALMIRSGTQVTEEIINSSNKLRIIGRAGVGVDNVDVKAATQKGVLVVNSPGGNTIAAAEHTIAMMLALSRNIPIANSSTLLGKWERKKFVGNELYKKKLGVVGLGKIGAHVAKVANALGMEVYGYDPFVSTERAQQIKVKLSELDDLFQQSDYVTLHLPRTPETENLVNMKVLKSMKSSAKLINCARGGLIDEEALAEALNQSFIGGAAIDVFSKEPLESDSPLLQVEKNLILTPHLGASTREAQENVAVDVAEQIRDVLLGLSARTAVNIPGLSPDIMDSLKPHLQLAETMGLLVSQLAGGQIQKLEVKLQGEFVQHPSQPLIIASLKGLLSKALGDRINYVNASLEADSRGISVVESKDEARPEFASGSLQLTTYGDNGDHSVAGSIFADGELRIISIDQYPVNVSPSRYMLVTRHRDMPGIIGKLGSLLGSNNVNIASMQVGRKIVRGEAVMVLSIDDPIPNKLLDTIIEVEGITSANPVTL

SEQ ID NO: 33788 - protein, 1468 aa, Prochlorococcus marinus str. MIT 9312
MEHRGGCGGDSDSGDGAGILCSIPWKYLEEKMNLQNKKDFVRGLGMVFMPNKKEKIEECKTICEEEAKKLKVKNTFWRTVPVHNEILGPLAKANAPFISQWILYIDKKDNQDIERLLFQLRKRIEKKIRVTFKNHVGDCEFYFASLSSQTVVYKGMVRSEILSEFYQDLKEDSFKVSFSVYHRRFSTNTLPKWPLAQPMRFLGHNGEINTLLGNINWAKASEKHIDDFWGELSNEIKPIVDVNKSDSSNLDATLEINIRSGQPITDSLLKLVPEAFRGQPELEQREEIKAFYEYSASLQEAWDGPALLVFADGNFVGATLDRNGLRPARYSITNDGFVIMGSETGVVDLEEEKVIEKGRLGPGQMLAVDFHQNRILRNWEVKSEAAQRHHYKKLLNKRTIKIDNHEWLKDCKLKDLELLQQQTAYGFSAEDNDLILDSMASLAKEPTYCMGDDIPLAVLSSKPHILYDYFKQRFAQVTNPPIDPLREKLVMSLEMHLGERCTPFEIKDPKPFVHLKSPILNEEELISIKNSKIKSQTISSLFDIEEGVQGLENQLKAICKQSELSIEEGCSLIIISDKGINPKKTFIPPLLAVGSIHHYLLKKEIRLKASLIVETGQCWSTHHLACLIGYGASAVCPWLTFEAGRHWLKHPKTQKLIDSKKINTLSIIDVQENIKKALEDGLRKILSKIGISLLSSYHGAQIFEAVGLGSDIIKIAFDGTTSRIAGITLKELTNETLSIHTKAYPEIDLKKLEFLGFVQFRNNGEYHSNNPEMSKVLHSAVKQGPGYDHFETYKQLISNRPTTSLRDLLTISSKRKSIPLEKVETVESICKRFCTGGMSLGALSREAHEVLAVAMNRIGGKSNSGEGGEDPARFNVLNDINANTQSATLPFIKGLRNGDTACSAIKQIASGRFGVTPEYLRSGKQLEIKMAQGAKPGEGGQLPGPKVDSYIAKLRNSKPGVALISPPPHHDIYSIEDLAQLIHDLHQVHPKAKVSVKLVSEIGIGTIAAGVSKANADVIQISGHDGGTGASPLSSIKHAGLPWELGVAEVHKSLLDNNLRERVILRTDGGLKTGWDVVIAALLGAEEYGFGSVAMIAEGCIMARVCHTNKCPVGVATQKEELRKRFKGIPENVVNFFLYIAEEVRQIMSSIGVANMEELIGNQEFLSTRNIGLPKTSNIDLSSLVNNECSNNDRSWLKHSKNAHNNGSVLEDEFLSDAEFIDSIKNHEKLTKEIKIKNTDRSVCAKISGEIAELHGNTGFNGELSLNFKGYAGQSFGAFLLKGMNIQLIGEANDYVCKGMNGGILTIIPPKIDKSSSEQVILGNTCLYGATGGKLFALGKSGERFAVRNSGATAVTEGAGDHCCEYMTGGKVIILGSAGRNIGAGMTGGIAFILDENNDLSNKVNKEIVSIHKITSSKQEEILLEIIREYLAKTNSLKAAKIIENWSFFKSAFKLIVPPSEEEMLGIK

SEQ ID NO: 33789 - protein, 586 aa, Prochlorococcus marinus str. MIT 9312
MALLVKKFGGTSVGDIKKIQNIATSICQSKEAGNEIVVVVSAMGHTTDNLNSIAESISKNPNRRELDMLLSTGEQVTIALLSMALNEYGIPAISMTGSQVGIITESIHGKARILDIQTGRIQNYIDQGFVVVVAGFQGTTLSHTGSMEITTLGRGGSDTSAVALSTALGAETCEIYTDVPGVLTTDPRIVPNAKLLDSISCEEMLELASVGASVLHPRAVEIARNYGIKLCVKSSQSNSSGTLLESQIQPLPLKRGSLELTKTVNSLEVLENQAVFSLSNIPDRPGIAAQIFEKLSEASINVDLIIQATNDGNNNDITFTVSALEAQKTAEQCELITSQLGGEYNLKTNMTKLSIQGAGIMGRPSVSADLFDTLSQANINVRLIATSEIKVSCVIEINNIPKAIRFVAEKFKLSDTQIFVNPIYEKQDQPEVRGIALDKNQVQVSFRKLPDRPGVAASICLALAENNLLFDTIVQSERISSLKAKDISLTMNKQDREKAKLVFEALTKKLPGSYIEDGPAIAKVSTVGAGMAFKVGTAGKIFRALANQNINIEMIATSEIRTSCIVLEKDCDKAVNAIHNHFELEK

SEQ ID NO: 33790 - protein, 293 aa, Prochlorococcus marinus str. MIT 9312
MIKNLFDNENAIFMGAKRSPNDCVIGIFGVNYDGTCSFKPGARFGPEAIRQVSSCLETYCPKLNKDLEDIMYVDFGSILIDKNDSKSVIESVKLATNFLINKRLSPIMLGGEHSITTGAIEALVKKYPDLILVQLDAHADLRESYIGNQYSHACAMKRCLEVLPEKKILQVGIRSGTKEEFQIMHNNNQLVNFYPGGNAQELKKALLPYSKSPIYLTIDLDWFDPSLLAGTGTPEPGGFFWNDFEEILKTLKDFRIVASDIVELSPEIDKSGVSSIVAAKVLRSLILSLENMQ

SEQ ID NO: 33791 - protein, 645 aa, Prochlorococcus marinus str. MIT 9312
MENIKYKNLPMGKVVGIDLGTTNSCVAVMEGGKPTVIANAEGFRTTPSVVAYTKNQDQLVGQIAKRQAVMNPENTFYSAKRFVGRRVDEVNEESKEVSYSVEKSGSSVKLKCPILNKQFSPEEVSSQVLRKLADDAGKYLGQQVTQAVITVPAYFNDSQRQATKDAGKIAGLEVLRIVNEPTAAALAYGLDKENEKILVFDLGGGTFDVSVIEAGDGVTEVLSTSGDTHLGGDDFDRCIVDHLASNFKSNEGIDLRQDKQALQRLTEAAEKAKIELSNATQSEINLPFITATPEGPKHLDLNLTRAKFEELAASLIDRCKTPVERAISDAKISTSEIDEVVMVGGSSRIPAVLDLVKKIIGKEPNQTVNPDEVVAVGAAIQGGVLAGEVKDILLLDVTPLSLGVETLGGVMTKMINRNTTVPTKKSETYSTAVDGQTNVEIHVLQGEREMASDNKSLGTFRLDGIPSAPRGVPQIEVTFDIDANGILSVTAKDKGSGKEQSISITGASTLSDNEVEKMVKDAESNASADKDKREKIDLKNQAETLVYQTEKQLSELGDKIDAAAKSKVEEKSNALKEATSKEDYESMKKLLEELQQELYAVGSSVYQQPGNQPPSPGSTGSPDQNDSNEKDGDDVIDADFTETKD

SEQ ID NO: 33792 - protein, 404 aa, Prochlorococcus marinus str. MIT 9312
MQQVNKVVLAYSGGVDTSVCIPYLKNEYGISEVVTFVADLGQGEDLELIRKKALNSGASKSIIGNLVSSFVERYAFPAIRANALYLDKYPLSTALARPLIAENLVNIAREINADAVAHGCTGKGNDQVRFDLAINALGPDLKIITPAREWNMSREEAILYGEKFGIPAPVSKKSPYSIDVNLLGRSIEAGILEDPMQEAPEDIFAMTSSINNSPESPLDIEIIFKNGFPVGINNEFLNPVEIIQKANVLAGEYGFGRIDMMEDRVVGIKSREIYETPGLLLLIKAHKELESITLNPDVIDFKGVVEKKWGQLVYQGFWFGPLKESLDAFIASTQTSVNGRVKIRLHKGNAIVIGRISENNSLYREDLATYSQDDVFKHSLAEGFIYMWGMSNKIWAELNSKKID

SEQ ID NO: 33793 - protein, 139 aa, Brassica rapa subsp. pekinensis
MRKGRGSSAVPPALHGSVKEPRYRGVRKRPWGRFAAEIRDPLKKSRVWLGTFDSAVEAARAYGAAARNLRGSKAKTNFPIDCSPSSPLQPPNYQNHHRNLAPNQNQMDPFMDHRLYGGGGGSFPEQQQVISRPASSSLS

SEQ ID NO: 33794 - protein, 189 aa, Brassica napus
MAFAGTTQKCMACDKTVYLVDKLTADNRVYHKACFRCHHCKGTLKLSNYNSFEGALYCRPHFDQNFKRTGSLEKSFEGTPKIGKPDRPLEGERPAGTKVSNMFGGTREKCVGCDKTVYPIEKVSVNGTLYHKSCFKCTHGGCTISPSNYIAHEGKLYCKHHHIQLIKEKGNLSQLEGGDNAAKDKVDAA

SEQ ID NO: 33795 - protein, 668 aa, Daucus carota subsp. sativus
MASAVFYTSMNSSPALFSRTHFPNSISKDFSDEFLNTHQVNYYLPARKIGSLKRVASKVRAAVTDAPVVSQSGGENLREGKKKLKILVAGGGIGGLVFALAARRKGFEVVVFERDLTAIRGEGQYRGPIQIQSNALAALEAIDWDVADEVMKAGCITGDRINGLVDGVSGNWYCKFDTFTPAAERGLPVTRVVSRMTLQKILATAVGDEIICNGSNVVDFEDDGKKVTVILEDGQRCEGDLLVGADGIWSKVRRNLFGYTEPTYSGYTCYTGIADFVPADIDTVGYRVFLGHKQYFVSSDVGGGKMQWYAFYNEPAGGKDKENGKKERLLQIFGGWCDNVIDLLMATDEEAILRRDIYDREPTFNWGKGRITLLGDSVHAMQPNLGQGGCMAIEDSYQLAMELDKAYNRSAESGNPIDIESSLRSYESSRKIRVSVIHGLARMAAIMASTYKAYLGVGLGPLSFLTKLRIPHPGRVGGRFFIDIGMPLMLSWVLGGNGSNLEGRPLQCRLSDRANSDLKRWFEDDDALERATKGEWVLFPVGNTSASSEAIFLSKDEGKPCIVGSVLHPNIPGTSIAIPSPQVSSLHAKITCKNGAFSVTDLRSEHGTYLSDNEGRRYRIPPNFPTRFHPSDIIGFGSDEKVAFRVKVMKFPSQVAENTEGSGALQAV

SEQ ID NO: 33796 - protein, 310 aa, Arabidopsis thaliana
MVTATSIIAWGSGEDGQLGIGTNEEKEWACVVEALEPYSVRSVVSGSRNSLAICDDGTMFTWGWNQRGTLGHQPETKTENIPSRVKALANVKITQAAIGGWHCLAVDDQGRAYAWGGNEYGQCGEEPLKDEMGRPVRRDIVIPKRCAPKLTVRQVAAGGTHSVVLTREGHVWTWGQPWPPGDIKQISVPVRVQGLENVRLIAVGAFHNLALEEDGRLLAWGNNEYGQLGTGDTQPTSHPVPVQGLDDLTLVDIAAGGWHSTALTDKGEVYGWGRGEHGRLGLGDNDKSSKMVPQKVNLLAEEDIIQVLKR

SEQ ID NO: 33797 - protein, 120 aa, Arabidopsis thaliana
MVPDMEAAGSTCVLSSSADDGVNNPELDQTQNGVSTAKRRRGRNPVDKEYRSLKRLLRNRVSAQQARERKKVYVSDLESRANELQNNNDQLEEKISTLTNENTMLRKMLINTRPKTDDNH

SEQ ID NO: 33798 - protein, 278 aa, Arabidopsis thaliana
MSNITKKKCNGNEEGAEQRKGPWTLEEDTLLTNYISHNGEGRWNLLAKSSGKSCRLRWLNYLKPDIKRGNLTPQEQLLILELHSKWGNRWSKISKYLPGRTDNDIKNYWRTRVQKQARQLNIDSNSHKFIEVVRSFWFPRLINEIKDNSYTNNIKANAPDLLGPILRDSKDLGFNNMDCSTSMSEDLKKTSQFMDFSDLETTMSLEGSRGGSSQCVSEVYSSFPCLEEEYMVAVMGSSDISALHDCHVADSKYEDDVTQDLMWNMDDIWQFNEYAHFN

SEQ ID NO: 33799 - protein, 344 aa, Arabidopsis thaliana
MASLGLSFPPAAKTPTYLASSSSTFFSNSSLSVRTSQFRSRNSVFACVKCDMPESLNVGNGNPSIPIINERTLPKFLESARMEKSVNRTNTRLKLFSGTANPALAQEIAWYMGLDLGKVNIKRFADGEIYVQLQESVRGCDVYLVQPTCTPTNENLMELLIMVDACRRASAKKVTAVIPYFGYARADRKTQGRESIAAKLVANLITEAGADRVLACDLHSGQSMGYFDIPVDHVYCQPVILDYLASKSIPSEDLVVVSPDVGGVARARAFAKKLSDAPLAIVDKRRSGHNVAEVMNLIGDVRGKVAIMVDDMIDTAGTIVKGAALLHQEGAREVYACCTHAVFR

SEQ ID NO: 33800 - protein, 934 aa, Arabidopsis thaliana
MVRISLLLLCLLVSTCLFTSSSAQAPGFVSLDCGGAEPFTDELGLKWSPDNHLIYGETANISSVNETRTQYTTLRHFPADSRKYCYTLNVTSRNRYLIRATFLYGNFDNSNNVYPKFDISLGATHWATIVISETYIIETAELVFLASSPTVSVCLSNATTGQPFISTLELRQLSGSMYGSMLSEDRFYLSVAARINFGAESEASVRYPDDPYDRIWESDLQKKPNYLVDVAAGTVRVSTTLPIESRVDDRPPQKVMQTAVVGTNGSLTYRMNLDGFPGFGWAFTYFAEIEDLAEDESRKFRLVLPEQPEYSKSVVNIKENTQRPYRVYAPGYPNITLPFVLNFRFAKTADSSRGPILNAMEISKYLRKSDGSVDATVMANVASLYSSTEWAQEGGDPCSPSPWSWVQCNSDPQPRVVAIKLSSMNLTGNIPSDLVKLTGLVELWLDGNSFTGPIPDFSRCPNLEIIHLENNRLTGKIPSSLTKLPNLKELYLQNNVLTGTIPSDLAKDVISNFSGNLNLEKSGDKGKKLGVIIGASVGAFVLLIATIISCIVMCKSKKNNKLGKTSAELTNRPLPIQRVSSTLSEAHGDAAHCFTLYEIEEATKKFEKRIGSGGFGIVYYGKTREGKEIAVKVLANNSYQGKREFANEVTLLSRIHHRNLVQFLGYCQEEGKNMLVYEFMHNGTLKEHLYGVVPRDRRISWIKRLEIAEDAARGIEYLHTGCVPAIIHRDLKTSNILLDKHMRAKVSDFGLSKFAVDGTSHVSSIVRGTVGYLDPEYYISQQLTEKSDVYSFGVILLELMSGQEAISNESFGVNCRNIVQWAKMHIDNGDIRGIIDPALAEDDYSLQSMWKIAEKALLCVKPHGNMRPSMSEVQKDIQDAIRIEKEALAARGGISDEFSRSSAHSSSLNMGMLDLAGSQSYVSIDESVLQPTAR

SEQ ID NO: 33801 - protein, 263 aa, Arabidopsis thaliana
MWKIGQRGVPYFQRLIAAPFTTLRSLPTSLVETGQNRVIDASLTLIRERAKLKGELVRLIGGAKATTALLGVPLGHNSSFLEGPALAPPHVREAIWCGSTNSTTEEGKELKDPRVLSDVGDIPVQEIREMGVDDDRLMKVVSESVKLVMEEEPLRPLVIGGDHSISYPVVRAVSEKLGGPVDILHLDAHPDIYDRFEGNYYSHASSFARIMEGGYARRLLQVGIRSINKEGREQGKRFGVEQYEMRTFSKDRQMLENLVCINF

SEQ ID NO: 33802 - protein, 577 aa, Arabidopsis thaliana
MCGILAVLGCVDNSQAKRSRIIELSRRLRHRGPDWSGLHCYEDCYLAHERLAIVDPTSGDQPLYNEDKTIAVTVNGEIYNHKALRENLKSHQFRTGSDCEVIAHLVKHGEEFVDMLDGMFAFVLLDTRDKSFIAARDAIGITPLYIGWGLDGSVWFASEMKALSDDCEQFMCFPPGHIYSSKQGGLRRWYNPPWFSEVVPSTPYDPLVVRNTFEKAVIKRLMTDVPFGVLLSGGLDSSLVASVALRHLEKSEAACQWGSKLHTFCIGLKGSPDLKAGREVADYLGTRHHELHFTVQDGIDAIEEVIYHVETYDVTTIRASTPMFLMSRKIKSLGVKMVLSGEGSDEIFGGYLYFHKAPNKKEFHEETCRKIKALHQYDCLRANKSTSAWGVEARVPFLDKEFINVAMSIDPEWKMIRPDLGRIEKWVLRNAFDDEKNPYLPKHILYRQKEQFSDGVGYSWIDGLKDHANKHVSETMLMNASFVFPDNTPLTKEAYYYRTIFEKFFPKSAARATVPGGPSVACSTAKAVEWDAAWSQNLDPSGRAALGVHVSAYGEDKTEDSRPEKLQKLAEKTPAIV

SEQ ID NO: 33803 - protein, 361 aa, Arabidopsis thaliana
MDIKEDDESRVITPTELQLHDSVTARTGTLWTAVAHIITGVIGAGVLSLAWATAELGWIAGPAALIAFAGVTLLSAFLLSDCYRFPDPNNGPLRLNSYSQAVKLYLGKKNEIVCGVVVYISLFGCGIAYTIVIATCSRAIMKSNCYHRNGHNATCSYGDNNNYFMVLFGLTQIFMSQIPNFHNMVWLSLVAAIMSFTYSFIGIGLALGKIIENRKIEGSIRGIPAENRGEKVWIVFQALGNIAFSYPFSIILLEIQDTLRSPPAEKQTMKKASTVAVFIQTFFFFCCGCFGYAAFGDSTPGNLLTGFGFYEPFWLVDFANACIVLHLVGGYQVSQKPLAHLTNMLVDFYVFVHILENKLPF

SEQ ID NO: 33804 - protein, 412 aa, Arabidopsis thaliana
MYLSFDPAVMATYSSVPVCADVCVVGVARTPIGDFLGSLSSLTATRLGSIAIQAALKRAHVDPALVEEVFFGNVLTANLGQAPARQAALGAGIPYSVICTTINKVCAAGMKSVMLASQSIQLGLNDIVVAGGMESMSNVPKYLPDARRGSRLGHDTVVDGMMKDGLWDVYNDFGMGVCGEICADQYRITREEQDAYAIQSFERGIAAQNTQLFAWEIVPVEVSTGRGRPSVVIDKDEGLGKFDAAKLKKLRPSFKEDGGSVTAGNASSISDGAAALVLVSGEKALELGLHVIAKIRGYADAAQAPELFTTTPALAIPKAIKRAGLDASQVDYYEINEAFSVVALANQKLLGLDPERLNAHGGAVSLGHPLGCSGARILVTLLGVLRAKKGKYGVASICNGGGGASALVLEFM

SEQ ID NO: 33805 - protein, 933 aa, Arabidopsis thaliana
MVRISLLLLCLLVSTCLFTSSSAQAPGFVSLDCGGAEPFTDELGLKWSPDNHLIYGETANISSVNETRTQYTTLRHFPADSRKYCYTLNVTSRNRYLIRATFLYGNFDNSNNVYPKFDISLGATHWATIVISETYIIETAELVFLASSPTVSVCLSNATTGQPFISTLELRQLSGSMYGSMLSEDRFYLSVAARINFGAESEASVRYPDDPYDRIWESDLQKKPNYLVDVAAGTVRVSTTLPIESRVDDRPPQKVMQTAVVGTNGSLTYRMNLDGFPGFGWAFTYFAEIEDLAEDESRKFRLVLPEQPEYSKSVVNIKENTQRPYRVYAPGYPNITLPFVLNFRFAKTADSSRGPILNAMEISKYLRKSDGSVDATVMANVASLYSSTEWAQEGGDPCSPSPWSWVQCNSDPQPRVVAIKLSSMNLTGNIPSDLVKLTGLVELWLDGNSFTGPIPDFSRCPNLEIIHLENNRLTGKIPSSLTKLPNLKELYLQNNVLTGTIPSDLAKDVISNFSGNLNLEKSGDKGKKLGVIIGASVGAFVLLIATIISCIVMCKSKKNNKLGKTSELTNRPLPIQRVSSTLSEAHGDAAHCFTLYEIEEATKKFEKRIGSGGFGIVYYGKTREGKEIAVKVLANNSYQGKREFANEVTLLSRIHHRNLVQFLGYCQEEGKNMLVYEFMHNGTLKEHLYGVVPRDRRISWIKRLEIAEDAARGIEYLHTGCVPAIIHRDLKTSNILLDKHMRAKVSDFGLSKFAVDGTSHVSSIVRGTVGYLDPEYYISQQLTEKSDVYSFGVILLELMSGQEAISNESFGVNCRNIVQWAKMHIDNGDIRGIIDPALAEDDYSLQSMWKIAEKALLCVKPHGNMRPSMSEVQKDIQDAIRIEKEALAARGGISDEFSRSSAHSSSLNMGMLDLAGSQSYVSIDESVLQPTAR

SEQ ID NO: 33806 - protein, 441 aa, Arabidopsis thaliana
DAIGITPLYIGWGLDGSVWFASEMKALSDDCEQFMCFPPGHIYSSKQGGLRRWYNPPWFSEVVPSTPYDPLVVRNTFEKAVIKRLMTDVPFGVLLSGGLDSSLVASVALRHLEKSEAACQWGSKLHTFCIGLKGSPDLKAGREVADYLGTRHHELHFTVQDGIDAIEEVIYHVETYDVTTIRASTPMFLMSRKIKSLGVKMVLSGEGSDEIFGGYLYFHKAPNKKEFHEETCRKIKALHQYDCLRANKSTSAWGVEARVPFLDKEFINVAMSIDPEWKMIRPDLGRIEKWVLRNAFDDEKNPYLPKHILYRQKEQFSDGVGYSWIDGLKDHANKHVSETMLMNASFVFPDNTPLTKEAYYYRTIFEKFFPKSAARATVPGGPSVACSTAKAVEWDAAWSQNLDPSGRAALGVHVSAYGEDKTEDSRPEKLQKLAEKTPAIV

SEQ ID NO: 33807 - protein, 176 aa, Arthrospira platensis
MRSQKFSNSLDQAARLIYLNKTCFNGLYRENRQGQFNVPMGKYKNPKICPRELLITASKTLQSATLKVQSFEAIVNEANSAADFVYFDPPYHPLSPTSNFTSYSRHKFGVDKQEKLAEIFGILHKRGVKVMLSNSDTELIRDLYKDFNIHPIQAGRAINSNPQNRGKITELLITSY

SEQ ID NO: 33808 - protein, 591 aa, Chlamydomonas moewusii
MAAKFVEGTLDVTLKSASDLREDMSVKLDAYCVVSCASTAHRSNTVTDAGKTMNWEQTFHFDKVASTSVLKLESSMRRTPSDRSSCACKIPLTRACTSGSDEVCVPVLDKKGKPIGETHVSMTFKATSMADGPTKGNWILPTYANKDCWKDYEQGKVVGKGSFGTTYLVTKKDTQEQYAVKVISKRKLTTMEEVEDIQREVRIMHHLAGHPNVVQLKNVYEDKSYVYLVMDACMGGELFDAIVERGTYSEKDARALMRTIVSVVAHCHDMGVIHRDLKPENFLLLDKSANPVLKSIDFGLSSFYQEGQVFHDIVGSPFYVAPEVVRRSYGKEADIWSCGVILYILLCGYPPFHGDNETKIFEAIMNKSLDFQSDPWPKVSEPAKECIRRMLDRNPKTRASAQQTLEHEWMRENGVATEKRLEMEVLTSMKKFSAGNRLKKEAAKIIAANLPTDEICGLREMFIAIDVDHSGSITAEEFANALRMKGNSLPEDEVQRLVSNADVDGDGTCDYEEFLAATINQSKLEREDRLKIAFEHFDLDHDGSITHDELMQSLANLGINDAGIKEIIADVDRDGNGQIDYNEFCLMMRNL

SEQ ID NO: 33809 - protein, 250 aa, Saccharomyces cerevisiae
MTTDNAKAQLTSSSGGNIIVVSNRLPVTITKKQQYGTVRVTQCRPEAGHGVGRVEEDVHFQWFGWPGLEIPDDEKDQVRKDLLEKFNAVPIFLSDEIETYTTTGSVILFYGRYSITILVRSISTRMRGSDNAKAQHQTFTNEIAKTMNHNDLIWVHDYHLMLVPEMLRVKIHEKQLQNVKVGWFLHTPFPSSEIYRILPVRQEILKGVLSCDLVGFHTYDYARHFLSSVQRVLNVNTLPNGVEYRADSLT

SEQ ID NO: 33810 - protein, 171 aa, Saccharomyces cerevisiae
MAEASIEKTQILQKYLELDQRGRIIAEYVWIDGTGNLRSKGRTLKKRITSIDQLPEWNFDGSSTNQAPGHDSDIYLKPVAYYPDPFRRGDNIVVLAACYNNDGTPNKFNHRHEAAKLFAAHKDEEIWFGLEQEYTLFDMYDDVYGWPKGGYPAPQGPYYCGVGAGKVYARD

SEQ ID NO: 33811 - protein, 205 aa, Nicotiana tabacum
MEGTCNNRSHFQTIFLILVVFTSSSFTESVSAARPVAGDTNTEFIRTSCKSTTYPNLCFSSLSSRATAIGVSPQLLAHESLTVSLETAQSTSVTMVELAHGQGMTPREIGAMHDCVEELSDAVVELRKSLGEMKQLRGKDFDLKMSDIQTWVSAALTDEDTCTEGFAGKVMNGKVKTVVRGRILDVAHMTSNALALINSLAAFHG

SEQ ID NO: 33812 - protein, 532 aa, Hordeum brevisubulatum
MGQCCSRATSPDSVQGGANGYGYSHQPKQAQAPPSYNNAQPPPRAEVRYTPPAMNPPVVPPVVAPSKPMPDTILGKQYEDVRSVYSLGKELGRGQFGVTYLCTEISTGRQYACKSISKRKLVSKADKEDIRREIQIMQHLSGQPNIVEFCGAYEDKGSVHVVMELCAGGELFDRIIAKGHYSERAAATICRGVVNVVNVCHFMGVMHRDLKPENFLLATKDENAVLKATDFGLSVFIEEGKMYRDIVGSGLLCCSEVLRRNYGKEIDVWSAGVILYILLSGVPPFWAETEKGIFDAILQGEIDFESQPWPSISESAKDLVRKMLAQDPKKRISSAQVLRHPWLREGEASDKPIDSAVLSRMKQFRAMNKLKKMALKVIASNLNEEEIKGLKQMFMNMDTDNSGTFTYEELKAGLAKLGSKLSEAEVKQLMDAADVDGNGSIDYVEFITATMHRHKLERDEHLFKAFQYFDKDNSGFITRDELETALIEHEMGDADTIKDIISEVDTDNDGRINYEEFCAMMRGGIQQPIKLK

SEQ ID NO: 33813 - protein, 584 aa, Astragalus sinicus
MCGILAVLGCADASRAKRVRVLELSRRLKHRGPDWSGLHQHGDCYLAHQRLAIVDPASGDQPLFNEDKSVIVTVNGEIYNHEDLRKQLPNHTFRTGSDCDVIAHLYEEYGEDFVDMLDGIFSFVLLDTRDNSYIVARDAIGVTSLYIGWGLDGSVWISSEMKGLNDDCEHFECFPPGHLYSSKNGGFRRWYNPLWYSEAIPSAPYDPIVLRQAFEKAVIKRLMTDVPFGVLLSGGLDSSLVASITSRYLATTKAAEQWGSKLHSFCVGLEGSPDLKAGKEVADYLGTVHHEFTFTVQDGIDAIEDVIYHVETYDVTTIRASTPMFLMSRKIKSLGVKWVISGEGSDEIFGGYLYFHKAPNKEEFHRETCRKIKALYQYDCLRANKSTFAWGLEARVPFLDKEFINVAMNIDPANKMINLDEGRIEKYILRKAFDDEEHPYLPKHILFRQKEQFSDGVGYSWIDGLKAHAAKHVTDKMMRNAANIYPHNTPSTKEGYYYRMIFERFFPQNSARLTVPGGPTVACSTAKAVEWDAAWSKNLDPSGRAALGVHASAYENQNNSVNKSIEFEKIIPLEASSVGVAIQT

SEQ ID NO: 33814 - protein, 586 aa, Astragalus sinicus
MCGILAVLGCSDDSQAKRVRILELSRRLKHRGPDWSGLHQHGDNYLAHQRLAIVDPASGDQPLFNQEKSIIVTVNGEIYNHEELRKQLPNHKFRTDCDCDVIAHLYEEYGENFVDMLDGIFSFVVLDTRDNSFLVARDAIGVTSLYIGWGLDGSVWIASELKGLNDECEHFEVFPPGHLYSSKEREFRRWYNPKWFSETVPSSPYDPLVLRHAFEKAVIKRLMSDVPFGVLLSGGLDSSLVASVTARYLEDTKAAKQWGAKLHTFCVGLKGAPDLKAGREVADYLGTVHHEFEFTIQDGIDAIEDVIYHTETFDVTTIRASTPMFLMSRKIKSLGVKMVLSGEGSDEIFGGYLYFHKAPNKKEFHEETCRKIKALYKYDCLRANKSTYAWGLEARVPFLDKDFINVAMDIDPEEKMIKRDEGRIEKWVLRKAFDDENKPYLPRHILYRQKEQFSDGVGYGWIDGIKDHAAKHVTAKMMLNASHIFPDNTPTSKEGYYYRMIFERFFPQNSARLTVPGGASIACSTEKAIEWDASWSNNLDPSGRAALGVHVSAYENQVNSSVGKGVEPEKIIPKMKVSPLGVAILG

SEQ ID NO: 33815 - protein, 755 aa, Asparagus officinalis
MSVNHNPDPQKPVPVESDRCPIEEVALVVPETDDPNLPVLTFRAWFLGLTSCSVLIFLNTFFTYRTQPLTISAILTQIAVLPIGRFMASALPDKEVRVLGGWGFNLNPGPFSIKEHVIITIFANCGVSTGGGDAYSIGAITVMKAYYKQGLGFLCALIIVLTTQAVLSHYLLMGFKSSSSSSSSSHRKVTVGFIAELTVTSTFAAVRAPDFNVIGYGWAGVLRRFLVDPVEMWWPANLAQVSLFRALHEKDVNSKGPSRMKFFMIFFIGSFLYYAFPGYLFPILTFFSWVCWAWPHSITAQQIGSGYHGLGIGAFTLDWAGISAYHGSPLVAPWFSILNIAAGFIMFVYIIVPICYWKYNTFDARKFPMFSNQLFTSKGTKYNTTAVLTPQFELNEAAYNSYGKLYLSPLFALSIGSGFARFTATLTHVFLFHGSDIWRQSRAAANSIKEDIHAKLMKKYKQVPEWWFLILLVGSIFLSLIMSFIWKEQVQLPWWGLIFAFGLAFVVTLPIGVIQATTNQQPGYDIIAQFMIGYVLPGKPIANLLFKIYGRISTVHALSFLSDLKLGHYMKIPPRCMYTAQLVGTLVAGILNLAVAWWMLENIENICDDSLPDSSPWTCPKYRVTFDASVIWGLIGPSRLFGHGGLYRNLVWLFLIGAVLPVPIWILSKIYPEKKWIPLINIPVISYGLRHPKVSAPSLRHPRVSAPSLRHPRVSAPTLRHPRVSASSLRHPRVSAPSLRHPRVSPRQIWAFKYF

SEQ ID NO: 33816 - protein, 392 aa, Solanum tuberosum
MAKPGRGRAASPSGSSSRSRSRSRSYTPSNSRSSSSRSPSRSRSRSRSISSSSSASRSASSRSPSRLPPSQRKSPAGVSKRGRSPPPPPPPESKKASPPPRKVSPIPESRVIHVDQLSRNVNENHLKEIFGNFGEILHVQLAIDHVVNLPKGFAYVEFKTRIDAEKAQLHMDGAQIDGKVVHARFTLPERKKAASPPRAVATSSRRDAPRTDNAPVDVEKDGPKRQQDLSPRRKPASPPRRSPIGRRGSPRRGPDSPVRRRANSPFRRGSPPPQRRRPASPMRRRSPSPPLRRHRTPPRGSPRRIRGSPVRRRSPLPPRRRSPRRARSPPRRSPIGRRSSRSPIRRPIRSRSRSISPRRGRGPAARRGRVIILLFFSQSSQGTPQDFKESQS

SEQ ID NO: 33817 - protein, 386 aa, Solanum tuberosum
MADMNQHPTVFQKAANQLHLRSSLSQDVHARYGGVQPAIYQRHFACGNYSNAGLQRGQATQDLSLITSNASPVFVQAPQEKGLAAFATDFLMGGVSAAVSKTAAAPIERVKLLIQNQDEMLKAGRLSEPYKGIGECFGRTIKEEGFGSLWRGNTANVIRYFPTQALNFAFKDYFKRLFNFKKDRDGYWKWFAGNLASGGAAGASSLFFVYSLDYARTRLANDAKASKKGGERQFNGLVDVYRKTLKSDGIAGLYRGFNISCVGIIVYRGLYFGMYDSLKPVLLTGNLQDSFFASFGLGWLITNGAGLASYPIDTVRRRMMMTSGEAVKYKSSLDAFSQIVKNEGPKSLFKGAGANILRAVAGAGVLAGYDKLQVLVLGKKYGSGGA

SEQ ID NO: 33818 - protein, 442 aa, Solanum tuberosum
MSTSGQQQFRYTQTPSKVLHLRNLPWDCSDEELVELCKPFGKIVNTKCNVGANRNQAFVEFADLNQAINMVSYYASSSEPAQVRGKTVYIQYSNRNEIVNNKSPGDVPGNVLLVTIEGVEAGDVSIDVIHLVFSAFGFVQKIATFEKAAGFQALIQFSDVGTASAAREALDGRSIPKYLLPEHVNHCHLRISYSAHTDLNIKFQSHRSRDYTNPYLPVNPTAMEGVLQPVVGPDGKKKEPESNVLFASLENMQYAVTVDVLNTVFSAFGTVQKIAIFEKNGQTQALIQYPDVTIAAAAKDALEGHCIYDGGYCKLHLSYSRHTDLNVQAYSDKSRDYTVPESSLLAMQQASAVHATPPVWHNPQSGPVQSSAGYATTGTVPGQAPPAWNPNLQGGGSTFPSAPTGYPGHSYAPPAPAYATAVHPPGSSQQTNHISTGSRLLV

SEQ ID NO: 33819 - protein, 644 aa, Chlorella pyrenoidosa
MSSPAIGIDLGTTYSCVGLWQHDRVEIIANEQGNRTTPSYVAFTDTERLIGDAAKNQVAMNPINTVFDAKRLIGRKFSDPTIQHDISHWPFKVVAGPGDKPMIQVSYKGEDKTFAPEEISSMVLVKMKEIAQAYVGADKEVKKAVVTVPAYFNDSQRQATKDAGVIAGLEVMRIINEPTAAAIAYGLDKKGTTSGEQNVLIFDLGGGTFDVSLLTIEEGIFEVKATAGDTHLGGEDFDNRLVNFFVQEFKRKYKKDISSNPRALRRLRTSCERAKRTLSSSTQASIEIDSLYEGIDFYSSITRARFEELNMDLFRKCMEPVEKVLRDAKMDKGQVNEVVLVGGSTRIPKVQQLLQDFFNGKELCKSINPDEAVAYGAAVQAAILNGETHEKVQDLLLLDVIPLSLGLETAGGVMTVLISRNTTIPTKKEQVFSTYSDNQPGVLIQVYEGERSRTKDNNLLGKFELTGIPPAPRGVPQINVTFDVDANGILNVSAEDKTTGNKNKITITNDKGRLSKEEIERMVQEAEKYKAEDETHRARVEARNGLENYAYSMRNTIKDANLADKLSAEEKEKIEKAVDKVVEWLDHNQLAEEEEITHQRTELEGVCNPIITKLYQGGAVPPDAAGAAPASAAGGQGPTIEEVD

SEQ ID NO: 33820 - protein, 622 aa, Populus tremula x Populus alba
LLQELGSSVREIIFPRGKKHTSSTARQKQQSRAIEFLQGVFPILRWGRDYKASKFKNDLMAGLTLASLSIPQSIGYANLAKLDPQYGLYTSVIPPLIYAIMGSSREIAIGPVAVVSMLLSSMIAEIQDPLADPVAYRNFVFTVTLFAGTFQALFGLFRLGFLVDFLSHASIVGFMGGAAIVIGLQQLKGLLGISHFTTKTDVVSVLHSAFTSIDHPWSPLNFVLGCSFLIFLLFARFIGRRNKKLFWFPAIAPLVSVILSTLIVFLTKADKHGVKIVRHIKGGLNRSSVHDLQLSGPQVGQAAKIGLISAIVALTEAIAVGRSFASIKGYYIDGNKEMLAIGFMNIAGSLSSCYVATGSFSRTAVNFSAGCQTLVSNIVMSITVLVSLEVFTRLLYYTPTAILASIILSALPGLIDIRGAYYIWKVDKLDFIACIGAFFGVLFASVEIGLLAAVTISFARILLNAIRPGIEALGRLPRADVYCDMNQYPMAVKTPGILAVRINSALPCFANANFIRERILRWVTEEVNEIKESTEGGIKAVILDVSNVMNIDTAGILALEELHKELLVHEAQLAIANPKWQVIHKLRLAKFIDRIGRGWIFLTVSEAVDACVSSKLTALANC

SEQ ID NO: 33821 - protein, 622 aa, Populus tremula x Populus alba
LLQELGSSVREIIFPRGKKHTSSTARQKQQSRAIEFLQGVFPILRWGRDYKASKFKNDLMAGLTLASLSIPQSIGYANLAKLDPQYGLYTSVIPPLIYAIMGSSREIAIGPVAVVSMLLSSMIAEIQDPLADPVAYRNFVFTVTLFAGTFQALFGLFRLGFLVDFLSHASIVGFMGGAAIVIGLQQLKGLLGISHFTTKTDVVSVLHSAFTSIDHPWSPLNFVLGCSFLIFLLFARFIGRRNKKLFWFPAIAPLVSVILSTLIVFLTKADKHGVKIVKHIKGGLNRSSVHDLQLSGPQVGQAAKIGLISAIVALTEAIAVGRSFASIKGYHIDGNKEMLAIGFMNIAGSLSSCYVATGSFSRTAVNFSAGCQTLVSNIVMSITVLVSLEVFTRLLYYTPTAILASIILSALPGLIDIRGAYYIWKVDKLDFIACIGAFFGVLFASVEIGLLAAVTISFARILLNAIRPGIEALGRLPRADVYCDMNQYPMAVKTPGILAVRVNSALLCFANANFIRERILRWVTEEVNEIKEGTEGGIKAVILDMPNVMNIDTAGILALEELHKELLVHEAQLAIANPKWQVIHKLRLAKFIDRIGREWIFLTVSEAVDACVSSKLTALANC

SEQ ID NO: 33822 - protein, 232 aa, Taihangia rupestris
MGRGKIEIKRIENTTNRQVTFCKRRNGLLKKAYELSVLCDAEVALIVFSNRGRLYEYSNNSVRETIERYKKACADTSNNGSVSEATTQYYQQEAAKLRNQITALQNNNRNYMAEGLGNMSVKELKNVESKLEKAIGKIRSKKNELLFSEIEYMQKRELDLHNNNQILRAKIAENERHQQSINAIAGGGGAHGSYEIMQSAQSFHEARNYFQVNALQPNHQYSRHDQISLQLV

SEQ ID NO: 33823 - protein, 228 aa, Taihangia rupestris
MGRKIEIKRIENTTNWQVTFCKRRNGLLKKAYELSVLCDAEVALIVFSTRGRLYEYANNSVRQTIQRYKKTCDSSNSGSVTEANVQFYQQEASKLRRQIREIQNSNRHILGEALSTLNVKELKNLEGRLEKGIGRIRSKKNEMLFAEIEYMQKKEIELQNQNNFLRAKIAETDKARQQQTNMMPGTSSAYDQSMPPPQTYDRSFLPVILESNHNYNRQGQNQTPLQLV

SEQ ID NO: 33824 - protein, 612 aa, Synechococcus elongatus PCC 7942
MQLQTVTIQQRATGAYALIDSLCQHGVKHIFGYPGGAILPIYDELHRAEAAGRVQHILVRHEQGAVHAADAYSRATGEVGVCFATSGPGATNLVTGIATAQMDSIPMVVVTGQVPRTAIGTDAFQETDIYGITLPIVKHSYVVRDPRDMARIVAEAFHIAQSGRPGPVLIDVPKDVGTEEFDYVPVAPGDIRLPGYRPTTRGNPRQIAQAIALVKVARRPLLYVGGGAITAGAHAELRAFAERFQLPVTTTLMGKGAFDERHPLALGMLGMHGTAYANFAVSECDLLIAVGARFDDRVTGKLDEFASKAQVIHVDIDPAEVGKNRVPEVPIVGDVRQVLNELLARAEEQISADDATRTQPWLDRIAYWKREYPLQIPYYADVLSPQQVIHSLGEAAPDAYFTTDVGQHQMWAAQFIKNGPRRWISSAGLGTMGFGMPAAMGAQMALPDDTVICVAGDASILMNIQELGTLAQYNIPIKVVVVNNGWQGMVRQWQEAFYDERYSNSNMERGMPDFVKLAEAFGIKGMRVSHPDELQAAIAEMLAFDGPVFLDAIVKRDENCYPMVPSGHSNAQMLGLPKDPTLDLDLAIATCSSCGAKTLPSHKFCPDCGAKL

SEQ ID NO: 33825 - protein, 497 aa, Synechococcus elongatus PCC 7942
MPRGVAPAFAGRKPKGWAWASTAVPDFQGGFKRLINRFQGSKLWLACVPLAATIAVFWGVAANAQGSADPVPSAQFLVNNLWLMVATVLVIFMNAGFAMVETGLCRQKNAVNVLAKNLIVFTLAATAYWFIGYSLMYGSPVVDGFLYFGKGGPLGFFFDPTVSAETIKNDGLISSLDFLFQAAFAGTAATIVSGSVAERIKFVDFIIFSLILTAVIYPIAGSWQWNVGSGWLNKAGFIDFAGSTVVHSVGGWAALIGAITLGPRMGKFQDGRPGALPGHNLAIATLGALILWIGWYGFNGGSVLAFNTAVPYVAVTTTLGGAAGGISATITSWSTSGKPDLSMVINGILAGLVGVTAGCDGFGMGGSFIVGLIAGVLVVFSVYTFENLKIDDPVGACSVHLVCGIWGTLAVGLFNLEKGLFYGGGFGQLGSQILGIISYGVWTVVASVIIWNILKALLGLRVSPEEELQGLDIGEHGMEAYSGFAKDASNALSSISE

SEQ ID NO: 33826 - protein, 331 aa, Synechococcus elongatus PCC 7942
MDASLLLRQITTGYWGSQALYVAAKLGIADQLVNGPRSCEDLAIVVGAKPEVLYRLLRALASLGIFTEVSDRQFALTPAAELLRSGTAGSLRNLVMMFGEEHYVAWGELLHSIQTGENAFEHHYGAPVFAYYAQHPASADIFNGAMSDMSRPDTAAVLSSYDFQGIRCLVDVGGGHGQLLSQILAAYPDLTGILYDQPAVVAGADSVLADVSDRCEVVGGDFFASVPAGGDAYLLKHIIHDWDDADSLKILANCRQVMQPGDRLLLLEQVVRAGNEPNLAKWLDLNMLVMTQGGRERTQAEFATLLADAGFQLSQIHGTASEVCIIEGRAI

SEQ ID NO: 33827 - protein, 489 aa, Synechococcus elongatus PCC 7942
MAKPLFDQLLASAQQARAPFHTPGHKLGRAIATHLQQAWGSAIFQSDLPELPELDNLYAASGVLAESQAQAAEVFGADRSWFLVNGSTGGLLAAILTICSPGDRLLLPRNAHRSLLSGCILSGAMPVWITPPEAADFDLVGVPTPEQVATALAQDPQIKAVVLVSPTYEGVCADVAAIAAIAHNHNLPLIIDAAHGAHLGFHPDLPRSPLHEGADLVVQSTHKLLGALTQAAMLHCKGDRIDPERLSQSLALVQSSSPSYLLLASLEAATEQMRTSAQDLLQVTIDLARQAHQRLAELPGLQLPALKIGNREGFPQWDRTRLVINFQSCGWSGFCADEYLHEQWQVTAELPSLSNLVFHLSLGNRIEDIDRLVTACDRLLSQEHQEELPPRLPVWLEPETILSPRQAWFSRHQTVSAEQAIGAIAAECVCPYPPGIPVLLPGERISKSAVDYLRQVQTTGGILSGCADPELTTLRIVQDSDTIHASCLS

SEQ ID NO: 33828 - protein, 1536 aa, Synechococcus elongatus PCC 7942
MNQHSVHSSSHPTYQGPRWLVEERDACGVGFVADQQGRASHDLVEKSLRALGCMEHRGGCSADSDSGDGAGLMTAIPTDLLKTWLGAAAPADLSSVGLGMVFLPQHGAEATIARQLIEQIVAEENLQFLGWRLVPTRPEVLGQQARANLPRIEQCFIASEQLRDDEFERQLYLVRKRVETAVKKALGTASEDFYICSLSSRTVVYKGMVRSEVLGQFYTDLTNPAYTSNFGVYHRRFSTNTMPKWPLAQPMRFLGHNGEINTLLGNINWMMARQADLQHPAWGDRIGDLLPVVDLNRSDSANLDNALELLVNSGRTPQEALMVMVPEAYQNQPALADHPEIVDFYEFYSGLQEPWDGPALLVFSDGKKVGACLDRNGLRPARYSITADGYIVFASEAGVVDLPVETIIEKGRLGPGQMIEVDLETKEVIKNWDIKKRIASQQPYGQWLQERQVLENKDFGNEQQLGDFDLLRLQTGFGYTAEDVDMVIEAMASDGKEPTFCMGDDIPLAVLSSKARLLYDYFKQRFAQVTNPAIDPLRESLVMSLSMTLGARDNLLQVGPESARLLKLDSPVLNEAELEQVKQSTLKAAELSTLYAIEQGPDGLQAAIAALCQQAEQAVQAGHQILILSDRTGAGLAPQISYIPPLLAVGAVHHHLIRQGLRMKASLVVDTAQCWSTHHFACLIGYGASAVCPWLALETVRHWWHAPKTQSLMERGKIAQVSLAGAQQNFRKAVEAGLLKILSKMGISLLPSYHGAQIFEAIGLSMEVVDLAFRGTTSRLGGLTLADIAHEVMSFHTRAFPELNQKKLENFGFVQYRPGGEYHMNSPEMSKALHKAVAAGKNYDHFEVYRKYLEERPVTALRDLLQFVSDRPAISLDEVESVEAIVQRFCTGGMSLGALSREAHETLAIAMNRLGGKSNSGEGGEDPVRYKVLGDVDAEGNSPTLPHLHGLRNGDTASSAIKQIASGRFGVTPEYLMSADQLEIKVSQGAKPGEGGQLPGKKVSPYIAFLRNSKAGVSLISPPPHHDIYSIEDLAQLIFDLHQINPKAQVSVKLVAEIGIGTVAAGVAKANADIIQVSGHDGGTGASPLSSIKHAGGPWELGLTEVHRVLMENQLRQRVLLRVDGGLKTGWDVVMAALMGAEEFGFGSIAMIAEGCIMARVCHTNNCPVGVATQQEQLRKRFTGIPEHVVNFFILIAEEVRSILAKLGYRSLTELTGRTDLLAPRPDLKLTKTAALNLDCLIKLPDTRSDRSWLVHDEVHDNGPVLDDQLLANPALTAAIANQDSVAIEQAIVNTDRSVGARLAGAIAQRYGNYGFEGQISLNFNGSAGQSFGAFNISGVSLNLVGEANDYVGKGMNGGEIIVRPEAGVRFDPSQSSIVGNTCLYGATGGSLFANGRAGERFGVRNSKAQAVVEGTGDHCCEYMTGGTIVVLGPCGRNVGAGMTGGLAYFLDEDGQFPAKVNPEIVKLQRVSTSAGEQQLKQLITAHAEKTGSPKACHILEQWEQYLPQFWQVVPPSEADTPEVNPEVADKQLTAV

SEQ ID NO: 33829 - protein, 616 aa, Synechococcus elongatus PCC 7942
MAIALTDKVRNGRAADHIVMALIVQKYGGTSVGSVERITAVAQRIAQTVAAGNQVVVVVSAMGHSTDELLKLANAISANPSRRELDMLLATGEQVSIALLSMALHEQGCDAISMTGAQVGIITEAHHSRARILEIDPQRLQSQLDAGRVVVVAGFQGIASSDRTALTEITTLGRGGSDTSAVALAAALNADRCEIYTDVPGILTTDPRLVPEAHLLEEITCDEMLELASLGASVLHPRAVEIARNYGVRLVVRSSWTQEPGTGVVAPPRRSDRSLQGLEIGRPVDGLALDTDQAKVALLHVPDRPGIAASLFGEMAQRGVNVDLIIQSIHEGNSNDISFTVSQADLEKAEAGTTQLLADLGGEQQSEAAVAKVSISGVGIVGRPGIAAQMFSALAQGGINIQMISTSEVKVSCVIAAADQQRAIAALQESFELEEAIAATATDACTTDLPAVRGVALDRDQARLAILNVPDLPGMAATIFQILADRQISVDMIIQSQRGRIHNGQPCRDIACTLPPADAELAAAALQAFADQHGCSLEIQTEIAKVSIVGSGMVQQPGVAAQMFAALANHGINIHMIATSEIKVSCIVDASQAVEALQTVHAAFGLASDRRIEVPA

SEQ ID NO: 33830 - protein, 244 aa, Synechococcus elongatus PCC 7942
MENRKEKILVVDDEASIRRILETRLAMIGYEVVTAADGEEALITFRNATPDLVVLDVMMPKLDGYGVCQELRKESDVPIIMLTALGDVADRITGLELGADDYVVKPFSPKELEARIRSVLRRVEKSGANGIPSSGVIQINSIRIDTNKRQVYKGDERIRLTGMEFSLLELLVSRSGEPFSRAEILQEVWGYTPERHVDTRVVDVHISRLRAKLEDDPGNPELILTARGTGYLFQRIVEPGEEGR

SEQ ID NO: 33831 - protein, 450 aa, Synechococcus elongatus PCC 7942
MNEFQPVNRRQFLFTLGATAASAILLKGCGNPPSSSGGGTSSTTQPTAAGASDLEVKTIKLGYIPIFEAAPLIIGREKGFFAKYGLDVEVSKQASWAAARDNVILGSAGGGIDGGQWQMPMPALLTEGAISNGQKVPMYVLACLSTQGNGIAVSNQLKAQNLGLKLAPNRDFILNYPQTSGRKFKASYTFPNANQDFWIRYWFAAGGIDPDKDIELLTVPSAETLQNMRNGTIDCFSTGDPWPSRIAKDDIGYQAALTGQMWPYHPEEFLALRADWVDKHPKATLALLMGLMEAQQWCDQKANRAEMAKILSGRNFFNVPVSILQPILEGQIKVGADGKDLNNFDAGPLFWKSPRGSVSYPYKGLTLWFLVESIRWGFNKQVLPDIAAAQKLNDRVTREDLWQEAAKKLGVPAADIPTGSTRGTETFFDGITYNPDSPQAYLQSLKIKRA

SEQ ID NO: 33832 - protein, 398 aa, Synechococcus elongatus PCC 7942
MEVSTGYLPQAVFAPADQGHPAPRVFISPQRYIQGRGVLRSVGRYLSLLQAKRAGLLMSQRSSRNEGDLLLAGLRSAGVDAVVSTFQGECTTDEITAHTTAFSKERIDCVIAAGGGKCIDTGKAIAFRLGIPVVVVPTLASNDAPCSALSVLYSPEGISQGVEFYPNSPAIVVVDTDIIAAAPERYLVAGMGDAMATWYEASVCLRNPAAVTTVGARPTLAACAIGEVCAHTLFQEGCAAAAAVASKTVNDALESVVEANTLLSGLGFESGGLAGAHAVAQSYTAIPHVRANYLHGEMVAMGTLAQLMMESRPKEATRVAEFFAAVGLPIHLGQLSLSSSDTQALEIVSEASLGFPFVGNMPMKITPEFVKSAILDAHHLGLSISEQIGDSAYRHLQG

SEQ ID NO: 33833 - protein, 363 aa, Synechococcus elongatus PCC 7942
MDIGVPRELKDQEFRVGLSPASVRALALQGHQIWIEQGAGVGSGFQDEDYLLAGAKVVATATEAWQHPLVVKVKEPLPAEYDYLRPDLLLFTYLHLAADRPLTERLLASGTTAIAYETVTARNGSLPLLMPMSRIAGRLSVQFGARFLERQQGGRGVLLGGVPGVSPGTVMILGGGIVGTEAAKMAIGLGAKVQIVDINVERLAELEALFGSRVELLYSSPAEIEARVPQADLLIGAVLVPGRRAPILVNRDLIAQMRPGSVVVDVAVDQGGCVETLRPTSHSQPIYLEAGVVHYGVPNMPGAVPWTATQALNNSTLPYVQAIAAQGLASCDRDPGLAEGLNVAQGVLTHPAIAAAFPDLPCR

SEQ ID NO: 33834 - protein, 263 aa, Synechococcus elongatus PCC 7942
MPDPAIAPLKPPLKWAGGKRWLAPKLQELVQGITYDRLVEPFCGGLAVTLSLQPKRALLNDINPHLINFYQQVKAGLEITIPLENDSDLYYQYRQAFNQTELPSALSAQYFYYLNRTGFNGLCRFNSKGEFNVPFGRYKTIHYRYDFSDYSQLFQDYQFYLGDFDQLVVGKQDLIYADPPYDVEFRQYAKEGFTWDDQVRLAQWLASATGPVITSNQATPRVLELYQALGFQVMTCLAPRRIACNGDRSPALEMIAMKGMSQA

SEQ ID NO: 33835 - protein, 288 aa, Synechococcus elongatus PCC 7942
MRCGLIGTGLLGTAIAERLLTVGQLLTVWNRTAERSQPLVALGATIAPTPAALLADCEVCLLLLSDAEAIAATLLTEESRSQLVGKTIIQMGTISPAESRAIADQIAAAGGQYLEAPVLGSLPEARNGTLIVMVGAEPAVFEQWRSLLCHLSPEPEWIGPIGTAATLKLALNQLIGSLTSAFGGSLALLQRSGLAVEPFMAILRQSALYAPTFDKKLSRLLSHQYDNPNFPTTHLAKDLRLFRETAADLGITTDAVEGVESIVQKAIAQGWGDQDYSALYEAINPDSN

SEQ ID NO: 33836 - protein, 359 aa, Synechococcus elongatus PCC 7942
MIGYIILLVCTIALFALFCVGLNLHWGYTGLLNFGHVAFLLIGAYSVSLLAQQGWPLWLAAIAGVTLAALLGLVMGVASLRLSQDYLGIVTVGLAEVLRIFVQNETGLTQGSFGVQAYPIILQGWEPPIWQTHLLVVGLLAIAAWGYWQLWQWWRSSASRGKHWLAIVALGSSLIVLPPAALGLADYERYPRSGQMLLLLGALWLTVAAVDRLVRSPWGRVLKAIREDETVAIALGKNVLSYKLQSLALGGAIAGLAGVFYAWQLTAIYPDNFRPQLTFDVWTMLVLGGTAHRFGPVLGAAVFWLYDSLTRFLLPAILPLDGSQIGALRIALVGLLLMALMIWRPQGILGRREELSLGR

SEQ ID NO: 33837 - protein, 393 aa, Synechococcus elongatus PCC 7942
MQLLTFNAGSSSYKLSGFEITTAAEQTDPVWQVQIDWKTDRAATLTQPGQPVQMLDSSDRRAWLEIALETLPDRSAIAAVVHRVVHGGQQQAPAVVTPELKATIAAAANLAPLHNPLNLAGIEQMEQLFGLAMPQIAVFDTAFHQQMPVAAAIYGGPYHWWEQGYRRYGFHGISHQYLAERCAQLSDRSLSNLQLVTAHLGNGCSLAAIRNGHSVDTSMGFSPLEGLVMGSRSGTVDPGLLLHLLQQPDCSPSQLSTVLNQQSGLLGLSGRSNDVRALAIAADAGDQRSQLALAAFTHSLRRHLGAMLASLTRLDALVFAGGIGENYRSLWPAVCEHFAGMPIRLDPEAMAVAGDRRISTPDSAITVWVIHSREDWQMVQLALPLLRSPQSFN

SEQ ID NO: 33838 - protein, 529 aa, Synechococcus elongatus PCC 7942
MVPPTLLEEQSKLLHSAACRCQDCYRLTTDHDRFLEDMPQDPEILMADFQKMGLFKPESIAIADRLTTSELRQALFFKNASQGDPEQEAMLRALAAEAGGLDQAFAAAFGPQAGRFFSNIQASGGVSRRVFLRNLVVGAALVTLTNCAQQAQQPDSPTTTGSGNLEKTDLKVGFIPITCATPIIMSDPLGFYQKYGLKVQVVKMPSWGAVRDSAIAGELDAYHMLAPMPIAMTLGLGSAPFSVKLASIENINGQAITVAKRHLGKVKEAKDFKGFVIGVPFPFSMHNLLLRYYLAAGGLNPDTDVQIRPVPPPDSIAQLVAGDIDAMLMPDPFNQRAVYEDAGFIHLLTKEIWNGHPCCAFAAGEPWIQENPNTFRALNKAIIEATGYASKAENRAEIAKAISSRQYLNQPPEVVEAVLTGKFPNGQGQELDVPDRIDFNPYPWQSFANWIQSQLVRWDLGKAAGVIQPDQYDKNGQAIYLTTEAQTLEKEVGLQPPTEIYREEKLAYDTFNPQDPVAYLASQKQKYGR

SEQ ID NO: 33839 - protein, 591 aa, Synechococcus elongatus PCC 7942
MPHPLVRLYRYSAPHQRQVLSAIACSILNKIFDLAPPVLIGMAVDVVVQRQDSWLAKWGVVPVEQQLGLLVLFSFVIWSLESLFEYLYAWQWRTLAQTLQHELRLDAYGHLQELELSFFEERSTGQLLSVLNDDINQLERFLDHGANEILQVTTTVLAVGGAMAYLSPTVAGLAILPIPVILWGSLRFQRRLAPRYARVREQAGLISARLANNLGGIATIKSFTAEAFEKGRVAEDSDAYRQANRRAIALSSAFVPLIRFAILFAFIAILYVGGMETINGRLDVGTYSFLVFITQRLLWPLTSLGRVLDDYQRAMASTQRVMDLLAIPVQIPSGRQSLPIGQVQGAVQFEGITFAYRDREPSVIDLNLNIPAGQTIAIVGATGSGKSTLVKLLLRFYEPQTGRILLDGIDLRDLKLKDLRQAIGFVSQDVFLFHGSVAENIAYGSFDATQTEIEQAAKLAEAHEFIMDLPQGYDTVVGERGQKLSGGQRQRLAIARAILKDPPILILDEATSAVDNETEAAIQRSLEQITRDRTTLAIAHRLSTIRHADCIYVMDQGRLVEAGHHDELLALDGLYANLWKVQTGERLSDRV

SEQ ID NO: 33840 - protein, 331 aa, Synechococcus elongatus PCC 7942
MIRSATLPFASALPSLPDNHRLRLFSGSSNSALSQEVSRYLGIDLGPMIRKRFADGELYVQIQESIRGCDVYLMQPTCWPVNDHLMELLIMIDACRRASARQITAVLPYYGYARADRKTAGRESITAKLVANLITQAGANRVLAMDLHSAQIQGYFDIPFDHVYGSPVLIDYLRSKNLADLVVVSPDVGGVARARAFAKKLDDAPLAIIDKRRQAHNVAEVLNVIGDVQGKTAVLVDDMIDTAGTICEGARLLRKQGASQVYACATHAVFSPPAIERLSASGLFEEVIVTNTIPIPEENRFPQLTILSVANLLGETIWRIHEESSVSSMFR

SEQ ID NO: 33841 - protein, 208 aa, Synechococcus elongatus PCC 7942
MTPVWTRPTLASGQLRQVLEQIYRDRPMLHFTAGQTVPLPQDSIWVVCRGIALITTSYESGDEALLGLAGPSMPFGSALSWVMPYEVQALTDLDLIRLKLVEIEQTPLLAQDLFLMLAQRHRQTEMLLSLIGQRRVEDRLRNFLQLLGREFGQPEDQLLRLNCRLTHQHLANALGTTRVTVTRLIGQFRREGWLDFDDQRHLVLKGLL

SEQ ID NO: 33842 - protein, 634 aa, Synechococcus elongatus PCC 7942
MAKVVGIDLGTTNSCVAVMEGGKPTVIANAEGFRTTPSVVAFAKNQDRLVGQIAKRQAVMNPENTFYSVKRFIGRRPDEVTNELTEVAYKVDTSGNAVKLDSSNAGKQFAPEEISAQVLRKLAEDASKYLGETVTQAVITVPAYFNDSQRQATKDAGKIAGLEVLRIINEPTAAALAYGLDKKSNERILVFDLGGGTFDVSVLEVGDGVFEVLATSGDTHLGGDDFDKKIVDFLAGEFQKNEGIDLRKDKQALQRLTEAAEKAKIELSSATQTEINLPFITATQDGPKHLDLTLTRAKFEELASDLIDRCRIPVEQAIKDAKLALSEIDEIVLVGGSTRIPAVQAIVKQMTGKEPNQSVNPDEVVAIGAAIQGGVLAGEVKDILLLDVTPLSLGVETLGGVMTKLIPRNTTIPTKKSETFSTAADGQTNVEIHVLQGEREMASDNKSLGTFRLDGIPPAPRGVPQIEVIFDIDANGILNVTAKDKGSGKEQSISITGASTLSDNEVDRMVKDAEANAAADKERRERIDLKNQADTLVYQSEKQLSELGDKISADEKSKVEGFIQELKDALAAEDYDKIKSIIEQLQQALYAAGSSVYQQASAEASANAQAGPSSSSSSSSGDDDVIDAEFSESK

SEQ ID NO: 33843 - protein, 1030 aa, Pichia angusta
MTILVASLFLPYTVHFEVQVKDKCVNNDTEFDDIAEPIRQPKTSASSKDKQLKDATNTTISLIKALAKNSSASNLSQTDLIDNRIQVISEDDDGETSVSTSNTDGANQNVSVQEFFFNNPKQPTLDEISQLKEASKSSPSVNVSTSTFIQPKSRVSTTKITVSSSVSEKQATKGPELLHSSLKVNRPGLSSRRSSSKVAKQALEKPLEREKDEYPPEHENAFLPDEDKVTPFGGFSKPDYHDLFIKDNVFATAPWRVVEFDKANGSLKNAIRVAAASDPETKFRWVGVLPIPSDVVPQTTKNNIAKELSEKYDSSVAFVDDVTFHGHYTSFSKEILWPIFHYQIPDNPKSNAFENHSWKHYEKLNRAVADQIVSQYREGDIVWVHDYHLMLVPKMIREKIPNAKIGFFLHVSFPSSEVFRCLAQRNNILEGLLGADCIAFQTEEYVRHFYQTCNRLLLADFDEYGIRYKDRVISVRGNPIGVDAELLNKRLQNNLCLNWRTLVRERWADKKLIVSRDKIDRIRGIKEKLLAYERFLNDNPERVSDTILILIYTKAKMEKDDDFETSIFNIAERINAKSSNISTDQPVIFLHQDIEFEQYLALLAEADLFIISTLREGMNLTSQEFVVAAQETHSPLIMSEFVGSAQVMTEGPLLTNPYDVKQVAENIKLGLEMSPEEKLQRWKKMYATILKHDSQSWVKNCIHDIETAFASNRKDCSSELTQLSQALFKEKYHSLPHPESKRLFIINLGNLVSKVNIPGSLINPVQHEYIMSTLFNLANDPNNIVYVFSFLKRSDLLRRYRRIGELGLIAENGGYIKLPNSNDWFTVIDENELTWMPTVIEVMNALCERLPGSFVEVEECTVRFHTENCSDVDRDHKLKLVGELITHVNELYSKEFNLHANLINGIVIVQEANLIVRALSFVMNQNSFDGHLRKIPSSSLTSPVSQPSDLTMSFKNQPQLKHNLGFVMAAGGNTPVDEEVFNYFNSLEFDIENKFTIRVGQDNSNSKAEEKLSGVNELFRILSTVIASDK

SEQ ID NO: 33844 - protein, 310 aa, Brassica rapa subsp. pekinensis
MMKRLSSSDSVGGLISLCPTTSTDQPSPRRYGREFQSMLEGYEEEEEEAVTEERGQTGLAEKKRRLSINQVKALEKNFELENKLEPERKVKLALELGLQPRQVAVWFQNRRARWKTKQLEKDYGVLKTQYDSLRHNFDSLRRDNESLLQEIGKLKAKLNGEEEVEKMMKMENNAVTMECDVSVKEEEVSLPEELTDPPSSPPQALEHSDSFNYRSFTDLRDLLSLKAAASSVAAAGSSDSSDSRAVLNEESSSNVTAGPVTVPQGGFLQFVKMEQTEDHDDFLSGEEACGFFSEEQPPSLHWYSTVDQWN

SEQ ID NO: 33845 - protein, 324 aa, Wolbachia pipientis
AAGEPDFDTPDHIKKAAIQAISEGKTKYTAVDGTRELKEAIINKLRKDNNLEYTLNQICVGTGAKQVLFNLFMATINSGDEVIIPAPYWVSYVDMVSLFGGLPVVVECKQNFKLTVELLKSRITKKTKWLILNSPNNPAGAVYTCDELKDIAQILLEYPHMNVVTDDIYEHIIYDEKFFTIAQVEPKLYDRVFVVNGVSKAYAMTGWRIGYIAGRSDVVKAISTLQSQSTSNPNSIAQAAAAAALNGDHSFLKERTRIFKSRRDFMVKELNSAPGLSASVPQGAFYLFVSCEGLLSKSTKSGKIINNDLDFTEYLLGDHLVAVV

SEQ ID NO: 33846 - protein, 324 aa, Wolbachia pipientis
AAGEPDFDTPDHIKKAAIQAISEGKTKYTAVDGTRELKEAIINKLRKDNNLEYTLNQICVGTGAKQVLFNLFMATINSGDEVIIPAPYWVSYVDMVSLFGGLPVVVECKQNFKLTAELLKSRITKKTKWLILNSPNNPAGAVYTCDELKDIAQILLEYPHMNVVTDDIYEHIIYDEKFFTIAQVEPKLYDRVFVVNGVSKAYAMTGWRIGYIAGRSDVVKAISTLQSQSTSNPNSIAQAAAAAALNGDHSFLKERTRIFKSRRDFMVKELNSAPGLSASVPQGAFYLFVSCEGLLSKSTKSGKIINNDLDFTEYLLGDHLVAVV

SEQ ID NO: 33847 - protein, 324 aa, Wolbachia pipientis
AAGEPDFDTPDHIKKAAIQAISEGKTKYTAVDGTRELKEAIINKLRKDNNLEYTLNQICVGTGAKQVLFNLFMATINSGDEVIIPAPYWVSYVDMVSLFGGLPVVVECKQNFKLTAELLKSRITKKTKWLILNSPNNPAGAVYTCDELKDIAQILLEYPHMNVVTDDIYEHIIYDEKFFTIAQVEPKLYDRVFVVNGVSKAYAMTGWRIGYIAGRSDVVKAISTLQSQSTSNPNSIAQAAAAAALNGDHSFLKERTRIFKSRRDFMVKELNSAPGLSASVPQGAFYLFVSCEGLLSKSTKSGEIINNDLDFTEYLLGDHLVAVV

SEQ ID NO: 33848 - protein, 324 aa, Wolbachia pipientis
AAGEPDFDTPDHIKKAAIQAISEGKTKYTAVDGTRELKEAIINKLRKDNNLEYTLNQICVGTGAKQVLFNLFMATINSGDEVIIPAPYWVSYVDMVSLFGGLPVVVECKQNFKLTAELLKSRITKKTKWLILNSPNNPAGAVYTCDELKDIAQILLEYPHMNVVTVEIYEHIIYDEKFFTIAQVEPKLYDRVFVVNGVSKAYAMTGWRIGYIAGRSDVVKAISTLQSQSTSNPNSIAQAAAAAALNGDHSFLKERTRIFKSRRDFMVKELNSAPGLSASVPQGAFYLFVSCEGLLSKSTKSGKIINNDLDFTEYLLGDHLVAVV

SEQ ID NO: 33849 - protein, 324 aa, Wolbachia pipientis
AAGEPDFDTPDHIKKAAIQAISEGKTKYTAVDGTRELKEAIINKLRKDNNLEYTLNQICVGTGAKQVLFNLFMATINSGDEVIIPAPYWVSYVDMVSLFGGLPVVVECKQNFKLTAELLKSRITKKTKWLILNSPNNPAGAVYTCDELKDIAQILLEYPHMNVVTDDIYEHIIYDEKFFTIAQVEPKLYDRVFVVNGVSKAYAMTGWRIGYIAGRSDVVKAISTLQSQSTSNPNSIAQAAAAAALNGDHSFLKERTRIFKSRRDFMVKELNSVPGLSASVPQGAFYLFVSCEGLLSKSTKSGKIINNDLDFTEYLLGDHLVAVV

SEQ ID NO: 33850 - protein, 324 aa, Wolbachia pipientis
AAGEPDFDTPDHIKKAAIQSINEGKTKYTAVDGTHELKEAIINKLKRDNNLEYKLNQICVGAGAKQVLFNLFMATIDPGDEAIIPAPYWVSYIDMVSLFGGLPVVVECKQNFKLTPNLLESKITKKTKWLILNSPNNPAGIVYTYDELKNIAQILLKYPHVNIVTDDIYEHIIYDERFFTIAQVEPKLYDRTFVVNGVSKAYAMTGWRIGYIAGRSGVVNAISTLQSQSTSNPNSIAQAAAVEALNGDHSFLKERKKTFKDRRDFVIEKLNSAPGLSSSIPQGAFYFFVSCEGLLGKSTKSGKVISNDLDFTEYLLEDYLVAVI

SEQ ID NO: 33851 - protein, 287 aa, Lactobacillus sakei subsp. sakei 23K
MNKNPLVKPFVKWAGGKRQLIPQITKYMPKTFGRYYEPFVGGGAVFFQLQYNKSTINDFNTELFLAYNAVRDNIDELISNLKIHEANTSSDYYYEVREWDRNGIIDTKSNVERAARFIFLNKTGFNGLFRVNSQNQINTPYGKYKNPAIVNEIVLRHVSKFLNKSTIKIINGDFEDAVKGARRGDFIYFDPPYAPMVNDRQSFVGYTLNGFGADEQERLRDLVDRLTAKGVKVMLSNSSVPYIHEIYANYKDTTVIVPASRSINSKATGRGKVDEVLIMNYNYLDEN

SEQ ID NO: 33852 - protein, 463 aa, Lactobacillus sakei subsp. sakei 23K
MGLGTRLFRKESLERYLQQDQRLAKTLTAKDLIALGVGAVIGTGIFILPGTIAALHSGPAITLSFMIAAVVCAVAAMCYAEFSSALPVAGSAYSYGNIIFGELIGWLLGWALFLEYMLSVAAVSTGWSAYFVSFIEGFGVHIPKAITGSFDPAHGTYINLFAVLIVTLISVLLMSGTRSSTRINNLMVMIKIGVVLLFLVVGIFYVKSSNWQPFMPFGVSGVFKGASLVFFAYLGFDCVSASAAEVKNPQKNLPIGIIGTLVICTLLYILVAFVLTGMVSYRELNVANPVAFALQVVHQNWFAGLLSLGALAGMFTMMLTMTYSSSRLVYSIGRDGLLPKMLGKIETRHQTPINSVRVVTVIIATLGGLVSLDQLTNLVNIGTLIAFFFMSIGVIPLRKRKDIPNKDGFKVPLYPWLPLLSGLLCLFMLFELPAVTWMAAGIWFILGLIIYFSYGLKHSRLND

SEQ ID NO: 33853 - protein, 394 aa, Lactobacillus sakei subsp. sakei 23K
MEKILAINAGSSTLKWQLFEMPSETVIAKGMIDRLGLSDSVFTAKYGDNQKFKEVQDVTTHEMAATLLLTRLKELGIVSHLDEITGVGHRVVGGGEAFSDSMVINPVALDEINRLAEYAPLHNPTQAYYIKIFTALLPGVPQVAVFDTSFYSTLAPENYLYSIPQEYYQTFGARKYGAHGTSHRYVAHRAAEILGTPLESQKMITLHLGSGASITAVQDGHAVDTSMGFTPLAGITMGTRSGDIDVSLVAFLAKKLEITMPEMIDILNHKSGLLGISELSPDMRDLEETAATRPQSALALSIFVNRVVKYVGSYVALMNGIDTLVFTAGSGENGSELRADICKQLACFGVKLDEEKNNVRSQERIISADDSKVKVLIVPTNEELMIARDVMRLK

SEQ ID NO: 33854 - protein, 583 aa, Lactobacillus sakei subsp. sakei 23K
MQQMRVAPSKSQFSFKDFLGLIKNTKPKYWQLFLGLALGLVATGVQLAVPSYAKQLINSFSKQFNIYMLIGIVVLFILSAVISAASGSLLGFFGEDVIQKLRNNIWHKLLHLRVSYFDDVKSGEMTSRLVNDSTQIKDLLSRSFPGLVTAIFTIVGAFAIMLFMDWKMTLIMAFSVPLVMAVMLPIAKKSHAIGHTRQDELARFNGETDETLSEIRLVKLSNAEQQASQQGQTAIGSLYKIGLREAIYDSVAGPIMTAVMMGLIVGILAYGSARVAQGTMTIGAMFSFLMYLFQLMGPAATLGQFFTTLSKASGSTERIQELMQESEEDFDHGTAVDVEGQTLKVESVDFGYEDDQTILHDLSFEAKPNTVVAFAGPSGGGKSTIFSLLERYYEPNQGAIKIGETSINDVSLADWRKQIGFVSQDSAIMAGTIRDNLTYGLTGEYADAQLWAVLQLAFAEKFVREMPEGLDTEVGTRGVKVSGGQRQRLAIARAFLRDPKILMLDEATASLDSESEAMVQKALETLMEGRTTLVIAHRLSTIVDADQIYFIENGHVSGAGKHQELVANHELYREYVETQFNQD

SEQ ID NO: 33855 - protein, 509 aa, Lactobacillus sakei subsp. sakei 23K
MLLFGIVSAFLMLGGDTLQHSISQLLDTMTSHSQWLYIGIYIINFIFLVWLGCSHYGRIRLGQPNEKPEYNDFQWGSMVFATGIDASILMLSTTDPLQYLQNPPFGAKPFSAAAYRYANVCGQFNWGPMAWMIFATATIAIGYALYVKNLRVQRLSAAIDLLEGPQTYKKVLRQLIDFIVVFGIMGGIGSSIGMEIPVISKVLSTMTGFSDTIWLKLALFVVLFVLFTLTVYAGLNKGIKKLSAWHIYTAIGFLLLVLLIGPTRHLIGAEGHNLFHLFGKFGQLSLNATGSDSHFAQHEMLFYWGWWLSYMPVMGLFIARISRGRTIRQVLLGMATYGALSCMSFYAILGGYALFLQSSGQVDLVTLLNTQGQAAVIAAVITTLPWKIVMLAIFCLSCFIFLATTISSSAFIVSSFTSLELKIGEQPNRWNRMAWVVIFILFSLGIVLVGSFQTVQAVCVIAGFPLIFVCALLLVSIFHAVHNGEIPIEIENEETSHFLKKKLTPKFFM

SEQ ID NO: 33856 - protein, 248 aa, Lactobacillus sakei subsp. sakei 23K
MAGKQYTEEYRIPYFETDIKGELTLASLVNVLILASEHQLNDLNVGEETMHSLNLGWVVTQYQMTINRMPKVDEKARIVTEAESYNRYFCYRNFWLYDEAGNECVFVQSIFVMMSYETRSMVPVVPEIMAPFESMAIKGSKRFPRIKKIDSEKASQKEYRVRYFDIDGNQHVNNVHYFEWMLDALDYDFLMDHRVTSVNIRYGHEIQYGQMTQSQVEQVMVDDIMTTRHKVAVGDLSAAEAEIAWTKR

SEQ ID NO: 33857 - protein, 634 aa, Lactobacillus sakei subsp. sakei 23K
MCGIVGFAGGLFDLPKKKEVLNQQMDVIKHRGPSGAGDFIDDKVALGFRRLSIIDLTKGGQPIYNEDHTKLIFFNGEVYNYREIRKELEPLGHEFKTDSDTETILHAYEQWGKDVLKKIRGMFVFVIYDLQTKTLFGARDFFGIKPLYYTTLDDGTFMFSSEIKTFMRHPEFKRTLNKKALKSFMMNQYNDLQETFFEGVFRFPAGHYFTYKDGQLDIEKYWDMQFDPSNLSFEEEVKKIDASVEESIKMHNVADVPVGAFLSEGVDSSYVTSILQPQEVFSVGFDDQTYNEVTAAHALADELGLNFNETKVKADDAFAEFDKIQYYLDEPDGNPSCVPLWFLSRFAREKVTVALSGEGADELFAGYVNYGMHSHNTTIKAFTSSLKKLPKGARAKLAKTVKKMPAFPGRVHLYTNLANPKEFYAGQSVIYDIENPSIFGSDEANQYLKPAYQNDTTIQENYQADFDRVKDADPVSQMQYIDMHHFMLNDILQKADKLSMAHSLELRVPFLDPEVAKTAGQVPTEYLINSKDTKYAYRQASAKHLPAAWANRPKLGFPVPIKQWLETDKYYEQVKALFSEDFVSEFFDQGQLLALLDANKEQRINGRRKIWTIYTFLTWYKVYFINIEDYLVLG

SEQ ID NO: 33858 - protein, 102 aa, Lactobacillus sakei subsp. sakei 23K
MYAIIKTGGKQYKVEAGQAIYVEKLTAEAGEKVTFDQVILVGGETTKVGTPNIDGVTVDGTVEKQGREKKVVTFKYKPKKHSHQKKGHRQPYTKVMIDAINA

SEQ ID NO: 33859 - protein, 66 aa, Lactobacillus sakei subsp. sakei 23K
MEKGTVKWFNNEKGFGFISVEGQDDIFVHFSAIQDEGFKSLEEGQAVEFDIVEGTRGAQAANVKKL

SEQ ID NO: 33860 - protein, 388 aa, Lactobacillus sakei subsp. sakei 23K
MEHIYLDNAATTPIAPEVIETMTTQMTQDFGNASSTHFFGRQAHTVLDTSRHILAQSINAKDNDIILTSGATESNNMVILQTAQKRANEGKRIITTAIEHHSVLKPMAYLESQGFDVVYLPVNAQGVIELADLKAALTPETILVTIMMGNNEIGSHMPIHEIGQLVHESNAWFHTDATQAYGLLDIDVQEDQIDMLSVSAHKINGPKQIGFLYVNEAIHLPSFLMGGEQEKKRRAGTENIPAVAGFAKAIELLTPAVKAEHRARYAGFKQQVLEILQANGIDFEVNGAGSDDMVGHVLNMWVKGVSTYVLQMNLDLAGFAISGGSACTAGDLEPSHVLIAMYGEDSPRVAESIRISFGVETTEADVTAFCAALTKIVQKNLAKQAGKA

SEQ ID NO: 33861 - protein, 382 aa, Lactobacillus sakei subsp. sakei 23K
MIYFDNSATTKIAPGALQTYQAVSEQFYGNPSSLHVVGEKAFHLLEQSRQQIADLLNVQSDEIYFTSGGTEGDNWALKGTAIEKSAFGKHLITTSVEHPAIIKSMQQLEKLGFEVTYLPVDKFGRINPADLKAAIRSDTILVSIMAVNNEIGTCQPLMAAAEILKDYPNIHFHVDAVQGIGKGIQKEIFNDRVDFVTLSGHKFHGPRGTGILYKKRDRHLAPLLTGGGQEHDLRSGTENVPAIAAMAKALRLLLTDEAQKVQKQAAIRERIYQHVSQAEKTVMFSQLTPDFAPHILCFAIKGVRGETTVHAFEEHEIYISTTSACSSKKGMESSTLKAMHVNEKIATSAIRISLDEYNTLAEADEFIKAFDQINHRFKKINS

SEQ ID NO: 33862 - protein, 300 aa, Lactobacillus sakei subsp. sakei 23K
MSDTYRSGFVAIVGRPNVGKSTFMNRMIGEKIAIMSSKAQTTRNKIQGIYTDDNAQIVFVDTPGIHKPHNELDEYMDQAALSTFNEVDAILFMISGVDKKGPGDQYIMDQLKNVKKPVYLVVNKIDAIHPDDLLPMIEQYRHELDFKAVYPISALEGNNVPEMLKELELTLPEGPQYYPEDQLTDHPEYFVVGELIREKILELTHEEVPHSVAVVVERMKDRVNGKLQIEANIIVERDGQKRIIIGQKGSIIKEIGIRSRREIEALLGEKVNLKLWVKIQKNWRDNNQYLREFGYNKKRL

SEQ ID NO: 33863 - protein, 68 aa, Lactobacillus sakei subsp. sakei 23K
MERGIVKWFSNAKGYGFINYRDDEEIFVHFTAIQIDGYKTLDKDDQVLFEVKEGARGLQAANVQKIEA

SEQ ID NO: 33864 - protein, 430 aa, Lactobacillus sakei subsp. sakei 23K
MFVDQVKIDVKAGKGGDGAVAFRREKFVPLGGPAGGDGGRGGSVILVVDEGLRTLMDFRYRHHFKANSGGNGQNKQMYGRGAEDTFVQVPPGTTVRDADTNELLGDLTEDGQELVIAKGGRGGRGNMHFATAKNSAPEIAENGEPGQERSIQLELKVLADVGLVGFPSVGKSTLLSVVTSAKPKIASYQFTTLVPNLGMVQLDDGRDFVLADLPGLIEGASDGVGLGIQFLRHVERTRVVLHLIEMDDQTGRDPYEDYQQINHELESYDPKILERPQVIVATKMDLPGSAELLAEFKQKLAAAGDTHEIFEISSITHQGVQPLMNKTADLLAETAEFPMGDVEEAQTQKLYQYQPEGPAFNVEQDEDGTFYITGEKVERLFKMSNLDHQDGVMRFARQLRSMGLDEALREKGAHDGDLVAIDNFTFEFVE

SEQ ID NO: 33865 - protein, 582 aa, Lactobacillus sakei subsp. sakei 23K
MLKRLMRYIGPYKITFWSAITATVISVLANALWPFIMGLAVTEISQNLAQHVAVNFSYITKVIAMILSFALLYQTMMFLGSFLMTRAVQHAMRDLRRDINLQMNALPVRFFDSQQQGNILSRVTNDVDAITNALQQSLIQVVTSILGIIMAVVMMLTINLWMALLSLIMIPTSLLISKAIIKKSQVYFQGQQNTLGEMNGYVQENYGGFSVLKLYGQEERAVDEFAAITDRLTEFGFKAAFISGIMMPLVGLTTNLTYAGMATLGGYYVLHGVITVGNLQAFIQYIWQINQPISQITQLSGVMQAAAAATQRVFEILDEPIEPTDQETAELPADVQGKVEFKDVSFSYDPAKPLIRDLSFTANPGDKIAIVGPTGAGKTTMINLLMRFYDVSSGQILIDGVDTRQLSKQTVRSLFGMVLQDAWLYHTTITENIRFGKLDATEYEVVDAAKTANVDHFIHTLPNGYQMTIDEEADNVSLGQKQLLTIARAVIANPKILILDEATSSVDTRLESLLQKAMKKVMQGRTSFVIAHRLSTIRDANLILVMDHGQIVEKGTHDDLLAANGVYAKLYNSQFAEAKLNA

SEQ ID NO: 33866 - protein, 260 aa, Lactobacillus sakei subsp. sakei 23K
MSKLEIIDLHVGIDGKEILKGVNLEMNTGEIHAIMGPNGTGKSTLSETIMGNPKYEVLQGEIKLDGQNILEMPVDERARAGLFLAMQYPSEIQGVTNAEFMRAAINARRAEDDQISIMAFLKKLDQRMAVLDMTEEMSERYLNEGFSGGEKKRNEILQLMMIEPKFAILDEIDSGLDIDALQVVSKGVNEMRGDNFGSLIITHYQRLLNYIVPDFVHIMMGGKIVTTGDASLAKRLEDEGYAGIRDELGLDIKLTDDESK

SEQ ID NO: 33867 - protein, 66 aa, Lactobacillus sakei subsp. sakei 23K
MNNGTVKWFNADKGFGFITGEDGKDVFAHFSAIQGDGYKSLDEGQAVSFDVEDSDRGPQATNIVKL

SEQ ID NO: 33868 - protein, 611 aa, Lactobacillus sakei subsp. sakei 23K
MTGTNTETQKTIPASVAMLRVLESWGVDHVFGYPGGSFNSTMRALTVEQDRLKYIQVRHEQVGALAAAADAKLTGKIGAAFGSAGPGATNLLTGLYDAKEDHAPVLALVGQVPSTNMNYNYFQEFNENPMFDDVSVYNRLVMTPESLPYVVDKAIREAYKHKGVAVVIIPNNFGYVEIPDTPYSSSSPTDRKQVAGPVATDEEVDQFLAMVKDAKRPVIHVGRGIKDGGDKLVELSKKLQIPIVMTGLAKGLVPDSYEGNLGMANRAASKAADEIMAVSDLVIAIGADFPFANLIYRTHDFKFVQIDNDEAQFGRHHFLDFGIWSDATTLVEKVVARSQAAAPSPFFKAAVADMKNWQAYLDALTNRPSDPLEFEPIYKEINRIADPDAVFSIDVGDNIINSFRHLHLTPKNKWVISALFASMGSGVPGALAGQLSYPDRQVFNIAGDGAFSMVMQDLITEKKYLLPIINIITSNASLNFIKSEQDDLPMDYSGIFIEDQDFAMIAQAMGVESITVRSSKELPAAFDKALEVTKAGRPFLIDAKITDKRSIPVEELELTIKDGKLTESISASYDASRPTGKEYSVADFFAEYDGQSLKTLPELFAENGVKL

SEQ ID NO: 33869 - protein, 463 aa, Lactobacillus sakei subsp. sakei 23K
MSKHSLFAKKKIDASQFKNGLLERNLTAVGLTAMGVGAVVGAGIFITPGIIAAKYAGPGAMLSYLLAAVVCALAALCYSEFASTIPLAGSAYTYVYTVFGELVAWILGWALVSEYLFAVASVAVSWSAYFQNLMAGFGLHLPTALSAAWEPGKPAGVNLIAGIVVLIVGFLLSNGMRESTRINTIMVGVKIAVIVIFLGVAVFYVKPANFQPFLPYGASGVLSGAALAFYAYIGFDAVSTASEEVINPQRDMPIGIIASLLIASLLYAAVATVLVGVVHYTKLNVGDPVAFALQLMHQNWVAGIISLGAVAGMTTVLLVMTYGGTRLIFAMSRDGLLPAVFAKINPKTHVPVANTWIFAVVTSIVAALVPLDKIAELVNIGTLFAFATVSLGVIFLRRIPNYNELPQGFKVPLYPIVPILSCILCVLLMTQLQITTWIVFVIWLVIGLVIYFSYSYHHSQQRM

SEQ ID NO: 33870 - protein, 398 aa, Lactobacillus sakei subsp. sakei 23K
MSKILAINAGSSTLKWKLFVMPEEKVIAKGMVDRLGLSDSVFTVKYGDGQKYEITQDIETQDVAVDLLLKKLIEFKIIAEYSEISGIGHRVVAGGEDFKTSALITEASLKRIEELAEYAPLHNPAEAGVIRAFRNILPNVPQVAVFDTSFHTTMPEENYLYSLPLDYYRKYGARKYGAHGTSHRYVSHRAAEMLGKPLEDLKMITMHLGSGVSMTAIKDGKSLDTSMGFTPLAGVTMSTRSGDIDASLVAFLMKKLDIKDPEEMIDILNKKSGIYGISGLSPDMRDLEKTREERPESQLAIDIFVNRLIKYVGSYVAIMGGLDVLVITAGMGEGDILMRQRIGDRLSYFGVEVDPERNNVMAQERIISTDDSKVKVLLVPTNEEVMIARDVMSVGQIK

SEQ ID NO: 33871 - protein, 328 aa, Lactobacillus sakei subsp. sakei 23K
MDLFESLKAKITRHDFKIVFPEGTEPRIIGAAARLNADRILKPILIGDAADIQSIASAKGFNLTGITIIDPKAYPQADFDTMVAAFVERRKGKATAEQAQTILQDPNYFGTMMVYLDLADGMVSGAVHSTGDTVRPALQIIKTKPGIQRTSGAFIMQRGRDNERYLFSDCAININPNAQELAEIAVASARTAELFDIDPKVALLSFSTMGSARGEEVTKVQEATKIAQELAPDLDIDGELQFDAAYVPVVANQKAPDSKVAGQANVFVFPELQSGNIGYKIAQRFGNFEAIGPILQGLNKPISDLSRGSNEEDVYKLAIITAAQALQN

SEQ ID NO: 33872 - protein, 378 aa, Lactobacillus sakei subsp. sakei 23K
MTEEQQQTEEALFCIGCGAQIQTTDKEALGYTPNSALKKGLETGQLYCQRCFRLRHYNEISDIKLNDDDFLALLNQIGDSDALIVNVVDIFDFNGSLIPGLHRFIGDNPVILVGNKVDILPTALNPNRVINWIQKEAKEHGLHPIETMLVSAKKGNSVDDLLAVIERERKGRDVYVVGVTNVGKSTLINRIIKQTGILDSDVITTSQFPGTTLDRIDIPLYEDDHALIDTPGIIHAQQMAHYLHDKDLRLIAPQKQIKPKVYQLNEQQTLFLGGLARFDYLQGPRHGFVGYFDNELYIHRTKLENADNFYVRQLGDLLQPPHPEDLADFPDLQRYEFSTKEKSDLVFAGLGWITLPENVVVAGYAPKGVSVMIRKALI

SEQ ID NO: 33873 - protein, 398 aa, Lactobacillus sakei subsp. sakei 23K
MKEVVIMSAKRTPIGKFGGQLASLTAVDLGTIAAKAAIQAAGIEADQIDQAIFGNVLQAGSGQNVARQIALNSGLAQTSVAMTVNEVCGSGLKAIRLAQSAIVMGDADVVLVGGTESMSQAPYLNKGMRFGSKFGDQTVVDSISSEGLNDAFTDKPMGITAENVAAKYGITRLMQDTFALESHQKAAKATQAGWFDAEIVPVTVQQRRATFEVSQDEGIRPDTTLEAMGKLRPAFQADGTVTAANASGINDGASAMIVMSKEKAEALGLVYQATLVGYQEVGLDPNYMGYTPVPAIQQLLAKQDQTVADIDLFEINEAFAASSVAVQNGLALDTAKVNVAGGAVALGHPIGASGTRIMTTLLHQLKRTNKTTGVASLCIGGGLGIAYEIQLNEAWLND

SEQ ID NO: 33874 - protein, 66 aa, Lactobacillus sakei subsp. sakei 23K
MENGTVKWFNAEKGYGFVTREDGSDVFVHFSAIQGEGYKTLEEGQSVSFDIEESDRGPQAVNVNKN

SEQ ID NO: 33875 - protein, 696 aa, Lactobacillus sakei subsp. sakei 23K
MNNKKNRLFSNSLFYIIILVALVGVFSFFMNGNGGSESKEVQSSTFLSELKTDKVKSFSIQPTNGIYKISGEYRKAQKDEQPKSTFFGSQSKNKKVTHFTTTLLQSDSQVSAITNLANQNKTKIETMQEPQSGWWVSILSLILPLIIMFGLFYMMMGQAGQGGGQGGRMMNFGKSKAQKADKGANKVRFSDVAGAEEEKQELVEVVEFLKDPRKFVALGARIPAGVLLEGPPGTGKTLLAKAVAGEAGVPFFSISGSDFVEMFVGVGASRVRDLFEQAKKSAPSIIFIDEIDAVGRQRGAGMGGGHDEREQTLNQMLVEMDGFSGNEGVIVIAATNRSDVLDPALLRPGRFDRKILVGRPDVKGREAILKVHAKNKPLADDVDLKEIAQQTPGFVGADLENLLNEAALVAARRSKKDIDASDVDEAEDRVIAGPAKRDRVINPKERETVAYHEAGHAIIGLVLSDSRVVRKVTIVPRGRAGGYAIMLPKTDQFLMSKKELTEQMTGLMGGRTAEEIIFNSQSTGASNDFEQATDIARGMVTHYGMTEKLGTVALEKEGQPFVGAAYGQGPAFSEATAAAIDSEVRRLIDEAHQQATEIIQAHREQHKLIAEMLLKYETLNEKEILSLFNDGKMPEKNAEEFPSEKAATFEEAKKALEAKEAEKTDSELEAEQADSETTEVADDTADSKPTNDDSND

SEQ ID NO: 33876 - protein, 323 aa, Lactobacillus sakei subsp. sakei 23K
MSEQYFDPKLKIFALNSNKPLAEKIAAEVGVPLGKSSVKRFSDGEIQINIEESIRGDEIFLIQSTSAPVNDNLMEILIMIDALRRASAKTINVVLPYYGYARQDRKARSREPITAKLVANMLTMAGADRILALDLHAVQIQGFFDIPVDHLMGAPLLADYFLSNDLAENAVVVSPDHGGVTRARKLADFLKTPIAIIDKRRPRPNVSEVMNIIGNVNGKRAIIIDDMIDTAGTITLAAQALKDAGATEVFACCTHPVLSGPAIQRIEDSVIKQMIVTDSIDLPKEKLIDKMVQVSVGPLIGDAIKRIHENKPVSPLFENRFKR

SEQ ID NO: 33877 - protein, 394 aa, Lactobacillus sakei subsp. sakei 23K
MNNILVINAGSSSLKWQLFQQTDLSLVASGLMERMNTPEARFTFKFNGQKEQVAIANLTYEDGVIRLLKQLQDNAIIDSPSDIVAVGHRVVAGATTFEKSTLITADNLATLKALDKYAPLHNPVQVDCIETLMHILPNSVPEVAVFDSQFYLDMPDATSFYGLPYEDSQKYQIRKYGEHGISHGYILQETAAFLNQPVAELKLITLHLGGGSSITASQNGKPVDTSMGFTPLEGLPMGTRAGSLDAAIVPFLMNELNKSADEIITLLNTESGILGVSGVSADMRDIQSSLATNPRAKLAYDMFITSAAKFIGSYYVELGGANVITFTAGIGENDAKMRADVCDRLAVLGVKIDPERNEQGHSARQISTDDSAIKVLMIPTNEELAIAKQVKALV

SEQ ID NO: 33878 - protein, 577 aa, Lactobacillus sakei subsp. sakei 23K
MVTQKINAADAMLKVMADWGIDHIFGLPGGSFDSTMNALHNQKAIMRYIQVRHEEVGALAASGEAKATGKIAATFGSAGPGAVHLLNGLYDAKYDHVPVLALVGQVATGVMNTDYFQEMNENPMFADVAVYNRTVMTAEQLPLVVDQAIQQAYKNSGVAVVTIPTDLGWQPIEDHFEATANLFQMGNYPEPRSTDIQQTLQLIKEAKQPIIYFGQGAKAAGDELVALSDKLSIPMMSSALSKGIVADENPAYMVSAGRVATKPGVDLAEAADLILFVGSNYEFGQYFFKPDAKFIQIDIDPTKLGHRHHVDVGILADAKTALAALLEASEPVSEKTAFYRAAVANKANWDQWTASFEDDPQTPLRVEPVFKEINQMATNDAIFNLDVGNVTIDGVRFLKMKPGQKTTISAWYATMGAALPAAIGTQAAFPNRQVWSISGDGGFTMVMQDLITQVKYQMPIINVVLSNDSFGFIEAEQDDKGQPHSGVAIQGADYGAAATALGAQGFTVRTLDELKAAFAAAQKRQGPVVIDVKIANERPLPVEQLVIDDQTQDPKAVAQFVEKYRAQGLKPFRTFLG

SEQ ID NO: 33879 - protein, 277 aa, Lactobacillus sakei subsp. sakei 23K
MNSKNRKRLLLVASLFLFMLIAAGCSTAPVSSASTGFWDHYIIYNFSRFLLWLADIFGGSYGWAIVAFTIIIRLIILPLTWWQSKTMMKQQEVAPEIQALQKKYASKDVETQQKLREETQKLYAEAGVNPVIGCLPLLVQMPVLIALYQAIYRTSALKSGSFLWMQLGKADPYFIMAILAAVFTFATSYLTMMSQPTKNATTTAMLWVMPIMIFVMAMNIASAVSIYWVVTNAFSVGQTMVIQNPFKIRREREAKEQVKRDREKALAKARKKATKKR

SEQ ID NO: 33880 - protein, 196 aa, Solanum lycopersicum
QAPGEDSEVILYPQAIFKDPFRRGNNILVMCDAYTPAGEPIPTNKRHAAAKVFSHPDVAAEETWYGIEQEYTLLQREVNWPLGWPIGGFPGPQGPYYCGTGADKAFGRDIVDAHYKACLYAGINISGINGEVMPGQWEFQVGPSVGISAGDEVWVARYILERIAEIAGVVVSFDPKPIPGDWNGAGAHTNYSTKSM

SEQ ID NO: 33881 - protein, 310 aa, Capsicum annuum
EVAAERLEPRVEEKDGYWILKEKFRQGINPQEKVKIDKEPMKLFMENGIEELAKIPIEEIDQSKLSKDDIDVRLKWLGLFHRRKNQYGRFMMRLKLPNGVTTSAQTRYLASVIRKYGEEGCADITTRQNWQIRGVVLPDVPEIIKGLAEVGLTSLQSGMDNVRNAVGNPLAGIDPEEIVDTRPYTNLLSQFITGNARGNPAVSNLPRKWNPCVVGSHDLYEHPHINDLAYMPATKDGRFGFNLLVGGFFSAKRCDEAIPLDAWVPADDVVPVCKAMLEAFRDLGFRGNRQKCRMMWLIDELGVEGFRAEV

SEQ ID NO: 33882 - protein, 392 aa, Solanum tuberosum
MAKPGRGRAASPSGSSSRSRSRSRSYTPSNSRSSSSRSPSRSRSRSRSISSSSSASRSASSRSPSRLPPSQRKSPAGVSKRGRSPPPPPPPESKKASPPPRKVSPIPESRVIHVDQLSRNVNENHLKEIFGNFGEILHVQLAIDHVVNLPKGFAYVEFKTRIDAEKAQLHMDGAQIDGKVVHARFTLPERKKAASPPRAVATSSRRDAPRTDNAPVDVEKDGPKRQQDLSPRRKPASPPRRSPIGRRGSPRRGPDSPVRRRANSPFRRGSPPPQRRRPASPMRRRSPSPPLRRHRTPPRGSPRRIRGSPGRRRSPLPPRRRSPRRARSPPRRSPIGRRSSRSPIRRPIRSRSRSISPRRGRGPAARQWEVIILLFFSQSSQGTPQDFKESQS

SEQ ID NO: 33883 - protein, 303 aa, Elaeis guineensis
MGSRRRDAEAELNLPPGFRFHPTDEELVVHYLCKKVACQRLPVPIIAEVDLYKYDPWDLPEKALFGLKEWYFFTPRDRKYPNGSRPNRAAGRGYWKATGADKPVTPKGSSRPLGIKKALVFYSGKAPRGVKTDWIMHEYRLADTNRAANKKGSLRLDDWVLCRLYNKKNTWEKMQQQKEAASFGETMDSVDDTGSDSFRTPESDIDNDVMFPDFDDMAQVGAHPPQAFNGMQGVRVNNITGYQPAIEQRPKEENDWFTDLNLDDFHSTCMAFGSTPALDMSDHDYYYSNLPQLRSNQSDLLPF

SEQ ID NO: 33884 - protein, 335 aa, Elaeis guineensis
MGSRRRDAEAELNLPPGFRFHPTDEELVVHYLCKKVACQRLPVPIIAEVDLYKYDPWDLPEKALFGLKEWYFFTPRDRKYPNGSRPNRAAGRGYWKATGADKPVTPKGSSRPLGIKKALVFYSGKAPRGVKTDWIMHEYRLADTNRAANKKGSLRVCHRQSEIHKFFGFLGFFMNIDSDEKIHEFMQLDDWVLCRLYNKKNTWEKMQQQKEAASFGETMDSVDDTGSDSFRTPESDIDNDVMFPDFDDMAQVGAHPPQAFNGMQGVRVNNITGYQPAIEQRPKEENDWFTDLNLDDFHSTCMAFGSTPALDMSDHDYYYSNLPQLRSNQSDLLPF

SEQ ID NO: 33885 - protein, 303 aa, Elaeis guineensis
MGSRRRDAEAELNLPPGFRFHPTDEELVVHYLCKKVACQRLPVPIIAEVDLYKYDPWDLPEKALFGLKEWYFFTPRDRKYPNGSRPNRAAGRGYWKATGADKPVTPKGSSRPLGIKKALVFYSGKAPRGVKTDWIMHEYRLADTNRAANKKGSLRLDDWVLYRLYNKKNTWEKMQQQKEAASFGETMDSVDDTGSDSFRTPESDIDNDVMFPDFDDMAQVGAHPPQAFNGMQGVRVNNITGYQPAIEQRPKEENDWFTDLNLDDFHSTCMAFGSTPALDMSDHDYYYSNLPQLRSNQSDLLPF

SEQ ID NO: 33886 - protein, 319 aa, Cryptococcus neoformans var. grubii
MSKVQESTVKKPTDTDVSGFLTNFLMGGVSAAISKTAAAPIERVKLLIQNQDEMIKQGRLSTPYKGVMNTFARTYKDEGLISLWRGNTANVIRYFPTQALNFAFKDYFKTLFGFKRSEGYWKWFAGNIASGAAAGASSLLFVYSLDYARTRLANDNKSAGKGGTRQFNGLLDVYKKTLASDGLIGLYRGFIPSVAGIVVYRGLYFGLYDSVKPVVLVGALEGNFIASFLLGWTVTTAAGFVSYPLDTIRRRMMMTSGGTVHYKSMFDAASQIVAKEGSRSLFKGAGANILRGVASAGVLSLYDKAQELMFGKVYSSGSG

SEQ ID NO: 33887 - protein, 316 aa, Cryptococcus neoformans var. grubii
MSEVARKPKDAKAFLTDFLMGGVSAAVSKTAAAPIERIKLLVQNQDEMIKQGRLATPYKGVTDCFARTYKDEGLASLWRGNTANVIRYFPTQALNFAFKDYFKSMFGFKKSEGYWKWFAGNIASGGAAGASSLLFVYSLDYARTRLANDSKSAKKGGARQFNGLVDVYKKTLASDGIAGLYRGFIPSVVGIIVYRGLYFGLYDSIKPVILVGPLEGNFLASFLLGWTVTTSAGLASYPLDTIRRRMMMTSGGTVHYKSMFDAGSQIIAKEGVKSLFKGAGANILRGVAGAGVLSLYDKAQELMFGKVYSLSKGGSG

SEQ ID NO: 33888 - protein, 304 aa, Anabaena sp.
MTQAKAKHADVPVNLYRPNAPFIGKVISNEPLVKEGGIGIVQHIKFDLTGGNLKYIEGQSIGIIPPGVDKNGKPEKLRLYSIASTRHGDDVDDKTISLCVRQLEYKHPESGETVYGVCSTYLTHIEPGSEVKITGPVGKEMLLPDDPEANVIMLATGTGIAPMRTYLWRMFKDAERAANPEYQFKGFSWLVFGVPTTPNILYKEELEEIQQKYPDNFRLTYAISREQKNPQGGRMYIQDRVAEHADQLWQLIKNQKTHTYICGLRGMEEGIDAALSAAAAKEGVTWSDYQKDLKKAGRWHVETS

SEQ ID NO: 33889 - protein, 303 aa, Anabaena sp.
TQAKAKHADVPVNLYRPNAPFIGKVISNEPLVKEGGIGIVQHIKFDLTGGNLKYIEGQSIGIIPPGVDKNGKPEKLRLYSIASTRHGDDVDDKTISLCVRQLEYKHPESGATVYGVCSTYLTHIEPGSEVKITGPVGKEMLLPDDPEANVIMLATGTGIAPMRTYLWRMFKDAERAANPEYQFKGFSWLVFGVPTTPNILYKEELEEIQQKYPDNFRLTYAISREQKNPQGGRMYIQDRVAEHADQLWQLIKNQKTHTYICGLRGMEEGIDAALSAAAAKEGVTWSDYQKDLKKAGRWHVETS

SEQ ID NO: 33890 - protein, 908 aa, Funaria hygrometrica
MNPEKFTHKTNEALAAGQELATEAGHAQYTPVHLALALLNDSEGLLRQAIASASGGDQTLNSVERVLKNTLKKIPSQNPAPDASPANNALIKCIKKAQSLQKSRSDSHLAVDQLILALLEDSQIADCFKEAGVSATRVKRELEAVRRSSKKVDNANADSNFQALKKYGRDLVEDAAKLDPVIGRDDEIRRVVRILSRRTKNNPVLIGEPGVGKTAVVEGLAQRIVRGDAPSNLLEVRLVALDMGALVAGAKYRGEFEERLKAVLKEVEDSDGKVILFIDEIHLVLGAGRTEGSMDAANLLKPMLARGQLRCIGATTLDEYRKYVEKDAAFERRFQQVMVSEPSVADTISILRGLKERYEGHHGVRLLDRALVVAAQLSSRYITSRFLPDKAIDLIDEACANVRVQLDSQPEEIDVLERRRIQLEVEAHAMEKEKDKASKARLLEVRQELQNLEDQLRLLKMKYQREKERVDELRKLKQKREDLQASLVDAERRYDLARAADFKYGALVEVEKAIQKMEQQESGENTMLTESVGPEQIAEVVSRWTGIPVTRLGQNEKARLLAFADRLHERVVGQDEAVQAVAEAILRSRAGLGRQQQPTGSFLFLGPTGVGKTELAKALAEQLFDKENQLVRMDMSEYMEQHSVSRLIGSPPGYVGHEEGGQLTEAVRRRPYSVVLFDEVEKAHPAVFNTLLQLLDDGRLTDGQGRTVDFTNTVVIMTSNLGAEHLLAGLSGMMSMTVAKEKVLEQVRVHFRPELLNRLDEIVVFEPLKHDQLRKVARMQMKDVALRLAERGVALAVTDAALDLVLKESYDPVYGARPLRRWLERKVVTNLSRMLINDEVDDNSTVFIDVKPGENQLSYAVERNGGLVNSITGKKADILIEVPRVEQHDVKRIRVEEPDSDLDDEMED

SEQ ID NO: 33891 - protein, 134 aa, Synechococcus sp. WH 8101
ERVYLIRRGAVRLSRVYESGEEITVALLRENSLFGVLSLLTGHRSDRFYHAVAFTRVEMVTAPAASVRQAIEADTGVGLLLLQGLSSRILQTETMIETLTHRDMSSRLVSFLLVLCRDFGIPGTQGITIDLRLS

SEQ ID NO: 33892 - protein, 134 aa, Synechococcus sp. RS9911
ERVYLIRRGAVRLSRVYESGEEITVALLRENSLFGVLSLLTGQRSDRFYHAVAFTRVEMVMAPATSVKAAIEADTSVGLRLLQGLSSRILQTETMIETLTHRDMSSRLVSFLLVLCRDFGVADELGITIDLRLS

SEQ ID NO: 33893 - protein, 134 aa, Synechococcus sp. RS9916
ERVYLIRRGAVRLSRVYESGEEITVALLRENSLFGVLSLLTGHRSDRFYHSVAFTRVEMLTAPAASVRQAIEADASVGLLLLQGLSSRILQTETMIETLTHRDMSSRLVSFLLVLCRDFGVPGDRGITIDLRLS

SEQ ID NO: 33894 - protein, 134 aa, Synechococcus sp. MIT S9220
ERVYLIRRGAVRLSRVYESGEEITVALLRENSLFGVLSLLTGHRSDRFYHSVAFTRVEMVTAPASSVRQAIEANTSVGLLLLQGPSSRILQTETMIETLTHRDMSSRLVSFLLVLCRDFGMPGPQGITIDLRLS

SEQ ID NO: 33895 - protein, 134 aa, uncultured cyanobacterium
ERVYFLLKGAVKLSRVYEAGEEITVALLRENSVFGVLSLITGHRSDRFYHAVAFTPVELLSLPIDRVEKTIRQNPDLSMVMLQGLSSRILQTEMMIETLAHRDMGSRLVSFLLILCRDFGIPAEDGITIDLKLS

SEQ ID NO: 33896 - protein, 134 aa, uncultured Synechococcus sp.
ERVYLIRRGAVRLSRVYESGEEITVALLREDSLFGVLSLLTGHRSDRFYHAVAFTRVEMVTAPAGSVRAAIEADTAVGLRLLQGLSSRILQTETMIETLTHRDMSSRLVSFLLVLCRDFGVPDQLGITIDLRLS

SEQ ID NO: 33897 - protein, 134 aa, uncultured Synechococcus sp.
ERVYLIRRGAVRLSRVHESGEEITVALLRENSLFGVLSLLTGQRSDRFYHAVAFTRVEMVTAPATSVRAAIEADTTVGLKLPQGLSSRILQTETMIETLTHRDMSSRLVSFLLVLCRDFGVPDELGITIDLRLS

SEQ ID NO: 33898 - protein, 134 aa, uncultured Synechococcus sp.
ERVYLIRRGAVRLSRVYESGEEITAALLRENSLFGVLSLLTGHRSDRFYHAIAFTRVEMVTAPAASVRAAIEADTTVGLRLLQGLSSRILQTETMIETLTHRDMSSRLVSFLLVLCRDFGVPDELGITIDLRLS

SEQ ID NO: 33899 - protein, 134 aa, uncultured Synechococcus sp.
ERVYLIRRGAVRLSRVYESGEEITVALLRENSLFGVLSLLTGHASDRFYHAIAFTRVEMVTAPAASVRAAIEADTTVGLRLLQGLSSRILQTETMIETLTHRDMSSRLVSFLLVLCRDFGVPDELGITIDLRLS

SEQ ID NO: 33900 - protein, 134 aa, uncultured Synechococcus sp.
ERVYLIRRGAVRLSRVYESGEEITVALLRENSLFGVLSLLTGHRSDRFYHAIAFTRVEMVTAPAASVRAAIEADTTDGLRLLQGLSSRILQTETMIETLTHRDMSSRLVSFLLVLCRDFGVPDELGITIDLRLS

SEQ ID NO: 33901 - protein, 134 aa, uncultured Synechococcus sp.
ERVYLIRRGAVRLSRVYESGEEITVALLRENSLFGVLSLLTGHRSDRFYHAVAFTRVEMVTAPAASVRAAIEADTGVGLRLLQGLSSRILQTESMIETLTHRDMSSRLVSFLLVLCRDFGVPDELGITIDLRLS

SEQ ID NO: 33902 - protein, 134 aa, uncultured Synechococcus sp.
ERVYLIRRGAVRLSRVYESGEEITVALLRENSLFGVLSLLTGHRSDRFYHAIAFTRVEMVTAPAASVRAAIEADTTVGLRLLQGLSSRILQTETMIETLTHRDMSSRLVSFLLVLCRDFGVPDELGIPIDLRLS

SEQ ID NO: 33903 - protein, 134 aa, uncultured Synechococcus sp.
ERVYLIRRGAVRLSRVYESGEEITVALLRENSLFGVLSLLTGHRSDRFYHAIAFTRVEMVTAPAASVRAAIEADTTVGLRLLQGLSSRILQTETMIETLTHRDMSSRLVSFLLVLCCDFGVPDELGVTIDLRLS

SEQ ID NO: 33904 - protein, 134 aa, uncultured Synechococcus sp.
ERVYLIRRGAVRLSRVYESGEEITVALLRENSLFGVLSLLTGHRSDSFYHAIAFTRVEMVTAPAASVRAAIEADTTVGLRLLQGLSSRILQTETMIETLTHRDMSSRLVSFLLVLCRDFGVPDELGITIDLRLS

SEQ ID NO: 33905 - protein, 134 aa, uncultured Synechococcus sp.
ERVYLIRRGAVRLSRVYESGEEITVALLLENSLFGVLSLLTGRRSDRFYHAIAFTRVEMVTAPAASVRAAIEADTTVGLRLLQGLSSRILQTETMIVTLTHRDMSSRLVSFLLVLCRDFGVPDELGITIDLRLS

SEQ ID NO: 33906 - protein, 134 aa, uncultured Synechococcus sp.
ERVYLIRRGAVRLSRVYESGEKITVALLRENSLFGVLSLLTGHRSDRFYHAIAFTRVEMVTAPAASVRAAIEADTTVGLRSLQGLSSRILQTETMIETLTHRDMSSRLVSFLLVLCRDFGVPDELGITIDLRLS

SEQ ID NO: 33907 - protein, 134 aa, uncultured Synechococcus sp.
ERVYLIRRGAVRLSRVYESGEEITVALLRENSLFGVLSLLTGHRSDRFYHAVAFTRVEMVTAPAASVRAAIEADTGVGLRLLQGLSSRILQTETMIETLTHRDMSSRLVSFLLVLCRDFGVPDDLGITIDLRLS

SEQ ID NO: 33908 - protein, 134 aa, uncultured Synechococcus sp.
ERVYLIRRGAVRLSRVYESGEEITVALLRENSLFGVLSLLTGHRSDRFYHSVAFTRVEMVTAPASSVRQAIEADTSVGLLLLQGLSSRILQTETMIETLTHRDMSSRLVSFLLVLCRDFGIPSTQGITIDLRLS

SEQ ID NO: 33909 - protein, 134 aa, uncultured Synechococcus sp.
EKVYLIRRGAVRLSRVYESGEEITVALLRENSLFGVLSLLTGHRSDRFYHSIAFTRVEMLTTPATSVRQAIEDDTSVGLLLLQGLSSRILQTETMIETLTHRDMSSRLVSFLLVLCRDFGVPGQRGITIDLRLS

SEQ ID NO: 33910 - protein, 134 aa, uncultured Synechococcus sp.
ERVYLIRRGAVRLSRVYESGEEITVALLRENSLFGVLSLLTGQRSDRFYHAVAFTRVEMVTAPATSVKAAIEADTSVGLRLLQGLSSRILQTETMIETLTHRDMSSRLVSFLLVLRRDFGVADELGITIDLRLS

SEQ ID NO: 33911 - protein, 134 aa, uncultured Prochlorococcus sp.
ERVYLIRRGAVRLSRVYESGEEITVALLRENSLFGDLSLLTGHRSDRFYHAIAFTRVEMITAPANSVLRAIEEDASVGLLLLQGLSSRILQTETMIETLTHRDMSSRLVSFLMVLCRDFGVASEKGITIDLRLS

SEQ ID NO: 33912 - protein, 134 aa, uncultured Prochlorococcus sp.
ERVYLIRRGAVRLSRVYESGEEITVALLRGNSLFGVLSLLTGHRSDRFYHAIAFTRVEMITAPAHSVLRAIEEDASVGLLLLQGLSSRILQTETMIETLTHRDMSSRLVSFLMVLCRDFGVASEKGITVDLRLS

SEQ ID NO: 33913 - protein, 134 aa, uncultured Prochlorococcus sp.
ERVYLIRRGAVRLSRVYESGEEITVALLRENSLFGVLSLLTGHRSDRFYHAIAFTRVEMITAPANSVLRAIEEDRSVGLLLLQGLSSRILQTEAMIETLTHRDMSSRLVSFLMVLCRDFGVASEKGITIDLRLS

SEQ ID NO: 33914 - protein, 134 aa, uncultured Prochlorococcus sp.
ERVYLIRRGAVRLSRVYESGEEITVALLRENSLFGVLSLLTGHRSDRFYHAIAFTRVEMITAPATSVLRAIEEDASVGLLLLQGLSSRILQTETMIETLTHRDMSSRLVSFLMVLCRDFGVASEKGITIDLRLS

SEQ ID NO: 33915 - protein, 134 aa, uncultured Prochlorococcus sp.
ERVYLIRRGAVRLSRVYESGEEITVALLRENSLFGVLSLLTGHRSDRFYHAIAFTRVEMITAPANSVLRAIEEDASVGLLLSQGLSSRILQTETMIETLTHRDMSSRLVSFLMVLCRDFGVAGEKGITIDLRLS

SEQ ID NO: 33916 - protein, 134 aa, uncultured Prochlorococcus sp.
ERVYLIRRGAVRLSRVYESGEEITVALLRENSLFGVLSHLTGHRSDRFYHAIAFTRVEMITAPANSVLRAIEEDASVGLLLLQGLSSRILQTETMIETLTHRDMSSRLVSFLMVLCRDFGVASEKGITIDLRLS

SEQ ID NO: 33917 - protein, 134 aa, uncultured Prochlorococcus sp.
ERVYLIRRGAVRLSRVYESGEEITVALLRENSLFGVLSLLAGHRSDRFYHAMAFTRVEMITAPANSVLRAIEEDASVGLLLLQGLSSRILQTETMIETLTHRDMSSRLVSFLMVLCRDFGVATEKGITIDLRLS

SEQ ID NO: 33918 - protein, 134 aa, uncultured Prochlorococcus sp.
ERVYLIRRGAVRLSRVYESGEEITVALLRENSLFGVLSLLTGHRSDRFYHAIAFTRVEMITAPANSVLRAIEEDASVGLLLLQGLSSRILQTETMIETLTHRDMSSRLVSFLVVLCRDFGVASEKGITIDLRLS

SEQ ID NO: 33919 - protein, 134 aa, uncultured Prochlorococcus sp.
ERVYLIRRGAVRLSRVYESGEEITVALLRENSLFGVLSLLTGHRSDRFYHAIAFTRVEMITAPANSVLRAIEEDASVGLLLLQGLSSRILQTETMTETLTHRDMSSRLVSFLMVLCRDFGVASGKGITIDLRLS

SEQ ID NO: 33920 - protein, 134 aa, uncultured Prochlorococcus sp.
ERVYLIRRGAVRLSRVYESGEEITVALLRENSLFGVLSLLTGHRSDRFYHAIAFTRVEMITAPANSVLRAIEDDASVGLLLLQGLSSRILQTETMIETLTHRDMSSRLVSFLMVLCRDFGVASEKGITIDLRLS

SEQ ID NO: 33921 - protein, 134 aa, uncultured Prochlorococcus sp.
ERVYLIRRGAVRLSRVHESGEEITVALLRENSLFGVLSLLTGHRSDRFYHAIAFTRVEMITAPANSVLRAIEEDASVGLLLLQGLSSRILQTETMIETLTHRDMSSRLVSFLMVLCRDLGVASEKGITIDLRLS

SEQ ID NO: 33922 - protein, 134 aa, uncultured Prochlorococcus sp.
ERVYLIRRGAVRLSRVYESGEEITVALLRENSLFGVLSLLTGHRSDRFYHAIAFTRVEMITAPANSVLRAIEEDASVGLLLLQGLSSSILQTETMIETLTHRDMSSRLVSFLMVLCRDFGVAGEKGITIDLRLS

SEQ ID NO: 33923 - protein, 134 aa, uncultured Prochlorococcus sp.
ERVYLIRRGAVRLSRVYESGEEITVALLRENSFFGVLSLLTGHRSDRFYHAIAFTRVEMITAPASSVLRAIEEDASVGLLLLQGLSSRILQTETMIETLTHRDMSSRLVSFLMVLCRDFGVAGEKGITIDLRLS

SEQ ID NO: 33924 - protein, 134 aa, uncultured Prochlorococcus sp.
ERVYLIRRGAVRLSRVYESGEEITVALLRENSLFGVLSLLTGYRSDRFYHAIAFTRVEMITAPAASVLRAIENDASVGLLLLQGLSSRILQTETMIETLTHRDMSSRLVSFLMVLCRDFGVASEKGITIDLRLS

SEQ ID NO: 33925 - protein, 134 aa, uncultured Prochlorococcus sp.
ERVYLIRRGAVRLSRVYESGEEITVALLRENSLFGVLSLLTGRRSDRFYHAIAFTRVEMITAPANSVLRAIEEDASVGLLLLQGPSSRILQTETMIETLTHRDMSSRLVSFLMVLCRDFGVAGEKGITIDLRLS

SEQ ID NO: 33926 - protein, 1147 aa, Hordeum vulgare subsp. vulgare
MSSSRSNSRSACSRGSSARSRHSERVVAQTPVDAQLHAEFESSHRHFDYSSSVSALNRSGASTSSAVSAFLQNMQRGRYIQPFGCLLAIHPESFALLAYSENAAEMLDLTPHAVPTIDQRDALAVGADVRTLFRSQSAVALHKAAVFGEVNLLNPILVHARTSGKPFYAILHRIDVGLVIDLEPVNPADVPVTAAGALKSYKLAAKAISRLQSLPSGNLSLLCDVLVREVSELTGYDRVMAYKFHEDEHGEVIAECRRSDLEPYLGLHYPATDIPQASRFLFMKNKVRMICDCAASPVKLIQDGNLSQPISLCGSTMRAPHGCHAQYMANMGSIASLVMSVTVNEDDDEDGDTGSDQQPKGRKLWGLVVCHHTSPRFVPFPLRYACEFLLQVFGIQLNKEVELASQAKERHILRTQTLLCDMLLRDAPVGIFTQSPNVMDLVKCDGAALCYQNQIMVLGSAPSEGEIKKIAAWLLECHDGSTGLSTDSLLEAGYPGASALGEVVCGMAAIKISSKGFIFWFRSHTAKEIKWSGAKHEPGDADDNGRRMHPRSSFRAFLEVVKWRSVPWEDVEMDAIHSLQLILRGSLQDEDANDNNVRSIVEAPSDDVRKIQGLLELRIVTNEMVRLIETATAPILAVDIVGSINGWNGKVAEITGLPTTEAIGMLLVDLVEGDSVEVIKQMLNSAMQGTEEQNFEIKLKTFHQQESNGPVVLMVNACCSRDLSDKVVGVCFVAQDLTGHKMVMDKYTQIQGDYVAIVKNPNELIPPIFMINDLGSCLEWNEAMQKITGIKREDAIDKLLIGEVFTLHDYGCRVKDQATITKLSILMNTVISGQEPEKLAFGFFSTDGKYMESLLTANKRTDAEGKITGALCFLHVPSPELQHALQVQKMSEQAAARSFKELTYIRQELKNPLNGMQFTRKLLEPSDLTEEQRQLFASNVLCQEQLKKILHDNDLEGIEQCYMEMNTVEFNLEEALNTVLMQGMSLSKEKQISLDRDWPVEVSSMYLYGDNLRLQQVLADYLACTLQFTRPAEGPIVLQVIPKKEHIGSGMQIAHLEFRVVHPAPGVPEALIQEMFRHGPGVSREGLGLHISQKLVKTMSGTVQYLREAESSSFIVLVEFPVAQLNSKRSKPSTSKWSKPSTSKSNF

SEQ ID NO: 33927 - protein, 355 aa, Helianthus annuus
MEDSTDSIAVDMETIYLGGKEHVIRTGHGCVSVILYGDEEKPPLITYPDVALNHMSCFQGLFFSPEAASLLLHNFCIYHITPPGHELGAASICPDVPVPSVDDLCDQILEVLNHFRLGAVMCMGAMAGAYLLTLFAIRYRDRVTGLILISPLCKAPSWTEWLYNKLMSNLLYYYGMCSLSKECLLQRYFSKEVRGTPEIPESDIVQACRKLLDERQSINVLRFLQAIHRRPDITQELEKLKCRTLIFVGDNSLFHSEALHMSEKLDRRFSALVEVQGCGSMVTEEQPHAMLVSLEYFLIGFGLYRPSESDGSPRSPLSPFSISPELLSPESLGLKLKPIKTRVLSRGGDSTCYSS

SEQ ID NO: 33928 - protein, 342 aa, uncultured candidate division WS3 bacterium
MSIWSLRWSSGVVSSSPAGRRERARGSGADGTSILEVDMKLVECVPNFSEGRRPEVIDAIVGEMTAVDGVRLLDREMDADHNRAVVTIVGEPEAVLEGVFRGMARASELIDLTKHEGEHPRMGATDVVPFVPIKGVTMDDCVELARRLAERVGRELGIPVFLYEAACTRPDRENLANVRKGQFEGLCQEIGKNPDREPDCGPNCIHPTAGATAIGARPFLVAYNINLGTADVNVAKAIAKAIRHSNGGLRHVKAMGFAIKDRGIAQVSINMVNFRGTPLFRAFEMVKSEAERYGVPVIGSEIVGLVPADALVDCAEFYLRLENFKRDQVLENRLSSEDGSDQ

SEQ ID NO: 33929 - protein, 380 aa, uncultured gamma proteobacterium
MIASKLPNVGTTIFTRMSALANACGALNLSQGFPDFDAPPALLEAMARHVRAGHNQYAPMPGVPALREQITNQLLRHRGVVCDPEDEITVLPGATEGIFCAVMACIHPGDEVLVFDPCYDSYEPAILLAGGHARHIPLEPGSFRIDWQQVAGAINARTRLVIINSPHNPSGATLSREDLLHLQSLAEEHDLLVISDEVYEHLVFDGQQHHSALQHPGLRQRSFVMFSFGKTFSVTGWKTGYCVAPAALTAELRKVHQFVCFVAVTPVQMAIADFMAAEPDYPATLPAFYQRKRDLFCGALWDSRFRFTPSAGTYFQLLDYSGITQTPDCQLAEDWTREKGIAAIPVSVFYQEPPDQHLLRFCFAKNDQVLLEAAERLCKI

SEQ ID NO: 33930 - protein, 397 aa, uncultured delta proteobacterium
MKLAERIARIKPSETLAITAKTNALRAQGRDVIGFGAGEPDFDTPVNIKNAAIKAIEGGFTKYTPVTGTDELKDAIVAKLKQDNSLDYKRSQIVVSCGAKHTLYNLAQALFEEGDEVIIPSPYWVSYPDIVVLAGASPVYVTTDEKDGFKMKPQQLSSAISERTRAVIINSPSNPTGAAYSPDELKSLAKVLLDKDILVITDDIYEKIFYADFAFANIASAEERIKDKTIVVNGVSKTYAMTGWRIGYAACSEEIASAMNKIQSQSTSNPTSIAQKAALEAISGDQSAVPQMVNEFSKRRDFIVGALNAIDGIKCFSPEGAFYVFPNVSGVYERAFQGKKITNSAEFIDFLLDEANVAAVPGAAFGSDDHIRLSYATSMKNIEEGIRRIKNAVSKLD

SEQ ID NO: 33931 - protein, 291 aa, Helianthus annuus
FCPEAASLLLHNFCIYHISPPGHELGAAAICPDDPILSVEDLCDQILEVLNYFRLGAVMCMGAMAGAYILTLFATKYRDRVTGLILVSPLCKAPSWTEWFYNKLMSNLLYYYGMCGLLKECLLQRYFSKEVRGNPEIPESDIVQSCRKLLDERQSVNVWRYLQAIDKRPDITEGLKKLKCRTLIFVGDSSPFHSEALHMMGKLDRRYSALVEVQACGSMVTEEQPHAMLIPMEYFLMGYGLYRPSPFTGSPRSPLSPSCISPELLSPESMGLKLKPIKTRVSSPDSNNIER

SEQ ID NO: 33932 - protein, 299 aa, Helianthus annuus
FCPEAASLLLHNFCIYHISPPGHELGAAAICPDDPILSVEDLCDQILEVLNYFRLGAVMCMGAMAGAYILTLFATKYRDRVTGLILVSPLCKAPSWTEWFYNKLMSNLLYYYGMCGLLKECLLQRYFSKEVRGNPEIPESDIVQSCRKLLDERQSVNVWRYLQAIDKRPDITEGLKKLKCRTLIFVGDSSPFHSEALHMMGKLDRRYSALVEVQACGSMVTEEQPHAMLIPMEYFLMGYGLYRPSPFTGSPRSPLSPSCISPELLSPESMGLKLKPIKTRVSSPDSNNIERLSMICLFV

SEQ ID NO: 33933 - protein, 291 aa, Helianthus annuus
FCPEAASLLLHNFCIYHISPPGHELGAAAICSDDPILSVDDLCDQILEVLNYFRLGSVMCMGAMAGAYILTLFAIKYRDRVTGLILVSPLYKAPSWTEWLYNKFMSNLLYYYGMCGLLKECLLQRYFSKEVRGNPEIPESDIVQCCRKLLDERQSVNVWRYLQAIDKRPDITEGLKKLKCRTLIFVGDSSPFHSEALHMTGKLDRRYSALVEVQVCGSLVTEEQPRAMLIPMEYFLMGYGLYRPSPITGSPRSPLSPSCIAPKLLSPESMGLKLKPIKTRGSPPDSSTLMW

SEQ ID NO: 33934 - protein, 495 aa, Artemisia annua
MKSILKAMALSLTTSIALATILLFVYKFATRSKSTKKSLPEPWRLPIIGHMHHLIGTTPHRGVRDLARKYGSLMHLQLGEVPTIVVSSPKWAKEILTTYDITFANRPETLTGEIVLYHNTDVVLAPYGEYWRQLRKICTLELLSVKKVKSFQSLREEECWNLVQEIKASGSGRPVNLSENVFKLIATILSRAAFGKGIKDQKELTEIVKEILRQTGGFDVADIFPSKKFLHHLSGKRARLTSLRKKIDNLIDNLVAEHTVNTSSKTNETLLDVLLRLKDSAEFPLTSDNIKAIILDMFGAGTDTSSSTIEWAISELIKCPKAMEKVQAELRKALNGKEKIHEEDIQELSYLNMVIKETLRLHPPLPLVLPRECRQPVNLAGYNIPNKTKLIVNVFAINRDPEYWKDAEAFIPERFENSSATVMGAEYEYLPFGAGRRMCPGAALGLANVQLPLANILYHFNWKLPNGVSYDQIDMTESSGATMQRKTELLLVPSF

SEQ ID NO: 33935 - protein, 506 aa, Prunus mume
MASTFSHISLSLLSLVLLAFFSAAFPNNGPLQLSSTPKLQAEKFIRGLNLFPTDEINTVPHKTSLDEAFAGPMLVEKQFKMPFLGAASGPSVQELGHHAGYYRLPNSKAARMFYLFFESRTDKNNPVVMWLTGGPGCGSEIAVFYENGPFQIANNLSLAWNDYGWDKASNLLFVDQPIGNGFSYTSDEGDIRHDEEGISNDLYDFLQAFFAQHPQFAKNDFYITGESYAGHYIPAFGSRIHKGNKAKEGMYINFKGFAIGNGLTNPEIQYKAYPDFALQTGLIKKADYDRISKTIPDCEQAIKTCGSEGGEACASSYEVCNSIFEKIINIIGGTNYYDIRKQCEGDMCYDFSNMETFLKKKQVRDALGVGDIDFVSCSSTVYDAMLMDWMRNLEVGIPALLEDGIKVLLYAGEYDLICNWLGNSKWVHAMEWSGQKAFGASSTVPFKVGATEAGLLKSHGPLTFLKVHNAGHMVPMDQPEAALQMLTSWMQGKLAIAESVERIAPK

SEQ ID NO: 33936 - protein, 295 aa, Prunus mume
MSSSDLQLPPGFRFHPTDEELVKHYLCRKCQSQPISVPIIAEIDLYKYNPWDLPGLALYGEKEWYFFSPRDRKYPNGSRPNRAAGSGYWKATGADKPIGSPKPVGIKKALVFYAGKAPRGEKTNWIMHEYRLADVDRSPRKKSSSLRLDDWVLCRIYNKKGTVEKQQQQQQQQQQQTTSRMSSGSEFEDRKPENLACPPPPAAVAPTRPNDYVYFDTSDSVPRLHTDSSCSEHVVSPEFTCEVQSEPKWKEWEKALDFNYNYMDTSVENGFGPQFQSANQMSPLQDIFMYLQKPY

SEQ ID NO: 33937 - protein, 508 aa, Coffea canephora
MALLLILLPVAFIFLAYSLYERLRFKLPPGPRPKPVVGNIYDIKPVRFKCYAEWSKLYGPIFSVYFGSQLNTVVDTAELAKEVLKDNDQQLADRYRSRPSARMSRNGQDLIWADYGPHYVKVRKLCNLELFTPKRLEGLRPLREDEVTAMVDSIFKDCTIPENKGKSLLMRNYLGSVAFNNITRLTFGKRFMNSEGVVDEQGQEFKGIVSNGIRIGAKLSVADHIPWLRWMFVGENEDLDKHNARRDKLTRMIMEEHTLARQKSGNTKQHFVDALITLQKQYELSDDTVIGLLWDMITAGMDTTTISVEWAMAELVKNPRVQHKAQEELDRVIGSDRIMTEADFAKLPYLQCVAKEALRLHPPTPLMLPHRANANVKIGGYDIPKGSIVHVNVWAIARDPAAWKNPLEFRPERFLEEDVDIKGHDYRLLPFGAGRRICPGAQLALNLVTSMLGHLLHHFTWSPPTGVSPEEIDLEESPGTVTYMRTPLQAVATPRLPAHLYNRVPVEL

SEQ ID NO: 33938 - protein, 508 aa, Coffea canephora
MALFLLLLTFIFILPPYYLYQKLRFKLPPGPRPLPVVGNLYDIKPVRFRCFADWSRAYGPIISVWFGSTLNVVVSNAELAKEVLKENDQQLSDRHRSRSAAKFSREGQDLIWADYGPHYVKVRKVCTLELFSPKRLEALKPIREDEVTAMVESIYKDCTLREGSGQSLLVKKYLGTVAFNNITRLAFGKRFVNSEGVMDEQGKEFKEITANGLKLGASLAMAEHIPWLRWLFPLDEAAFAKHGARRDRLTRAIMEEHRLAREKSGGAKQHFVDALLTLKDKYDLSEDTIIGLLWDMITAGMDTTAISVEWAMAEVIKNPRVQQKVQEELDQVIGYERVMIETDFSNLPYLQSVAKESLRLHPPTPLMLPHRSNASVKIGGYDIPKGSNVHVNVWAVARDPAVWRNPLEFRPERFLEEDVDMKGHDFRLLPFGAGRRVCPGAQLGINLVTSMLGHLLHHFNWAPPHGLSPDEIDMGESPGLVTYMRTALRAVPTPRLPSHLYERVAVDM

SEQ ID NO: 33939 - protein, 220 aa, Antirrhinum majus
MEKNCRGVRKGTWTKEEDTLLRQCIEEYGEGKWHQVPHRAGLNRCRKSCRLRWLNYLRPNIKRGRFSRDEVDLIVRLHKLLGNKWSLIAGRIPGRTANDVKNFWNTHVGKNLGEDGERCRKNVMNTKTIKLTNIVRPRARTFTGLHVTWPREVGKTDEFSNVRLTTDEIPDCEKQTQFYNDVASPQDEVEDCIQWWSKLLETTEDGELGNLFEEAQQIGN

SEQ ID NO: 33940 - protein, 224 aa, Antirrhinum majus
MQKNPRGVRKGTWTKEEDILLMECIDKYGEGKWHQVPLKAGLNRCRKSCRLRWLNYLRPNIKRGCFSKDEVDLIVRLHKLLGNKWSLIAGRIPGRTANDVKNFWNTHVGKNLGVDGERRKKNVMNTKNSKETNIIRPRARTFNGLHVTWPREHGKNDAFSNVRITSTTENLDYEKQKPFHNNVASTPEEVDESIRWWSNLLETTEDELENLFEDVQQTGKMSEW

SEQ ID NO: 33941 - protein, 194 aa, Antirrhinum majus
MGNNPLGVRKGTWTKEEDILLKQCIEKYGEGKWHQVPIRAGLNRCRKSCRMRWLNYLSPNIKRGSFTRDEVDLIVRLHKLLGNRWSLIAGRLPGRTGNDVKNFWNTHFEKKSGERENTENINPKLINSSNIIKPQPRTFLKLRPKETKKQKNIRNVCTANDDKQQPLSTSGQLEEVNERIRWWSELLDFADYVD

SEQ ID NO: 33942 - protein, 227 aa, Plantago major
VLKCSLRTLPDGGAERLYGLAPVCEFLTKNQDGVSMAPLLLMNQDKILMESWYHVKDAVLDGGIPFNKAYGMTAFDYHGTDPRFNKVFNQGMSNHSTIIMKKILETYDGFEGLNSVVDVGGGTGATLSMILSKYPSIKGINFDLPHVIEDAPSYAGVEHVGGDMFVSVPEGDAIFMKWICHDWSDAHCLKFLKNCYKALPENGKVILAECILPEVPNSELATQNVVH

SEQ ID NO: 33943 - protein, 425 aa, Agaricus bisporus
MPENKGRVLLAYSGGLDTSCILAWLIEEGYEVYAFMADVGQEEDYAAAEQKALKVGAKKFFLADLKREFVTELIYPAVQANCIYENVYLLGTSLARPVIARGMIEVADKEGCDYVSHGCTGKGNDQVRFELAFYGLKPDIKVIAPWRIPEFYNRFAGRQALLQYAAEQNIPVQQTVAKPWSTDENLFHISYEAGILEDPNVTPPDDMWKLTTAPEDAPTSPERIILEFQNGLPTKVIVPEQQKEYTDAVEIFTALNTLARKHGIGRIDIVENRFIGVKSRGCYESPGATILRVAHMDLEGLTLDRNVRALRDQFTTIALSRILYNGHYFSPEREFVTSSIPSSQRTVNGIVRLKLYKGNTIVEGRESSEGLYDAAQSSMDELGGFEPTDTTGFISIESIRLKKWAQSKAAKGQSGVTAKDVYGSS

SEQ ID NO: 33944 - protein, 243 aa, Malus x domestica
MEGYNENLSVRKGAWTREEDNLLRQCVEIHGEGKWNQVSYKAGLNRCRKSCRLRWLNYLKPNIKRGDFKEDEVDLIIRLHRLLGNRWSLIARRLPGRTANAVKNYWNTRLRIDSRMKTVKNKSQEMRETNVIRPQPQKFNRSSYYLSSKEPILDHIQSAEDLSTPPQTSSSTKNGNDWWETLLEGEDTFERAAYPSIELEEELFTSFWFDDRLSPRSCANFPEGHSRSEFSFSTDLWNHSKEE

SEQ ID NO: 33945 - protein, 292 aa, Malus x domestica
MSTNTKTLSSNYSGEDDSELRRGQWILEEDSLLIQYIERHGEGQWNLLAKRSGLRRTGKSCRLRWLNYLKPDVKRGNLSPEEQLLILDLHSKMGNRWSKIARYLPGRTDNEIKNYWRTRVHKQARHLNIDTKSREFQNMIRCYWMPRLKQKIGRETSISSAVLNQNPTISQPRENNTFQHFTATISPPPQILVQEEINMSGTMYNLDVEKQNTEADYCRSSFIFPSEPMDMSKTAQFPECPPFYCGDNNGYDMESFNLQESVSADSAPNFPGNSAGDCYVAENNWFDSDFFM

SEQ ID NO: 33946 - protein, 476 aa, uncultured archaeon
MREVGREKRMRVVMKFGGTAVANGEKIKTAANLVMRSKEAAENMEIVVVTSAIYAVTDTIYEQANRIAEEGKVEKVKEFVEELQEKHNKIAYWAIDNVQVLEKVKGEIKERMAEMEKALVGICLLGELTLRSLDYIGSFGERLAAPILAGAIQSAGIDAVHFTGGDVGIITNAEYGSAKLMEGVEQEVRARIMPLLGDKIPVVCGFTGETKDEKITTLGRGGSDYTATIIGAAIDADEIWLWKDTEGIMSADPKRIKNARKIPYISYIEAMELSYFGAAVLHPRAIEPVMEKKIPIRVKNLLNPDDEGTLIGEEQEKTKKAAKAITLIENTSIVNIAGTGIGSISDVASRIFSVLAAKNVDIIMISHGSSERTLSLVIDSAQLERAIDAIQSIHAVDTVIRDISYNSNVCTVGVVGVGMAGTVGVAGKVFSALGNEGISVKMISQGSSEFNISFVVQKEEAYKAAQAIHDVFEMGS

SEQ ID NO: 33947 - protein, 399 aa, uncultured archaeon
MFFFIWEESVKMLSKRLSRIEESATIKMGQIAKKLQEEGKEVLSFTLGEPDFKTPEHICEAAKHALDLGYTHYTSSAGIDELREKIAKKTTEENKVDCAMENVIVTPGAKQAIYELMMSVLDYGDEVILLDPAWVTFEAAVKLAGGTPKWVKRIEEEVKYESLEAASSENTKLIVINSPNNPAGYVLSENELKEIAEFAVEHDLLVLSDEIYEKILYGRRHISIASFDSMQERTVIINGLSKTYAMTGWRIGYAVAPTAIQKGMLKIQQHSVSCASSIAQYAALAAFEESQECVNEMVAEFERRRDVIVKRLNNVGLRCLDPEGAFYAFVNTSNYGNGAEFTERLLKDAYVVVTPGSAFGAAGKDYIRFSFAASMENILAGMDRIEAMCTLPSSSKYSR

SEQ ID NO: 33948 - protein, 250 aa, Vitis vinifera
MESLGVRKGAWIQEEDVLLRKCIEKYGEGKWHLVPLRAGLNRCRKSCRLRWLNYLKPDIKRGEFALDEVDLMIRLHNLLGNRWSLIAGRLPGRTANDVKNYWHGHHLKKKVQFQEEGRNKPLTHSKTKAIKPHPHKFSKALPRFELKTTAVDTFDTQVSTSSKPSSTSPQPNDDIIWWESLLAEHAQMDQETDFSASGEVLIASLWTEETATQTKGPMDGMVEQIQGGEGDFPFDVGFWDFPNTEVNHLI

SEQ ID NO: 33949 - protein, 247 aa, Vitis vinifera
MESLGVRKGAWIQEEDVLLRKCIEKYGEGKWHLVPLRAGLNRCRKSCRLRWLNYLKPDIKRGEFALDEVDLMIRLHNLLGNRWSLIAGRLPGRTANDVKNYWHGHHLKKKVQFQEEGRNKPLTHSKTKAIKPHPHKFSKALPRFELKTTAVDTFDTQVSTSSKPPSTSPQPNDDIIWWESLLAELDQETDFSASGEMLIASLRAEETATQKKGPMDGMIEQIQGGEGDFPFDVGFWDTPNTQVNHLI

SEQ ID NO: 33950 - protein, 247 aa, Vitis vinifera
MESLGVRKGAWIQEEDVLLRKCIEKYGEGKWHLVPLRAGLNRCRKSCRLRWLNYLKPDIKRGEFALDEVDLMIRLHNLLGNRWSLIAGRLPGRTANDVKNYWHGHHLKKKVQFQEEGRNKPLTHSKTKAIKPHPHKFSKALPKFELKTTAVDTFDTQVSTSSKPSSTSPQPNDDIIWWESLLAELDQDTDFSASGEMLIASLWTEETATQTKGPMDGMVEQIQGGEGDFPFDVGFWDFPNTEVNHLI

SEQ ID NO: 33951 - protein, 250 aa, Vitis vinifera
MESLGVRKGAWIQEEDVLLRKCIEKYGEGKWHLVPLRAGLNRCRKSCRLRWLNYLKPDIKRGEFALDEVDLMIRLHNLLGNRWSLIAGRLPGRTANDVKNYWHSHHFKKEVQFQEEGRDKPQTHSKTKAIKPHPHKFSKALPRFELKTTAVDTFDTQVSTSSKPSSTSPQPNDDIMWWESLLAEHAQMDQETDFSASGDVLIASLWTEETATQKKGPMDGMIEQIQRGEGDFPFDVGFWDTPNTQVNHLI

SEQ ID NO: 33952 - protein, 307 aa, Vitis vinifera
MESLGVRKGAWIQEEDVLLRKCIEKYGEGKWHLVPLRAGLNRCRKSCRLRWLNYLKPDIKRGEFALDEVDLMIRLHNLLGNRWSLIAGRLPGRTANDVKNYWHGHHLKKKVQFQEEGRDKPQTHSKTKAIKPHPHKFSKALPKFELKTTAVDTFDTQVSTSSKPSSTSPQPNDDIICWESLLAEHAQMDQETDFSASGEMLIASLRTEETATQKKGPMDGMIEQIQGGEGDIIWWESLLAEHAQMDQETDFSASGEMLIASLRTEETATQKKGPMDGMIEQIQGGEGDFPFDVGFWDTPNTQVNHLI

SEQ ID NO: 33953 - protein, 250 aa, Vitis vinifera
MESLGVRKGAWIQEEDVLLRKCIEKYGEGKWHLVPLRAGLNRCRKSCRLRWLNYLKPDIKRGEFALDEVDLMIRLHNLLGNRWSLIAGRLPGRTANDVKNYWHSHHFKKEVQFQEEGRDKPQTHSKTKAIKPHPHKFSKALPRFELKTTAVDTFDTQVSTSSKPSSTSPQRNDDIIWWESLLAEHAPMDQETDFSASGEMLIASLRTEETATQKKGPMDGMIEQIQGGEGDFPFDVGFWDTPNTQVNHLI

SEQ ID NO: 33954 - protein, 158 aa, Vitis vinifera
MESLGVRKGAWIQEEDILLRKCIEKYGEGKWHLVPLRAGLNRCRKSCRLRWLNYLKPDIKRGEFALDEVDLMIRLHNLLGNRWSLIAGRLPGRTANDVKNYWHGHHLKKKVQFQEEGRDKPQTHSKTKAIKSRKPLDRRNCNTDKGTHGWYGRTNPGR

SEQ ID NO: 33955 - protein, 158 aa, Vitis vinifera
MESLGVRKGAWTQEEDVLLRKCIEKYGEGKWHLVPLRAGLNRCRKSCRLRWLNYLKPDIKRGEFALDEVDLMIRLHNLLGNRWSLIAGRLPGRTANDVKNYWHSHHFKKEVQFQEEGRDRPQTHSKTKAIKSRKPLDRRNCNTDKGTHGWYGRTNPGR

SEQ ID NO: 33956 - protein, 181 aa, Misopates orontium
MAAKVSSDPLVIGRVIGDVVDHFTSSVKMSVIYNANNSVKHVYNGHELFPSAVTSTPRVEVHGGDMRSFFTLIMTDPDVPGPSDPYLREHLHWIVTDIPGTTDSSFGKEVVSYEMPRPNIGIHRFVFLLFKQKKRGQAIMSPPLVTRDGFNTRKFTQENELGLPVAAVFFNCQRETAARRR

SEQ ID NO: 33957 - protein, 240 aa, Asparagus officinalis
MDQPDLSQVGPVGLTQLSPLQIQQIQAQIQLNHQHQLMVSRTLQARNYHNTLGVKPQPMKLQASVAAPQSKPTKLYRGVRQRHWGKWVAEIRLPKNRTRLWLGTFDTAEEAALAYDKAAYKLRGDYARLNFPNLKHTHLAGNPLHSSVDAKLEAICQTLESPGKKKVSTGSKPEPVVSSPTVETEEESSSSSSVTGATNSPVSEIESLDFNEVPWDETEDFVLRKYPSYEIDWDSILSSA

SEQ ID NO: 33958 - protein, 678 aa, Boechera stricta
MSVAVKDLSAASSSSSPAIPVKVIPLQHPDSTSSDPRCHSIPFNNFFSRWTAKIKRMTFFDWMDTIFPCFLWIRTYRWHQYFKLDLMAGITVGIMLVPQAMSYARLAGLQPIYGLYSSFVPVLVYAVFGSSRQLAVGPVALVSLLVSNALGGIVDPSEELYTELAILLALLVGIFECIMGFLRLGWLIRFISHSVISGFTTASAVVIGLSQLKYFLGYSVSRSSKIVPLIESIIAGADQFKWPPFLLGSTILVILLVMKHVGKAKKELQFVRAAGPLTGLALGTTIAKMFHPPSISLVGDIPQGLPEFSFPKSFDHATLLLPTAALITGVAILESVGIAKALAAKNRYELDSNSELFGLGVANIFGSLFSAYPTTGSFSRSAVNSESEAKTGLSSLITGTIIGCSLLFLTPMFKYIPQCALAAIVISAVSGLVDYEGPIFLWRVDKRDFTLWTITSTTTLFFGIEIGVLIGVGFSLAFVIHESANPHIAVLGRLPGTTVYRNVKQYPEAYTYNGIVIVRIDAPIYFANISYIKDRLREYEVAIDKHINKGPDVERIYFVILEMSPVTYIDSSAVEALKDLNEEYKTRDIQVAISNPNKEVLLTLARSSIVELIGKEWFFVRVHDAVQVCLHYVETPTNVEESSNSSLWRRSGANTNLVLKEPLLSREIRHSTSRFFSQ

SEQ ID NO: 33959 - protein, 185 aa, Boechera stricta
MLDSGIPHADDVTNSGNLVDSNLELVPYQSDISVDEPSSDSKALVPLPALEVKALAIVPLNQKPKRTELAQRRTRRPFSVTEVEALVQAVEELGTGRWRDVKLRAFENADHRTYVDLKDKWKTLVHTASISPQQRRGEPVPQELLDRVLRAYVYWSQHQGKHQARGASKDPDMNRGRALESGVAV

SEQ ID NO: 33960 - protein, 114 aa, Pseudoroegneria spicata
KTRPCKVVEVSTSKTGKHGHAKCHFVAIDIFNGKKLEDIVPSSHNCDVPHVTRLDFQLIDITDDGYVSLLTESGSTKDDLKLPTDDALLAQIKAGFADGKDLILSVMSAMGEEQ

SEQ ID NO: 33961 - protein, 114 aa, Lophopyrum elongatum
KGRPCKVVEVSTSKTGKHGHAKCHFVAIDIFNGKKLEDIVPSSHNCDVPHVDRQDYQLIDITDDGYVSLLTESGNTKDDLKLPTDDVLLGQIKTGFADGKDLILSVMSAMGEEQ

SEQ ID NO: 33962 - protein, 114 aa, Eremopyrum bonaepartis
KARPCKVVEVSTSKTGKHGHAKCHFVAIDIFNGKKLEDIVPSSHNCDVPHVDRQDYQLIDITDDGYVSLLTESGNTKDDLKLPTDDVLLGQIKTGFADGKDLILSVMSAMGEEQ

SEQ ID NO: 33963 - protein, 114 aa, Secale cereale
KARPCKVVEVSTSKTGKHGHAKCHFVAIDIFNGKKLEDIVPSSHNCDVPHVDRQDYQLIDITDDGYVSLLTESGDTKDDLKLPTDDVLLGQIKTGFADGKDLILSVMSAMGEEQ

SEQ ID NO: 33964 - protein, 114 aa, Psathyrostachys juncea
KGRPCKVVEVSTSKTGKHGHAKCHFVAIDIFNGKKLEDIVPSSHNCDVPHVDRQDYQLIDITDDGYVSLLTESGSTKDDLKLPTDDALLAQIETGFADGKDLILSVMSAMGEEQ

SEQ ID NO: 33965 - protein, 114 aa, Crithopsis delileana
KSRPCKVVEVSTSKTGKHGHAKCHFVAIDIFNGKKLEDIVPSSHNCDVPHVTRLDYQLIDITDDGYVSLLTESGNTKDDLKLPTDDALLAQIKAGFADGKDLILSVMSAMGEEQ

SEQ ID NO: 33966 - protein, 256 aa, Impatiens balsamina
MADLPSESMELLDISGQRKNGRGKIEIKRIENTTNRQVTFCKRRNGLLKKAYELSVLCDAEVALVVFSSRGRLYEYANNSVRGTIERYKKASSDTPNTAGSVAEANAQFYQQESSKLRQQIGNLQNSNRQILGESLSSMNLRDLKSLESRLERSISKIRSKKNELLFAEIDFMQKREVDLHNNNQFLRAKISESERAQQQQQHQQTQINLMPGGSNYELVQSQAQTSFDNRNFFQVTALQPDNQYSRDDQTPFQLV

SEQ ID NO: 33967 - protein, 166 aa, Aquilegia formosa
MAASVDPLVVGKVIGDVVDMFIPTINMSVYYGSKHVTNGCDIKPSLATAPPTVHISGFSDELYTLVMSDPDAPSPSEPTKREWLHWIVVNIPGAGYVTRGKEVLPYMGPAPPVGIHRYALLLFRQKNPLSIDNPPLRANFKTRNFAHQFDLGLPVACAYFNAQKEL

SEQ ID NO: 33968 - protein, 145 aa, Nicotiana plumbaginifolia
GASKTYPQQAGTIRKNGHIVIKNRPCKVVEVSTSKTGKHGHAKCHFVAIDIFTGKKLEDIVPSSHNCDVPHVNRTDYQLIDISEDGFVSLLTENGNTKDDLRLPTDDNLLALIKDGFAEGKDLVLSVMSAMGEEQICGIKDVGPK

SEQ ID NO: 33969 - protein, 373 aa, Pisum sativum
TINRVEDLLNLDITPFTDSIIAEYIWIGGTGIDVRSKSRTISKPVSHPSEVPKWNYDGSSTGQAPGEDSEVILYPQAIFKDPFRGGNNILVVCDAYTPAGEPIPTNKRHRAAEIFSNPKVEAEIPWYGIEQEYTLLQTNVKWPLGWPVGGYPGPQGPYYCAAGADKSFGRDISDAHYKACIYAGINISGTNGEVMPGQWEYQVGPSVGIEAGDHIWASRYILERITEQAGVVLTLDPKPIEGDWNGAGCHTNYSTKSMREDGGFEVIKKAILNLSLRHKIHIEAYGEGNERRLTGKHETASINDFSWGVANRGCSIRVGRDTEKNGKGYLEDRRPASNMDPYVVTALLAESTLLWEPTLEAEALAAQKIALKV

SEQ ID NO: 33970 - protein, 259 aa, Pisum sativum
AGEPIPTNKRHAAAKVFSHPDVVAEETWYGIEQEYTLLQKDINWPLGWPAGGYPGPQGPYYCSVGADKAFGRDVVEAHYKACLFAGINISGINGEVMPGQWEFQVGPSVGISAGDEIWVARYILERITEVAGVVLTFDPKPIKGDWNGAGAHTNYSTKSMREDGGYEIIKKAIEKLGKRLPEHISAYGEGNERRLTGKHETADINTFSWGVANRGASVRVGRDTEKEGKGYFEDRRPASNMDPYVVTSMIAETTILLKP

SEQ ID NO: 33971 - protein, 155 aa, Codonopsis lanceolata
MALIPSIFGGRRSNVFDPFSHDIWDPFQGLSSALANARDQETAAIANTRIDWKETPEAHVFKADLPGLKKEEIKVEVEDGRVLQISGERSKEQEEKTDTWHRVERSVGKFHRRFRLPENAKVDQVTASMENGVLTVTVPKKEEKKPEVKAIDISG

SEQ ID NO: 33972 - protein, 1300 aa, Brassica rapa
MQGLELLPEPSSNSNSNSRNPETELQEHPPEMGNGGGTPPPPPPATVEEPKKAEIRGVAFKELFRFADGLDYVLMTIGSVGAFVHGCSLPLFLRFFADLVNSFGSNANNVDKMMQEVLKYALYFLVVGAAIWASSWAEISCWMWTGERQTTKMRIKYLEAALNQDIQFFDTEVRTSDVVSAINTDAVMVQDAISEKLGNFIHYMALVTIAVVPLIAVIGGIHTTTLSKLSNKSQESLSQAGNIVEQTVVQIRVVMAFVGESRASQAYSSALKTAQKLGYKTGFAKGMGLGATYFVVFCCYALLLWYGGYLVRHHLTNGGLAIATMFAVMIGGLGLGQSVPSMAAFAKAKVAAAKIFRIIDHKPTIERNSESGVELESVTGLVELKNVDFSYPSRPDVKILNDFTLSVPAGKTIALVGSSGSGKSTVVSLIERFYDPTSGQVLLDGHDLKTLKLKWLRQQIGLVSQEPALFATSIKENILLGRPDADQVEVEEAARVANAHSFIIKLPDGFDTQVGERGLQLSGGQKQRIAIARAMLKNPAILLLDEATSALDSESEKLVQEALDRFMIGRTTLIIAHRLSTIRKADLVAVLQQGSVSEIGTHDELFAKGENGIYSKLIKMQEAAHETAMNNARKSSARPSSARNSVSSPIIARNSSYGRSPYSRRLSDFSTTDFSLSVEASSYPNYRHDKLPFKDQANSFWRLAKMNSPEWKYALVGSVGSVICGSLSAFFAYVLSAVLSIYYNPDHNYMIKQIDKYCYLLIGLSSAALIFNTLQHSFWDIVGENLTKRVREKMLTAVLKNEMAWFDQEENESARISARLALDANNVRSAIGDRISVIVQNTALMLVACTAGFVLQWRLALVLVAVFPVVVAATVLQKMFMTGFSGDLEAAHAKGTQLAGEAIANVRTVAAFNSEAKIVRLYTANLEPPLKRCFWKGQIAGSGYGVAQFCLYASYALGLWYASWLVKHGISDFSKTIRVFMVLMVSANGAAETLTLAPDFIKGGQAMRSVFELLDRKTEIEPDDLDTTPVPDRLRGEVELKHIDFSYPSRPDIQVFRDLSLRARAGKTLALVGPSGCGKSSVISLIQRFYEPSSGRVLIDGKDIRKYNLKAIRKHIAIVPQEPCLFGTTIYENIAYGHECATEAEIIQAATLASAHKFISALPDGYKTYVGERGVQLSGGQKQRIAIARALVRKAEIMLLDEATSALDAESERSVQEALDQACSGRTSIVVAHRLSTIRNAHVIAVIDDGKVVEQGSHSHLLKNYPDGIYARMIQLQRFTHTQVIGMTSGSSSRVKEDDA

SEQ ID NO: 33973 - protein, 178 aa, Hordeum vulgare subsp. vulgare
MVGSSMQRGDPLVVGRVIGDVVDPFVRRVALRVGYASRDVANGCELRPSAIADQPRVEVGGPDMRTFYTLVMVDPDAPSPSDPSLREYLHWLVTDIPATTGVSFGTEVVCYEGPRPVLGIHRLVFLLFQQLGRQTVYAPGWRQNFSTRDFAELYNLGLPVAAVYFNCQRETGTGGRRM

SEQ ID NO: 33974 - protein, 206 aa, Thermoplasma acidophilum
VDQVDRVTKMVFSDGKIPIMLGGEHSITVGAVRNLPEDVHMVIVDAHSDFRDSYMGNKLNHACVTKRALEILGPNRITSIGTRSVSLEEYQDPDFEKVEFIPSFSVREYGIERFINDIERRPGRVYISIDMDGIDPAYAPAVGTPEPFGLTDYEVRRLVERLSYKAIGMDINEFSPLYDNGNTSMLAGKLIQVFIASREKYRIEHI

SEQ ID NO: 33975 - protein, 642 aa, Monochoria vaginalis
MAASKPSPFPSSASSSRLLLHPFSKPLHPSPKLQRQQRIFVPLVTSSTTVAAPDAVFPPRRNFSPDEPRKGADILVEALEREGVTDLFAYPGGASMEIHQALTRSPSITNHLLRHEQGEAFAASGYARSTGRPGVCIATSGPGATNLVSALADALLDSIPMVAITGQVPRRMIGTDAFQETPIVEVTRSITKHNYLVLDVDDIPRIIKEAFFIATSGRPGPVLVDIPKDIQQQLAVPVWNPPVRLPGYVSRLPKPPALHLLQQIVRIVSESSRPVLYVGGGSLHASEELRRFADLTGIPIASTLMGIGVYPLDGPLSLKMLGMHGTVYANYAIDKADLLLAFGVRFDDRVTGKLEAFASRAKIVHIDIDPAEIGKNKQPHVSICGDIKLALQEMNEMIEESGIHNKLDFSAWREELDQQKKNYPLEYKTFGDLIPPQHAIELLEELTNGEAIITTGVGQHQMWAAQYYSYKRPRQWLTSAGLGAMGFGLPAAVGAAVGNPGVMVVDIDGDGSFQMNAQELAIIRIENLDVKMLILNNQHLGMVVQWEDRFYKSNRAHTYLGNPANESKVFPDFVKLAESYDIPAARVSKKSEVRDAIRKMIQTPGPYLLDVIVPHEEHVLPMIPSGGAFKDMILDGDGRTVH

SEQ ID NO: 33976 - protein, 642 aa, Monochoria vaginalis
MAASKPSPFPSSASSSRLLLHPFSKPLHPSPKLQRQQRIFVPLVTSSTTVAAPDAVFPPRRNFAPDEPRKGADILVEALEREGVTDLFAYPGGASMEIHQALTRSPSITNHLLRHEQGEAFAASGYARSTGRPGVCIATSGPGATNLVSALADALLDSIPMVAITGQVLRRMIGTDAFQETPIVEVTRSITKHNYLVLDVDDIPRIIKEAFFIATSGRPGPVLVDIPKDIQQQLAVPVWNPPVRLPGYVSRLPKPPALHLLQQIVRIVSESSRPVLYVGGGSLHASEELRRFADLTGIPIASTLMGIGVYPLDGPLSLKMLGMHGTVYANYAIDKADLLLAFGVRFDDRVTGKLEAFASRAKIVHIDIDPAEIGKNKQPHVSICGDIKLALQEMNEMIEESGIHNKLDFSAWREELDQQKKNYPLEYKTFGDLIPPQHAIELLEELTNGEAIITTGVGQHQMWAAQYYSYKRPRQWLTSAGLGAMGFGLPAAVGAAVGNPGVMVVDIDGDGSFQMNAQELAIIRIENLDVKMLILNNQHLGMVVQWEDRFYKSNRAHTYLGNPANESKVFPDFVKLAESYDIPAARVSKKSEVRDAIRKMIQTPGPYLLDVIVPHEEHVLPMIPSGGAFKDMILDGDGRTVH

SEQ ID NO: 33977 - protein, 642 aa, Monochoria vaginalis
MAASKPSPFPSSASSSRLLLHPFSKPLHPSPKLQRQQRIFVPLVTSSTTVAAPDAVFPPRRNFAPDEPRKGADILVEALEREGVTDLFAYPGGASMEIHQALTRSPSITNHLLRHEQGEAFAASGYARSTGRPGVCIATSGPGATNLVSALADALLDSIPMVAITGQVPRRMIGTDAFQETPIVEVTRSITKHNYLVLDVDDIPRIIKEAFFIATSGRPGPVLVDIPKDIQQQLAVPVWNPPVRLPGYVSRLPKPPALHLLQQIVRIVSESSRPVLYVGGGSLHASEELRRFADLTGIPIASTLMGIGVYPLDGPLSLKMLGMHGTVYANYAIDKADLLLAFGVRFDDRVTGKLEAFASRAKIVHIDIDPAEIGKNKQPHVSICGDIKLALQEMNEMIEESGIHNKLDFSAWREELDQQKKNYPLEYKTFGDLIPPQHAIELLEELTNGEAIITTGVGQHQMWAAQYYSYKRPRQWLTSAGLGAMGFGLPAAVGAAVGNPGVMVVDIDGDGSFQMNAQELAIIRIENLDVKMLILNNQHLGMVVQWEDRFYKSNRAHTYLGNPANESKVFPDFVKLAESYDIPAARVSKKSEVRDAIRKMIQTPGPYLLDVIVPHEEHVLPMIPSGGAFKDMILDGDGRTVH

SEQ ID NO: 33978 - protein, 642 aa, Monochoria vaginalis
MAASKPSPFPSSASSSRLLLHPFSKPLHPSPKLQRQQRIFVPLVTSSTTVAAPDAVFPPRRNFAPDEPRKGADILVEALEREGVTDLFAYPGGASMEIHQALTRSPSITNHLLRHEQGEAFAASGYARSTGRPGVCIATSGPGATNLVSALADALLDSIPMVAITGQVSRRMIGTDAFQETPIVEVTRSITKHNYLVLDVDDIPRIIKEAFFIATSGRPGPVLVDIPKDIQQQLAVPVWNPPVRLPGYVSRLPKPPALHLLQQIVRIVSESSRPVLYVGGGSLHASEELRRFADLTGIPIASTLMGIGVYPLDGPLSLKMLGMHGTVYANYAIDKADLLLAFGVRFDDRVTGKLEAFASRAKIVHIDIDPAEIGKNKQPHVSICGDIKLALQEMNEMIEESGIHNKLDFSAWREELDQQKKNYPLEYKTFGDLIPPQHAIELLEELTNGEAIITTGVGQHQMWAAQYYSYKRPRQWLTSAGLGAMGFGLPAAVGAAVGNPGVMVVDIDGDGSFQMNAQELAIIRIENLDVKMLILNNQHLGMVVQWEDRFYKSNRAHTYLGNPANESKVFPDFVKLAESYDIPAARVSKKSEVRDAIRKMIQTPGPYLLDVIVPHEEHVLPMIPSGGAFKDMILDGDGRTVH

SEQ ID NO: 33979 - protein, 604 aa, Monochoria vaginalis
ILVPAVASSTTVAVPDAVTPPRRDFASDEPRKGADILVEALGREGVTDLFAYPGGASMEIHQALTRSPSITNHLLRHEQGEAFAASGYARSTGRPGVCIATSGPGATNLVSALADALLDSIPMVAITGQVPRRMIGTDAFQETPIVEVTRSITKHNYLVLDVDDIPRIIKEAFFIATSGRPGPVLVDIPKDIQQQLAVPVWDQPVRLPGYVSRLPKPPALHLLERIIRLVSASSHPVLYVGGGCLHASEELRRFADLTGIPIASTLMGLGVYPLDAHLSLKMLGMHGTVYANYSIDKADLLLAFGVRFDDRVTGKLEAFASRAKIVHIDIDPAEIGKNKQPHVSICADIKLALQEMNKIIEESGIYNKLNFSAWREELDQHKKNYPLNYKTFGDLIPPQYAIEVLDELTNGDAIITTGVGQHQMWAAQYYNYKRPRQWLTSAGLGAMGFGLPAAVGAAVGNPGVTVVDIDGDGSFQMNAQELAVIRIENLDVKMLILNNQHLGMVVQWEDRFYQSNRAHTYLGNPANESKVFPDFVKLADSYDIPASRVSKKSQVRDAIRKMLQTPGPYLLDVIVPHEEHVLPMIPSGGAFKDMILDGDGRTVH

SEQ ID NO: 33980 - protein, 604 aa, Monochoria vaginalis
ILVPAVASSTTVAVPDAVTPPRRDFASDEPRKGADILVEALEREGVTDLFAYPGGASMEIHQALTRSPSITNHLLRHEQGEAFAASGYARSTGRPGVCIATSGPGATNLVSALADALLDSIPMVAITGQVPRRMIGTDAFQETPIVEVTRSITKHNYLVLDVDDIPRIIKEAFFIATSGRPGPVLVDIPKDIQQQLAVPVWDQPVRLPGYVSRLPKPPALHLLERIIRLVSASSHPVLYVGGGCLHASEELRRFADLTGIPIASTLMGLGVYPLDAHLSLKMLGMHGTVYANYSIDKADLLLAFGVRFDDRVTGKLEAFASRAKIVHIDIDPAEIGKNKQPHVSICADIKLALQEMNKIIEESGIYNKLNFSAWREELDQHKKNYPLNYKTFGDLIPPQYAIEVLDELTNGDAIITTGVGQHQMWAAQYYNYKRPRQWLTSAGLGAMGFGLPAAVGAAVGNPGVTVVDIDGDGSFQMNAQELAVIRIENLDVKMLILNNQHLGMVVQWEDRFYQSNRAHTYLGNPANESKVFPDFVKLADSYDIPASRVSKKSQVRDAIRKMLQTPGPYLLDVIVPHEEHVLPMIPSGGAFKDMILDGDGRTVH

SEQ ID NO: 33981 - protein, 604 aa, Monochoria vaginalis
ILVPAVASSTTVAVPDAVTPPRRDFASDEPRKGADILVEALEREGVTDLFAYPGGASMEIHQALTRSPSITNHLLRHEQGEAFAASGYARSTGRPGVCIATSGPGATNLVSALADALLDSIPMVAITGQVPRRMIGTDAFQETPIVEVTRSITKHNYLVLDVDDIPRIIKEAFFIATSGRPGPVLVDIPKDIQQQLAVPVWDQPVRLPGYVSRLPKPPALHLLERIIRLVSASSHPVLYVGGGCLHASEGLRRFADLTGIPIASTLMGLGVYPLDAHLSLKMLGMHGTVYANYSIDKADLLLAFGVRFDDRVTGKLEAFASRAKIVHIDIDPAEIGKNKQPHVSICADIKLALQEMNKIIEESGIYNKLNFSAWREELDQHKKNYPLNYKTFGDLIPPQYAIEVLDELTNGDAIITTGVGQHQMWAAQYYNYKRPRQWLTSAGLGAMGFGLPAAVGAAVGNPGVTVVDIDGDGSFQMNAQELAVIRIENLDVKMLILNNQHLGMVVQWEDRFYQSNRAHTYLGNPANESKVFPDFVKLADSYDIPASRVSKKSQVRDAIRKMLQTPGPYLLDVIVPHEEHVLPMIPSGGAFKDMILDGDGRTVH

SEQ ID NO: 33982 - protein, 604 aa, Monochoria vaginalis
MLVPAVASSTTVAVPDAVTPPRRDFASDEPRKGADILVEALEREGVTDLFAYPGGASMEIHQALTRSPSITNHLLRHEQGEAFAASGYARSTGRPGVCIATSGPGATNLVSALADALLDSIPMVAITGQVPRRMIGTDAFQETPIVEVTRSITKHNYLVLDVDDIPRIIKEAFFIATSGRPGPVLVDIPKDIQQQLAVPVWDQPVRLPGYVSRLPKPPALHLLERIIRLVSASSHPVLYVGGGCLHASEGLRRFADLTGIPIASTLMGLGVYPLDAHLSLKMLGMHGTVYANYSIDKADLLLAFGVRFDDRVTGKLEAFASRAKIVHIDIDPAEIGKNKQPHVSICADIKLALQEMNKIIEESGIYNKLNFSAWREELDQHKKNYPLNYKTFGDLIPPQYAIEVLDELTNGDAIITTGVGQHQMWAAQYYNYKRPRQWLTSAGLGAMGFGLPAAVGAAVGNPGVTVVDIDGDGSFQMNAQELAVIRIENLDVKMLILNNQHLGMVVQWEDRFYQSNRAHTYLGNPANESKVFPDFVKLADSYDIPASRVSKKSQVRDAIRKMLQTPGPYLLDVIVPHEEHVLPMIPSGGAFKDMILDGDGRTVH

SEQ ID NO: 33983 - protein, 614 aa, Monochoria vaginalis
SKPLHPPPKLQRQQRIFAPLVTSSTTVAAPDAVFPPRRNFAPDEPRKGADILVEALEREGVTDLFAYPGGASMEIHQALTRSPSITNHLLRHEQGEAFAASGYARSTGRPGVCIATSGPGATNLVSALADALLDSIPMVAITGQVLRRMIGTDAFQETPIVEVTRSITKHNYLVLDVDDIPRIIKEAFFIATSGRPGPVLVDIPKDIQQQLAVPVWDPPVRLPGYVSRLPKPPALHLLQQIIRILSESSRPVLYVGGGSLHASEELRGFADLTGIPIASTLMGLGVYPLDGPLSLKMWGMHGTVYANYAIDKADLLLAFGVRFDDRVTGKLEAFASRAKIVHIDIDPAEIGKNKQPHVSICGDIKLALQEMNEMIEENGIHSKLDFSAWREELDQQKKNNPLKYKTFGDLIPPQHAIELLEELTNGEAIITTGVGQHQMWAAQYYNYKRPRQWLTSAGLGAMGFGLPAAVGAAVGNPGVVVVDIDGDGSFQMNAQELAIIRIENLDVKMLILNNQHLGMVVQWEDRFYQSNRAHTYLGNPANESKVFPDFVKLAESYDIPAARVSKKSEVRDAIRKMIQTPGPYLLDVIVPHEEHVLPMIPSGGAFKDMILDGD

SEQ ID NO: 33984 - protein, 614 aa, Monochoria vaginalis
SKPLHPPPKLQRQQRIFAPLVTSSTTVAAPDAVFPPRRNFAPDEPRKGADILVEALEREGVTDLFAYPGGASMEIHQALTRSPSITNHLLRHEQGEAFAASGYARSTGRPGVCIATSGPGATNLVSALADALLDSIPMVAITGQVPRRMIGTDAFQETPIVEVTRSITKHNYLVLDVDDIPRIIKEAFFIATSGRPGPVLVDIPKDIQQQLAVPVWDPPVRLPGYVSRLPKPPALHLLQQIIRILSESSRPVLYVGGGSLHASEELRRFADLTGIPIASTLMGLGVYPLDGPLSLKMLGMHGTVYANYAIDKADLLLAFGVRFDDRVTGKLEAFASRAKIVHIDIDPAEIGKNKQPHVSICGDIKLALQEMNEMIEENGIHSKLDFSAWREELDQQKKNYPLKYKTFGDLIPPQHAIELLEELTNGEAIITTGVGQHQMWAAQYYNYKRPRQWLTSAGLGAMGFGLPAAVGAAVGNPGVVVVDIDGDGSFQMNAQELAIIRIENLDVKMLILNNQHLGMVVQWEDRFYQSNRAHTYLGNPANESKVFPDFVKLAESYDIPAACVSKKSEVRDAIRKMIQTPGPYLLDVIVPHEEHVLPMIPSGGAFKDMILDGD

SEQ ID NO: 33985 - protein, 614 aa, Monochoria vaginalis
SKPLHPPPKLQRQQRIFAPLVTSSTTVAAPDAVFPPRRNFAPDEPRKGADILVEALEREGVTDLFAYPGGASMEIHQALTRSPSITNHLLRHEQGEAFAASGYARSTGRPGVCIATSGPGATNLVSALADALLDSIPMVAITGQVSRRMIGTDAFQETPIVEVTRSITKHNYLVLDVDDIPRIIKEAFFIATSGRPGPVLVDIPKDIQQQLAVPVWDPPVRLPGYVSRLPKPPALHLLQQIIRILSESSRPVLYVGGGSLHASEELRRFADLTGIPIASTLMGLGVYPLDGPLSLKMLGMHGTVYANYAIDKADLLLAFGVRFDDRVTGKLEAFASRAKIVHIDIDPAEIGKNKQPHVSICGDIKLALQEMNEMIEENGIHSKLDFSAWREELDQQKKNYPLKYKTFGDLIPPQHAIELLEELTNGEAIITTGVGQHQMWAAQYYNYKRARQWLTSAGLGAMGFGLPAAVGAAVGNPGVVVVDIDGDGSFQMNAQELAIIRIENLDVKMLILNNQHLGMVVQWEDRFYQSNRAHTYLGNPANESKVFPDFVKLAESYDIPAACVSKKSEVRDAIRKMIQTPGPYLLDVIVPHEEHVLPMIPSGGAFKDMILDGD

SEQ ID NO: 33986 - protein, 614 aa, Monochoria vaginalis
SKPLHPPPKLQRQQRIFAPLVTSSTTVAAPDAVFPPRRNFAPDEPRKGADILVEALEREGVTDLFAYPGGASMEIHQALTRSPSITNHLLRHEQGEAFAASGYARSTGRPGVCIATSGPGATNLVSALADALLDSIPMVAITGQVPRRMIGTDAFQETPIVEVTRSITKHNYLVLDVDDIPRIIKEAFFIATSGRPGPVLVDIPKDIQQQLAVPVWDPPVRLPGYVSRLPKPPALHLLQQIIRILSESSRPVLYVGGGSLHASEELRGFADLTGIPIASTLMGLGVYPLDGPLSLKMLGMHGTVYANYAIDKADLLLAFGVRFDDRVTGKLEAFASRAKIVHIDIDPAEIGKNKQPHVSICGDIKLALQEMNEMIEENGIHSKLDFSAWREELDQQKKNYPLKYKTFGDLIPPQHAIELLEELTNGEAIITTGVGQHQMWAAQYYNYKRPRQWLTSAGLGAMGFGLPAAVGAAVGNPGVVVVDIDGDGSFQMNAQELAIIRIENLDVKMLILNNQHLGMVVQWEDRFYQSNRAHTYLGNPANESKVFPDFVKLAESYDIPAARVSKKSEVRDAIRKMIQTPGPYLLDVIVPHEEHVLPMIPSGGAFKDMILDGD

SEQ ID NO: 33987 - protein, 614 aa, Monochoria vaginalis
SKPLHPPPKLQRQQRIFAPLVTSSTTVAAPDAVFPPRRNFAPDEPRKGADILVEALEREGVTDLFAYPGGASMEIHQALTRSPSITNHLLRHEQGEAFAASGYARSTGRPGVCIATSGPGATNLVSALADALLDSIPMVAITGQVSRRMIGTDAFQETPIVEVTRSITKHNYLVLDVDDIPRIIKEAFFIATSGRPGPVLVDIPKDIQQQLAVPVWDPPVRLPGYVSRLPKPPALHLLQQIIRILSESSRPVLYVGGGSLHASEELRRFADLTGIPIASTLMGLGVYPLDGPLSLKMLGMHGTVYANYAIDKADLLLAFGVRFDDRVTGKLEAFASRAKIVHIDIDPAEIGKNKQPHVSICGDIKLALQEMNEMIEENGIHSKLDFSAWREELDQQKKNYPLKYKTFGDLIPPQHAIELLEELTNGEAIITTGVGQHQMWAAQYYNYKRPRQWLTSAGLGAMGFGLPAAVGAAVGNPGVVVVDIDGDGSFQMNAQELAIIRIENLDVKMLILNNQHLGMVVQWEDRFYQSNRAHTYLGNPANESKVFPDFVKLAESYDIPAACVSKKSEVRDAIRKMIQTPGPYLLDVIVPHEEHVLPMIPSGGAFKDMILDGD

SEQ ID NO: 33988 - protein, 614 aa, Monochoria vaginalis
SKPLHPPPKLQRQQRIFAPLVTSSTTVAAPDAVFPPRRNFAPDEPRKGADILVEALEREGVTDLFAYPGGASMEIHQALTRSPSITNHLLRHEQGEAFAASGYARSTGRPGVCIATSGPGATNLVSALADALLDSIPMVAITGQVPRRMIGTDAFQETPIVEVTRSITQHNYLVLDVDDIPRIIKEAFFIATSGRPGPVLVDIPKDIQQQLAVPVWDPPVRLPGYVSRLPKPPALHLLQQIIRILSESSRPVLYVGGGSLHASEELRGFADLTGIPIASTLMGLGVYPLDGPLSLKMLGMHGTVYANYAIDKADLLLAFGVRFDDRVTGKLEAFASRAKIVHIDIDPAEIGKNKQPHVSICGDIKLALQEMNEMIEENGIHSKLDFSAWREELDQQKKNYPLKYKTFGDLIPPQHAIELLEELTNGEAIITTGVGQHQMWAAQYYNYKRPRQWLTSAGLGAMGFGLPAAVGAAVGNPGVVVVDIDGDGSFQMNAQELAIIRIENLDVKMLILNNQHLGMVVQWEDRFYQSNRAHTYLGNPANESKVFPDFVKLAESYDIPAARVSKKSEVRDAIRKMIQTPGPYLLDVIVPHEEHVLPMIPSGGAFKDMILDGD

SEQ ID NO: 33989 - protein, 752 aa, Nicotiana tabacum
MWNLRSISCLLLLCCSAAFVSAQRSDNATSKWLTLTGDAPKVIARGGFSGLMPDSSFNAYILAKAISVADWVAWCDVQLTKDGVGICLSDIRLDNSSDVNVLFKNKQNTYLVNGVPQKGWFSVDFNFKDLALVSLKQGVFSRSPRFDGTPQQILTVQDVASQVKPPGLWLNIQHDSFYSQRNLSIRSFVVSLSRSVIVNYISSPEVNFLRSIARRFNPRVTKFVFRFLGEDGIEPSTNQTYGSLLKNLTFVKTFASGILVPKHYIWPVDNSLYLQPHTSVVLDAHKEGLEIFAADFANDVPSAYNYSYDPVAEYLSYIDNGDFSVDGVLSDFPLTPSSSVDCFSHLGKNDKPQVKLQIITSEGASGDYPGCTDLAYTKAASDGADVLGCPVQMTKDRVPFCLGSINLIDKTTAAQSPFSNIATTVPELKITNGILTINLTWTEIQSLKPAISNRWSEFRLFRNPKARNDGNFMSLADFLTFAKNATSVSGVMISVENAAYMAKQGLGVTGAVLDALSKAGYNNQTAKKVLIQSTDSSVLEEFKKSSYELVYGVGDDIRDIESSTILEIKTFAKSVIITKQSVFPSEDAFIIAQTNVVQKLQSSNLTVYVQLLNNEFVSQSWDFFSDSSVELNNYAVGAGIDGVITEYPATAARYRRNRCLGFKDSPPYMTSVQPGSLLELMAPQFLPPAEAPNPVLTESDVVEPPLPPVAKINPSNDNGSAIAPTPPNGQSSVVASILMSSVAILLATIMVV

SEQ ID NO: 33990 - protein, 387 aa, Vibrio fischeri ES114
MKNVVIVDCIRTPMGRSKNGVFRHTRAEDLSAHLMKGLLKRNPSVDPNDIEDIYWGCVQQTLEQGFNIARNSALLAGLPQSIAATTVNRLCGSSMQALHDASRAIMVGDAEICIIGGVEHMGHVPMNHGVDFHSGLSKSVAKASGMMGLTAEMLGKMHGISREQQDAFALASHQKAHKATIEGYFDSEILPMEGHDENGALTLVTHDEVIRPETTLEGLAALRPAFDPANGTVTAGSSSALSDGASAMLVMSEEKANELGLPIRAKVRSMAVSGCDPSIMGYGPVPATKKALKRAGLSLDDIELFELNEAFAAQSLPCIKDLGLLDVMDEKVNLNGGAIALGHPLGCSGSRIATTLINNMERTGAKLGVATMCIGLGQGIATVFERP

SEQ ID NO: 33991 - protein, 399 aa, uncultured bacterium
MNPPHAVIAGAGIGGLCTSLSLALRGWRVSLYEKAKVLEETGAGLQLSPNASAILGKLGVIERLTPFALRPKAIRIRRARDGATLALMPLDEAERRWGAPYLVVHRADLQRALLEAIAREPSIRLQTGAAVAGFATGEDSVAIAVEQGAVRRKAAADCLIGADGVRSFVRQRLGADSARFSGWTAWRAAVDAAHAPPAMRREEITLWLGPNAHLVHYPLRGGAIINSVAIVDEDFRPGGADFWSGAGAPEFLEARFSSWDATARELLRAAPDWRKWPLFDCHPIARWVAGRVALIGDAAHPMLPFLAQGAAQAIEDAGVLGEVLTRGQNIETSLRAYQEARCPRAARVQKESRRQAKIYHLAGPAALLRDTTLRALGPQKMLARYDWLYDARNARGHEG

SEQ ID NO: 33992 - protein, 427 aa, uncultured bacterium
MTTTMFSSLARQTGRLWALVLAAALAVTMAAIGPADAHGEKSQAAFLRMRTLNWYDVVWSKTNVAVNEEYEITGKLHIMNSWPAAIKVPDQCFLNTGQPGAMAARLGVWVGAPGQMQFTPRSMRLDVGKTYAFRILLKGRRPGHWHTHVQLSVMTGGPIPGPGQYIDIKGNFSDFVDDVKLLNGTTVDIETYGIGKIYMWHLFWIVVGGWWILYWFGKRGFIGRFAWVASGKAEEVITPQERVVGAITLLAVLLVVIIFYAITVSGNPNTIPLQAGDFRNITALENEVDSGPITIKYLNGTYKVPGRELVANFKITNNGKEPLRIGEFNTAGLRFLNPDVYTAKVVYPDYLLAERGLSLNDNSPIAPGETRDVAVTVQDARWDTERLSGLAYDVDSSFAGVLFFFSPSGARYPMEVGGPVIPTFMPV

SEQ ID NO: 33993 - protein, 421 aa, Methylocapsa acidiphila
MFSTLAGHAKRQAGRLWALGLAVGLAASMAGSGPADAHGEKSQAAFLRMRTLNWYDVKWSKTSLNVNEEMEITGKLHIMDAWPVAVAKPEVAFLNVGMPGPVLVREGSFLGGKFVPRSTSLELGKTYEFRVLLKARRQGRWHVHTQLSVQTGGPIIGPGQWVEIKGDMADFKNPVTLLNGEVIDLEQYKIGNIYFWHTVWFIAGVAWVFYWFRKRGFVGRYISVASGKGGELITPLERQIGAGALAATLLVVIISYALTASEFPRTIPLQAGNIRAIDALNIPESPIKVEYLRGTYKVPGRELVATYKITNTGKEPVRVGEFATATLRFLNPDVYTQKVDYPEYILAERGLSLSDNAPIAPGETKELTVKVQDARWDTERLADLAYDVDSSFAGLMFFFTPSGARYEVETGGPVIPEFLPI

SEQ ID NO: 33994 - protein, 313 aa, Salvia miltiorrhiza
MEAIGVLMMCPMNSYLEQELDKRFKLFRYWTQPKQREFLAQQAESIRAIVGNSTSGADADIIDSLPKLEIVSSFSVGLDRIDLLKCKEKGIRVTNTPDVLTEDVADLAIGLMLAVLRRICECDKYVRSGAWKLGDFKLTTKFSVKRVGIIGLGRIGLAVAERAEAFDCPINYYSRSKKANTNYTYYGSVVELASNSDILVVACALTPETTHIVNREVMDALGPKGVLINIGRGPHVDEAELVSALVKGRLGGAGLDVFEKEPEVPEQLFGLENVVLLPHVGSGTVETRKVIADLVLGNLEAHFSSKPLLTPVV

SEQ ID NO: 33995 - protein, 154 aa, Synechococcus sp. WH 8103
ERNKTIFFPGDPAERVYLIRRGAVRLSRVYESGEEITVALLRENSLFGVLSLLTGHRSDRFYHAVAFTRVEMVTAPAASVRAAIEADTGVGLRLLQGLSSRILQTETMIETLTHRDMSSRLVSFLLVLCRDFGVPDELGITIDLRLSHQAIAEA

SEQ ID NO: 33996 - protein, 210 aa, Catharanthus roseus
MYQSNAHNSDHLTFLPPLVDYQFLNNDFDFSEIFTDFNYANYNYNTSTSDNFSGFQFNENCEEIISPNYASEDLSDIILTDIFKDQDNYEDEVVAGEQEEELITTPTSRGGGGGGCEQRSNEEWIRYRGVRRRPWGKFAAEIRDPKRKGSRIWLGTYETAEDAALAFDQAAFQLRGSRARLNFPNLIGSANAPVRVSPRRRSSSCHLRPQ

SEQ ID NO: 33997 - protein, 317 aa, Pseudomonas fluorescens
MMIDVLVVARHDEALDICSFELAAADASPLPAFSAGAHIDVHLANGLARQYSLCNHPEERHRYLIGVLKDPASRGGSSSLHQELQVGARLRISQPRNLFPLAPGARRSLLFAGGIGITPILSMAEQLAHNGADFQLHYCARSAKRAAFVQRLRQSPFAERVSLHFDEQPETALDIAHALAEPQDDVHLYVCGPGGFMQYVLDSAQALGWKEHCLHREYFSAAPVDHSADGSFAVRLASSGQVFQVPADRSVVQVLQDQGIEVAISCEQGICGTCLTRVLEGVPEHRDLFLTEDEQARNDQFTPCCSRAKTPLLVLDL

SEQ ID NO: 33998 - protein, 149 aa, Pseudomonas putida
MLVPPAWQNVETMDADLRAFYEYNSMHMEPWDGPAGIVMTEGRHAVCLLDRNGLRPARWVTTTNGYITIASEIGVWGYQPEEVLAKGRVGPGQILAVDTETGQILDTDAIDNRLKSRHPYKRWLRQHATRIQATLTDDQGVASYDADQL

SEQ ID NO: 33999 - protein, 123 aa, Pseudomonas putida
KFKEYTTLVDQRPVSMIRDLLKVKVADQPLALEQVEPLEAILKRFDSAGISLGALSPEAHEALAEAMNRLGARSNSGEGGEDPSRYGTIKSSKIKQVATGRFGVTPEYLVNAEVLQIKVAQGA

SEQ ID NO: 34000 - protein, 589 aa, Helianthus annuus
MCGILALLGCSDDSQAKRFRVLELSRRLKHRGPDWSGLYQHGDNYLSHQRLAVIDPASGDQPLYNEDETVVVTVNGEIYNHMELREKLMGHKFKTGSDCDVIAHLYEEHGENFVDMLDGMFSFVLLGTRDNSYLVARDAIGITSLYIGWGLDGSVLISSGLKGLNDDCEHFEVFLAGHLYSSKIRGFRRWYNLPWFSESIPSTPYDPLVLRCAFENAVIKRLMTDVPFGVLLSGGLDSSLVASVTARHLAGSKAAKQWGAQLHSFCVGLEGSPDLKAAREVADYLGTLHHEFHFTVQDGIDAIEDVIYHIETYDVTTIRASTPMFLMSRKIKSLGVKMVISGEGSDEIFGGYLYFHKAPNKEEFHQETCRKIKALHQYDCLRANKSTSAWGLEARVPFLDKEFINVAMSIDPEAKMINMDQKRIEKWILRRAFDDEEKPYLPKHILYRQKEQFSDGVGYSWIDGLKSHAEQHVTNKMMLNAERIFPHNTPVTKEAYYYRMIFERFFPQNSAKLTVPGGASVACSTAKAIEWDASWSNNLDPSGRAALGVHNAAYKKNSGSISSANLAPSIADNVPRMMDITGPELVIRS

SEQ ID NO: 34001 - protein, 175 aa, Solanum tuberosum
MASKMCEPLVIGRVIGEVVDNFCPSVKMSVVYNNNKHVYNGHEFFPSSVTSKPRVEVHGGDLRTFFTLVMIDPDVPGPSDPYLREHLHWIVTDIPGTTDCSFGREVVGYEMPRPNIGIHRFVFLLFKQKKRQTISSAPVSRDQFSSRKFSEENELGSPVAAVFFNCQRETAARRR

SEQ ID NO: 34002 - protein, 230 aa, Prototheca wickerhamii
MATLYPAPLRPGCLPCPSRGPGWRSLPLSRRAQLCTWRPMAICGAPPSSPSLGGSSSPHTNGSLTPLVHLESVPVRVTNEVNVNAVLSPKDIYFRCAELGGHKAAQPWWKILLAGVMAGSYVSMSGMLLLTVGPHCIEMAGSNPGLARYVTGAIGFPFGLLTIMTCGAELFTGNTAMVAAAVYEGRADLKALAKSWSCSYIGNMLGCCLGVAIVVAGGLLPQMTRGAASL

SEQ ID NO: 34003 - protein, 213 aa, Prototheca wickerhamii
MSLAACSTAAGRPSPGAGMSGRTSQSGAPARLGAGRRRSRAFSPQASSDSARSLLSGNGLSTLATSLATPSPPLPRSVDFQRPVLQPLNWDSGSSRSGPPAPAQAPPALPQAGQPSRLRIFSGTANPGLSQEVVCYLGLELGAISIKRFADGEIYVQVGESIRGCDVFLIQPTAPPVNDALVELLITIDACRRASARSITAVLPYFGYARADE

SEQ ID NO: 34004 - protein, 525 aa, Moorella thermoacetica ATCC 39073
MRVLALDGVDARGLAALREAGLEVTTSGKMEEEELKEAIRDCEALIVRSGTRVTAAAINAAKKLKIIARAGVGTDNIDVAAATERGIVVVNAPEGNTIAAAEHTIAMMLALARNIPQASAALKQGRWEKKKFVGVELRGKTLGIIGLGKIGREVARRARGLEMKVVAFDPYVDSEQAARLEVELVPLETLLAGADFVTVHLPLTKDTRHLLDREKLGLMKQGARVLNVARGGIIDEGALYEALKAGHLAGAALDVFEEEPLGQSPLLELENVIVTPHLGASTREAQVAVAVEVAGDVIRCLQGEPVLNAVNIPVVRGHLAEVLHPYLQLAEKLGSFLSQLMESPILTAEICFNGELAGYDLAPLTSSFLKGLLRPLLAEAVNYVNAPLVAKKRGIRIREKKSPEMEYFANLIGVQVQGRRESHRLAGTVNQAGEPRLVNLDGYSVDTIPAGHLLVIPHLDRPRIIGPVALAIGDHGVNIAAMQVGRRERGGQAVMLISVDSEVPRAALDAIRQVDGVLDVRYISL

SEQ ID NO: 34005 - protein, 469 aa, Moorella thermoacetica ATCC 39073
MKTQGQAPLWEALLNYRQQGLNSWHTPGHKDGAYTLPLWRDFLGAALALDLTEVPGLDNLACPGGAIAAAQERAARFYGAARTFFLVNGASAGLMAVILATCRPGDEVLLPRYAHRAVFNGLILSGARPVYLATEWLASPGLPLGVAPESLAGTLREHPGARLLLLVHPTYEGVVPRSEELIALAHAHGVAVLADAAHGAHFGLAPGLPPSPLDLGADFVVQSSHKTLAALTQAAMLHLREEAAAARVAAALNLLQTTSPSYLLLASLDTARLLAEERGRQDWGLTVARATAARARLDRAGLPPLAMADVTGPAASGLDVTRLLLPTAPLGRRGTEVAATLRRAGQEVELAGEDYIVVIITPGDGEEKIEALVTALLALPRSDSRQPAALAPAPPVRIPETALTPREAWLAPRRELPLGEATGKIAAELISPCPPGLALTVPGEVLTPEVLERLRDLRGPSGRVLVVDG

SEQ ID NO: 34006 - protein, 322 aa, Moorella thermoacetica ATCC 39073
MEVIKKQMETESGRLKIFTCNANPKLAEEIGAYLGVPLGAAKVKRFSDGEISVVIDESVRGEDVFVIQPTCEPVNDNLMELLIMIDALRRASARRITAVIPYYGYARQERKTRARDPISAKLVANLITAAGAHRVLTMDLHAAAIQGFFDIPVDHLTAVPILADYFNSKGFEKAVIVSPDLGGVTRARNFAERIGAEIAIIDKRRPAPNVAEIMNLIGDVKNKTVIMIDDLIDTAGTICLGAKALMEQGACAVYACCTHPVLSGPARERLMASPLQEVVVCNTIPVPEGKEIPKLHRLSVAPLLGEAIIRIHEDLSVSKLFD

SEQ ID NO: 34007 - protein, 645 aa, Moorella thermoacetica ATCC 39073
MNRIFKNLAIYLLIVLLAVSVIRLSTPPEKPAQEWDLTRFYQAVDQDQVREVTLTPQDNIIKVDGVLKDNTKFTVNALSSTPLTDRLISKGVRIKTQPSPQPPWWTSLLGSLLPILLLVGLVFFMMQQTQGGGSRVMQFGKSRARLHTDDKRKVTFEDVAGADEVKEELEEVVEFLKNPRKFNELGARIPKGVLLFGPPGTGKTLLARAVAGEAGVPFFSISGSDFVEMFVGVGASRVRDLFEQAKKNSPCIVFIDEIDAVGRQRGAGLGGGHDEREQTLNQLLVEMDGFNANEGIIIIAATNRPDILDPALLRPGRFDRQIVVDIPDVNGRKDILKVHVRGKPLDETVDLDVLARRTPGFTGADLANLVNEAALLAARRGKHKISMEEMEDSIERVIAGPEKKSRVISDYEKRLVAFHEAGHALLGHYLPHTDPLHKVSIIPRGRAGGYTLLLPKEDRRYMTKSQIIDQVTMLLGGRVAEALVLKEISTGAQNDLERATELVRKMITEFGMSEELGPLTFGRRQETVFLGRDIARDRNYSEAVAFSIDKEARHIIDECYNRAKEMLQKHLAELHLVARALMEKETLEAEEFTAIIEAYDREHGVPENSSDAGKPAAAGGQDTGKDTPGNTLIKLTFLQGLKGVW

SEQ ID NO: 34008 - protein, 128 aa, Moorella thermoacetica ATCC 39073
MWRIMMKSKLHRATVTAADLNYIGSITIDSDLMAAADILPNEKVQVVDNNNGARLETYAIPGPAGSGVICANGAAARLVQPGDIIIIIAYGIFDDREARTYQPRVIFLDARNKITAVKKGEQPGQVWV

SEQ ID NO: 34009 - protein, 462 aa, Moorella thermoacetica ATCC 39073
MSIAAARTRSQAGQKVGLRRDLGIWESYATLIGVLIGSGIFVVTGQAGAVAGPSVPLAYLVMYPIVICTAVAYMVFLSTPLGERPGGAYIHISRTFGTYYPGYIAMWLKWVAFMGALGVLSLGFGQYVTFFIPGANPVLVGSLVLLFFYFINLFGVRIYGWAQVAMFLVLMIAVLVLVIPGLPAVNLSYYRPLFPFGLKGFLAAIPPLFLSYAGFESLAQTAGETREARRSLPRVFLVGLSITVVIYFAMSFVAFGNLPYQQLAHSRSAMADVAARYLPFGAAAIVAVGAMMAFTTSINGTLMVPPRVLMVLAEDRMIPGFLAHINPRFRTPDVALTISTGVALALLWTKTLDYILAVTLQAMFILYIVHGIALICLPFVNPRLYKTALVRLHPALLVISGLISIAAMLLFSYAMIIAAWRLLLLWVAVGTGIYLYSRYQGRREGFDYQRRLVEEWCDEAEA

SEQ ID NO: 34010 - protein, 840 aa, Moorella thermoacetica ATCC 39073
MARFTERANRVLRLAQEEALALRHPAIGTEHILLGILREGDSVAARALTNLGVNIKAVREEVRKVIRPGEAVVGGELGLTPRAKRVLELANEEARRQGVNYVGTEHLLLGLLEEGEGLAAQVLGGLGLSPEKIREQVIALLGGAGQPQTGGWTVLFGNLPFGMAAFPGGMGFQAQGMPAGAKMQERRPGQTPTLDQFSRDLTRLAREDKLDPVVGREKEIERVVQILSRRTKNNPVLIGDPGVGKTAIVEGLAQKIVQNQVPEVLRDKRVVALDMSGMVAGTKYRGEFEERFKKVMDEVRAAGNVILFIDELHTLIGAGAAEGAIDAANILKPALARGELQTIGATTIDEYRKHIERDAALERRFQAVMVEEPTVEETIAILKGLRDRYEAHHRVKITDEALEAAARLSDRYITDRYLPDKAIDLVDEAGSRVRLKVYTAPDDVKKLEARLEELEKEKAAAVNAQEFEKAATLRDEEKKIKEELEAKKGEWQKEKGLEKSVVTPEDIAQIVSSWTGIPVTQLAQEESERLLHLEDVLHQRVIGQDEAVHAVARAVRRARAGLKDPKRPIGSFIFLGPTGVGKTELARALAEALFGDEDAMVRFDMSEYMEKHTVSRLVGAPPGYVGYEESGQLTEAVRRRPYSVVLFDEIEKAHPDIFNVLLQVLDDGRLTDAKGRTVDFRNTVIIMTSNIGASTIKRESLGFKASTSEVAAESYDKMKKHILEELRRTFRPEFLNRIDDLIVFHALSRDDIRKIVDLMLAELNRRLEDNNLSVEVTDEAKDILVREGFDEAYGARPLRRAIQTLIEDQLSDEMLAGKFKPGDKVRAVARDGKIALEKAA

SEQ ID NO: 34011 - protein, 382 aa, Moorella thermoacetica ATCC 39073
MAIIYLDNSATTAALPEVAIAVKEMLTENYGNPSSLHGLGIKAEKALGEARRQVAGLIGARPTEIYFTSGGTEANNWALLGIARARRRQGRHLITTAIEHPSILATCRRLEADGFEVTYLPADARGVIRLADLEAALREDTILVSVMSVNNEVGSRQPVADIARLVHSRSRAVLHVDHIQGYGKIPLNCHEAGIDLMSLSGHKIHGPKGVGALYIKEGLRLEPLLTGGGQEAGQRSGTENTAGIAGFGVAAQLAAADFARRTARMQEIKLELARRLVAEIPGAVINGPPPEEGAPNIINVSFPGVRAEVLVHMLEQRGIYVSTGSACHSRRESASHVLQALHLERWRQDGAIRISLGALNRLEEVEPTVEAFKECVQELWSL

SEQ ID NO: 34012 - protein, 65 aa, Moorella thermoacetica ATCC 39073
MQGKVKWFNPEKGYGFIEREDGKDVFVHFSAIQEEGFKTLAEGQEVEFDIVEGPRGPQAANVIKC

SEQ ID NO: 34013 - protein, 363 aa, Moorella thermoacetica ATCC 39073
MLERIIAPGSYLRGPAVIEKAGQALARLGARACLAGGHRALAAAAPALQEALSSAGVEPAGQVWYGGECCPENIARVATTVKETGADFLIGVGGGKALDTAKGAAWQAGVPLVTVPTIAATCAAFTSIAIIYDREGHFLAISHEAANPSLVLVDSRIIAAAPGRYLAAGMGDTIAKYIELRATSTAAARHLALEGALELARLCYDSILAAGPGARAAVDDRAVTPDLEKVIDAVILISGLVSGLGGDDGRTAGAHGVYEGLTASPLTRSYCHGELVAFGNLVQLVLEGRERGEIRGVADFNRRVGLPVTLEGVGLSPEDGPSLDLVSRAAAESPDMANMPFPVTATMIREALLAADRLGRETA

SEQ ID NO: 34014 - protein, 104 aa, Moorella thermoacetica ATCC 39073
MYAIIMTGGKQYRVSEGDTLRVEKLPAEVGEKVVLDKVLAVGEGADLKVGNPYVEGAKVTASVQAQDKAPKIIVFKYKPKKNYRRKQGHRQPYTQLQIEKIEIQ

SEQ ID NO: 34015 - protein, 423 aa, Moorella thermoacetica ATCC 39073
MFYDEAKIYVKGGDGGNGIVAFRREKYVPRGGPNGGDGGRGGSVILEADAGLRTLVDFRYRAHYRAERGQHGQGKNKHGRSAPDLILRVPVGVVVRDATSGQVLADLVEDGQRVVVAAGGRGGRGNARFVTSTDRAPTFAEKGEPGEERWLVLELKLLADVGLIGLPNAGKSTLLARISAARPKIADYPFTTLTPNLGVVRLEDGDSFVVADIPGLIAGAHQGAGLGLKFLRHIERTRVLVHVLDTSQPGEDVLAGWRTVNDELAHYNPELARRPQVVAANKMDIPGGEEKVAFLRERLGDSYRIFPISAATGEGVQELLYHVSGLLATLPPPAPVTAPEEEKVTALAPEELTIEREGQVFIVKNPDVERRVAMTYLDNEEAVRRLQVYLKQKGVDDALRRAGAATGAIIRIGKFEFEYVEEP

SEQ ID NO: 34016 - protein, 612 aa, Moorella thermoacetica ATCC 39073
MSKVIGIDLGTTNSCVAVMEGGEAVVIPNAEGGRTTPSVVAFTKEGERIVGQVAKRQAITNPDRTVISIKRHMGTNYKVKIDNKEYTPQEISAMILQKLKADAEAYLGEKVTQAVITVPAYFTDSQRQATKDAGRIAGLEVLRIINEPTAASLAYGLDKGEDQTILVYDLGGGTFDVSILELGDGVFEVKATSGNNRLGGDDFDQRIMDYLVDICRREHGVDLTQDKMAMQRLKEAAEKAKIELSGMTSTNINLPFISATPNGPVHLDVNLTRAKFEELIADLVEKTVGPTRQALADAGLEPKDIDKVLLVGGSTRVPLVQETVRKILGQEPHKGINPDECVALGAAIQGGVLAGEVKDVLLLDVTPLSLGIETLGGVFTKLIERNTTIPTSKSQIFSTAADNQTTVEIHVLQGERAMAADNKTLGRFQLTGIPPAPRGVPQIEVKFDIDANGIVHVSAKDLGTGKQQAITITSSSGLSEEEIQRMVKEAEASAEADRRRKEEIETRNQADSLIYQAERTLKEFKDKADQNDVDRIEKAKKELQEVLDSKNNDKIKEKMEALSQALYTLTTKVYQQAGAQAGAQGQGAAGGQKQDGNVYDADYKVVDDDKKE

SEQ ID NO: 34017 - protein, 301 aa, Moorella thermoacetica ATCC 39073
MAEAYRSGFAGLIGRPNAGKSTLLNRLVGRKVAIMSDKPQTTRNKILGVLTATAYQIVFLDTPGIHKPRHQLGEYMVAVARNTLAEVDVVLYVVDAAEEPGAGEEYIISRLKEVDVPVILILNKMDLVAGETLIRREEFFRARLDVAAVRAVSALVGTNLDTLPDLISTYLPPGPQYYPPDMVTDQPEKFVMAELIREQVLRATREEVPHAVAVVVEEIAERPNDYLYVDAVIYVERDSQKGIIIGEGGQRLKEIGSQARREMEALLGNKIFLNLRVRVKKNWRQQELTLRQLGYDRRHIQ

SEQ ID NO: 34018 - protein, 270 aa, Moorella thermoacetica ATCC 39073
MLALPEKSVLLVEDSTLTRFSSRRVLEERGYLVDEAASGQEALVKARGKGEPYDLVILDIHLPGMDGLAVLENLKRLPEYRYVPVMVVTIESNVAVVKKAIDLGAVEYLCKPYSVEELVRRVEKLIGPGARREATPAELLHKVLRNEINRASRGALNVALVLARSEGLGKGKIVECARQARRRLREIDTVIELSKSTLALVLPHTGKEGAQVVITKLAGLLPGTWSYGVAVYPDNGKDGEELFAYAEASLKECWEKKTTGAPAQQQALDT

SEQ ID NO: 34019 - protein, 506 aa, Moorella thermoacetica ATCC 39073
MGIWRTKKIADLMQEAGDNQKLKRSIGTPELVALGVGAIIGSGIFVLTGVAAANYAGPALVFSFILSGLAAGLAALVYAEMAAMIPVTGSAYTYAYASLGEIIAWLVGWNLVLEYLVASGAVAVGWSGYITDMLASVGVFLPRALVNSPLSGGLVNLPAILITVVMTGVAIVGTTTSARTNKIIVGVKILVILAFLALGAPRVNPAYWHPFLPFGVTGVVHGAAIIFFAYIGFDAVATAAEEVRDPARELPLGIIGSLALATILYVAVTIVLTGLTPYTNLNTPSPVTTGLLAAGVRGASLIVGTGALAGLTSVLLVNIFAQSRVFMAMGRDGLLPPLFTRVHPRFHTPWLTTLIVGAFITLIGGFLPVDIIAELANVGTLSAFFVVSVGVMVLRRTQPDLKRPFKVPLMPWTPLLAIAFAVYLFFNLPGLTWIRFGVWVTLGLVVYFAYGRRHSVLAREEESKAVPRPTYRPSPLEMPAPARKPFPFKLPAPDLLRMFLPRWRRD

SEQ ID NO: 34020 - protein, 225 aa, Moorella thermoacetica ATCC 39073
MAEDWEFLRQVPVFAGLEPEELQHIASLALLRRYRKNMYIFMEGEPGDAFYFVKKGAIKLFQVLEDGREKILHFVREGEIFAEVLLFEGGPYPATAQTLEDTEVGIIRNADMEKLLSAHGEMAVKIIKVMSRRLRQAQNHIRDLALKGAYGRLASSLLQLAREYGKPREDGVTIDLNLSQQELASLIGTSRETVARILSDFKRLGAVEVERQRITLLEPEKLKGW

SEQ ID NO: 34021 - protein, 397 aa, Moorella thermoacetica ATCC 39073
MKILVLNCGSSSVKYQLFDMEDESVLAKGLVERIGIDGSVLTHRPAGKEKLVRETEIPDHKVAIRLCLEALTDPHYGVIKDYSEIGAIGHRIVHGGTFPHSVLVDASTKKAISELEVLAPLHNGPALRGIEACEAILPGTPQVTAFDTAFHQGMPDYAYTYSLPYELCQKHLIRRYGAHGTSHQYVALRAAAIVGKPLEELKVITCHLGNGSSITAIKNAKSYDTSMGFTPLAGLTMGTRCGDIDPAIVPFLMEKEGYTPAEMDQVMNRRSGVLGVSGLSSDFRDIEAAMAEGNDRARLAWEVFVHSAKKYIGAYAALLNGLDILVFTAGLGENSIAAREAICRDMDYLGIKIDPEKNQVRGQEREITAAGARVRTFVIPTNEELMIARDTLALVQA

SEQ ID NO: 34022 - protein, 413 aa, Moorella thermoacetica ATCC 39073
MKVLVQKFGGTSVASPEQRLVVTGHIERACRVGYQVVVVVSAMGRRGAPYATDTLLELLGDNEVEPRERDLLLACGEVISGVVLTGLLKSKDLPAVFLTGGQAGIITDAQFGDARILRVEPRRIQSYLDQGRVVVVAGFQGVTESGEVTTLGRGGSDTTAVALGVALGAEAVEIFTDVDGVKTADPHIVSDARTLSTITYNEVCQMAYEGAKVIHPRAVEIARQKNIPLRIKSTFNDGPGTLVVAWQPGVTGVHISRDRVITGITHMDGLTQLRVSLPSGEGAGEVFPLLAQNNISVDFINIFPGELVFTVKSEVARQARELIEGLGLKVTARPGCAKVATVGAGMRGVPGVMATIVTALEREGIKILQSADSYTSIWCLVDRKDMERAVQTLHREFKLNDGKTGEVKVYAVG

SEQ ID NO: 34023 - protein, 226 aa, Moorella thermoacetica ATCC 39073
MRARILVVDDDAKITSMLKRALTYEGYDVEIAANGHQALALAANNPDLIILDIMLPGIDGLAVCRQIRSNSDIPILMLTARDDTADRVLGLDTGADDYLVKPFALEELLARIRALLRRRSRETEAEVLQFSDLTLNTSTREGFRGQRSFSLTAKEYELLLYFLQNPHRVLTRDELMTRIWGYDFSGESNVLEVYIGYLRAKLEAGGEPRLIQTVRGVGYVLKEQQP

SEQ ID NO: 34024 - protein, 404 aa, Moorella thermoacetica ATCC 39073
MTIAHGFEARRFITPVVRDLPPSGIRRFFELVASTKGVISLGVGEPDFVTPWHIREACVQSLERGYTMYTSNYGLPELRRAIADYLAWRFGLTYDPMKQIMVTIGASEAVDLALRTVLNPGDEVLIPEPCYVSYQPITQLAGGIPVPIPTTMTDGFALTAARLEHYITPRSKVLILCFPNNPTGAVLSREEMQAIARLVEKYNLLVISDEIYAELRYEGQPLSFASLPGMQERTILVSGFSKAFAMTGWRIGYVAAHPDFLAAMVKIHQYTILCAPVMGQMAALEALRHGRQDVERMVEQYDQRRRLVYSRLREMGLDCFEPRGAFYIFPSIAATGLDSVTFAEELLKEEKVAVVPGTAFGASGEGFIRCSYAASLADLTEAMNRMERFVARRLAFNQRAVAQA

SEQ ID NO: 34025 - protein, 393 aa, Moorella thermoacetica ATCC 39073
MKDVVIVSGVRTAVGTRGGSLKDIHQADLGAMVIKEAVRRAGLEGNQVDEVIVGNVGQVAENGFIARMCSLKAGLPLETTAFSVNRQCGSGLQAINSAVQEIQSGNAEIVVACGTENMNQLPYYVRKARYGYGFGHGQLEDGLLTILTWPLGPYPNGVTAENIAERYHISREEQDAFALKSQQKAEAAIKAGKFVDEILPVEVPAGKRETRIFAQDEHPRFGLTMEQLAKLKPAFREGGTVTAGNSSGINDGAGAVVLMTAEKANKLGLKPLLLIRSQAVAGVDPDVMGIGPAPATMKAVEKAGLTLADIDLFELNEAFASQSIAVMRILGLPEEKVNVNGGAIALGHPIGATGIILTVKLQKEMVRRQAKYGIVTMCIGGGQGIATVFENIA

SEQ ID NO: 34026 - protein, 502 aa, Moorella thermoacetica ATCC 39073
MPTLSLMPPEFSVVRDENKCIKCLACVRQCGFDAQKYDAEDDRLYTIDANCVNCQRCVSICPAGALTIYKNPPPMRPNAYWSEGHLRNIIKQAETGGVLLTGMGNDQPYPSYFDRLLLNASQVTNPSIDPLREPMELRTYLGSRTEPVSLEERQDKTRTPLVPLETPIMFSAMSYGSISHEAFESLARAAKEFGTMFNTGEGGLPEDLYQYADHAVVQVASGRFGVHADYLNAGRIIEIKIGQGAKPGIGGHLPGEKITAAVSATRMIPEGTDALSPAPHHDIYSIEDLKQLVFTLKEATRYQKPVSVKVSAVHNVAAIASGIARAGADIITVDGFRGGTGAAPTMIRDHVGIPIELAIAAVDQRLREEGIRNKVSLVAAGGFRSSADVVKAIALGADAVYIATAALIALGCHLCQKCYTGKCSWGIATQDPYKTRRLNPEIGAERLYNLLRGWSHEIKEMLGGMGINSIESLRGNRLHLRGVGLNEVELKLLGVKHAGEAI

SEQ ID NO: 34027 - protein, 613 aa, Moorella thermoacetica ATCC 39073
MCGITGWVDWELDLTGQKNILEAMTATLACRGPDAAGTWVAPRVALGHRRLVVVDPAGGGQPMVRRRGNQTFVLTYNGELYNTGEIREELLSRGYTFRGHSDTEVLLTAYMEWGVECVRRFNGIFAFAIWDEARERLFLARDRLGVKPLFYATLPHSFLFGSELKALLAHPAIKPEVDAEGLAEVFVLGPARTPGHGVFHNLAELKPGYYMTYDRQGLRLHQYWALQSHPHTDNLETTIAKVRQLLQDTVERQLVADVPVCTLLSGGLDSSAVTVFAARAFQGRGQGHIHTWSVDYIDNDRYFQPSHFQPNPDAPWVKLVSEHLETIHHYVYIDTPELVDSLKAAMRARDLPGMADVDSSLLLFCREVKREATVALSGEAADEVFGGYPWFRSEKALAANTFPWNRAGQERIRLLSPELKAMVRPEEYVARRYREALAEVPALPGEEARAARLREISYLSLTRFMPVLLDRKDRMSMAVGLEVRVPYCDHRLVEYVWNIPWEMKFVGQMEKGILRRALAGILPAEVINRRKSPYPKTYNPAYLEAVRNWMLDILADPASPLLPFIDVAAVKALTQSREVFNLPWFGQLMSGPQLFAYLAQIDTWMREYGVSVR

SEQ ID NO: 34028 - protein, 405 aa, Moorella thermoacetica ATCC 39073
MALIVQKYGGTSVNGPERVKNVARRVVNTRRAGNDVVVIVSAPGDMTDDLIAMAHEISPNPPAREMDMLLATGEQTSIALLAMAIHELGEPVISLTGPQVGILTDNVHSKARIMEVSCERLRRELEQGKIVIVAGFQGKTCEGEITTLGRGGSDTTAVAVAAALKADVCQIYTDVDGVYTADPRVVPEARKLPVISYDEMLELASLGAQVLQPRSVEFGKLNHVVLEVRSSFNDHEGTLVKEVTEMERKMVVSGVAGDRNVARIALHDVPDRPGIARTLFVALARESINVDMIVQSAMRDGINDIAFTVGRDDLQKAVEVTERVRQEIGASKVTSNDRVAKVSIVGAGMITNPGVAADMFACLAEEGINIHMISTSEIKVSCIIDEEHLTRAMQALHRHFKLDRE

SEQ ID NO: 34029 - protein, 521 aa, Moorella thermoacetica ATCC 39073
MATATEKLELRREVTVWGSYMWGYADVGADIYAALGLVMLWAKGATSLAFALAGLVYIMIGLAYTELAAAYPVAGGGQFFTLRGLGDFWGFVAGAALLLDYTIDIALFATASAGYINFFLPYLFGVNIDSLAVSIGPLHHVNLVWMAEALALVFFLIALNIRGMRESSLLNEVLGAIDILTESTIIVFGFLFAWRPELLAHQWVTQFPTFKEFAYGSSLAIISFVGLESISQAAQETKRPATVVPRTSVGLIFTVFIFATAFSTMSLGVLPWQDIAKAVGDPVATLAHAIPFIGIIAGPFAALLGATILLISANSGVMSASRLTFAMSQFNFISDWFNAVHPRYRTPYRTILVFSGIGILQLVLSFLTPNAMDTLGNMYAFGATTGYILVFIALIKLRFTDPYAPRPYKVPLNIKINYRGRVVEFPILGVIGTLGISTILFEVILTHAIGRIAGPAWIILCFLYYAYYRRSKGYPIFGNIPRDWEAQQIKVLEAAEEYDLLEEYKQALAERERLEAKAHVK

SEQ ID NO: 34030 - protein, 485 aa, Moorella thermoacetica ATCC 39073
MSQKQPAKIVMVSNRGSYNLQATRDGIQVVPAISGLVSAVEPFLREKGGVWVAWGGREAPQENSPGLRLPVPEGNPAYTFREVPLTADEINLYYHGFTNSALWPLCHYFLEKCRYEVREWSAYVDVNAKFAAATLEEAGERDTVWVNDYHLALVPAHLRHRRPQLKQFFFWHIPFPHHDLLATLPWATHILRGLLGTDVLGFHLQAYVDNFLQAVAHMLGARVDFEAGIVFWEQRRIHVGAWPMGIDYQAFQRQAASPATMARAQKLREQIGVERLALSVERLDYTKGILERLLAWERLLEEAPEWRGRAALIQVAVPSRTAVPAYRQLKEQVEATVGRINGRFSDGNYQPVYYFWRGLPRRELVAYYLAADVMLVTPLRDGLNLVAKEYVASRRDQTGVLVLSRFAGAAQELKGAVLVNPYDIDGMAMIFNTALGMGRAEQSKRLQLLQERVRRHDVHWWMNCFHQAMAVREGETGDVSGSAGS

SEQ ID NO: 34031 - protein, 396 aa, Moorella thermoacetica ATCC 39073
MQLAQRAAGISPSPTLAIDAQAKAMKAKGVKVINFSAGEPDFGTPEHIKQAAIDALAAGFTRYTPVAGIPELRQAICASLAARGVTYEPADIVVSCGAKHSLYNAMQVLLNAGDEVILSAPYWVSYYEQVKLAGGVPVVVTTGPDTGFKLTPGLLEAAITPRTRLLILNSPCNPTGAVYSREELAALAEVIVARDLIVISDEIYAALLYDGLTHTSIASLAPEVKERTILIDGVSKTYAMTGWRIGYAAAPRPVAKAMTDLQSHSTSNPTSIAQKAAVAALTGSQEAVEMMRREFEQRRNRILAGLRELPGIECNQPGGAFYVFPYIGKLFGRKFRGRVLGNSTDVATALLNEFQVAVVPGVAFGAEPYLRLSYATSMDQIEAGLERLRAFVTELE

SEQ ID NO: 34032 - protein, 392 aa, Moorella thermoacetica ATCC 39073
MRRVYLDHSATTPVRPEVLEAMLPFLKDEAFGNPSTVYSYGREAKKALEEAREKVANLIGARPEEIFFTSGGTEADNLALIGTAAANEKKGRHIITSSIEHHAVLHTAQYLLRHGFKVTFLPVTPEGLVRVEDVEKAITDETILISVMHVNNEVGTIQPIKEIGKLARERGIIFHTDAVQSVGKLPVNVDELGVDLLSASGHKIYGPKGIGCLYIRKGTKINPILYGGAQERKRRPGTENMPGIVGFGRAAELAGQELESEMERLQALRDKLIDGILTRIEDVQLNGDPRQRVATNANFSFRYCEGESILLSLDMKGICASSGSACTSGSLDPSHVLLAMGIPHEVAHGSVRMTLGRENTEEDIDYVLEVMPEIIARLRSMSPLYEEAAGKR

SEQ ID NO: 34033 - protein, 270 aa, Moorella thermoacetica ATCC 39073
MSVSSPVRPFLKWAGGKGQLLEQLQPLLPQNYSRYLEPMVGGGALFFYLQPAYAILADLNDELINVYRVVRDNVEELIADLRRHRNIREYYYAIRGTDPARLPPVARASRFIYLNRTCYNGLYRVNRLNKFNVPFGRYKNPDIVNAAGLRAASWALQAADLRAGDFSLVLEYARPGDFIYFDPPYQPLNRTSRFTSYTAGNFGEGEQKRLARVFRELTRRGCLVMLSNSDTPLIRELYRGFRIETVQARRAINSRPDRRGSITELVILNY

SEQ ID NO: 34034 - protein, 296 aa, Moorella thermoacetica ATCC 39073
MNNSAILEGFTRGQGFLASSDDFAGARAVLAGIPFDATTSFRPGTRWGPRAIRSVSEVLEEYSPYLQRELTGVPFYDAGDLDLPPGRVEASLERMEAAADAIFAAARIPFFMGGEHLVSYPLIRAAYRHYPDLAVLHFDAHADLREDYLGERFSHATVMRLVAEEIGPDRLYQFGIRSGTWGEFAYGQEETNFFMDVITPPLAKLVPELVRRPLYVTIDIDVVDPAFAPGTGTPEPGGCPPGEIFKAIQILQGANVVAFDLVEVCPAYDQSDITAILAAKILREAILAWGGKNDQA

SEQ ID NO: 34035 - protein, 466 aa, Moorella thermoacetica ATCC 39073
MASSILRKKDIATAMEMAAMDQYRLRRELKAMDLFFLVIGITIGGGIFVLPGVMAAEHAGPGVTISFLIGAVVAIFTGLCYVEFASMVPVAGSAYTYSYIALGEIFAWIIGWDVLLEFTLVCSAVAVGWSGYIVELLKDMGLSLPPAFTTDIAHGGIVNLPAVFILLVVAYIIYGGISLTGKVNDAIGIIKLLTVVFFIIVALPFVKPVNWQPFLPFGWQGVMTAAALGFFAYGGFDAVTTAAEETRNPNRDIPLGLILGLVVVASLYVLVSLVLTGVIPYTKLDTPAPVAFALSYLGKRWGGSLVAAGAICGLFTVMMGAMLGGSRILFALSRDGLLPPVFSRVHATRRTPYVATLIVLTVAVLTGGFLSLGELVELVNIGMLTAYLLTSISILVMRLRYPEIERPFRVPAVWLVAPVATLGVVALTFSLPGATLVRFAIWFIVGMLIYFGYGIRHSKLANRENN

SEQ ID NO: 34036 - protein, 463 aa, Moorella thermoacetica ATCC 39073
MTLLFRRKSISEATELAELKEYKLRRDLNLLELFFLVIGATIGAGIFVLPGVAAAKYSGPAVSISFFLGGLVCICVGLCYVEFASMVPVAGSAYTYAYLALGEIFAWIVGWDLLFEFTAGTSTVSVGWSGYFVEFLRGFGIHLPKMITTDIAHGGFINAPAIIAILLVTYIVYSGIREAGKINAYLSLGKLCALALFLVLAIPFIKPVNWHPFLPFGWKGVMTGAALTFFAFTGFDGVTTVTEETKNPQRDVPIALVSGLGFITILYIVVSAVLTGVVPYTKLDVPDPAAFALVSIGKSWGGGIIAIAAIFGLFTVMMGNGLSATRILFAMSRDGLLPPIFARVHKTRRTPYIATLIIFSVALIGGGFLSIGELAELANIGGLTAFTLTAISTLVMRYSQPAARRPFKVPAIWVVAPLGTVGGIALISSLPPITFIRFGIWMVIGLVIYFSYGRKYSKADIGG

SEQ ID NO: 34037 - protein, 329 aa, Moorella thermoacetica ATCC 39073
MSKWNVYVTRLVPQPALDLLAEYCDLEINPEDRVLTRAELLEKVRGRDGILCLLTDILDDEVFTAAKGAKIFANLAVGFNNVDLEAATRHGIMITNTPGVLTEATADMAWALLFAVARRVVEGDKFTRAGKYKGWGPLLMLGQEITGKTLGVIGAGRIGTAFARKARGFDMKVLYHDVQPSKAFEEATGGQFVDKETLLKEADFVSLHVPLMPSTTHLISTPELKLMKKTAILINTSRGPVVDEKALVKALREKEIWGAGLDVFENEPELAPGLADLENVVLCPHIASATWETRTNMALMAANNLLAALRGELPPQCLNPEVYYRQHGK

SEQ ID NO: 34038 - protein, 392 aa, Moorella thermoacetica ATCC 39073
MFEKIFADKMANLGTETAFMVLAKAKALEAQGKEIIHLEIGEPDFATPRNIIDAGIRALNEGYTHYTPAPGLPEVRATIAEYATRQKGVHYDPEEVVIVPGGKPIMFFTILALVNPGDEVIYPNPGFPIYESVINFVGGKAVPLPIREENDFRLDVDELAGLITPKTKLLIINSPANPTGGVLTAEDIGRIADLVRGKNIVVLADEIYDRIVYDGARPVSIAAQPGMKDWTIILDGFSKTYAMTGWRIGYGLMHRELADRIAQLMVNSNSCTAAFTQKAAQEALTGPQDAAEAMVAEFKKRRDIIVDGLNSIPGITCKRPLGSFYVFPNIKGLGLSSQELEAFLMEKAGVAALSGTAFGKYGEGYLRLSYANSVENIEKALEKIAAAVKELR

SEQ ID NO: 34039 - protein, 299 aa, Moorella thermoacetica ATCC 39073
MTNDYKDIDFNQLKKGGFIRQQGPDLFIMRLRSIGGHLTSRDLENIARLARKYGRGEVHLTTRQGVEIPGVRLADYQALIAEIQTLQLLPGACGPRIRSIVGCPGKEVCPNGVVDTREMARQVDQAFFGRDVPVKFKIAIAGCHNACTKPRENDIGLQGVVYPQLAADRCSLCGLCQSICPGGAIKIIADRVTIDRQKCCGDGACVASCPTGAWTAGARGFVLYAGGKMGRRPRLGDRLFDFIPEDEVIPRINSILQVFIKYRQGNERLADTIERLGSGGFRELIPPQFREEVAAGGRD

SEQ ID NO: 34040 - protein, 301 aa, Moorella thermoacetica ATCC 39073
MAFKLPKEVAMDIVQAGVKKAALPVNKTLVLGFLAGAYIALGGLLAVRVSGAVPNEVWGSLQKLIFAGVFPVGLMMVIIAGAELATGNFMTQPLALLERKIGVNGVFKNWVLAYLGNFIGSIFVAFFLAYMTGLTLEPVKTGDVVAKMPWAAFIVNLANAKTALNWWEAFWRGVGCNWLVALAVWMAFSANDIAGKIYAMWWPIMAFVAVGFEHSVANMFFIPLGIFVGNNPAYVAFTHTAQGIATQAPVLKATWETFFVNNLIPVTLGNIVGAGLFVGTVYWYVYLKAEKERSVRFSKAA

SEQ ID NO: 34041 - protein, 252 aa, Moorella thermoacetica ATCC 39073
MPTSTYQRDYEVRYYETNFLLEASPVTILGYLEETATLHSETAGIGINKLKAAGRGWVVYRYHLQMERYPRWREHITITTWVENFQRCFAHRDFYIHDAGGNLIGRAASVWVFLDIHKKKPLRIPPQVTGAYGLYPEVAVPGAFTDLPSLEKPATAGEFTVRMADLDTNHHANNKRYIGWILEGVPLEVHRTAFPATIEVLYKKDARYGEHIHCECQEIPAVEGDRCYLHRLSCPERDLELTLARTTWRKRR

SEQ ID NO: 34042 - protein, 560 aa, Moorella thermoacetica ATCC 39073
MAQETSGRTGARAVVEALLDEGVELVFGYPGGAVLPLYHELARTPIRHILVRQEQNAVHAASGYARASGRTGVCFATSGPGATNLVTGIATAFMDSVPVVIFTGQVPTRMVGSDAFQETDITGITMPITKHNYLVKDVEELPRIVKEAFYIAGTGRPGPVLVDIPKDVALAPCRAPLPERVELRGYKPTYHGHPGQLRSLARILGEAERPLIFAGGGVQVSRAEDYLRQLVEKLQIPVVTSLTGLGSFPEDNPLSLGMVGLHGKPCANHALMECDLLVGLGVRFDDRVTGALDKFAPRARIAHLDIDPAEIGKNVRVDLPLVGDISCILKELLPLVEPAGHGPWLQRIKELRNLYPLTYGRGGEVRPQWVIERLGEMTRGQAIITTDVGQHQMWAALFYGFTEPRTFISSCGLGTMGYGLPAAVGAALARPDKQVWLITGDGSFQMSMAELGTAREQGVPLKILLFNNQSLAMVRQLQHFYYERQYTAIEFTGNPDFVRLAECYGAEGLRISKQEEVVPVLARAMGNDRLTLIECLISPEEMVYPMVPEGAALDEMILPE

SEQ ID NO: 34043 - protein, 569 aa, Moorella thermoacetica ATCC 39073
MLFTIGDRAEGKKLTGAEIIVQALQAEGVDTVFGIPGGSVLPLYHELAVASIRHILTRHEQAAAHAADGYARASGKPGVCIATSGPGATNLVTGIANAYMDSIPLVAITGQVSVPMIGHDSFQEADITGITLPITKANYLVKNVHDLAATIHEAFYIATTGRPGPVLIDIPKDITTQRALFRYPPRLHLPGYRCKVQPHALQVAQAAAAIGAAEKPLLFIGGGVITSEAHEEVRQLAEGQDIPVVMSMMGKGGFPETHPLFVGMVGMHGTAAANYAMCETDLIIGVGVRFDDRVTGKVEAFAPKAKIIHIDIDAAEIGKVVQAHIPIVSDARQGLAAILEKLSGKGDHQAWRQQIRRWQEENPLRYEKSGLKPQYVLEELYNLTKGQAIICTDVGQHQMWAVQYYPLSRPRAFLSSCGLGTMGFGVPAAMGAAVARPGEPIVVITGDGSFQMNIQELATISHYQLPLKIIIMNNGYLGMVRQWQEFFFNRRYAYSEMLGNPDFVKVAEAYRIPGRLVNESREVVPALEEALAAEGPFLVDVRIDREENVFPMVPPGGTLNKMVTGGKGA

SEQ ID NO: 34044 - protein, 499 aa, Moorella thermoacetica ATCC 39073
MLDQTRTPVFTAIKQYIDDEVIPFHVPGHKQGRALPEFKEYVGERVLAMDLTCVPGLDNICNPRDVIREAEELTAAAYGAEHAFFLVNGTTSGIQAMILAVCQPGDKIIIPRNAHRSALGGLILSGARPVYIEPEINADFGISMGITPEQVEAALREHPDAKAVFVISPNYYGTVPPLKEIVAIAHSYDVPVLVDEAHGAHLKFHPALPPSAMEAGADLAATSAHKLAGSLTQSSYLLLQGGRLDPKHIKAVLNLSQTTSPSYILLASLDVARKQMILKGRKLLERTLEIAHWIRGELSRIEGLAIMGEEVTSLPGCSYLDPTKITVNVQGLGLSGYEMETLLRREYKIQVELSDLYNVLLLVSIGDNEETAGKLVAAFKDIARKRSLKNVVRFCPPLPAIPRMAVLPREAFYSQTYCLELDYAEGEISAEAITAYPPGIPLVCPGEVITREIIDYVNLLKREHADLQGPEDPELKVIRVLKDTVSMLEHGAASRAGLA

SEQ ID NO: 34045 - protein, 408 aa, Moorella thermoacetica ATCC 39073
MKGVFTVAEKVVLAYSGGLDTSIIIPWLKETYGYEVIAVAVDVGQGEELEPLEEKAIKSGASKIYILDKKKEFVEEYIWPTLKAGAVYEGKYLLGTSFARPLIAKCLVEVAAQEGATAVAHGATGKGNDQVRFELGVKALNPQLKVIAPWRIWNIRSREEAMDYAAARGIPVPVTKDRPYSMDRNLWHLSHEGGDLEDPWNAPGDDLYLIITPPEQAPDKPTYVTIDFEKGIPVAVDGEKLDAVALVEKLNDLAAANGVGIVDIVENRLVGMKSRGVYETPGGTILYTAHRELEYLTLDRMTMHFKEMVAAKYAELVYDGNWFSPLKKALDAFVDSTQETVTGTVRLKLYKGSCTPAGVKSPYSIYNEDLVTFGAGGDYDHKDATGFINLFGLPLKVRALMEQKTGLR

SEQ ID NO: 34046 - protein, 215 aa, Moorella thermoacetica ATCC 39073
MRIFIDTANVEEIKAANDLGIIAGVTTNPSLIAREGRNFREIVEEIAAIVDGPISAEVVSTTAPEMVAEGVELAAIHPNIVIKIPMIAEGLKAVKELSARGIKTNVTLVFSANQALLAALAGATYVSPFVGRLDDISHDGLQVIADIVPIFAQYGFKTQIIAASIRHPLHVLEAARLGADIATVPFKVLMQMLKHPLTDTGLARFLADWEKVKNK

SEQ ID NO: 34047 - protein, 317 aa, Moorella thermoacetica ATCC 39073
MRFNKKNLIVLAGVILIYFLVYELQAAGVISAFQEINLMMLGINIILAVSLNLIVGFTGQLALGHAGFMAVGAYVSAILSTNFNQPFPVALLAGACAAAVAGIVIGLPTLRLRGDYLAIATLGFGEIIRGAANNINYIGGAAGMIGIPQLTNWTWLYAMMVLTILVTTNFINSTHGRACVAIRENEIAAETMGINTTYYKVLAFAMGAFFAGIAGALYAHYFYLIQPTTFTFFRSFDILVMVVFGGLGSITGSIIAAAGITFVNAALQDLAVLRMVIYAVLLIIIMVFRPQGLMGNKEFTLDRWLKKRGAVSGPAGN

SEQ ID NO: 34048 - protein, 225 aa, Moorella thermoacetica ATCC 39073
MRILVDFLSQSIQFLYNITKAIGIPNYGLAIILFTIAVKVILYPLTYRQLRSMRRLQELQPKIQELQKKYKSNPQKAQQAMMELYQKEKVNPLGGCLPLLIQMPILYALFTSLRSFFNPALNPTVNLAHANFLWISNLGQPDPYILPVLVAVGTFFQQKVSMVSGGQDQTQKTMLFVMPLIIGWMSRNFSAGLSLYWVTFSLMGILEQWLARRQPHLVKEEISAK

SEQ ID NO: 34049 - protein, 366 aa, Rhodospirillum rubrum ATCC 11170
MTERKTGSPFSARRSRLGFEEGNGFAMTIPSPSISAPVADLSDEAGRALACARHVLEAEAEALRALAADLNGAFTAAIDLLCDGPAKRSGKVIISGMGKSGHVAAKIAATLASTGTPSFFVHPAEASHGDLGMIGRSDAVIALSNSGETPELADMVAYTRRMGIPLISITGRHPSALSDAADVALVLPALTEACPHGLAPTTSTTAMMALGDALAVALLERRGFTASDFRLFHPGGQLGRKLLKVADLMHGQDRLPLVGPATPMAEAILEISSKSLGCVGVVDAAGRLAGIITDGDLRRHMGADLWSRTAGSVMTPTPKTIAPTTLAIEGLRIMNESAITGLFALDADKRPVGFLHLHDCLRAGLA

SEQ ID NO: 34050 - protein, 1524 aa, Rhodospirillum rubrum ATCC 11170
MTQSSERLSASAPESGEAFVARWQRDAARLEAAHAYDPAHEHSSCGVGLVASINGKPRRSVVEAGIQALKVLFHRGAVDADGKTGDGAGIHVEIPQDFFKEHIRRTTHEPRAGRVAVGMVFLPKTDLNAQEVCRTIVESEILSFGYSIYGWRQVPVDTSVIGEKANATRPEIEQIMIANTRGGDDEQFERDLYVIRRRIEKHALASNVGELYICSLSCRSIIYKGMFLAEQLTSFYPDLLDERFISSFAIYHQRYSTNTFPTWRLAQPFRMLAHNGEINTLTGNINWMKAHETRMDSPFFAEVIEDLKPVVQPGGSDSAALDGVFELLCRAGRPAPMVKAMVIPESLTQNALMPDHHKALIGYCNCVMEPWDGPAAIAATDGRWVVAGLDRNGLRPMRFTITTDGLLIVGSETGMVRVPESDILRKGRLGPGGMVAVDLREGRLYEDGEIKDVLAAREPYAEWVGKITELEGQIGTDVVEPATLSTEDLCRRQLACGQSMEDLELILHPMVADAKEALGSMGDDAPLAVLSSHYRALHHFFRQNFSQVTNPPIDALRETRVMSLKTRLGNLGNILDEDASQCDLLQLESPVLTTAEFEAMRRSMGETVAEVDCTFSPDGGPTGLRDAIVRVQQEAEEAVRGGCTHVVLTDTALSATRVAIPMILAAGAVHTHLIREQLRTFTSLNVRCAEVLDVHYFAVLIGVGATTVNPWLAQESIADRLRRGLFDEGVTLEAAMKRFKKAVNEGLLKIMSKMGISVISSYRGGCNFEAIGLSRSLVAEYFPSLTSRISGIGLAGIQKKVLEQHAKAFGAAAVVLPVGGFYRVRKQGGEAHHFDGDLIHTLQQAVATDSYQTFKKYTAGLRKLPPITIRDLLDFKPGTTGVSIEEVESITSIRRRFVTPAMSLGALSPEAHGTLNIAMNRIGAKSDSGEGGEVRERYKPAANGDNANSAIKQVASGRFGVTAEYLNQCREIEIKVAQGAKPGEGGQLPGFKVTEMIAKLRHSTPGVMLISPPPHHDIYSIEDLAQLIYDLKQINPRAKVCVKLVSRSGIGTIAAGVAKANADVILISGHSGGTGASPQTSIKHAGLPWEIGLAEVHQVLTLNRLRHRVTLRTDGGIKCGRDVVIAAMLGAEEYGIGTTSLVAMGCIMVRQCHSNTCPVGVCTQDDDLRAKFTGTAEKVVNLFSFMAEEVKEILASLGMRSLDEVVGRTDLLQQVSRGADHLDDLDLNPILVQPDTGSGPNICTMEGRNEVPETLDAQMIADAKSALDDGEKMQLTYTVRNTHRAIGTKLSHRIVIKYGMTGLEPGHITVRLRGSCGQSLGAFAVQGLKLEVFGDSNDYVGKGLSGGTIVVRPAVSSPLQTNENTIIGNTVLYGATSGKLFAAGQAGERFAVRNSGAQVVVEGCGSNGCEYMTNGTVVILGQVGANFGAGMTGGMAFVYDPQNTFPLRVNPDSVIWQRIEVPHYAGVLRDLIAEHVSETQSKYAEHLLADWGREIGNFWQIVPKEMVNRLAIPARVAEAEKVSA

SEQ ID NO: 34051 - protein, 658 aa, Rhodospirillum rubrum ATCC 11170
MCGLTGYWTRGGDGRGRGEMTALVLRMAGALAHRGPDGDGAWVDEDAGLALGHRRLSIVDLSPAGQQPMVSADGRLALAYNGEIYNAAELRPELEAAGIVFRGHSDTEVLLEGFARWGVVPTLRRAIGMFAFALWDRKERRLTLGRDRLGIKPLYVADHGGTLLFASQPKGMMPHPSWRGEVDREGLAAMLRLSCLPAPRSIFKGVSQLAPGTVVRFEADGRRSEEVFWSLEEVAARGVAQARSQPARPESASLAVEHLESLLLDAVRRRLIADVPVGAFLSGGVDSSTVVALMRKVASGPVKTFSIGFAEEGWDESVHAAAVARHLGTDHRELVVSPDEVPAIVGDLPRWYDEPFADASQIPTLLVSKLARSEVTVSLSGDGGDELFAGYNRHVQGQRLWDLAQRIPTVGRDLGAALIEAPSPGFWQRAVGLLPAGRRPPQAADKPAKIARLLRARSPEALYRTLVGAMPSAEVPLAGVSLAAEERWYAASAEGVDSFVDRMRLLDAKGYLPDDILTKVDRASMAYGLEARVPLLDHRVVEFAWSLPPEMLIREGQGKWLLRRVLHRHVPRALIERPKMGFGVPLAAWLRGPLRGWAEDLLDPQTMAVQGLIDPAPVRRWWLDHLAGRRDTHDRLWPVLSALSWHHHWKSAGAFTAA

SEQ ID NO: 34052 - protein, 390 aa, Rhodospirillum rubrum ATCC 11170
MTDIVIAGATRTPVGTFNGGLSGLPAHALGEIVIREVLRRAKVEAGEVDEVVLGQILTAGQGQNPARQAAVNAGIPVEKTAYGINQLCGSGLRTVALGFQAITLGDADIVVAGGQESMSMAPHATYLRSGIKMGTTELVDTMLKDGLWDAFHGYHMGTTAENIAGKWQISREDQDLFSAGSQNKAEAAIAAGRFKDEIVPVTVKGRKGDIVIDTDEHPKAGVTPESLAKLRPAFSKDGTVTAGNASGINDGAAALVLMSEANAAKRGVAPLARIVSWATAGVDPAIMGTGPIPATRKALEKAGWSIDDLDLIEANEAFAAQALAVNKDLGWDPAKINVNGGAIALGHPVGASGARILVTLLHEMIKRDAKKGLATLCIGGGMGIALCVER

SEQ ID NO: 34053 - protein, 576 aa, Rhodospirillum rubrum ATCC 11170
MGSIGSNIQKHSRGVCAVVQSSVASRTGGALLADSLIALGADTVYCVPGESFLPFLDAVHDRTDALRLVVCRQEGGASYMADAHAKMTGKPGVCFVTRGPGACNAAIGVHTAFQDCTPMLLFIGQVDRPMIGREAFQEVDMTAFFAPLAKFSATADSAARLPELVARAWAAATSGRPGPAVVALPEDVLAEMAFARDPLPRPPARPAPRAADMADLASRLAAAERPLVIVGGGTWTPRAAKLVTTWAEASGLPVVAAFRRQDVVDNLSPVYIGELGFSASPRLNARIKAADLIVCVGDRLGEVTTQGYSLIESPVPSQSLIHIFPDAGEIGRVYATDLGIVSAMEPFAEMLSPVDGRHWAGWLAQGRADYAANLRADPCPGSVDMAQVMAEIEARLPEDAVITNGAGNYSGWVHRFHRYRHFPSQLAPGNGSMGYGLPAAIAAKVVAPRRVVVAFAGDGCFLMNGQELATAVDQGLDPIIIVINNGMYGTIRMHQEKAYPGRVSGTSLTNPDFVALAQAYGALGLRVRRTAEFGPAFDQALVAGRPVLIEIHQDPEAISHRVSLTALREKALATSA

SEQ ID NO: 34054 - protein, 310 aa, Rhodospirillum rubrum ATCC 11170
MSYYTPKEIAENAVKTYGLKAAMPASKILALGFLAGGFIALGAEAATLAAHDASGVGIGRLISGLVFSTGLMMVMIAGAELFTGNVLIWMDFLERKVGVNAMLRNWTLVWLSNFAGAVVVASMMDLSGLWNTNEAHVGAYVLKTAVGKLSLTYTEAFVRGIFCNWMVCLGVWMAYSAKDTAGKVLAILFPITLFVLSNFEHCVANMYYIPAAIFAKANIAAVEASHLGDKLDLLTWSNFIVNNLVPVTLGNIVGGALFVGSFYWFTYLRGQKPTPAPAATVPFSVAKCPVIAACPATTLAGSKGSLSAAE

SEQ ID NO: 34055 - protein, 243 aa, Rhodospirillum rubrum ATCC 11170
MENGEGTADRGAGLSRSAAQGPDRPWSSGLLDRALLRRKLAAGKGLGKRSDWAVSGDLGGTAPSGFQRPPEGCRPAAVLVPLVDHPGAPSLLLTRRTAHLANHAGQIAFPGGRSEPEDASAEATALREATEEIGLPASLVDILGRLDDYVTVTGFRVTPIVGVVSPPFRLIPDPFEVEDAFEVPLAFVLDGANHRRETRQVKGERRAFYAMPYREHYIWGATAAMLMNLHAVLGRTEGEGEVG

SEQ ID NO: 34056 - protein, 586 aa, Rhodospirillum rubrum ATCC 11170
MADQQKSGAEIVLKALADQGVEVIFGYPGGAVLPLYDEIFKQNQIRHVLVRHEQAAVHAAEGYARSTGKTGVVLVTSGPGATNAVTGLTDAMLDSIPVVCLTGQVPTHLIGNDAFQEADTTGITRQCTKHNYLVKKGEDLARVIHEAFQVAGSGRPGPVVIDLPKDILMGPAPYVAPSRVKHKSYRPQLKGDITAIEKAVEIIAKAKRPIFYCGGGVVNSGPQASQLLTQFVKMTGYPITLTLMGLGIYPASDPQYLGMLGMHGTFEANHAMHDCDVMVAIGARFDDRVTGRLDAFSPNSTKIQIDIDPSSINKNVAVDLGIVGDVGHVLEDMIKVWKARQYHPDVAALKNWWGRIADWQRRDCLHYQPSDEVTKPQYAIERLYALTRDRETFITTEVGQHQMWAAQYFKFDKPNQWMTSGGLGTMGYGFPAAIGVQMAHPGALVVDISGEASFMMNMQELATAVQYRLPVKVFILNNRYMGMVRQWQELLHGGRYSESYSECLPDFVKLAEAFGAVGLRSEKPADLDDVIAEMIAVDRPVLVDVAVDPSENVFPMIPSGAPHNQMLLGPEDSLGQPISKEGAILV

SEQ ID NO: 34057 - protein, 310 aa, Rhodospirillum rubrum ATCC 11170
MKILACNSNRPLAEAIATYLNLELTHASVRRFSDMEVWVEILENVRGEDVFVVQSTSYPANDHLMETLVTLDALKRGSARRVTAVIPYFGYARQDRKTGPRTPITAKLVANLITSAGANRVVTLDLHSGQIQGFFDIPLDNLYAAPVFSKHIIENFKGTRPMIISPDVGGVVRARELARRIEADLAIIDKRRERAGVSEVMNIIGDVRGRDCILVDDIVDSAGTLCNAAVALKNAGATSVAAYVTHGVLSGGAVARVTSSPLDSLCITDSIQATEAMRLARNVHQISIAPLMAEAMRRISQEASVSSLFN

SEQ ID NO: 34058 - protein, 109 aa, Rhodospirillum rubrum ATCC 11170
MSVQDRIKSEVDGTPVVLFMKGTPAFPQCGFSAAVVQVLNHYGVAFKGINVLEDDEIRQGIKEFANWPTLPQLYVKGEFVGGCDIVREMAADGELATLFEKSGIPTTAA

SEQ ID NO: 34059 - protein, 406 aa, Rhodospirillum rubrum ATCC 11170
MARIVMKFGGTSVGDVDRIRNVARRVKAEVDAGNEVAVVVSAMSGETNRLVGFCDSMTNMYDAREYDAVVATGEQVTIGLLAIALQDIGVEARSWMGWQIPIHTDEAHGKARILSIDTTVLEQRLASGQVAVVAGFQGLGPNNRVTTLGRGGSDTSAVALAAALKADRCDIYTDVDGVYTTDPRIVPKARKLDRITYEEMLEQASLGAKVLQTRSVEMAMKHRVRVRVLSSFSDAPGTLVCDEDEIVEKELVSGIAYSRDEAKITLVKVSDRPGVAARIFGPLADANINVDMIVQNVSEDGHSTDLTFTLPRSDLARALKVLEGARDDINYRELTTSSAVVKVSVIGVGMRSHAGVAQTMFRALSEKGINIHVISTSEIKVSVLIAEEYMELAVRALHSAYGLDAA

SEQ ID NO: 34060 - protein, 414 aa, Rhodospirillum rubrum ATCC 11170
MILTINCGSSSLKYQLYTPDLGEVAAKGIISRIGEAGTSIDHRVGGRKIRQDLPGADHAGALEAVIANLLHPEWGAIGDIAEIEAIGHRAVHGGDTFVESVLVTDEVIAQLEECTPLAPLHNPVNLVGIREARRLLPDVPHVVVFDTSFHQGMPPHAHVFALPYHYYAEHKIRRYGFHGTSCRYVSARAAEILGRPIEDLRMVICHLGNGVTIDAVSGGRSVDTSIGFGTFSGVMMGTRSGDFDPGLIFYMHKKLNMSLSDIEAICYKESGLLGVSGVSNDMREVVEQAVAGNARCALAIDMFVYMVRKFVGSYAAAMDGIDALVFTAGIGENSAYIRSRISHGLEFLGVELDDVANDQVNGAAAIISPAHARAATMVVPTDEEKMIALDTLRLSGGLIGRDPAEVYLAAAVAE

SEQ ID NO: 34061 - protein, 393 aa, Rhodospirillum rubrum ATCC 11170
MSVVYLDHSATTPADPRVVEAMIPFLGGIYGNPSSLHTVGREARAAVLTARAQVAALIGARPEDIVFTASGTEADNLAILGSYEARESQDFALAVSAIEHPAVLAPARAVERRGAALEIVPVDGQGTVDPDRLALAFARRPAIALVSVMAANNVVGTLQALEDLGQVAHENGALFHTDAIQAAGKVAIDVRTLPVDMLSLSAHKLHGPKGVGALYLRPGVALHPIIHGGGQERGLRSATENVAAIVGFGKAAEIALAEGAAEADRLRVLRDHILAEVTRRLPNAYLLGHPSERLPGHLCLGFAGQEGEAIRLLMALDQEGIAVSSGSACSAHRVAEPSYVLQAMGLDAFQARGSLRVTLGRFTTAAEIERFLEVLPRVVGELRSISTRRFATS

SEQ ID NO: 34062 - protein, 640 aa, Rhodospirillum rubrum ATCC 11170
MNLSRNLLLWIIIAVLLVVLFNLFQTSAPRGPQTTVPYSDFLSSVDAREVRDVVIKGDSISGHTTDGRAFTTYAPRDADMVSHLRDSGVQISAVPAEDNVPTFWSILISWFPFLLLIGVWIFFMRQMQSGGGKAMGFGKSRAKLLTEKTGRVTFDDVAGIDEAKQELEEVVEFLRDPQKFQRLGGKIPKGVLLVGPPGTGKTLLARAIAGEANVPFFTISGSDFVEMFVGVGASRVRDMFEQGKKNAPCLIFIDEIDAVGRHRGAGLGGGNDEREQTLNQLLVEMDGFEANEGVILIAATNRPDVLDPALLRPGRFDRQVTVSNPDIMGREKILKVHMRKTPLGPDVDAKVIARGTPGFSGADLSNLVNEAALLAARKGKRVVTMAEFEEAKDKVLMGAERRSMVMTEDEKEKTAYHEAGHALIAIHQEGHDPLHKVTIIPRGRALGVTMSLPERDRYGYSLKELKARIAMAFGGRVAEEMIYGTENVTTGASNDIMQATDLARRMVTEFGFSEKLGPLRYTDNQEEVFLGHSVTQHKNLSDETARMIDEEVRRFVEQGEARAREILGKYKDELEIITRGLLEYETLSGDEVNKLLRGEDLNRAEQPAPPRDRSGRRASVPTSGPAAGGVGGDPEPQPGA

SEQ ID NO: 34063 - protein, 400 aa, Rhodospirillum rubrum ATCC 11170
MSIVAERLSAIKPSPTLAVTTKAAELKAAGRDIIGLGAGEPDFDTPDHIKQAAIAAIERGETKYTAVPGTAALRKAICAKLKRENDLEYTIEEISVGCGGKQTIYNALMATLNPGEEVIIPAPYWVSYPDIALLAGGVPVFVPSGPEVGFKLQPADLERAITPKTKWLILNSPSNPTGVAYSAADLKALAEVLLKHPHVWVMTDDMYEHLVYDGFKFATIAQVEPKLKDRTLTLNGVSKSFAMTGWRVGYAAGPVAVIKAINKIQSQSTTHTSSISQAAALAALEGPMDFLIERNAIFKERRDLVVRMINDCPGLSVGTPEGAFYVYPSCAGVIGKTTPEGKLLETDSDFVAALLESEGVAAVQGVAFGLSPYFRISYATATATLEDACQRIRRFCESLR

SEQ ID NO: 34064 - protein, 391 aa, Rhodospirillum rubrum ATCC 11170
MKFLDQAKIFVKSGDGGNGCVAFRREKNIEFGGPDGGHGGRGADVIVEAVPNLNTLIDFRYQQHFKAARGRDGSGDNRTGKSGEATIIKVPVGTQIFEDDRKTLIADLSRPGQRVRLAKGGDGGFGNAHYKSSTNQAPRRADPGWPGQEIWVWLRLKLIADAGLIGLPNAGKSTLLAAVTRARPKIADYPFTTLHPNLGVVHQDAREFIIADIPGLIEGAHEGAGLGTRFLGHVERCAVLLHMIDATQDDVAGAWRTVRAELKGHGQGLDEKSEIVGLSKIDALPPEDIAAKIAELSEACGAPVMAFSAISGKGLADVLRVMATHVDEARALRHARGEAEGDASDEAMRDVTGIDHGYNRPSAVVDWEDAPFDDDDDDDGDESGDKGQWTR

SEQ ID NO: 34065 - protein, 100 aa, Rhodospirillum rubrum ATCC 11170
MFAVIKTGGKQYKVAENDVIDIEKLEADEGATVEFDSVLALGDTVGLPTIAGAKVTGEVLSQFRGEKVIIFKKHRRQNYRRKNGHRQFLTRVRITGFAGV

SEQ ID NO: 34066 - protein, 1491 aa, Rhodospirillum rubrum ATCC 11170
MMDPLQGCLLRLLRSDGESDIIVGTGFLSLGADGRPYVLTCAHVVNAALGRDKTETSHPGSCVVMANQQGGKPIPLDLQAWNAPISGASGNSDIADIAILTPLQSLSASWLPRLRAEPPSRVVPHNSKVPFHSFGFMVTSDGNPARGSLTAVDFANRFVAHGDHTFRRFIEEGLSGAPVFSDDSRVLGMVARRLAVEDKQGLVISAFALAQAWPLLAMPYPGLPSFEASNAHLFFGRGRPVNGEVPTGKLKELLERLQKQRLVALVGASGSGKSSLANAGVAEYYRQRNWRVVSFRPGLAPLRNLSEAIFEVIEEGETVLSRLQTVSYWESLLKRGMLRDAFDCINRAGADGTLVIVDQFEEFFPGREASSYDNGDLSVDLDPIAQERSLILKQLRQAEDRADVHCLLTVRLDLLESIIKGGKDAARLLSDPYPIFMLTAMTASEVREAIVGPAQVFGVETDTNFATNLAAEVTKGEGRLPLLQEALRQCWARIRFGEQGWNLYQPEDLSEGKEILLLEESVGRRGDEAMGEIERHYKPVEVNRMLLSLVRWVDGRPLRRILSMMESDESDVPMIAMLANQRLVILSGDGSRRTAELVHEALMTRWARLASLISNHHVFLEWRDRFDREFIVWERGRCEEKDLLRRHDVQLAMSWKENVDGFFIAPTSRQLKFIDESYLFYEKEEIRREEDFRQKEKQNRRIRKWLLLSIFALFLFFIFLCLSIFTFKKAQDETYSAQMQESRALAVLARQESEKGDQGTAILLALEGLPDPGFGGKRPLSPEAATMLRQAWLRNREVTTVGYDGPVRVASLSSDGQRVVVASDDEIVRVWDLSAPKSPGINLGEHQGSVFSANLSPDGQRAVTASYDGIVLVWDLSAPKFPAITLAGSSGSVLSGRESVSFSPDGQRVLKTSEDGTAQVWDLSSSKIQAITLGERGHYVQSASFSPDGRRVVTASSDGAAQVWDLSAPKTQAILLEGHEQPVQSASFSPDGQKVVTVSSDGTARVWNLSEPKPQALLLDGHKGLVQLASFSPDGQHVVTASGDTARVWDLSAPKSQAFLLEGHEGSIQSASFSPDGRRVVTGSGEGTVRVWDLSAPKSQPILLRGHLRATFFARFSADGRSVVTASYDGTARVWAVPAVEPGELFLEGSDDSVRSASFSPDGEHLVTISDDKTVRVWDLSVPKPRSLLLEGYEGSVQSASFSPDGQRLVTVSDDKTARVWDLAEPKAKALILEGDDASVGSASFSPDGRRVVTASYDKTARVWDLSALKPRAITLESSLGWVGSANFSPDGQRVVGASYGGAQIWDLSVPERPKLCMRLKQLNAGLLQSASFSPDGGRVVTVSDGGTRVVDLSTPKSPPITLGGRLDRARSASFSPDGQRVLTASYDGTARVWDLAGSQASALVLGEYSSSMLYANFSRDGRRVLTFSSPNKLRVWDVYPDIRELSSLVRKRLTRCLSTAQREEFGLRVEDRKRNRDAIPIPDSEGNCPR

SEQ ID NO: 34067 - protein, 588 aa, Rhodospirillum rubrum ATCC 11170
MTPHADRRTLFIAATTALPGLSAVSQGLVRAFERQGLRVAFAKPVADHAAVGGDGAPSADLAGPIPARRAEAMIRAGQRDGLLEEIVERAERARGDSAVLVVEGPLPDADHPLLAELGRDLGRSLAAEVIAVVSGDRPSPTDVLETVADTLYHQGAAALSGVVITSIREGQQGDALKAALAGLNLPCPLVALFPGESERSLLGLIGGAAPGRARGLGEDDASVVWLIEHIADHVARGHLTDPSPTHRAAMPPPLFRHRLVGAARAADRRIVLPEGDEPRTLRAAAICAKKGIARCLLLGDPSRIRALAQANAICLPDTIEILDPELVRGRYVEALVEMRRAKGLTAVQATAQLEDTVVLGTVMLALGEVDGLVSGAVHTTASTVRPALQLIKTAPGASIVSSVFFMLMPDQVLVYGDCAINPNPTAEQLADIAIQSADSALAFGIEPRVAMISYSTGSSGVGDDVEKVRAATALAKLKRPGLMIDGPMQYDAASVESVGRQKAPDSPVAGRANVFVFPDLNTGNTTYKAVQRSANVVSVGPMLQGLRKPVNDLSRGALVDDIVYTIALTAIQADQGEPRTPHTLATAV

SEQ ID NO: 34068 - protein, 408 aa, Rhodospirillum rubrum ATCC 11170
MLSPLILVINCGSSSLKFALFPLEGRTPVLVGLAECLGQAEASIRIDHAGTRDKRAIANAGHQQALDCLLGRLGEMGLLEPISAVGHRVVHGGERFTGSAPITPEVLADIEACAQLAPLHNRANLIGIFAAMKALPDTPQVAVFDTAFHQTMPPEAYLYALPRLYHSRLGVRRYGFHGTSHRFVAAEAVKLLGLDPDHHGLIIAHLGNGASATAVLNGRSVDTTMGMTPLEGLVMGTRSGDVDFGVLAHIARHEGLDIDGLEALLNKTSGLLGLSGLSGDCRALQEAASQGHAGATEALGVFVHRLVRHIGALAMSLPRLDALIFTGGIGENSALIRGRTLDHLGLLGFELDSAANDTMPRGESGVISRGAGPKAAVLPTNEEWMIAHDTAAIAGLLSNSAQNERLAS

SEQ ID NO: 34069 - protein, 391 aa, Rhodospirillum rubrum ATCC 11170
MNDVVIAGAARTAIGAFNGAFGAVPAHTLGEVAIREALNRAKVEAGDVDEVVLGHVLTAGQGQNPARQAAVNAGIPVERTAYCINQLCGSGLRTVALGFQAIRNGDAKIVVAGGQESMSMAPHASHLRAGIKMGPGELVDTMIKDGLWDAFNGYHMGTTAENIADKWQISRAEQDEFACASQNKAEAAIAAGKFKDEIAAVTLKTRKGDVVVDTDEHPKAGVTIESLAKARAAFRKDGTVTAGNASGINDGAAALVLMSADNARLRGIAPLARIVSWATAGVDPAIMGSGPIPASRLALKKAGWTIDDLDLIEANEAFAAQAIAVNRDMGWDTAKVNVNGGAIALGHPIGASGARVLVTLLHEMIKRDAKKGLTTLCIGGGMGIALCVERG

SEQ ID NO: 34070 - protein, 677 aa, Rhodospirillum rubrum ATCC 11170
MDFFPAGHPLTQALIERNYTEPTAVQTAVLEPGAQGRDLLVSAQTGSGKTVAYGLAIASTLLGDEAVLEPATEPLALIVAPTRELALQVHRELAWLYGHAGAKVVSCVGGMDPRAETRRLGEGCHIVVGTPGRLRDHLERGNLAVGRLKAVVLDEADEMLDLGFREDLEFLLEATPQERRTLLFSATLPKAIVTLAKRYQREAWRIAVAAGKQGHADIEYRAISVAPNEVEHAVVNLLRYVESPATLVFCNTRESVRHLQAILLERGFAAVALSGELGQGERNQALQALRDGRARVCVATDVAARGIDLPNIGLVIHAELPQNAQTLQHRSGRTGRAGRKGISVLLVLFSRKRRAEQLLETAGVRAQWGGAPSADDIRALDQERLLQSPLVSEDLTEDDLAMAKALLAVRSPEEIAAALVRMYRAQLPAAEDVFAAGTAEPSPEPRARRPASRDRDRDGEREPMTEPRPGRNSGLSGPSVCFRLNVGRQKNADPRWLVPMICRLGKITKQEIGAISIFERDTKIEIAAAFAERFIAAVGQVERGDIRIDPWVETSRSKPVDALEVATAGDEAAAAAPRASAPRAPRASEPRVTKPYEPRAPRSTEPRAPRAARSADRPTEARAPRTAEPRPPRASDRASEPRAAKAPRRTEKPAVGKAMVKTWGKPKPGSRPKTKQK

SEQ ID NO: 34071 - protein, 402 aa, Rhodospirillum rubrum ATCC 11170
MFPPSPKQAFLVLNSGSSSIKFSVFEKTSDDVLTMILTGQLTGIGTDAQFSVKGAKGETLAKESWAERDTGAIAPLLQSLIVWITDRLPDTPLAAAGHRVVHGGRRFVHPVQVTPQVILDLESLIPLAPLHQPQNVSAIRVLAETFHDLPQIACFDTAFHHSQPRRARSYALPRELTDRGLHRYGFHGLSYEYIARHMPSIAPEIAEGRIVVAHLGNGSSLCALHRGESVDTTMGFSALEGVPMGTRSGSIDPGVLIYLIRELGMGADELEHLLYQRSGLLGVSGLSNDMRVLLESDSPDAAEAVDLFCFRVAKEIAALAASMGGIDALVFTAGIGEHSEPVRARICERLAWLGITLDATANARADGLISQPGSLPVLVVPTNEEYMIARHTADLVALKNVA

SEQ ID NO: 34072 - protein, 478 aa, Rhodospirillum rubrum ATCC 11170
MTTVSPDDSSPSTLTSLTFDDLTPGQSASLSRTLTQADLDLFATVSGNIDPSHFADPPAGTTLFPKAIGHGMWSASLISGVLGTRLPGPGTVYLAQDLRFRAPVTLGDTITASVTVREKRTERKTVVFECLCTNQNGVTVVSGTAEVIAPATHASVAAQALPGLQMIRHDRQAALLARCAGLPALPTAVIHPCDGPALQGAVEAAQRGLIEPILVGPSLLIAATAKALGLDISAFRLVEAANGAAAAATGVALVRAGEARAVMKGALHTDELMAAVVKRDGGLRTAGRISHVFLMTVPTYPKPLLITDAVVNIAPSLEDKVHIVQNAIDLARILGVETPKVAILSAVETINPKISSTVDAAALCKMAQRGQIRGGLLDGPLAFDNAISAEAAKTKGIVSEVAGQADILLVPDLESGNMLAKQLSFLAHADAAGIVLGTSAPVMLTSRADNLAARLASCALAVLIDAASRPRSTVLAAE

SEQ ID NO: 34073 - protein, 391 aa, Rhodospirillum rubrum ATCC 11170
MNDIVIAAAARTAVGAFTGSLSSLPAHSLGASVITDLLTRGKIAAGEIDDVLLGQVLTAAQGQNPARQAAIAAGLPASSTALTINQVCGSGLRAVALGAQAIACGDAEVVIAGGQESMSLAPHAVLLRAGVKMGPAEMVDTMIKDGLWEAFHGYHMGITAETVAQAFGIDRATQDAFALASQQKAAAAQREGRFVDEIVAVCVRSRKGEVLVDSDEHLKPDTTAQSLAKLRPAFTKDGTVTAGNASGLNDGAAGVLLMSAENAAKRGVTPLARVVSWATAGVDPAVMGTGPIPASRKALAKAGWTIDDLDLIEANEAFAAQAIAVNREMGWDTAKVNVNGGAIAIGHPIGASGARILVSLLHEMTRRDAKKALATLCIGGGMGIALCVERP

SEQ ID NO: 34074 - protein, 616 aa, Rhodospirillum rubrum ATCC 11170
MCGLVAILERRGPADEAAVSKALARLARRGPDGEGRAAFWDGRLLLGHRRLAIFGKGADGAQPMVDPETGSVLVFNGALYNYVELRQALQALGQRFAGESDTEVALLAWRQWGEAAFARFNGMWAMVLLDAPGDRLVVSRDRLGVKPLYLCDTGGRVTFASTIAATLAASGIAPRVDDDAVFDFLVGGLTDHRGGSFFAGIVEVPAGALWSVDRSGGIDRRRFHDWRKEGSGEAAPPSAEALRATLSDAVRLRLRADVPAVALLSGGLDSSIVTRLATAPDMPRGALAGLLTYGYRDATEADETREAGRFAATLDSALPHDILRVAPLPAAPDLDALLAAQEQPFNTPSLVAAFRLYRLIAARGVKVAITGEGADELFAGYTNRYGALLAREHLRLGRLRPLGALLGSAHCPPRLVANRLAWDLPLAIVRPLMAGRVHGRVIARSFWQDSAERFEALAAYHHQPLASRLRDDALRALLPYSLRFADRSGMASGVEVRSPFLDYRVVEAALALPVAAKIDDRGGKRILRQAFRHDLPAEIIGAGKTHGLGMAEQFQVGHLDWAALAEAPPTLAARYLDLGRLKTALAAHPSDPRLWWPLCLLRWLAWVEGGMADAPR

SEQ ID NO: 34075 - protein, 68 aa, Rhodospirillum rubrum ATCC 11170
MSTGTVKWFNGTKGYGFIEPDDGSADVFVHITAVQQAGLDSLREGQKVAFELERGRSGKMAASNLKPL

SEQ ID NO: 34076 - protein, 452 aa, Rhodospirillum rubrum ATCC 11170
MAQAPLNAKAGAGAGGLQIGWVNVPKLIKESLITAALAAVLFLPFIALHATSSGAGLFIEQRWETWGWSVLTVFIGRIALVIWRDNPSNRLHDALLKSVVMPVGGFFRRNMAFIGLAALVLAIVFPITPFSNRYYVDVATTWMIYIMLGWGLNIVVGLAGLLDLGYVAFYAVGAYSYALLSQTFGWSFWVCLPLAGVFAAFFGVVLGFPVLRLRGDYLAIVTLGFGEIIRVVLLNWYAVTNGPDGISGIERPSFFGLDFARTAPEGGETFHQFFGISYSPDHRVIFLFYLILALAVLTNIFTGRIRRLPVGRAWEALREDEIACRSLGINPTNVKLSAFALGAMFGGFAGSFFATRQGFISPESFTFMESAVILAIVVLGGMGSQIGVVIAAFFLVVLPEVFREFDQFRMFFFGAAMVAVMVWRPRGLLSYRDPTILFEKIKHRLAKQGGKA

SEQ ID NO: 34077 - protein, 323 aa, Rhodospirillum rubrum ATCC 11170
MLGKPVVLVTRTLPAAVEERLLGDYDVWLNRDDRPIPPEDLPALARRLGAQAMLVTPTDRLERAVIEALPNSVAIIASFSVGYEHIDHNAAARRGILVTNTPGVLSDATADIALLLMLGAARRASEGERLVRSGYWKGLTPVQLLGRHLHGQRLGILGMGRIGQALAERARPLGLEIHYHNRTPIAEDAAKGAIFHATVEDLLAVSDVLSLHCPATPLTRKLLNAERLALLPPGAIVVNTARGILIDDEALIAALNSGQVFAAGLDVYDNEPDLHPAYRSLPNVFLLPHLGSATIETRTAMGFLALDNLDAYFGGREPPHRIA

SEQ ID NO: 34078 - protein, 296 aa, Rhodospirillum rubrum ATCC 11170
MAKIAFIGLGNMGGPMLRNLLKAGHECVAFDLSAPALAAAEQAGARPAASPGDAARGVDGVITMLPAGTIVRAVYEGPGGVIANAAPGTLLIDCSTIDVASARAVAEAATAAGLSMVDAPVSGGVAGAAAATLTFMVGGPPETFEAARPILAAMGGTIVHAGAAGTGQAAKICNNMLLGISMIGTCEAFMLAKRLGLDAQKLFDISSKASGQCWSLTSYCPVPGPVASAPSNRDYQPGFAAAMMLKDLKLAQEAAAGVDAATPLGAAAAALYSLYCNAGHAGTDFSGIIAMIDGSD

SEQ ID NO: 34079 - protein, 309 aa, Rhodospirillum rubrum ATCC 11170
MTDLDCPSPADSAPPRCGFVAVIGAPNAGKSTLVNRLVGSKVTIVSPKVQTTRSRVRGIAMVGEAQVVFVDTPGIFQPRKRFDRAMVAAAWEGALEADLVLLVIDAHKGITAEVEEILTKLKATGRRALLALNKVDALERSRLLEMASRLDAALPFEKVFMISALTGSGCDDVLAWLAERVPAGPWMFPEDEVSDLPQRLLAAEITREKVFLQLHEELPYAAAVVTESWRERADGSVRIDQTVLVQRESQRAIFLGKGGARIKALGRAARVELSEILERPVHLFLHVKVNDRLWDDRDQYSEWGLDFDV

SEQ ID NO: 34080 - protein, 68 aa, Rhodospirillum rubrum ATCC 11170
MSTGTVKWFNTTKGFGFIAPDNGGADAFVHITALERAGIHSLNEGQRVTYDLEMGRTGKMAAINIRLA

SEQ ID NO: 34081 - protein, 556 aa, Rhodospirillum rubrum ATCC 11170
MYRYDEFDAAIVADRISEFRDQVNRRLSGELDEEAFRPLRLMNGVYLQLHAYMLRVCIPYGEINATQLRRLGAIAQRYDRGYGHFTTRQNIQFNWVALSDIPAVLEELAEVGMHAIQTSGNCIRNTTTDPLAGVAADEVEDPRPWAELIRQWSTFHPEFTFLPRKFKVAITGASHDRAAIRFHDIGLELAPIGGGEIGFKVFVGGGMGRTPRLGRLLRDDLPKQHLLSYIEAILRVYNRQGQRENKYKARIKILVDSLGVEAFRAEVDAEWEAMGRATIDVPEAEIARIQSYFVPQDSAPEDGGLAASRAITKRRASDPAFAGWLDANVHAHKVAGHAGVTISLKPAGGIPGDATTAQLETIADLAERYSKGLLRVTHEQNLLLPHVRQEDLPALWAALVAAGLETANVGRIGDIISCPGLDYCSLATARSIPIAQALSARFADPARLRDIGPITLNISGCINACGHHHAGNIGILGLEKTGNEAYQLVLGGAADETAAIARITGQGFSADAIVGAVETVVDTYIGLRQDGETFIETFRRVGVTPFKEALYGSVAA

SEQ ID NO: 34082 - protein, 406 aa, Rhodospirillum rubrum ATCC 11170
MSSAAPSAFPFSAGDPVVIVGAKRTPLGAFMGSLGSLRAPELGARAISGALDGLEGAEHRVDGVIMGCVLPAGQGQAPARQAAHAAGLSWAVPCATVNKMCGSGMEAAILACNTLAAGAAEVMVAGGMESMTNAPYLLDKARGGHRLGHGQVVDHMFLDGLEDAYDRGRLMGTFAEDTAQSYRFSREEQDAFALESLLRAKRAIADGVMARECVSVVVRERGEDHLVETDEAPIKANPDRIPHLKPAFREGGTVTAANSSSISDGAAALVLTRASVADRAGWRPLAVVRGHAAYAAEPELFPTAPVGAIERMLARVGWRRDEVDLWEINEAFAVVALVALRDLGLDPGRLNVHGGACALGHPIGASGARIIVTLLNALRQRGLTRGVASLCIGGGEATAMAVELAS

SEQ ID NO: 34083 - protein, 591 aa, Rhodospirillum rubrum ATCC 11170
MCGVCGEIRFDGQFAGTTAVDRMTAKLAPRGPDDGGILVHGPVALGHRRLSIIDLSPKAAQPMVDSDLGLSIVFNGCIYNYPALRSELEALGYRFFSGGDTEVILKAYHAWGTACVKRFNGMFAFAIHERDSGKVVLARDRFGIKPLYLAEVDGGLLFASSLPALLATGRVDKAIDPLALRFYISFHAVVPAPRTILKGVRKLPPATLRVVSADGSSFDEVYWRLDFRALPGEDGRSAKDWEDGLFEAVRAAVARRIIADVPVGVLLSGGLDSSLIVGLLAEAGQRDVETFSIGFEEANGEKGDEFFYSDLIAERYATRHHKIFIPEADMIAALPGAIAAMSEPMVSYDNVAFYLLAREVSKRVKVVLSGQGADEIFGGYHWYRPLVGSTDPVADYAAHFFDRTPERLARHLSPAWLGTTDEARAFVAAHFAEDGAPDPVDKALRLDSTVMLVEDPVKRVDNMTMAFGLEARVPFLDHQLAEFAGRIPSSLKLAQNGKGILKEVARRVVPAAVIDREKGYFPVPGLKYIEGSRLDYVRDGLSSRAARQRGLFREDYLASLYENPRDAITPLRGSELWQVGLLELWLQEHGI

SEQ ID NO: 34084 - protein, 368 aa, Rhodospirillum rubrum ATCC 11170
MTHAGVYLDHNATTALRPEAVAAITAALEVLGNPSSIHRDGRRARALIEDARDAVGALVGARAERVIFTSGGSEANALGLLGSGRRLIVGATEHPCVLRADPAALRIRVDRHGVVDLGHLEALLQAERNPAVVGLMLANNETGVVQPVAEAVALAHAHGALVHCDGVQAPGRMALSLAALGCDSLALSGHKIGGPAGSGALILAEGHEVSPGLRGGGQERGRRAGTENLLGIVGFGASAATLGAQTAAESTRLGALRGRLEAAVTAAVPGVVIYGAGVARLPNTTCVGLPGVGADRQVMALDLAGLRVSAGSACSSGTLSASPVLLAMGVGEDAARQAIRVSLGWTTTEDEVSGFIEAYGAMAARLTA

SEQ ID NO: 34085 - protein, 394 aa, Rhodospirillum rubrum ATCC 11170
MKAANSLFSGLGTTIFSVMSHLAQEYGAINLGQGFPEGLEPADVIAAAARSLAAGPHQYPPMMGLPALRQALAAHEKRFYDLDIDWQTEVMVTSGATEALADALFGLIEPGDEVVLIEPLYDSYLPIIRRAGGIPRLVRLEPPRWSLPREALAAAFSPRTKLILVNSPMNPCAKVFSADEMAFIGDLAIAHDAYIVCDEVYEHLVFDGQSHRPLMAQPGLRERCVRIGSAGKTFSLTNWKVGYVIAAPEVLDPIAKTHQYITFTTPIPLQQAVAEGLAKDDAYFAGLAHDMAARRDRLGAGLRRIGFEVLDCAGTYFLTADFRPLGFAGDDLAFCRHITCEAGVTAVPVSAFYQPGQGGIPTSFARFCFAKRDDALDEAVARLERHFAGGRRNA

SEQ ID NO: 34086 - protein, 384 aa, Rhodospirillum rubrum ATCC 11170
MKIAIPKERRPGEDRVAISPEVVKKLVGLGFEVIVEQGAGVGASITDDALTAAGATIASTAAQALSQADVVWKVQRPMTAEEGTDEVALIKEGAVLMCHLGALTNRPVVEALTKRKITAYAMELMPRISRAQSMDILSSQSNLAGYRAVIDGAYEFARAFPMMMTAAGTVPPARVLVFGVGVAGLQAIATAKRLGAVVMATDVRAATKEQVESLGGKFITVDDEAMKTAETAGGYAKEMGEEFRKKQAEAVLKELVKTDIAITTALIPGKPAPVLITEEMVTKMKPGSVIIDLAVEAGGNCPLSEPGKIVVKHGVKIVGHTNVPSRVAADASPLFAKNLLNFLTPHVDKDTKTLVMKLEDETVSGTCVTRDGAIVHPALTGQGA

SEQ ID NO: 34087 - protein, 460 aa, Rhodospirillum rubrum ATCC 11170
MARLIVVSNRVALPEDQAGRAGGLAVALREALVSFGGIWFGWSGKVAAQTSDRPRFIEEGPVTYAVLDLGRKDHAQYYNGFANRTLWPLFHYRMGLAEFTRQDYEGYMRVNTVFAEQLQPLLTDDDLIWVHDYHLIPLGGELRRLGARQRMGIFLHTPFPAMEVLLALTHHRRLVGSLCAYDVVGFQTENDRRSFFDYVLHEAGGWIGENGHVTVWGRSLVARVYPIGIEKGAFAEAAQRAQRTVAYRRLRASLNGRKLMIGVERLDYSKGLPERFEAFSRLLEKHPEHRAKVSFMQVAPISRSEVPEYRRLREELESLSGQINGQFGDYDWVPIRYLTRNFARSVLAGFYRQGAVGVVTPMRDGMNLVAKEYVASQNPQDPGVLVLSRFAGAARELTTALQVNPFDREDMADAMDRALGMALDERKERWVEMMRMVDENSLEAWREKYLADLNAAPFNG

SEQ ID NO: 34088 - protein, 273 aa, Rhodospirillum rubrum ATCC 11170
MMTLSKTEKDRAMALLEIKDLHARVEDEASGRGEGAYREILKGLSLTINPGEVHAIMGPNGAGKSTLSSVITGKPGYEMTAGSLIYQGRDLCALEPHERACEGIFLAFQYPVEIPGVGFTTFLKTAINARRKYFGQEDIDAMDFLKLMKSKTKLLGIADDMMKRPVNVGFSGGEKKRAEILQMAMLEPTLMILDEMDSGLDIDALRIAAQGVNDMRSPDRAILCITHYQRLLDYIVPDFVHVLADGKIVKSGGKDLALELEEKGYAEFVARAA

SEQ ID NO: 34089 - protein, 799 aa, Rhodospirillum rubrum ATCC 11170
MTFADLGLSPETLRAIEEVGYTTPTPIQVQAIPYVQMGRDVLGIAQTGTGKTASFTLPMIDILASGKAKARMPRSLILAPTRELATQVSENFTLYGKYQKLSMALLIGGESMNEQQKVLDRGVDVLIATPGRLIDLFERGSILLRDVKVLVIDEADRMLDMGFIPDVERIVALLPKIRQTLFFSATMDKEIRRLADAFLMNPKEVRIEPTQKVAETVEQALIMVKASEKREALRQLLRRETVTNAFIFCNRKRDVDVLYKSLSGHGFDILALHGDMPQYVRTERLEKFKRAEVQLMVCSDVAARGIDVTEVSHVFNFDVPTHPEDYIHRIGRTGRAGRLGRAYTLATPEDAKYLRAIENLLGKTIPPDPQLELSDVAVEDVALAVAEDDRRPKRGGKGRPERGARRSGRGSADAERPRPLAPERAANDQAPVERPAVEKTLAEQPVAERPPVERGQAERTAERPSSDRTNERASSDRSSERASSERNGDDRGRGGRGRDDRSAARGRRPRRWEDDPQSEVMEMRIGDDVIGFGGFTPAFLLVPSVPFSDPDELDREALAEEALADAGLLVEAEEPENDSDFVPAPGLAAREIETAPKAPVAAEKPEREKAEREKPKRKRGGRRTKGATDGADTAPTAETLAATTEGTDALAATSEGTDALAATTEGTDAVAEPLSDDAAPMVAEAPGAEPVVEAPTVAEAAPEKPKRKRAAPRKKAEAAETVTNEAAASPEAEAPAEKPKRKRAAPRKKAEAVGAEGDETVAVVAEKPKRKRAAPRKKAEAAQADAEAEVAAPTEPRED

SEQ ID NO: 34090 - protein, 553 aa, Rhodospirillum rubrum ATCC 11170
MPTIATALLDALKAHGATRIFGIPGDFALPFFRVAEQSALLPLYTLSHEPGVGFAADACARMGRGLGVAAVTYGAGALNMVNPVAGAWSEKSPLVVISGAPGVAESAGGLLLHHQAKTLDSQWRIFEEITCARTRLDDPLTAPGEIARVLRACLEHSRPVYIEIPRDIVDAPCAAVDRLPPTPVDGEAVEAAAGEIMARLAAASAPALLLGVEVRRHGIEADVAELARRLGLPIATTFMGRGLLSEEGAAGGAPDSLMGTYLGLAGRPEVRAVIEDSDGLLMLGVILSDTNFGVSGKRIDLRRAMLAADRQVALGFHTYNDIPLADLVAALLRQAEGFARQDAKALPKPTALPRDMIADGAPIGPMDIAAAINDLFSAHGVMPIASDMGDCLFTALDTTHAPLVAPGYYATMGFGVPAGLGVQASCGRRPLILVGDGAFQMTGWELGNCARYGWDPIVIVFNNASWEMLRTFQPDTAYNDLADWRFADLAAGLGGVGHRCQTRADLARALDRAAREPGRFHLIEAVLARGAISDTLQRFVTTMKGRHAAAADA

SEQ ID NO: 34091 - protein, 586 aa, Rhodospirillum rubrum ATCC 11170
MCGIAGMVTKLGRSVPEGLADRFAQKLAHRGPDGKGVFEAPGVLLVQARLAIIDLLTGDQPLHGPDGLVLVANGEVYNYRELRAELGEGVFLTRSDCEPPLHLYARRGLAGFDVLRGMYAIALWDPPRRRLVLCRDPFGIKPLYYVETNDGVAFASEPQALIGAGLLPAREDAAAVDELLQLQFTCGARTIFQGIRRVLPGETLVFEDAQLVERHRRPALPAVRERVSPADPLALLDHVLEDSLDLHQRADVPYGLFLSGGIDSSSVLAMMARLNERPVLAFTAGFPGTEVADERADARAATRAVGARHVEVAVSEGDFLEHLPAIAAAVDDPVADYAIVPTWLLAREAAKSVKVVLCGEGGDELLGGYGRYRSAMRPWPLARPLRRKGLLDGLGLLRGGGGRNWRAGIARAEVEARAQGGSRLIRAQRVDCADWLPHDLLNKLDRCLMAHGLEGRVPFVDVDVARFCLPLADGLKVRDGMGKWILRSWLERTLPEARPFAPKRGFSVPVGEWMSRHGDRLGPLVAASPAVAARCHGEAVRALFTHPRKETALAAWILLYYALWHRRHIVGLAPEGDVFHCLSTAA

SEQ ID NO: 34092 - protein, 605 aa, Rhodospirillum rubrum ATCC 11170
MTTRTAREAGEAEAAGPSTLRLVGRLIKDHLAQQWGLIALAVLCMLAVAASTSAIAWLMKPAVNDVFARHDRDVLMLIALAFPVAFVLKGLANYGQRTLMNRVGLRVVQRCREALYDHLQGMDIAFFAQQQTAALVSRFTVDLTLLKNTITSGIMVVGRDAVTMVSLVVSLFLLDIELALIAVTVFPAAVLPIALLGKRVRKAARGMQAQSGQLDALLLQVFQAIRVVKVYNAGEHERARVAATVDRIYRHLMRSERIGAAISMVVEILSGFAFAAVVIYGGQRVTAGDLDPGTFFAFITSLFLLYQPIKRIGGVNVVAQEGMAAVERMYGVIDTPPALREGKDAPALVVGGGEIVFDDVRLTYPTQEGPALDGLSFRAPAGATVALVGRSGAGKSTALQLVPRFYDADGGRVLIDGQDVRAVTFRSLWAAIAMVTQEIILFDDSVRANIAYGRPGASQAEIEDAARHAAAHDFILALPEGYDTVIGEQGTRLSGGQRQRLVIARAMLKNAPILLLDEATSALDTESERHVRQAFERLRQGRTCIVVAHRLSTVMNADIIHVIDAGRIVESGSHAALLAEGGLYADLCATDLSDEPAEDPEVVPA

SEQ ID NO: 34093 - protein, 703 aa, Rhodospirillum rubrum ATCC 11170
MPARMFFLAPMAQDVGLTSVALGLARALQRDGIKVGFAKPIGHAEADGEPGDPSSHFARSLCLLEAPESIAFARAEDQVRRGDLAALMEEVVTLVDGLRASHDAVIIEGLIPGADTQVAGRLNAEMARALGADLIPVLSGAGRDGADLAEAIALARRQYDGAQNAAFAGVLINKVSPSHGAELRGDLERAVGERLPILATIPFETRLQSPRLADVVRGLGLTVEHEGALAQTRVREIVIAARSVENIIERLRPGALVVTPVDRIDIVLAATLASLRGVPLAGVLLTCGGSLPDTVASLVLSARPEGLPILSTPADTYATASRLSRLSGHVGADDHAQMEEVIDFIAEQIATAPLRRRIGEPGEVRMSPPAFRNRLIQSARRAAKRIVLPEGDEPRTLQAAIACHAKGIARCVLLGHPAQVRQVASAQGLEIPADLEILDPELVRGRYVEALVEMRRAKGLTALQAAAQLEDTVVLGTVMLALGEVDGLVSGAVHTTASTVRPALQLIKTAPGASIVSSVFFMLMPDQVLVYGDCAINPNPTAEQLADIAIQSADSALAFGIEPRVAMISYSTGSSGVGDDVEKVRAATALAKLKRPDLMIDGPMQYDAASVESVGRQKAPDSPVAGRANVFVFPDLNTGNTTYKAVQRSANVVSVGPMLQGLRKPVNDLSRGALVDDIVYTIALTAIQADQGADPMAEKVAAE

SEQ ID NO: 34094 - protein, 405 aa, Rhodospirillum rubrum ATCC 11170
MIHENSLILVLNSGSSSLKFALFAADAREPLCSGLAECLGRADARLTVKRDGTKAVTPMEGGGHDVALGAILDILASADLLAPIRAVGHRVTHGGERFRASALITDAALADIEACSALAPLHNPPNLLGIRMARARMPDVPHVAVFDTSFHQTMPRAAFMYALPLRFYAKFGVRRYGFHGTSHRFVAAQAVTLLGLDPEDHGLVIAHLGNGSSATAVLDGRSVDTTMGMTPLEGLVMGTRSGDVDAGALSHIARQTGWSREELDAVLNKESGLLGLSGLSNDCRTLEAAAEDGNDGARLALDVFVHRLARHIGGLAMALPRLDAVVFTGGIGENSSRLRAATLERLKPLGLTLDAAANERCVRGVSGRISQGLFPAAAVIPTDEEWMIAQDTLDLTSDESLSCVA

SEQ ID NO: 34095 - protein, 641 aa, Rhodospirillum rubrum ATCC 11170
MCGLVGIYHPTASRPVDRALVEAMNQRQFHRGPDDGGVFIGPGIGLGHRRLSIVDLGGGRQPMTNDGGGVVLVYNGELYNNAELVAELKAAGHVFRTASDTETVIHAWEEWGEDSVRHLRGMFAYALWDDRSQTLFLARDRLGIKPLHYTCLADGRVMFGSELKSLTGVEDIPKVVDPLAIEDFLAYGYVPDPRSIFKDILKLEAGHTLTFRRGEAPGRPHCYWDVSFTTPSRPAKTDDLCAEVIDRLDEAVRCHLVADVPVGAFLSGGVDSSAMVALMAGATDRPVETCSIAFSEARFDESAYAKTVAERYGTHHRVHTLPAQALSEVGPLTAIYDEPFADSSALPTLKVCQAARETVTVALSGDGGDELFAGYRRYRFHTAEEAVRRILPQAARGPLFGALGRVYPKLDWAPQVLRAKSTFQALGRDRVEGYFNAVSVIPDGLRRGLYSKTMRAELAGYGASEVLRRHMTRAPADHPLSIAQYVDLKTWLPGDILTKVDRASMATSLEVRVPMLDHRFVEWTAGLSPDLKLSGGTGKYLLKRALRPLLPDEVLYRRKMGFSIPLTDWLRGPWSGRTRALAGRSALVTSGLFDGAAVAKLVEQHLGGNWDHGAALYALIVLDDFLTAHVGAACLPARMSA

SEQ ID NO: 34096 - protein, 595 aa, Rhodospirillum rubrum ATCC 11170
MLQQRNLILAIVLSMAVLFGFEYFFGAKQPPMTAQQQDSAQMAAPSNGQMAAPSSVQAPGQSPVAAPQVPAQPGAAVPTPGGMTPGAASLSREEALAADISPRIGIDTARLHGSIRLRGARIDDLSLVDYRETVDPQSPEISLLSPPGAPLPYYAEFGWVAGTPGVKVPDADTLWQADRGALGVDAPVTLTWDNGEGLRFIRKIAIDHDFMFSITQAVENTGAGAVTLFPYGLVSRINTPALLNYYILHEGPLGVFDGTLKEVKYSALKDDGEVKHTSTGGWMGITDKYWLTALVTDQSMPVTGRFLYQPRDGRDGYQADFLGAAFTVEPGGRIETSNHLFSGAKEVKLLDRYTDELGIKNFDLAIDFGWFYFMTKPFFLSIQFLHGILGNMGLAILAFTVVLKLVFFPLANKSYRSMSKMKLLQPELKKLQERFKDDRARLNQEMMSLYKKEQVNPLSGCLPIVIQIPVFFALYKVLFVSIEMRHEPFYGWIRDLAAPDPTTVFNLFGLIPWDPPNMLMLGAWPLIMGVTMWMQQKLNPTPADPTQAKIMMFLPIMFTFMLAHFAAGLVIYWTWNNLLSITQQWVIMKRMGAKT

SEQ ID NO: 34097 - protein, 295 aa, Rhodospirillum rubrum ATCC 11170
MLSYLLAVTVIALIYSLMTLGLNLQYGFTGLINFGVVGFFAIGAYTSALLVVAGWPILLALPCAVAASALVSWPVALLSLRLRIEYFAIVMLGFAETIRLVVTSEGWLTGGVQGVTGIPSLAAALGLSMESTLLTALVALGAVIGVVWLSRRLVASPFGRIIRAIRDDEDAVQALGKAPGRFKVAVFVLGSASAGLAGALYAHYITYISPDQFMSLLTFYIWVAMILGGVGRVGGAVLGTAVLIGLMEGSRFLRDILPGVAEVEMASIRLGVIGLALMVLMRFRPEGLLGKGRGA

SEQ ID NO: 34098 - protein, 210 aa, Rhodospirillum rubrum ATCC 11170
MLSRSTATVKWFNATKGFGFVRVSDGEPDAFLHISVLQRAGYSELPEGATIVCDLAPGQKGMQVSEIYEVEGGSPGGFGGGGYDRGGYSGGFDRGGYNGGFDRGAADRGGYAGATDRGGYAGGAADRGGYAGGADRGGFQGETEIDGVVKFFSADKGFGFVVPDGGGKDVYVGSRTLQDCGVSVLEQGQRVRMSIRMGKKGPMAGSLELI

SEQ ID NO: 34099 - protein, 274 aa, Rhodospirillum rubrum ATCC 11170
MSKDSPILEVRDVSLHFGGVRALTMVSTTVAAGALFAIIGPNGAGKTSMMNCISGRYRPTQGKVLFKGRDVTALPPDRRTGLGLGRTFQNLALFGHMSVLDNIMVGRHHLLRNGFVGGALYWLGGTQAEELEHRRAVEDIIDFLEIGAIRKATAGTLSYGLRKRVELARAIALKPDLILLDEPMAGMNQEEKEDMARFIVDLNEEWGMTVIMIEHDMGVVMDISHTVMVLDFGQKIAEGPPAAIMAHPQVRRAYLGENDDDAAVPPAKTAGETA

SEQ ID NO: 34100 - protein, 753 aa, Rhodospirillum rubrum ATCC 11170
MADETNRNLDREALLFHITGRPGKIEIAATKPLTTQRDLSLAYSPGVAAPCLAIQRDPTTAYDYTAKGNMVAVISNGTAVLGLGDLGALASKPVMEGKAVLFKKFADVDGIDLEVDTRDVDEFVNCVRYLGPTFGGINLEDIKAPECFIIEQRLRALMDIPVFHDDQHGTAIIAAAGLINALDLSGRDIGDAKMVVNGAGAAAIACVELVKAMGMRSANVTLCDSKGVVHRGRSDLNQWKSAHAIDTEARSLQDAMRGADVFLGLSVKGAVTAEMVATMAPQPIIFAMANPDPEITPEDVLSVRDDAIIATGRSDYPNQINNVLGFPYIFRGALDVRARTINDEMKIAAARAIAALAREDVPDEVAAAYSGRRLRYGRDYIIPVPFDPRLIAAISPAVAEAAMRSGVARKPIIDIIGYRRELSARLDPTAASLQALSAQVINNPKRVAFAEGEEEKMIRAALSYRNAGYGTPILIGRAEKIAATMAAMGLGGLEGMEIQNAKLSTQTKPYTDYLYGRLQRHGYLYRDVQRLVNSDRNVFAASMVMLQDADAMVTGTIRHFHSCLSDITKVIDQTPGELVFSVTLLIARGRTVFIADTNVHEAPSAQELADIAIQTAALARRMGHEPRVALLSYSTFGAPLGRTPDRPRQAVALLEDRKVEFEFDGEIGVHVALDPDLLKLYPFCRLSAPANVLIMPGLHSANISSKLMQKMGGATTIGPVLMGLSRPCQIVPMDATVSDIVHMATLAAAEAGR

SEQ ID NO: 34101 - protein, 639 aa, Rhodospirillum rubrum ATCC 11170
MSKVIGIDLGTTNSCVAVMDGKDVRVIENAEGARTTPSQVAFTESGERLVGQPAKRQAVTNPENTLFAIKRLIGRRYSDPTVEKDKGLVPYRIVKGDNGDAWVQTRDEKYAPSQLSAFILQKMKETAEAHLGEPVTQAVITVPAYFNDSQRQATKDAGKIAGLEVLRIINEPTAAALAYGMDKKNTGTIAVFDLGGGTFDVSVLEIGDGVFEVKSTNGDTFLGGEDFDARIIDYLASEFKKEQGIDLRTDRLALQRLKEAAEKAKIELSSSMQTEVNLPFITADQAGPKHLNIKLTRAKLEALVDDLVQRTVEPCRKALADAGIKASEIDEVILVGGMTRMPKVQQVVKDFFGREPHKGVNPDEVVAMGAAIQGGVLKGDVKDVLLLDVTPLSLGIETLGGVFTRLIDRNTTIPTRKSQTFSTAEDSQTAVTIRVFQGEREMAADNKMLGQFDLVGLPSAPRGVPQIEVTFDIDANGIVNVSAKDKATGKEQAIRIQASGGLSDNDIERMVKEAELNAEADRKRKEAVEARNHADGLIHATEKNLKEYGDKIPAEDKAKVEGDLTALKAVLDSEDAESIKAKTDALMQSAMKLGEAAYSAGQSAEGAPHAAGAEASAQSRTDDGVVDADFEEVDEKKGH

SEQ ID NO: 34102 - protein, 579 aa, Rhodospirillum rubrum ATCC 11170
MRPHLGTIALAVMWMLVLAAATVAVAHMLKPAIDGIVVGSDPQALWGIGLGILLAFAVKAVSNFFSVVLVAKAGLAAVSDARNRLYRHLSEMDLGFFLAHSASALAARFTVDLHLLRLAVSNGLTSLGRDLMTLIGLVAYTFWVDWQMALLAYIALPLAIWPVARLGRRIRRIAGRTQRDLGSLNAQLTQTLRGIRMVKIYGAEEMERARVHRLIAAVQTQSFKAEWTRALVTPIMEGVVGLAAGAALYYGGARVLAGEVTPGDLTAFLGAVMLAYQPAKRLANLHTILQEGLAAADRMYHLLDLKPAVAEAPGAPPLRPGPGTVRFDDVTFAYDGGPGPELGDDASGPAAAPPALRGVDLTLEAGTVVALVGPSGAGKSTLMNLIPRLHDPQRGRVLIDGQDVRAVSFASLWARIGLVSQDVVVFDDTVRANIAYGRPEASAEEVERAARRAAAHDFIAALPDGYDTRLGEQGVRLSGGQRQRLCIARAFLKDAPILLLDEPTAALDTESERLVQSALAALMAGRTCLIIAHRLSTIAGADVIHVMAEGAVVESGDHAGLLAKDGLYARLHAANRLGA

SEQ ID NO: 34103 - protein, 193 aa, Rhodospirillum rubrum ATCC 11170
MPQTRPRVVLLDRDGTLNEEVHYLARPDQLVLIPGAVAGLRRLRDLGLTLVVVTNQSGLERGYFSNADLEAIHRRLIDMLAAEGIVLAGIFVCPHGPDSDCECRKPKPGLVDAARHALGFDPAEAFMIGDKQSDLDLGLAVGALPILVRTGYGLETESAGAAGAAFVASDLLQASAFIAGRLEREKPRGTAAP

SEQ ID NO: 34104 - protein, 372 aa, Rhodospirillum rubrum ATCC 11170
MRIGVPKEIKNHEYRVGLTPNSVHEFVDHGHAVVVESGAGLGIGSTDADYIKAGATIAATAAEVFAGAEMVIKVKEPQAVECAMLRPGQILYTYLHLAPDPEQTRALIASGATCIAYETVTDAKGGLPLLAPMSQVAGRMAIQAGAHCLEKAHGGEGVLLGGVPGVAPAKVAIIGGGVVGENAAQIALGIGAEVTVLDRSLDALARLSARFGAGLKTVYSTRAALEQTVLESDLVIGAVLVKGAATPKLVTRAMLGRMRPGAVLVDVAIDQGGCFETSKATTHDAPTYVVDGVVHYCVANMPGAVARTSTYALTNATLPYGLAIATKGWKAALADDPGLLEGLNVHAGKVTCAPVAAELGYEHTPAASVLGA

SEQ ID NO: 34105 - protein, 334 aa, Rhodospirillum rubrum ATCC 11170
MSRRLVLMLGGACLLALAGWGLPMVVSDYGQRLLIMGCISVILVASMGLANGFTGVFSLGQVGFVAIGAYVSGILSLSVADKAAYLPDLPAFLAGVQMGTVPATLLAGAVCAGVAVIVGLPLMRLSGHHVSVATMGFMIIVNSVIVNAESFTRGARTFTGVPTDITLPVALIWMVITLALLGRLIYSPIGLALRSVREDTIAAQAVGLSVLKTRLLAFTVGAFFAGVGGSLYGHYLGSFSAQTFFFPLMVSLIIMLVLGGMGSLSGAVVGVVVVTALSEILRNLERGMDLGFVVVPPLFGASQVVLGLLFILVMIYRPRGLLEDRELTSFGRKG

SEQ ID NO: 34106 - protein, 419 aa, Rhodospirillum rubrum ATCC 11170
MGSGCIPPMVKKALSMKKGDVKKVVLAYSGGLDTSIILRWLQDEYDCEVVTFTADIGQGEELEPARQKAEMMGIKEIYIEDLREEFVRDYVFPMFRANTLYEGVYLLGTSIARPLIGKRLVEIAEATGADAVSHGATGKGNDQVRFELTAYALKPDIKIIAPWRTWDLHSRTKLIEYAMRHQIPVPKDKHGEAPYSMDANLLHISYEGKALENPWTEPSEDMFRLTVSPEAAPDKAQYIEVDFERGDAVAIDGEKLTPAALLAKLNEIGGRHGVGRLDLVENRYVGMKSRGVYETPGGTILQVAHRAVESLTLDREVMHLRDELMPRYAKLIYNGFWFAPERLMLQAAIDQTQQTVTGTARLKLYKGNVSVVGRKAAKSLYRMDYVTFEEDTVYDQHDAEGFIKLNALRLRLGKMARDS

SEQ ID NO: 34107 - protein, 328 aa, Rhodospirillum rubrum ATCC 11170
MPQAKPLVIVTRKLPEAIETRMAELFDARLNVDDHPFTREELCQAVAEADVLVPTVTDRIDGGVLSHCGESLRLIANFGTGIDHIDVATAHQRGVTVTNTPDVLTEDTADMTMAMILAVPRRLAEGERMVREGQWLGWSPTHMLGHRIWGKRLGIIGMGRIGRAVARRARGFGMTIHYHNRRRLHESLEQELDATYWESLDQMLARMDVVSIHCPHTPASYHLLSARRLALLRPEAYVVNTARGEVIDENALVRMLAKGDLAGAALDVFEYEPAVNPKLVAMNNVLLLPHMGSATLEGRIDMGEKVLINIKTFVDGHKPPDRVLPTML

SEQ ID NO: 34108 - protein, 245 aa, Cocos nucifera
KQVKGSEFPRSYYKCTYPNCPVKKKVERSQEGHITEIIYKGAHNHPRLSHSFRSMQLEGWEQRGLQSGLHGEQHSKVNTRNGTSAHDGRNDGLEATLSPSLAAEFCDTSTSMPVTEGCTSCEIKDAMDVSSTLSNKQEENDLANHGSMSLGCDGEGDEIEPKRRKLDAGALEICASSKVVREPRVVVQTTSEVDILDDGYRWRKYGQKVVKGNPNPRSYYKCTNPGCTVRKHVERASHDLKSVIT

SEQ ID NO: 34109 - protein, 370 aa, Bradyrhizobium sp. UPM1167
MKVGVPKEIKAHEYRVGLTPGAVREYVAAGHRVMIETNAGAGIGATDDDYRAVGATILASAGEVFASSEMIVKVKEPQPSEWSQLREGQILFTYLHLAPDPEQAKGLLKSGCTAIAYETVTDGHGGLPLLAPMSEVAGRLAIEAAGSALKRSAGGRGLLIGGVPGVQPARIVVIGGGVVGTHAARMAVGLGAEVTIIDRSIPRLRELDELFEGRVRTRFSTIESVEEEVFAADVVIGAVLVPGASAPKLVRRSMLSSMRKSAVIVDVAIDQGGCFETSHPTTHADPTYEVDGIIHYCVANMPGAVPLTSSQALNNATLPFGLALANKGFSAVLENPHLRAGLNVHRGRLTYKAVAESLGLPFSPIEQAAA

SEQ ID NO: 34110 - protein, 177 aa, Lolium perenne
MAGRDRDPLVVGRVVGDVLDPFIRTTNLRVTFGNRAVSNGCELKPSMVTHQPRVEVGGNEMRTFYTLVMVDPDAPSPSDPNLREYLHWLVTDIPGTTGASFGQEVMCYESPRPNMGIHRFVLVLFQQLGRQTVYAPGWRQNFNTRDFAELYNLGPPVAAVYFNCQREAGSGGRRMYN

SEQ ID NO: 34111 - protein, 479 aa, Burkholderia thailandensis E264
MAGGMDVQRGRLAHGVGLRQPASRMGPTLDARSRAPYDRMGNVRLTILCSYIELLSSEFEASGGGDVESARGIRPTGDDMTEAFLCDAIRTPIGRYGGALAPVRADDLGAVPLKALAERNRDVDWAAVDDVIYGCANQAGEDNRNVARMSLLLAGLPHAVPGATINRLCGSGMDAIGIAARAIKAGEANLMIAGGVESMSRAPFVTGKATSAFSRQAEIFDTTIGWRFVNPLMKQQYGVDSMPETAEHVATDYRVSRADQDAFALRSQQKAARAQADGTLAQEIVPVTIAQKKGEPLVVARDEHPRETTLDALAKLKGVVRPDGTVTAGNASGVNDGACALLVASEAAARRHGLVPRARVLGIATAGVEPRVMGIGPAPATQKLLARLGMTLDQFDVIELNEAFASQGLAVLRLLGVADDDARVNPNGGAIALGHPLGASGARLVTSATYQLHRTGGRFALCTMCIGVGQGIAIAIERV

SEQ ID NO: 34112 - protein, 353 aa, Burkholderia thailandensis E264
MTAARAAGGAIARARRPRGVTETAMQKILVARSIFPDVIERLKQYFDVDWNDGDALAPDALKARLADKDGALTAGDMIDASVLAAAPRLRVVSNMAVGYNNFDIGAFDAAHVLGTNTPDVLTETTADFGWALMMAAARRIAESEHWLRAGRWRKWSYDSFLGADIHGATLGVIGMGRIGQALARRARGFGMRVIYHNRSRVAPEIEAELNAEYASKAALLAQADHVVLVLPYSAESHHTIGAAELAMMKPSATLTNIARGGIVDDAALADALRNKRIAAAGLDVFEGEPSVHPALLEVPNVVLTPHIASASEGTRRAMANLAADNLIAALGAGPDAGRPPNPINPGVLGKARI

SEQ ID NO: 34113 - protein, 156 aa, Capsicum annuum
MMLGSGSGRRHYRGVRQRPWGKWAAEIRNPKKAARVWLGTFDRAEDAALAYDEAAVRFKGSKAKLNFPERLVQGQPQLLSQDTSPQHNSHHFEEFNTASATGISYPHLLQYAQLLSSNDAEFPFFTSALYNNKQDGSTSNILQQHDFPSQHDDFSS

SEQ ID NO: 34114 - protein, 783 aa, Zea mays
MASGSRATPTRSPSSARPEAPRHAHHHHHSQSSGGSTSRAGGGAAATESVSKAVAQYTLDARLHAVFEQSGASGRSFDYSQSLRAPPTPSSEQQIAAYLSRIQRGGHIQPFGCTLAVADDSSFRLLAFSENSPDLLDLSPHHSVPSLDSSAPPHVSLGADARLLFSPSSAVLLERAFAAREISLLNPIWIHSRVSSKPFYAILHRIDVGVVIDLEPARTEDPALSIAGAVQSQKLAVRAISRLQALPGGDVKLLCDTVVEHVRELTGYDRVMVYRFHEDEHGEVVAESRRDNLEPYLGLHYPATDIPQASRFLFRQNRVRMIADCHATPVRVIQDPGLSQPLCLVGSTLRAPHGCHAQYMANMGSIASLVMAVIISSGGDDEQTGRGGISSAMKLWGLVVCHHTSPRCIPFPLRYACEFLMQAFGLQLNMELQLAHQLSEKHILRTQTLLCDMLLRDSPTGIVTQSPSIMDLVKCDGAALYYHGKYYPLGVTPTESQIKDIIEWLTVFHGDSTGLSTDSLADAGYLGAAALGEAVCGMAVAYITPSDYLFWFRSHTAKEIKWGGAKHHPEDKDDGQRMHPRSSFKAFLEVVKSRSLPWENAEMDAIHSLQLILRDSFRDAAEGTNNSKAIVNGQVQLRELELRGINELSSVAREMVRLIETATVPIFAVDTDGCINGWNAKIAELTGLSVEEAMGKSLVNDLIFKESEATVEKLLSRALRGEEDKNVEIKLKTFGSEQSKGPIFVVVNACSSRDYTQNIVGVCFVGQDVTGQKVVMDKFVNIQ

SEQ ID NO: 34115 - protein, 149 aa, Sesbania rostrata
MGAFTESQEALVTSSYETFKQNASDLSVLFYTFILEKAPGAKNLFSFLKDSDGVPKDNPNLKAHAAKVFELVVDSAVQLRTKGAVVIADANLGPVHVQKGVTDAHFVVVKEALLKTVKEATGAKWSDELSNAWEVAYDELAAAIKKAMG

SEQ ID NO: 34116 - protein, 192 aa, Rhizobium sp. CCBAU 41044
APLWGFDGSSTMQAEGRSSDCVLKPVAIYPDPARTNGVLVMCEVMMPDGVTPHASNARATILDDEDAWFGFEQEYFFYENGRPLGFPESGYPAPQGPYYTGVGYSNVGSVAREIVEEHLDLCLAAGINHEGINAEVAKGQWEFQIFGKGSKKAADQIWMARYLLQRLTEKYGIDIEYHCKPLGDTDWNGSGI

SEQ ID NO: 34117 - protein, 353 aa, Burkholderia thailandensis E264
MDTARINQTAPDAPERGRLRIGFVALSDAAPLIAAKRLELGERYGLTLELCRQPSWASIRDKLLSGELDAAHALYGLVYGVQLGIGGPRADLAVPMVLNRNGQAITFSNRLADAYRASGDLKAALATLGRRPVFAQTFPTGTHAMWLYHWLASHGVDPLRDVRSVVIPPPEMVGALAAGELDGLCVGEPWNAVAQARGAGRTVATTSEVWRDHPEKALACRREFVALYPNAARLLVRTLLDACAWLDDPAHRMRAAQWLAEPDAIGVPLEQIAPRLLGDYGAGPFAQPPAPIRFYAHGTANRPAASDGLWFLSQYRRWGMLSGDVDDAAIATGVAQTAIYDEAVALAGARRAD

SEQ ID NO: 34118 - protein, 671 aa, Burkholderia thailandensis E264
MLTNRLVRAYALYTIGFAAFVLLLWRIERATGPGVWIGYVFLFVPIAVYAVIGLLSRTSDLVEYYVAGRRVPSAFNGMATAADWLSAASFIGLAGSLYATGYDALAYLMGWTGGFCLVAFLLAPYVRKLARYTIPDFLGTRFSSTLVRALAAIAAILCSFVYLVAQIQGIGLIATRFIGVDFSIGIFCGLAGILVCSFLGGMRAVTWTQVAQYIILIIAFLLPVSLIAMKNGLGPVPQFNYGRLMSRVETLESEMRDAPQERQVRDTYRRQAAAIQAQLDRLPASYDEARERLVDQVAELRRHNGPLREINQREHALAEFPRDPAAARVVWEQARDDLLARAAAPVPMHEPFPAASDDDRRPRERNFLALLLCLSLGTASLPHILTRYNTTTSVASARRSVGWTLFFIALFYLTVPVLAVLIKYEILTNLVGRPFADLPAWITQWHRFEPGLISVVDQLRDGIVHWSEIQMQPDIVVLAAPEIAGLPYVVSGLIAAGALAAALSTADGLLLTIANALSHDVYYHMVAPDASSQRRVTISKVLLLGVALFASYVASLNTGKILFLVGAAFSLAASSFFPVLVLGVFWKRTTTRGAVAGMVTGLGVCAYYIVSTYPFFTQITGFAGPSWFGIEPISSGVFGVPAGFAMAIVVSLLDRRPDAYTNALVDYIRHP

SEQ ID NO: 34119 - protein, 467 aa, Burkholderia thailandensis E264
MDREILQNRPFDSLAIGDSASLVRIASRDDIDLFAAMSGDVNPAHLDATFAAHDLFGHVVVHGMWTGALVSAVLGTKLPGPGTIYLDQTLEFRHPVAPGDTITATVTVKEKRADKRIVLLDTRCTNQDGHVVLRGVATVIAPATPIAWERVPGPDVAVRRHDRYETFVRAAREQPPLRTAVVHPCSPDAIRAAIDARDANLIEPILVGPEAKIRAVADAAGVNLAGVPIVAVEHSHAAAARAVEMGSAGEVAALMKGSLHTDELLAAVVGPASLLRTERRISHVYAMDVPAYPKPLVITDAAINIAPTLEQKRDICQNAVDLLHVLGVERPRVAVLAAVETVNPKMPSTLDAAALTVMAARGQIAGAIVDGPLAFDNAISAVAATSKGIASPVAGDADVLLVPDLEAGNMLAKQLMYFAGADAAGLVLGARLPIILTSRADSLRVRIASAALAKLVAERTRAGALAS

SEQ ID NO: 34120 - protein, 431 aa, Burkholderia thailandensis E264
MNAPVERGATAAPHHAGSLTILQGTALYIGAVLGTGVIALPALAAEVAGPASLLAWAALVVLSIPLAATFAALGARYADAGGVSTYVRNAFGAKAAAVVGWCFYFAVPAGAPAAAMFGGAYVAAVTGGGHATMIASAAALIAIVAAANAFGVTVSGRMQLVLSALLVALLVAAVLASAPHARAANLHPFAPHGWLAVGQAAALLVWSFAGWEAITHLAAEFRRPAHDLPRSTGIAVAVVGLLYLSVAAASVLVLGPAAGTSGAPLAALIARGIGGNAQLIATAAALLLTLGTMNAYFAGAAKLGAALGRDGALPRWFAQGSQTGGVPRRSLAVLAALAGCALAATVATGTGPKPLVLATSGNFVMVYVLGSAAATKLLPRGGFARRASVVAFLSSLLLLATTGWYLLWPLLLTAAAIGYLRVTDKRTAAKR

SEQ ID NO: 34121 - protein, 656 aa, Burkholderia thailandensis E264
MCGISGFVGPVACAPETARATLARMTDSLAHRGPDDTGLWIDPDAGVALGHRRLSIVDLSEHGHQPMPSACGRYAMTFNGEIYNFRELRRELEREHRAPEWRGHSDSEVLLAAFSAWGIDRALQKAVGMFALALWNRESRVLTLARDRIGEKPLYYGRIGGSFVFGSELKALRRFPGFGAHPIDRNALCLYLRHASVPAPYTIYEGIRKLPPGTYVQHEGLGDEPAPRRYWSLDRVIAAGRANPFDGDANAAVAQLDHVLRDAIAEQSVADVPLGAFLSGGVDSSVIVALMQTQTAQPVQTFTIGFHEAGYDEAGYAKAVARHLGTSHTELYVKPSDVLATVPRMPSVYDEPFADSSQIPTLLVSELTRRHVKVSLSGDGGDELFGGYTRYFLTPRLWGRLRRVPAAVRMRIAAALHALRPDHADQIAALVQGAWSAAAQRDASPRVGDRLHKLANVMTADSRASLYRLLMSSVHHPERFTLAGHEPQTLIDTPGAWPAGLSFAEQAMAVDTLTYLPTDILTKVDRAAMAVSLETRMPFLDHRVVEFAWRLPEALRIPDGQDKWLLRKLLYRYVPRPLIDRPKQGFCAPVGAWLRGELSDWAAELLRPARLRDEGYLDATRVERLWRQHQSGRMNWQHPLWTVLMFQAWLERQRAE

SEQ ID NO: 34122 - protein, 820 aa, Burkholderia thailandensis E264
MTQAAPAAPEAPPSVAPFHDGELAAQRRAGVADAAAESGGRGIRAFMPDQHRAFFAQLPFFVVGGVDGDGQPWATLRVGAPGFISSPQPRTLDIAGGALRDDPLAGSWRVGSLLGGLGIELHTRRRNRINGVVASLEGDAMSVTVGQSFGNCAKYIQSRTPTPAPPQRAYAAPPQRRAARLDADDRALLARADTFFIATANTSDAAGGARGVDVSHRGGPPGFVRVDDDRTLTTPDYSGNNFFNTIGNLLRDPRAGLLFVDFARGDLLYVAADAEIVWDGPALAAFDGAQRLVRLRIREVRRSAAVLPFRWSAPRFAPQFAAWGGAGVFSSSSSSGMGAAGVAGLARVESAELPESSMLSKVLKASEASEASEASEASEASETRDGPKAPEAPHTTQATNEAEMPQASAAISARSPDARWRTLVVAAVRDETPDVRSFELEAADAGPLAPFEPGQHLTIRLPAAGQSGPLIRSYTLSDAFDGRRYRISVKRDGRASSWLHDHARPGVRIDATAPRGAFTFDAASPRPAVFVSAGIGITPMIAMLNAVLARRAAGAPADAHAKRIYFVHGARRGDERPFAAHLAAAARAHPALSVHLFDSRADGASAGASPGRVSIDALQRVLPFGSYDFYLCGPASFMKSLYDGLRALDVPDGRIRLEAFGPASVRRTALRGGAAAIVAADEKPIVKHGGNGDGNDGEKSGEKSGEKSGKKSGGGDDAKAGGQAGAHAATVVFSRSRRTVEWTPRDGTLLELAEAHGVPADSNCRSGACGTCTTRVLGGRVRYGGTVDAEVAPGMALVCMATPDCAGDAESGPPCVTLDL

SEQ ID NO: 34123 - protein, 338 aa, Burkholderia thailandensis E264
MEHRIALQFEDGVTRFIACREGETLADAAYRQQINIPLDCRDGACGTCRCRCESGDYDLPESSYIEDALTADEAARRYVLACQTRPRSDCVIDVPASSAACKTGAARHEGTLASVERLSASTLHFSIDVDEPAKLAFLAGQYVNVEIPGVGATRSYSFSSRPGDARVSFLVRNVPGGRMSRYLADEAAPGQRIAFSGPHGSFYLRDAARPALFLAGGTGIAPFLSMLDVCASRDGAPPVRLVYGVTRDDDLVALERLGDVERRLAGFAYRTCVADDASAHPRKGYVTAHVEPDWLNGGDVDIYLCGPVPMVDAVQTWLRERGVAPANLYFEKFSSSSA

SEQ ID NO: 34124 - protein, 321 aa, Burkholderia thailandensis E264
MQASFHLVRVDALQDEAQDIRSFRISRVDGQPFDAYEPGAHIDVTSPCGLIRQYSLCGDPAQRGSYQFAVKKEPRSRGGSRSLHDDVRVGTELEVGAPRNLFRIADDARAHLLIAAGIGVTPLLSMAYRLVERRAPFRLHYFVRSRAHAAFLDRLSSEPFAPHVALHVGIEPPDLAGALDACVADATPGTHVYTCGPAPFMDQVVARAAARIDEDAIHLERFAAEPPLPVARGDAFEVRLQRSGRSIRVDDSTSIVDALASIGVEVDTSCGEGVCGTCMVSVVSGEPDHRDHCLSKAERASSKVICCCVSRSRSPVLVLDL

SEQ ID NO: 34125 - protein, 204 aa, Burkholderia thailandensis E264
MSNISEVITSRVSANRYDAGRRLSDEQIRDLIGLATRAPSAFNLQNWKFVAVRSEQGKARLLPLAFGQQKVADAAVTFIVCGTLDPHLTLADALRPTLNAGIIDEGTYNGWVGAAQNMYRDNQTFQRDEAIRSGSLAAMTLMLAAQGYGLASGPMIGFNPQGVAEAFDLAPTDVPVMLVAVGHPAPGNWPQKPRKPVSDVLTFA

SEQ ID NO: 34126 - protein, 320 aa, Burkholderia thailandensis E264
MNETLYGDGAIRRPSVYGSSIENTYAGVLSFMRRNYTRDLDGVDVVVSGVPLDLATTFRSGARLGPSAVRAASVQLAELNPYPWGFDPFDDLAVIDYGDCWFDAHHPLSIKPAIVEHARTILQSDARMLTLGGDHYITYPLLIAHAQKYGKPLSLIHFDAHCDTWADDAPDSLNHGTMFYKAVKDGLIDPKASVQVGIRTWNDDYLGINVLDAAWVHEHGARATLERIESIVGGRPAYLTFDIDCLDPAFAPGTGTPVAGGLSSAQALAIVRGLGGVNLIGADVVEVAPAYDQSEITAIAAAHVACDLLCLWRQRKAGAR

SEQ ID NO: 34127 - protein, 541 aa, Burkholderia thailandensis E264
MPAQGNAQRSAPLARPTPTDAGHGTFKKQLSLTDLTFIGLGAIFGSGWLFAASHVSTIAGPAGILSWLLGGFAVLLLGIVYCELGAALPRAGGVVRYPVFSHGPLLGYLMGAITLIAFSSLIAIEVVAARQYAAAWFPGLTVEGSGNPTTLGWLVQAALLCLFFYLNYSSVKTFAKANNLISVFKFVVPLSVIVVLFTFFKPANLTMHGFAPFGMPGVEMAVSAGGIIFAYLGLTPIVSVASEVRNPQRTIPIALILSIVLSTLIYVLLQLAFLGGIPSAMLAGGWHDIGKAFSLPYRDIALALGVGWLAYMVVADAMISPSGCGNIYMNATPRVVYGWAKTGTFFKVFTRVDEASGIPRAGLWLTFALAIFWTLPFPSWEALINTVSAALVLSYAVAPVSVAALRRTAPGLPRPFRASAFAITGPASFVIAALIVYWSGWSTVSWLLGLQIAMFVVYLACRRWVPTAHLSLAEQVRSSAWLIAFYALMIAASYFGGFGGTGRLAHPYDTLAVAAVALVIYYWGAHTGVPAAKLQLDDDEN

SEQ ID NO: 34128 - protein, 328 aa, Burkholderia thailandensis E264
MTNTPISLFAFATSRPFGERIAARLGVALAAHEERAFEDGEHKTRPLASVRGHDVYVVQSLHGEPGSSVNDKLCRLLLFIGALKDASAASVCAVVPYLCYSRKDRRSQPRDPVSTRYVAAMLEAVGVDRVVTIDVHNVAAYQNAFRCPTEHLEANGLLVDWFAERAGALPIVVVSPDAGGVHRAEDFRARLTARLGRPVDAAFAGKLRSSGVVTAKPLVGDVAGRCAIIVDDLIGSGTTLAHTAADCRALGAQSVYAVATHGMFFGRAAELLGGDALTALAVTDSVPPWRVPPGALQDKLTVLDSAPLFAEAIARIHRGGSLTDLLRR

SEQ ID NO: 34129 - protein, 918 aa, Burkholderia thailandensis E264
MSCLSRQARLHMTEPDTTRHFPVLHASVAYSRIHDRDMTVSRQALFGKLGHSLFRSIESATAFCKLRGNPYVELVHWLHQMLQAADGDIQRIARHCDIDIGELDRDMVRALDELPAGASSISDFSHHIETAIERAWVLATLDFGDRRIRGAWLLAALLKTPELRRVLLSISSAFGRIRVDELDAMLPAWIDGSPEANETPYDNSDFGAATPGEASSALQQKGGGSPLEQFCLDLTARARAGQIDPVVGRELEIRTMIDVLLRRRQNNPLLTGEAGVGKTAVVEGLARAIADGDVPPKLADVRLLSLDVGALLAGASMKGEFEARLKGVLEAATKATQPVILFVDEIHTLIGAGGQAGTGDAANLLKPALARGTLRTIGATTWAEYKRHIEKDPALTRRFQVLQVPEPDEAAAIDMVRGLTRTFSRHHGVVVLDEAIRAAVKLSHRYIPSRQLPDKAISLLDTACARVALSQHAPPRELQDVRRRLEAARVRLELLDGEQRIGLGDESALAQSRDEIAALEVQEQAIDACWRQQIEAAQALLSAREAAGDDPATAIDALRELERALSSLQGDCAFVFPEVNEAIVAEIMSDWTGIPVGRMVTDEVSAVRALPDTLAARVIGQRDALHQICDRVQTARAGLTDPKKPLGVFLLAGPSGVGKTETALALAEALYGGEQNLITINMSEYQEAHTVSGLKGAPPGYVGYGEGGVLTEAVRRRPYSVVLLDEIEKAHPDVHEMFFQVFDKGYMEDGDGRYIDFRNTTILLTSNAGSELVSGLCTDEACAPDADGLCAALAPALLKTFPAAFLGRVTLVPYRPLAQETLSRIVRLHLDRVVARMAENQAVALSYSDNVVDYVVGRCLVQETGARLLIGFIEQHVLPLLAKCWLDSLSSKTVFTRVDLDVADSGAAPAQAFVLRAS

SEQ ID NO: 34130 - protein, 67 aa, Burkholderia thailandensis E264
METGTVKWFNETKGFGFITPDSGGDDLFAHFSEIRSEGYKTLADNQKVSFETKRGPKGLQAANIKPL

SEQ ID NO: 34131 - protein, 371 aa, Burkholderia thailandensis E264
MLIGVPKEIKVYEYRVGLTPAGARELALHGHPVLVQRGAGAAIGLRDEDYAAAGAMLADDPAEVYARADMIVKVKEPQPAECAMLRRGQILFAYLHLAPDPGQAAALVRSRAVCIAYETVRAPGGGLPLLAPMSEVAGRMSIQVAAAHLESPGGGMGLLMAGVPGVPAAHVVVLGAGVVGTCALQMAAGLGARVTVLDTNVDRLRELDLVFGNRIATLYSNAHAIDDAVRGADVVIGAVLVPGASAPRLVTREMISTMRAGAVVVDVAIDQGGCIETSRPTTHAQPTYVVDGVVHYCVANMPGAVARTSTFALGNATLRHAIALANKGWKRALADDPYLRAGLNVCDGHVTHEAVARALGLAYVHADEMLD

SEQ ID NO: 34132 - protein, 461 aa, Burkholderia thailandensis E264
MTSRDERLHRGLEERHINLMALGATIGVGLFLGSATAIRAAGPAILLTYMLGGIAIFLIMRALGEMAIDNPVAGAFSRYARDYIGPLAGYLTGWTYWFMWIVTCMAEITAVGVYMHMWFPDVPNWIWTFAALIVMGAVNFIAVKLYGEFEFWFALIKIVTIVLMIAGGALMIVAGVGNGGVPTGVSNLWAHGGFLPNGLAGVVDALPIVMFAYLGVEMLGLTAGEARNPEKSLAKAVNSVFWRVVIFYVGALFVIMSIYPWSQIGTQGSPFVMTFSRLGIPAAAGIINFVVLTAALSSCNSGIFSTARMLFNLAEQGQAPERLASVNRRGVPVHGVLISVALLFVGVALNYYAPQKVFVWLTSVSTFGAIWTWCVILIAQLRFRRRVSAERLARLPLRVPLYPMSSFVALAFLAFVVVLMAFSPDTRVALVIGPLWIAALTVYYHLSQAGRRAPLGAPTDG

SEQ ID NO: 34133 - protein, 676 aa, Burkholderia thailandensis E264
MPSSRSAPRTTLKPQVVVPSLAVIGALLAVCALLPNEAGALFGAGQQWIVERFDWFYVLAITTFLIFIVLIAASRFGNIKLGPDDAEPEFSFVSWTAMLFAAGMGIGLMYFGVGEPIQHYLKPPTALGGTPAAAREAMLMSFFHWGLHAWATYGVMGLVLAYFGFRYNLPLTLRSGLYPVLREGVNGWIGHTVDAFALVGTVAGIAVTLGYGVLQLSAGLHTIAGWQTDSDAFRIGLVAVVVALAGLSAASGLDKGVRRLSELNLMLAFALLAFVVVAGPTSFLLRAFGDNVGEYLSKLVSLSFRTYAYEAPNDKGWFGGWTLLYWAWWVSWSPFVGMFIARISRGRTIREFVIGVLLVPTAFNLVWMTAFGNSAIWLDTHAAAGALAQTATNVDALLFRFFDYLPLTQLLSVAAIVLIAVFFVTSADSGAFVIDAIATRGAPHSPVWQRLFWAAVLGVTASVLLVAGGLKALQALTLVAALPVALVMLALCYGLWRGLKADHAHYSQEMAPATSFWTGQHWRQRLSQILRHTTGADARRFIAQTVEPALRKVAEELKAGGVDAHVARDDDDAVRLTVPAPAQRDFVYGARVSRKSAPAFRIREAAEPEPQREHVCEVLTFFADGRLGYDIEYLRGDEIIADVLRQYERYVSLASDTRTHLLNRAPEHAGPDGLTQ

SEQ ID NO: 34134 - protein, 423 aa, Burkholderia thailandensis E264
MNQAMTSVHTTASAPAVQSLKHAVTAAVLTAILTVPILGLQLKLDGYQVVLEAHWRPVWIAVAAVFLFQLFKPALLRAKAAVRMPAIAPLGAREQRAIVWALVALGFVWPFIGSRGAIDIATLALIYVILGLGLNIVVGFAGLLDLGYVGFYAVGGYTYALLNQYFGLTFWECLPLSALASATFGFLLGFPVLRLRGDYLAIVTLGFGEIIRLLANNLTSITGGPDGISSIPKPTVFGFEMARSASVEGAKTFHELIGIEYSGKHVVIFLYLIALVLVCFTLFVTSRLIRMPMGRAWEALRDDEIACRSLGLNPTRIKLSAFTLGASFAGIGGAFFAARQGLVNPESFTFIESALILAIVVLGGMGSQLGVILAAILLTVLPEVARGFAEYRMLMFGLVMVLMMMWRPQGLLPASRPHVELPQ

SEQ ID NO: 34135 - protein, 392 aa, Burkholderia thailandensis E264
MSEPLLLTFNAGSSTLKIGLYSVANGEPAPLGRGKIDFNRTPLQLEYSNSGDAHTVPLAASVTDDLHDVLDEALNWIGAHLPVHELVSVGHRVVHGGDAFGGPVRIDERTLDAIAALVPLAPLHQPQSVRLIRALRHLRPHLPQVASFDTAFHRTQSDLVRRFALPRALFDEGVKRYGFHGLSYRYVAGRLRERHPAVARGKVVAAHLGSGASLCALDAGVSRDTSMGFSTLDGVPMATRCGTLDAGVVLHLQKTLGYSVDDVEQMLYHRSGLLGVSGVSGDARALLADPSAGARDALALFAFRIAGEAARLATTLGGLDALVFTAGIGEHQPQTRAAVCERLRWLGVELDADANARNAEIVSSDASRVAVLVVPTDEEQVIARDAASVLHA

SEQ ID NO: 34136 - protein, 947 aa, Burkholderia thailandensis E264
MNRERIFNCLGRTTYAALVDATALGRSRRHAFIDLDHWALCLLQREQSDLARLFEQFGSDVGEAKRRMEKALDGFDVSGDSLRDISSSLERSVGPAVIWSQIAARAGKVRSGHLLLAWLDEDLTRRWLQQRVPNGITSVALDEVVKRYEALAPGWTETDEAPAALDGGALGAEAGEAGADGTSDALAKWATCVTEQAARGELDPVVGRDDELRTVIDILSRRRQNNPILVGEAGVGKTAVVEALAQKIHAGAVPPGLIGAQVWALDLARMQAGAGVRGEFEQRLKSLIDAVIASAAPIILFCDETHTLIGAGGAAGTGDAANLIKPMLARGQLRMVAATTWSEYKQYIEPDAALVRRFQAVPVDEPSDDAAVDMLRTIAPRFAAHHGVRIVDSALRGAVELSRRYLPARQLPDKAISLLDTACARVAMSQNCAPAELERLQHQAFAIGQTLDWRASDRRMGVRTPGDEAELEGRQASLVQQAATLETVVDAQRDEVRSWLARLNDETHVSADSDGDSFAARIGANRWVRPWVDEHVVSEVLAEWTGVPVAQLAQDDAQRVVELEGALNAGIHGQTGAMRSIAQALQVSHSGLNDPRRPLGVMLLAGPTGTGKSQAAAKLAELLFGGERNLLQFNMNEFQEAHTVSTLKGAPPGYVGYGKGGRLTEAVRKKPYSVLLLDEFDRAHPDIHEVFYQVFDQGWMEDGEGRRISFRNCLILLTSNLGDVEIEAACKADPQISQAKLDKLVGERLQGRFSPALLARIQLVAFRPLDVDALTGIATQALDELGERLAENDLQWRADEGVASWVAHAVSQHPANGRAVRDLLRQHVMPAVARGVLAARAEGRALKTVRLSAHEKLSLVFDEDALEIGGTDAASLGEQAEAAAREAAASAAAHGAPEAHDAPESRDVHEANGDMRAEADDERPADAHHPDETTSANAGTTGEPSCV

SEQ ID NO: 34137 - protein, 299 aa, Burkholderia thailandensis E264
MEAIMKVGFVGIGVMGQPMALNLARAGTELVVWNRTRERCEPLRAAGAQVVDSVADVYRHARIVILMMATDAAIDAVLDRGKPAFASNVAQHTIVQMGTVSAEYSRGLEADIRAAGGRYVEAPVSGSRKPAEAGQLVAMLAGEPAAVDEVRALLAPMCREIVVTGPVPTGLLMKLAVNTFLIAMVTGLAEAAHAARGFGLDMKQFQAVLDAGPMASSVSRVKIDKLVNEDYEVQASITDVFKNSRLATEAAHGAHLSAPLLEVCCELYRETEALGHGQADMAAVVHAIEARSVARYAGS

SEQ ID NO: 34138 - protein, 958 aa, Burkholderia thailandensis E264
MLLVDLKPLIERLNPYCRTALENAVGACVARRHDDVAVEHLLARLCDEPSADVALLLRASGADAARLRRQADAALDARPAGGGGRPAFAPSLLALLQDAWLIASLELGETQIRSAAVLAAAVARAARQPSRGGDDMLQSLRRDALVARFAHACAQSIESRGPGARDAAPGDANDTPGAHDASSAIARYCEDFTAKARAGRIDPVFGRDAQIRQIVDILARRRKNNPVCVGEPGVGKTAVVEGLALRIAEGDVPAALRHATLLGLDLGLLQAGASVKGEFEQRLKRVIAEIHASQAPVVLFVDEAHTLIGAGGPAGASDAANLLKPALARGELRTIAATTWSEYKKYFEKDAALARRFQPVKLDSPDVATSVMILRGLKERYQDAHGVTIRDDALVAAAELSERYITGRQLPDKAIDLLDTACARVKVRQQTKPAALEDAERAIQALERERRALRRDLAERCAPDTPRVADIDRELAALSARADALSEAWAAQRDAAQALVEARRACRAIADAAEAAETASASGVAGVAGVAAAADVAPGAEASADARERAARALADATHRFEHARRDAPLVRIDVDPEAIADVVADWTGIAAGKLRRDRANVMLRLADTLKGRIRGQDHAIEQISEAVKAGAAGVHDPRRPLGVFLLAGPSGTGKTETALAVADALFGDERSIVVVNMSEFQERHDVSRLIGSPPGYVGYGEGGMLTEAVRQRPYSVVLLDEVEKAHPDVLNLFYQVFDKGSLCDGEGKEVDFANTVIFLTSNLGADVIADLAARGGRPDPDAMRAAIRPALSRHFKPALLARMTEIPYATLAPDTLADIARRKLERIAARVAAQHATRVVYDEAVVAHVAARCTEVESGARSVDFILQRHVLPALAQHVLVCAGDATPMAAIRIAIDANGRFVVSTDEPACSGGRNAADALDGPDASDTPNAPNAPNAPNAPNAPNAPNAPNAPNAR

SEQ ID NO: 34139 - protein, 468 aa, Burkholderia thailandensis E264
MAMISESSSAAAAAPGGARAPDTLARSLNVRDVVMITVSGVTPASSIFVIAPFAIQQAGSGAVVSFVLGGLLALAFALCYAELSAAHRSAGGEYVMVKRVFGALPGYLTFVAVLAVNVFIPAVLASGAAPYLNAALGTQFRNQSVALAIVLASYALGILNIRTNAWITGAFLVIEILVLALIAYLGFSEPHRSPLALVHPVVANGAALVPATLAAIMPAVGTAIFCYNGFGAAVFLAEDLEGGNRDIAKAVICSLAVILVVELVPLTAIVLGAPSFVELAKSADPIGYVVRALSNPGVSRVVSGGIFLSVFNAIIAIVIMVGRFLYSSGRHALWSRACNGAFTRIHPRLESPWVATLTLAVPSTLLVFVSSLDELTAFTVDLLLLIYLAVGVAALASRVTRRDVDHHYRMPWWPLPPIVAIAGAGYTLYTTIAAATKPTDLYIIAGLAAVSLVTYAMWARRSEAFRAL

SEQ ID NO: 34140 - protein, 476 aa, Burkholderia thailandensis E264
MSSEEQFHAIAAREGGLRRTLSARQMTMIAIGGAIGTGLFLGSGFAIGFAGPSVLISYAIGALISLLLMGCLAEMTVAHPISGSFGAHAEHYLGPWAGFLVRYAYWACIVLAVGTEVTAVALYMKYWLPAVPGWIWIASFSAVLVCVNALSVDVFGSVEYGFSVVKIAAIVAFIAIGGYVVFVDPSLVADPNAGAPGLRHYFAHGGFFPKGLWGMWVAVIVSIFSYLSIEMIAVAAGEAQDPERAVTRAFRSTVIRLVLFYLVTLALMLAIVPWTAAGRDESPFVKVMIAIHLPGAAGVINFVVLIAALSAMNSQLYITTRMMFSLACAGHAPRGLGKLTSRGVPLNALLLSTAGIAIATLVSIVYPDASFTIMMAISMFGAMFTWTMIFVTHYFFRRKRAAQGLPPPRFRMPGFPFATLAGAALMLAIMATTYFTAEFHMTLVFGVPFLVALSVLYFARYRRRPQALAQAESLPR

SEQ ID NO: 34141 - protein, 885 aa, Burkholderia thailandensis E264
MSDIGRVTLFGKLNAFLYETLEQATGFCRLRGNPYVELAHWLNQMLQRPDSDVHRVLRRFDIEAAAIDRGIVSALDRLPRGAGSVSDLSAHIDDAVERAWVYATLKYDATQIRGAVLLLAIVKTAQLRNVLYAIARDFERIVPDVFADELERIVEGSPEAPPPAARASAGAGGGASPAAREGSALARYAVDLTARARAGEIDPVVGRDGEIRQIVDILLRRRQNNPLLVGEAGVGKTAVAEGFALRIVAGDVPPPLRDVELYLLDIGLLQAGASVKGEFESRLRGVIDEATSSERPVILFVDEVHTLVGAGGAAGTGDAANLLKPALARGLLRTIGATTWSEYKQYIEKDPALTRRFQLVQVREPEEGAALTMLRGLAAKLEAHHRVLVLDDALQAAVTLSHRYIPARQLPDKAISLLDTACARVAVSQHAVPAPIEDARRRIDSLRVERELIARECALGAGDAPRLDAIDASIASEQAALDALDARWQAERDALGQIVDWRASLLADDPSRALDETARADVQAKLSAALRALAELQGETPLVLPAVDTHAVAAVVSDWTGIPLGRMVRDEMQSVLKLADTLAERVVGQRHAVELIAERIQTARARLDDPAKPHGVFLLCGPSGVGKTETALALAETLYGGEHNAITINMSEFQEAHTVSTLKGAPPGYVGYGQGGVLTEAVRRRPYSVVLLDEIEKAHRDVHEIFFQVFDKGWMEDGEGRYIDFRNTVILLTSNVGSERVMQLCRDPQRLPDAQTLTDALRAPLREVFPAALLGRLSVVPYYPLTDEMLARIVALQLARIERRIESHHGIALRCEDSATALIVERCRTIESGGRMVDAILTHTVLPRISQEILRATIEGRALRAIDVSAEDGQFVYRFEEEGAT

SEQ ID NO: 34142 - protein, 622 aa, Burkholderia thailandensis E264
MCGITGWIDFSRDLRNEAPIVGTMTDTLARRGPDARGVWLDTHAALGHRRLSIIDLERGAQPMLTPERGPRGLPRAVISYAGETYNFRELRAELGALGHRFDTHCDTEVVLRAYLEWGAAFVDRLNGMYSIAIWDTARDELLLVRDRLGVKPLFYYPTADGVIFGSEPKAILAHPDVRARTSSEGLCDALLFLRTPGQVPFSGMREVKPGHLLRVRRGGLVEERYWALEARPHTDDLPTTIATIRALLDDIVSRQMISDVPLCALLSGGVDSSTVAALAQKQRRANGGGALATFCVDFTGHTRNFRADPIRPTADAPFALEVARHIGSDHHTIELDQAGLLDPQVRETVLRAWDLPFNFADLDVSLYRLFAEVRQHASVALSGEAADEIFGGYLWFSDPVARRAQTFPWLKLGAHRGLDPRALFHRAFIDELKLGEYEAQLYRAALAEVPRLDGESAEDRRTRELHYLTLTRWLPVLLDKKDRMGMASGLEGRVPFCDHRLVEYVFNIPWSMKTFSGQEKALLRAAAADLLPDSVLSRKKAAYPSIQTPGYDRGLIERLNRAIAAGRAPLEPFIDAGALRNLTAKTATGSLSEFERILLESSSRLNDWLDLYRVELDGVPAG

SEQ ID NO: 34143 - protein, 379 aa, Burkholderia thailandensis E264
MMRDAANFEPADSRVTRPAFWQALPERWTSDVEETLVCCHVRQETHDVKSFFFRSPQGRAFSFEPGQFVTLELDIDGETINRCYTISSSPARPHTISITVKRVPGGKVSNWLHDNLRPGAPLRVLGPAGEFTCARHPARKYLFLSAGSGVTPLMSMSRAHHDLAEDRDIVFVHSARTPDDIIFARELDLIASTHANFRTAFVCERLGARTNWHGVTGFLSLLLLKLIAPDFLEREIFTCGPAPYMKAVRDLLAEAGFDRGRYHEESFSFETLAQSDVRTEAPAGDAASDAQARRHTVAFAKSNREIACGADEHVLDAARRAGVRLPASCTQGMCGTCKVKLVSGQVDMKHNGGIRQREIDQGMVLLCCSKPLSDLVVDK

SEQ ID NO: 34144 - protein, 202 aa, Burkholderia thailandensis E264
MRAHPDPDMTLSDSALDQIFRTARTHNAWQPKPVDDALLHQLIDLVKCGPTSANSSPARFVFVKSPQAKAKLKPALSEGNLAKTMAAPVTVIVGMDMAFHDHLPKLFPHADARSWFAGNDALIEATAFRNSSLQGAYLIIAARALGLDAGPMSGFDQAAVDAAFFAGTSIKSNFLVNLGYGDAAGLFPRSPRFSFDEIARIE

SEQ ID NO: 34145 - protein, 317 aa, Burkholderia thailandensis E264
MSDQFFQPQSGNAMPRFAGIATMMRLPHASSAAALDACFVGVPFDLGTSNRTGARFGPRQIRSESVLLRPYNMATRAAPFDSLRVADVGDIATNPYNLADSIARIETAYDEILAHGCRPVTLGGDHTITLPILRAMHRRHGRVGLIHVDAHADVNDTMFGEKIAHGTPFRRAVEEGLLDCSRVVQIGLRGTGYAAEDFDWCRDQGFRVVQAEACWNRSLAPLMDEVRARVQGGPVYLSFDIDGIDPAYAPGTGTPEIAGLTVPQGLEIVRGAWGLDIVGADLVEVAPPYDPFGTTALVGANLAYEMLCVLPGVRRRA

SEQ ID NO: 34146 - protein, 605 aa, Burkholderia thailandensis E264
MIERGRAARGRNAARRGGGGEAWRRWLPGVATLRAYPRAWLARDLYAGVALTAVLVPVGMSYAQAAGLPVIAGLNATIAALLGYAIFGPSRILVLGPDSALTALIAGAIAPLAHGEPAHAVALAAALALMSGGFCVLAGLLKLGFVTDLLSKPIQYGYLNGLALTLIASQLPGLLGATPPGGAFVDEVAGIAATIAHGRIDFASLALGGGCLAGIVLLRRVAPAWPGMLIAVAGASIVAAWLGAAPDAAGANAHVANAHVANAHIALVGSLAGTLPPFGLPPISLADASRLVAGALAIALVSVADISVLSRVFAQNDGSETDRNQELIALGAANLLAGALRGCAVTSSSSRTPVALAAGARTQLTSVVAAACIALLLVAPTLLARVPLAALAAVVVYSAHALVDVRAIVRLYRVRRGECAVSVLCFAGVVLLGVVPGILLAVGLSLLSFVWRAWHPYDAVLGRVEGMHGYHDVSRHPEARRTPGLVAFRWDAPLFHANATIFRDHVRDAIAGAEAPVRCVVIAAEPITDVDVTAADMLATLRDELAERRIALVFAEMKGPVKDRLRTYGLFDKIGADHFFPTVTDAIAHFAQARKDAAAVRRARR

SEQ ID NO: 34147 - protein, 343 aa, Burkholderia thailandensis E264
MAFNVTLKQSGRQFQVEADETVLAAALRQNVHLPYGCKNGACGSCKGTIVQGQFEQGPHSASALSNDERTRGLALLCCSKPQSDLEVDVREIAGVDGVQVKKLPCRVAALERRADDVIVLRLQLPANERLQYLAGQYIEFILKDGTRRSYSMATAPHEEGPIELHIRHMPGGKFTDHVFGAMKERDILRFEGPLGTFFLREDSDKPIVLLASGTGFAPIKAIIEHAHHVKLARPMTLYWGARRKKDLYLLDAAEQWAKEIPNFKFVPVLSEPDASDAWTGRTGFVHRAVIEDLPDLSGHQVYACGAPVMVESAQRDFTQHHGLPADEFYADSFTSAADLAHPV

SEQ ID NO: 34148 - protein, 362 aa, Burkholderia thailandensis E264
MATPQFHPLRIRDVRPETADAVTVSFEVPPELRDAYRFTQGQFVTLKAHVDGEETRRSYSICVGTTDYDRDGELRIGIKRVRGGRFSNFAFDTLKPGHTIDVMTPDGRFFTHLNAEHGKQYVAFAGGSGITPVLAIVKTTLELEPRSAFTLIYGNRSVDSIMFAEELEDLKNRFMQRFALYHVLSDDVQDVELFNGVLDQAKCAAFIESLVPAATIDEAFICGPAPMMDAAEAALAEAGVPRERVHVERFGTPLPQAGAPAVEITDDTPAADLEIVLDGKKRKLRLPYEGVSLLDVGLRAGLALPYACKGGVCCTCRAKVLEGEVWMEKNYTLEPQEIADGFVLTCQCHPVSEKIVVSYDER

SEQ ID NO: 34149 - protein, 472 aa, Burkholderia thailandensis E264
MSRLIVVSNRVAAGQDARPTAGGLAVGVLDALKETGGVWFGWNGEIAGAPEEPAIERDGNVTYATVGLTRRDYDQYYRGFSNATLWPVFHYRGDLARFDRQEYAGYLRVNCALAKQLRALVQPDDIIWVHDYHLLPFAHCLRELGVKNPIGFFLHIPFPSPEVLRTVPPHEELMKFMCAYDVVGLQTEGDKQAFVDYIERRGLGTSSEDGILHAHGRVVKVAAYPIGIYPDAIGKAAVEYGSRKAVKALRDTMRERKLVISVDRLDYSKGLVERFQAFERMLANAPGWQGRVSLVQIAPPTRSDVQTYQRIRQTLEGEAGRINGRFAQLDWTPIQYLNRKYERNLLMALFRLSQVGYVTPLRDGMNLVAKEYVASQDPNDPGVLVLSEFAGAAAELPGALLVNPFDLSQMAESLERALAMPLEERQARHAENIARLRKNDLSVWRDSFLADLRSVATAASVTQRAGRRVANA

SEQ ID NO: 34150 - protein, 392 aa, Burkholderia thailandensis E264
MTEAVIVSTARTGLAKSWRGAFNMTHGATLGGHVVAAAVARAKLDPARVEDVLIGCANPEGATGANIARQIALRAGLPVSVPGMTVNRFCSSGLQTIALAAQRVIAGEGDVFVAGGVESISCVQNEMNRHMLREGWLDAHKPEIYWSMLQTAENVAKRYGIAKERQDEYGVNSQLRAAAAQAAGRFDAEIVPITVRAGVADKATGRLYTKDVTLAADEGIRPDTTLEGVAKIRSALPGGVITAGNASQFSDGAAACVVMNAKLAEREGLAPLGIFRGFAVAGCEPDEMGIGPVYAVPKLLKQAGLKVSDIDLWELNEAFAVQVLYCRDTLGIPDDRLNVNGGAIAVGHPYGVSGARLTGHALIEGKRRGAKYVVVTMCIGGGQGAAGLFEVV

SEQ ID NO: 34151 - protein, 289 aa, Burkholderia thailandensis E264
MDIGFIGVGEMGSAIAANLLKAGHRVRAWNRSAERVEPLVALGAQRVATIADAFSGDAVFSMLADDEAARGVFDAALLEHAPRGLIHVNMATISVALAEQLAHAHAQRGIHYVAAPVMGRPHVAAAARLTIIAAGPAEAIDRMQPAFDAIGQKTWRLGSLPQHANAVKIAANFTIASAIETMGEAGALLAAHGVAMNDYLDVITNSVFPGPVYQGYGAMIAESRYEPALFKARLGLKDVRLALEAGDAVSVPLPVASVVRDSLIEAVAHGHGDKDFAVLGQVAARRAGR

SEQ ID NO: 34152 - protein, 768 aa, Burkholderia thailandensis E264
MSTSSSSSSKDKLREAALDYHEFPTPGKVAIAPTKQMINQRDLALAYSPGVAFACEEIVENPLNAARFTARSNLVGVVTNGTAVLGLGNIGPLASKPVMEGKAVLFKKFAGIDVFDIELNESDPHKLVDVIAALEPTFGGINLEDIKAPDCFIVERECRKRMKIPVFHDDQHGTAIVVAAAVTNGLKVVGKSIKEVKLVASGAGAAALACLDLLVDLGLPLENITVTDLAGVVYKGRTELMDPDKERFARETDARTLSEVIGGADIFLGLSAAGVLKADMVKTMAARPLILALANPTPEILPEVALEARPDAVLATGRTDYPNQVNNVLCFPFIFRGALDVGATTITREMEIAAVNAIAELAQHEQSDIVATAYGIQDLSFGPEYLIPKPFDPRLIVKIAPAVAQAAMDGGVATRPIEDMEAYKVHLQQFVYHSGTTMKPVFQIARSAPAEKKRVVFAEGEEERVLRAVQIVVDEKLAKPILIGRPAVIEHRIQRYGLRLTPGVDFTIVNTEHDERYRDFWQTYFKMMARKGISEQLARVEMRRRTTLIGSMLVKKGEADGMICGTISTTHRHLHFIDQVIGKRAGCSVYGAMNALVLPGRQIFLVDTHVNVDPTPAQLAEITIMAAEEVRRFGIEPKVALLSHSNFGTSNAPSAQKMRDTLAILHERAPELQVDGEMHGDVALDAALRKEILPESTLEGEANLLVLPNIDAANIAYNLLKTAAGNNIAIGPILLGAAQPVHVLTESATVRRIVNMTALLVADVNAAR

SEQ ID NO: 34153 - protein, 756 aa, Burkholderia thailandensis E264
MDEQLKQSALAYHQNPKPGKISVTPTKPLSNQLDLSLAYSPGVAAACEAIHADPLDAQKYTSRGNLVGVVTNGTAVLGLGNIGPLAAKPVMEGKGCLFKKFAGIDVFDIELAESDPDKLVEAIAMLEPTLGGINLEDIKAPECFYIEQKLRERMKIPVFHDDQHGTAIIASAAILNGLKVVGKDLSSVKLVCSGAGAAAIACLDLLVKLGLSKSNVLVADSKGVIYEGRGNLDPSKQRYAAVTDARTLADAIRDADVFLGCSSAGVLKQDMVKTMADKPLILALANPEPEIRPEDAKAVRPDAIVATGRSDYPNQVNNVLCFPFIFRGALDVGATTITEEMKLACVRAIAELAQETDQSEEVAKAYEGHSLEFGPDYLIPKPFDPRLIIKIAPAVAQAAMDSGVATRPIADMDAYREQLGTTVYRTGMVMRPVFATAKTKAARIVFAEGEDERVLRAAQFVLQERIAKPIIVGRPSVVEMRLQKIGSKLKCGVDFEIVNPEDDPRYQQCWQAYHEMGARDGVTPEVAKAALRKFNTLIGAMLVHLGDADGMICGMIDTYHSHLKFIEQVLGRAKGAEHFAAMNLLMLPGRNLFMCDTYVNEQPSAEQLADMTIQAAAEIERFGITPKAALLSNSNFGSAPSASSRRMAEARKLIVERAPELEVDGEMHGDAALSEVVRKAAFPGTTLTGEANLLIMPNVEAANIAYNLLKMVGGEGVTVGPFLLGAAKPVHILTPAATVRRIINMTAVAAANVQVK

SEQ ID NO: 34154 - protein, 628 aa, Burkholderia thailandensis E264
MNNNMFSKAAVWLVIALVLFTVFKQFDKPRVQEGVSYSQFMDDAKNGKIKNVVVQGRNLTVTPADGQKYQIVSPGDIWMVGDLMKYGVQVSGKADDEPNALVSALYYLGPTLLIIVFWFYMMRQMQGGGKGGAFSFGKSRARLIDENNNAVNFSDVAGCDEAKEEVSELVDFLRDPQKFQKLGGRIPRGVLLVGPPGTGKTLLARAIAGEAKVPFFSISGSDFVEMFVGVGAARVRDMFEQAKKHAPCIVFIDEIDAVGRHRGAGMGGGNDEREQTLNQMLVEMDGFEANSGVIVIAATNRSDVLDKALLRPGRFDRQVYVGLPDIRGREQIMRVHLRKVPIANDVDAAVIARGTPGFSGADLANLVNEAALFAARRGKRIVEMQDFEDAKDKIFMGPERKSAVIREEAKRATAYHESGHAVIAKLLPKADPVHKVTIIPRGRALGVTWQLPEHDNETYSKDYLLDRLAILFGGRVAEELFLNLVSTGASDDFNKATQTARAMVARFGMTDALGPMVYVDDENDGGPFGRGFTRTISEATQQKVDAEIRRVLDEQYGLARRLLEENRDKVEAMTAALMEWETIDADQINDIMEGRPPRSPKSAPPAGDPSSGGSSGAEVKPGNATAPA

SEQ ID NO: 34155 - protein, 256 aa, Burkholderia thailandensis E264
MNRSEPLLQVFDLSVDVAKRRVLQSVSLTVPAGALVVLMGANGSGKSTLGMTLAGHPAYRVTHGHARFGGRDLLAMSVQERARAGLFLSFQAPPDIPGVKNSLFIRTALNAVREARGDTALDAVDFLGDARASAARVGLPDAMLNRSMNEGFSGGERKRNELLQLALLRPRLAMLDEIDSGMDVDGVRAAVDLIGRLREQGTAFVIVSHYLQMIESLAPDTVLLLDRGRIAESGDLALARDIAAKGFVRTDALAEA

SEQ ID NO: 34156 - protein, 865 aa, Burkholderia thailandensis E264
MRIDKLTTKFQEALSDAQSLAAGRDNQYIEPVHVLAALIAQQDGSARSLLSRAGVHIQALQGALNEAISRLPQVTGTGGDIQVGRELAGLLNQADKEAQKLNDTFIASEMFLLAVADDKGEAGKLARQHGLTRRALESAIAAVRGGSQVHSQDAESQREALKKYTVDLTERARAGKLDPVIGRDDEIRRSIQILQRRTKNNPVLIGEPGVGKTAIVEGLAQRIVNGEVPETLKNKRVLSLDMAALLAGAKYRGEFEERLKAVLNDIAKDEGRTIVFIDEIHTMVGAGKAEGAMDAGNMLKPALSRGELHCIGATTLDEYRKYIEKDAALERRFQKVLVDEPSVEATIAILRGLQEKYELHHGVEITDPAIVAAAELSHRYITDRFLPDKAIDLIDEAASKIKMEIDSKPEEMDRLDRRLIQLKIEREAVKKEQDEASQKRLALIEEEIERLGRQYADLEEIWTAEKAAVQGSAQLKEEIDKVRADIARLQREGKLEKVAELQYGKLPQLEARLKQVTQAEESEQHNPTRPRLLRTQVGAEEIAEVVSRATGIPVSRMMQGEREKLLHIEEKLHERVVGQNEAIDAVADAIRRSRAGLADPNRPYGSFLFLGPTGVGKTELCKALAGFLFDSEEHLIRIDMSEFMEKHSVARLIGAPPGYVGYEEGGYLTEAVRRKPYSVILLDEIEKAHPDVFNVLLQVLDDGRMTDGQGRTVDFKNTVIVMTSNLGSQLIQSMSGSSQEEIKDAVWVEVKQHFRPEFLNRIDDVVVFHSLDRSNIQAIAKIQLARLHDRLAKLEMALDVSEAALEQIGKVGYDPLFGARPLKRAIQQEIENPVAKLILAGRFGPKDVIPVDVQDGKFVFERVVH

SEQ ID NO: 34157 - protein, 271 aa, Burkholderia thailandensis E264
MKFKPFAAWLIGLSLAAAHAAAHADRLDDIKKAGVLRVATFDSNPPFGFVDPKTNRIVGLDVDYARALADKLGVKLKLQPTNPANRIPFLTSGKVDLVLANFTITGERAKQVDFSIPYFASGQQFLAKKGVLKSADQLNRLRIGADKGTTNEVTLREKYPQATIVAYDDTPFAFAALRAGNVQAITQDGPKLIGLLANVPDKQNYEVPAFSISNDYMGVGAPKGETRLVAFVNDTLAELEANGRAGRIYDAWFGPNTRTPLARIFRIGDKR

SEQ ID NO: 34158 - protein, 482 aa, Burkholderia thailandensis E264
MSFASLGLAEPLVRAVNELGYTQPTPIQAQAIPAVLGGGDLLAGAQTGTGKTAGFTLPILQRLHAFYAENRGARRAVRALILTPTRELAAQVEESVRAYSKYVKLRSTVMFGGVSINPQIDALKRGVDIVVATPGRLLDHMQQKTIDVSSLDILVLDEADRMLDMGFIHDIKRVLAKLPAKRQNLLFSATFSDEIKSLADSLLDSPALIEVARRNTTAETIAQKIHPVDRDRKRELLTHLIREHNWFQVLVFTRTKHGANRLAEQLTKDGISAMAIHGNKSQSARTRALSEFKNCTLQVLVATDIAARGIDIDQLPHVVNFDLPNVPEDYVHRIGRTGRAGANGEAVSLVCVDEKQLLRDIERLIKREISQEVIPGFEPDPNAKPEPIQRRGQRGGNGGGANGGNGGGSAGNAGRGNRAPRAASQPQAQQGQPAARRDGGTQAKAAKPQARGGGRPAGNGASNGGGAHANRNRSSRSGQRGR

SEQ ID NO: 34159 - protein, 467 aa, Burkholderia thailandensis E264
MSLFRKKNVDRMIAGAHAAGLKKALGAVDLTFLGIGAIIGTGIFVLTGTGAVQAGPALMLSFVIAAIACGLAALSYAEFASTIPVAGSIYTYSYATLGELVAWIIGWDLMLEYGLAASAVSVGWSGYLQSLLQGFGVSLPAALTAAPGALPGVVTYFNLPAFLVMLVITTLLSIGIRESTRVNNIMVFIKVAVVLLVIAVGIFHVTPANWKPFMPHGWNGVFGAAAVMFFAFIGFDAVSSAAEEVKNPKRDLPVGIIASLGVCAFLYVAVAAIATGIVPWAQYANVSHPISYALQVAGEKWVAGFIDLGAVIGMLTVILVMSYGQTRIIFAMSRDGLLPAALSRVHPRFATPFLTTWLVGLFFGLIAALIPLNVLAELINIGTLAAFSMVSIAVLVLRRTHPDLPRAFRCPGVPFVPILAVAACLFLMLNLQPVTWIAFLTWLVIGLFVYFAYSRSRSKLAHGAQQH

SEQ ID NO: 34160 - protein, 587 aa, Burkholderia thailandensis E264
MNMPSAEFSTSESLSPQKTGSIGATVLMKALADENVEFIWGYPGGSVLYIYDELYKQDKIQHVLVRHEQAAVHAADAYSRSTGKVGVCLVTSGPGVTNAVTGIATAYMDSIPLVVISGQVPTAAIGQDAFQECDTVGITRPCVKHNFLVKDVRELAETVKKAFYIARTGRPGPVLIDIPKDISKTPCEYEPVKNVSLRSYNPVTKGHSGQIRKAVSLLLSAKRPYIYTGGGIILADASRELNQFADLLGYPVTNTLMGLGGYRASDRKFLGMLGMHGTYEANMAMQHCDVLIAIGARFDDRVIGDPAHFASRPRKIIHIDIDPSSISKRVKVDIPIVGDVKEVLKDLIEQLQTAEHGPDADALAQWWKDIEGWRAKDCLKYDRESEIIKPQYVVEKAWELTDGNAFVCSDVGQHQMWAAQFYRFNKPRRWINSGGLGTMGFGLPAAMGVKMAHPDDDVLCITGEGSIQMCIQELSTCKQYDTPVKIISLNNRYLGMVRQWQQIEYSKRYSHSYMDALPDFVKLAQAYGHIGMRIEKSADVEPALKEALRLKDRTVFLDFQTDPTENVWPMVQAGKGITEMLLGSEDL

SEQ ID NO: 34161 - protein, 384 aa, Burkholderia thailandensis E264
MQSAAAPRSKLPDVGTTIFTVIGQLAAEHQALNLSQGAPSFAPDPALVERAARAMRDGHNQYAPMAGVAALRDALAVKTERLYGGRYDPDSEVTVVASASEGLYAAISALVHPGDEVIYFEPSFDSYAPIVRLQGATPVAIKLSPDGFRVNWDEVAAKITPRTRMLIVNTPHNPSATILGDADIAHLARLTAGTDIVVLSDEVYEHVVFDGARHHSMARHRALAERSVIVSSFGKSYHVTGWRVGYCLAPAELTRELRKVHQFMTFAADTPMQHAFAEALAEPASYLELGAFYERKRDLLASELAGSRFELQRSEGSFFMLARFRHFSDESDADFVLRAIRDARVATIPLSAFYADGTNTGCIRLSFSKDDATLIEGARRLRSL

SEQ ID NO: 34162 - protein, 482 aa, Burkholderia thailandensis E264
MSDAGDAAPDEPTFASLGLSPEIVSALQAAGYVKPTPVQQRAIPAGIAGRDLLVSSPTGSGKTAAFMLPAIERFAQLQKAQAQQPRAPREAQPGERRGRRPQPVARPGLLVLTPTRELAMQVTTAASTYGKHLRRLRTVSILGGVAYGQQLMLLAKNPEILVATPGRLLDHLERGRIDLSELKMLVLDEADRMLDMGFIDDIDTIVAATPASRQTMLFSATLDGKIGSLTNRLLKDPERIEITQKIESRSNIAQTVHYVDDRDHKDRLLDHLLRDTALDQAIIFTATKIDADQLAGRLADAGFQSAALHGDLPQGARNRTIRALRERRVRVLVATDVAARGIDIPGITHVFNYDLPKFAEDYVHRIGRTGRAGRSGTAVSLVHHAEQGALKRIERFVRAPLPVNVVEGFEPRKAPPPRNDRGNGRGRPGGNGGRRFGGKPGGGHGGGRSGGWSGKPGGNREGYGARRSDGQRGGPRRGNSAA

SEQ ID NO: 34163 - protein, 347 aa, Burkholderia thailandensis E264
MGRRPLAANSSHGRHFGRVCAAAPQSPISPRAAARSKSPNPANCISRDVVRDGLHAFDRRATADIALAPLATHPGRRACRSEHVKCCGPRRRGRPASGPGGRFFLFGATIWPYPFRAERPLTRRPIIDPEVLPIETTGAGLAPVPPSLLTPDGLRDRFAQPPVWTQEPAEAQLADGIDPRSAAVLVPLVVRERGLTVLLTQRADHLNDHAGQVSFPGGRREPDDRDANATALREAREEIALSHERVELLGALPDYLTGTGFCVTPVVALVHPPFTVEADTLEVAEIFEVPFDFLMNPAHHQVRVFRWEGGERRFFAMPYPRGPVGGQYFIWGATAGMLRNLYRFLAA

SEQ ID NO: 34164 - protein, 397 aa, Burkholderia thailandensis E264
MNTAADSLLRLASRVDAIEPFYVMEIVKEAAVLERAGRDIIHMSIGEPDFTAPEPVVDAAAAALRRGVTQYTSALGIAPLREAIAAHYARAYGLSIGPERIVVTAGASAALLLACLALVGRDDEVLMPDPSYPCNRHFVATAEGRAVLVPSGPEARFQLTADDVRTRWGERTRGVLLASPSNPTGTSLEPAELGRIIDAVRARGGFSIVDEIYQGLSYDGAPVSALSFGDDVVTVNSFSKYFNMTGWRLGWLVVPPALVGTFEKLAQNLFICPSALAQHAALACFEPHTLAIYEARRAEFKRRRDFIVPAIESLGFKVPVMPDGAFYVYAQCGGVAHPAAGDSAALVNAMLHDAGVVLVPGMDFGVHAPRDYIRLSYATAYSRLEEAVERLGKLFGR

SEQ ID NO: 34165 - protein, 446 aa, Burkholderia thailandensis E264
MTTILENLPAGQKVGIAFSGGLDTSAALHWMRIKGAVPYAYTANLGQPDEDDYDAIPKRAIQYGAEGARLIDCRAQLVAEGIAALQCGAFHISTAGVTYFNTTPIGRAVTGTMLVAAMKEDGVNIWGDGSTYKGNDIERFYRYGLLVNPDLKIYKPWLDQQFIDELGGRAEMSEFMRQAGFEYKMSAEKAYSTDSNLLGATHEAKDLESLESGIKIVNPIMGVAFWRDDVKIDKEAVTVRFEEGRPVALNGVEYKDAVELLLEANRIGGRHGLGMSDQIENRIIEAKSRGIYEAPGLALLYIAYERLVTGIHNEDTIEQYRENGRRLGRLLYQGRWFDPQAIMLRETAQRWVARAVTGEVTVELRRGNDYSILATRSPNLTYQPERLSMEKVQSTFSPRDRIGQLTMRNLDITDTRDKLRIYSEVGLLTPGESSALPKLKEDESGN

SEQ ID NO: 34166 - protein, 533 aa, Burkholderia thailandensis E264
MKSSIQRNIGPFALMLTGLGSIIGSGWLFGAWKAAKIAGPAAICAWIIGAVVILAIALTYAELGAMFPESGGMVRYARYSHGSLVGFISAWANWIAIVSVIPIEAEASIQYMSTWPYAWAHALFVNGELTTPGLLLSAVLVVIYFLLNYWGVKLFARANTTITIFKFLIPGLTIAGLLLSSFHSENLGTAGGSSSFAPYGWSAVLTAVATSGIVFAFNGFQSPVNLAGEARNPSRSVPFAVISSILIALVIYVLLQVAYIGAVNPADVAKGWAHFNFASPFAELAIALNLNWLAILLYVDAFVSPSGTGTTYMATTTRMIYAMERNNTMPKIFGSVHPLYGVPRPAMWFNLIVSFIFLFFFRGWSSLAAVISVATVISYLTGPISLMALRRAATDLERPLSIPGMKLIAPFAFVCASLILYWAKWPLTGEIILLMVVALPVYFYFQGKSGWSGWGRDLKAAWWLVAYLPTMAVLSLIGSKEFGGHGLLPYGWDMLVVAAIALVFYYWGVNTGYRTEYLDERESRDEILEGIGA

SEQ ID NO: 34167 - protein, 539 aa, Burkholderia thailandensis E264
MTPPDLRADAPAHAPYTVRDAVIDLLRRFGIRKVFGNPGSTELPMFRDFPADFEYVLGLHEAVAVGMADGYAQASGNAAVVNLHSAAGVGNAMGVLFTAYKNKTPLVVTAGQQARSILPFEPFLASVQAAELPKPYVKWSIEPARAEDVPAAIARAYHVAMQEPRGPVFVSIPADDWDRPAEPIAARTVSSEVRPAPDALARLGDALDASERPAFVVGAAVARAGAWDEAVRLAERHRARVYAAPMSGRCSFPEDHPLFAGFLPPMRERIVERLAGHDFILAFGAPVFTYHVEGFGPHVPAGATLHQLVDDPSVAAWTPVGDAVVGNLRLAARDLLARPVPRERPMPAPRAPHERAGPGAPGERMPVAFALQTLADVRGPDDIVVEEAPSARPAMQQHLPFSRVDTFYTMDSGGLGYGMPAAVGVALGSPGRRVIALIGDGSSLYSIQALWSAAHLKLPVTFVILNNARYAALQEFAPVFGFRDDEPVQGTALPDLDFVSLARGLGCDGVRVSDAARLRDALERALASPAPVVVDVQIA

SEQ ID NO: 34168 - protein, 557 aa, Burkholderia thailandensis E264
MDIKRTVLWVIFFMSAVMLFDNWQRSHGRPSMFFPNVTQTNTASNATNGNGASGASAAAANALPAAATGAAPATTAPAAQAQLVRFSTDVYNGEIDTRGGTLAKLTLTKAGDGKQPDLSVTLFDNAANHTYLARTGLLGGDFPNHNDVYTQAAGPTSLAAGQNTLKLAFESPVKGGVKVVKTYTFTRGSYVIGVDTKIENVGTAPVTPSVYMELVRDNTSVETPMFSHTFLGPAVYTDQKHFQKITFSDIDKNKADYVTSADNGWIAMVQHYFASAWIPQQGAKRDIYVEKIDPTLYRVGVKQPVAAIAPGQSADVSARLFAGPEEERMLEGIAPGLELVKDYGWVTIIAKPLFWLLEKIHGFVGNWGWAIVLLTLLIKAVFFPLSAASYKSMARMKEITPRMQALRERFKSDPQKMNAALMELYKTEKVNPFGGCLPVVIQIPVFISLYWVLLASVEMRGAPWILWIHDLSQRDPYFILPVLMAVSMFVQTKLNPTPPDPVQAKMMMFMPIAFSVMFFFFPAGLVLYYVVNNVLSIAQQYYITRTLGAAAAKKKAS

SEQ ID NO: 34169 - protein, 379 aa, Burkholderia thailandensis E264
MHIGVPAETRANEARVAATPETVKKYAAAGHRVTVERGAGAGASFPDDAYAAAGAELADAAAAFGADIVLKVQAPTDTECGQLKRGSVLIGMLEPFNAEQAARLAAAGVTGFALEAAPRTTRAQSLDVLSSQANIAGYKAVLVAAALYPRFFPMLMTAAGTVKAARVLVLGAGVAGLQAIATAKRLGAVIEASDVRPAVKEQIESLGAKFLDVPYETQEERDAAQGVGGYARPMPASWLGRQAALVHERAKQADIVITTALIPGRPAPTLISVETVQSMKPGSVLVDLAAGRGPEFDGRKSGNCPLTVADQVIVHHGVTIAGHTNLAAMVPADASSLYARNLFDFLKLIVTKEGALNIDRSDDIVAATLLCRDGEVVRK

SEQ ID NO: 34170 - protein, 394 aa, Burkholderia thailandensis E264
MQREVVVVSGVRTAIGDFGGSLKDFAPTELGARVVREVLSRAQVSGDEVGHVVFGNVVHTEPKDMYLARVAAINGGVAQHAPALTLNRLCGSGLQAIVSAAQGVLLGDADIAVAGGAENMSRAPYAVPSARFGQRMGDAKLVDMMIGALNDPFQSIHMGVTAENVAAKYGITRDAQDALALESHRRASHATKSGYFKEQILPIEIASRKGAVVFDADEHVRHDASLDDFTKLKPVFVKENGTVTAGNASGINDAAAAVVLMERSVAEKRGAKPLARLVSYAHAGVDPAYMGIGPVPATKKALERAGITVADLDVIEANEAFAAQACAVSNELGLDPAKVNPNGSGISLGHPIGATGALITVKALYELQRIGGRYALVTMCIGGGQGIAAVFERL

SEQ ID NO: 34171 - protein, 454 aa, Burkholderia thailandensis E264
MKNLQRHLSARHIRFLALGSAIGTGLFYGSASAIRLAGPAVILAYIVGGAAVYMVMRALGEMAVREPVPGSFGHYASENLGPFAGFVTGWTYTLEMVIVAIADITAFGIYMGFWFPDVPQWIWVLAIVAIICGLNLCHVKVFGELEFWLSIVKVGAIVAMIGGGAAILFSGMKLGSGGAPALANLWSHGGFLPNGVGGLVASLSVVIFAYGGIEVIGMSAGEAKEPERVIPRAINAVPMRILLFYVLTMVVLMSIFPWTGVGANGSPFVQIFSALGVRSAAEILNLVVISAAISAINSDIFGAGRMMYGMALQGQAPRALASMSARGVPWVTVLVMAGALLVGVVLNYLMPKDVFLMVAAIATFATVWVWLMILLSQVAMRRRLSAAETAALKFKVPFWPIGPAITIAFMAFVIAMLGYFDDTRIALFVGAAWLALLTLVFYTRVRPRLAAVAR

SEQ ID NO: 34172 - protein, 569 aa, Burkholderia thailandensis E264
MSTERTDATAPSNFIRNIIDDDNRTGKWSGRVETRFPPEPNGYLHIGHAKSICLNFSVARDYGGVCHLRFDDTNPEKESVEYVNSIVDAVRWLGFDWQKAGVDHQYFASDYYDRLYEFAELLIQRGKAYVDSQSADEMRTNRGSLTEPGTPSPFRDRSPDESLDLFRRMKAGEFGEGEHVLRAKIDMSSPNMNMRDPVIYRIRYAHHYRTGDKWCVYPMYDYTHCISDALEGITHSLCTLEFEDHRPLYDWVLNELADAGVFARPLPQQIEFSRLNLTYAITSKRKLLQLVTEGHVDGWDDPRMPTIVGVRRRGFTPESIQLFCERIGVTKVDSWIDMSVFEGALRDDLDDKAPRTVAVLDPLKLVIDNYPEGQTEECTAPVHPHHPERGQRAFPISRELWIEREDFNENPPKGYFRLFPGNKVRLRYGYVIECTGADKDEHGNVTAVHCNYYPDSKSGTEGANNYKVKGNIHWVSAAHACPAEVRIYDRLFKEPHPDAGGRNFLEALNPDSKKIVQAYLEPGARDALPEARYQFERHGYFVADRVDSKPGQPVFNRIVGLRDSWGKPA

SEQ ID NO: 34173 - protein, 400 aa, Burkholderia thailandensis E264
MTKAFLCDAIRTPIGRYGGALAPVRADDLGAVPLKALAERNRDVDWAAVDDVIYGCANQAGEDNRNVARMSLLLAGLPHAVPGATINRLCGSGMDAIGIAARAIKAGEANLMIAGGVESMSRAPFVTGKATSAFSRQAEIFDTTIGWRFVNPLMKQQYGVDSMPETAEHVATDYRVSRADQDAFALRSQQKAARAQADGTLAQEIVPVTIAQKKGEPLVVARDEHPRETTLDALAKLKGVVRPDGTVTAGNASGVNDGACALLVASEAAARRHGLVPRARVLGIATAGVEPRVMGIGPAPATQKLLARLGMTLDQFDVIELNEAFASQGLAVLRLLGVADDDARVNPNGGAIALGHPLGASGARLVTSATYQLHRTGGRFALCTMCIGVGQGIAIAIERV

SEQ ID NO: 34174 - protein, 299 aa, Burkholderia thailandensis E264
MNAPAPTGFRCGMIAIVGRPNVGKSTLMNALVGQKISITSRKAQTTRHRITGIRTLDDAQYVFVDTPGFQTRHSTALNRSLNRAVTSTLTSVDAILFVIEAGRFGPDDQKVLDLIPPGTPTLLVANKLDRVSDKDTLYPFFQKMGELREFAEIVPLSAKHPEDIQRLMNTIKPYLPEGDAIYGEDDLTDRSSRFLAAEILREKVFRWTGDELPYTSTVVIDKFEEEGRLTRVFATILVERDSHKAMVIGKKGAKLKQISTEARQDMEKLFDGPVYLETFVKVRSGWADNEAGLRAYGYE

SEQ ID NO: 34175 - protein, 393 aa, Burkholderia thailandensis E264
MTDVVIVSAARTAVGKFGGSLAKIAAPELGATVIRAVLERAGVKPEQVSEVILGQVLTAGSGQNPARQALIAAGLPNAVPGMTINKVCGSGLKAVMLAANAIVAGDAEIVVAGGQENMSAAPHVLPGSRDGFRMGDAKLVDSMIVDGLWDVYNKYHMGVTAENVAKEYGITREAQDQFAALSQNKAEAAQKAGRFDDEIVPIEIPQRKGEPLRFATDEFVRYGVTAESLASLKPAFAKDGTVTAANASGINDGAAAVLVMSAKKAEALGLEPLARIKAYANAGVDPSVMGMGPVPASRRCLERAGWSVGDLDLMEINEAFAAQALAVHKQMGWDTSKVNVNGGAIAIGHPIGASGCRILVTLLHEMQKRDAKRGLASLCIGGGMGVALALERP

SEQ ID NO: 34176 - protein, 516 aa, Burkholderia thailandensis E264
MNLTATFVFVLFFVGVTIMGFLAANWRRGDLAHLDEWGLGGRRFGTIVTWFLLGGDLYTAYTFVAVPALVFGAGAMGFFALPYTILIYPFAFVVFPKLWSIAKRHGYVTAADFVGARYGSRSLALAVAVTGIVATMPYIALQLVGIEVVIGGLGFDTQGFVGDLPLIIAFAILAAYTYTSGLRAPAMIAIVKDILIYITIAAAVIVIPAKLGGFGHIFGAVPSAKLLLKAPDAASLNGFSAYTTLAIGSALALFLYPHSVTAILSSSSGNTIRRNMAMLPAYSFVLGLLALLGYMALASGVKDMPEYAPYFKAFGPNFAVPALFLHFFPSWFVGVAFAAIGIGALVPAAIMSIAAANLYTRNIHREFVNRNMTHDQETHVAKLVSLIVKVGAVAFILGLPLTYAIQLQLLGGIWIIQTLPAIVLGLYTRVLDYRGLLIGWAAGLVCGTWMAISLKLASSIFTIHLFGHAVPGYAAVWALAVNLVVSIAVSALVRMLGIAHAEDRTRPEDYLDVVES

SEQ ID NO: 34177 - protein, 887 aa, Burkholderia thailandensis E264
MSTPLKTLIAKLNPVCRKAAERAASHCFARGHYEVDLEHLFLALLDESTGDVPLVLRASGVDPHALRADLERELEGLKAGNTRTPVFSVHLTELFEQAWLIASLDSQIGRIRSGHLLLALLTGPDLAQFAQRMSPQFARVRIDDLKHKFDEITAGSIETEPRQAEADIAVPDGAAADSPRGPSKTPALDTYTTNLTQRASEGKIDPVIGRDAEIRQAIDILMRRRQNNPIMTGEAGVGKTAVVEGLALKIAADDVPPPLSGVALHVLDMGLLQAGASVKGEFENRLKSVIDEVKKSAHPIILFIDEAHTIIGAGGQAGQNDAANLLKPALARGELRTIAATTWSEYKKYFEKDAALARRFQVVKIDEPSEPLAAAMLRGMAGLMEQHFNVRILDNAITEAVRLSHRYISGRQLPDKAISVLDTACAKVALAHSATPAAIDDAKKRIERIDAEIAALEREAASGAAHDERLAELRAEREADLKALAEDEARYEEERALVTEIGALRAELDAAREPSADGRPADIDATRAKLAERVDALRALQGNQPMVPLQVDGHVIAEIVASWTGIPLGRMVKDEIETVLNLRDLLGARVIGQDHALDAIAQRVRTATANLEDPNKPRGVFMFVGPSGVGKTETALALADVLYGGERKMITINMSEYQEAHSVSGLKGSPPGYVGYGEGGVLTEAVRRNPYSVVLLDEVEKAHPDVLEMFFQVFDKGAMDDAEGREIDFRNTLIILTSNVGSPAVMQACLNKTQEELPDAETLAETLRPQLYKTFKPAFLGRMKVIPYYPISDDVLAEIIELKLERIRRRIEANHKAAFEWDESLVDAVLARCTEVDSGARNVDHILNGTLLPEIAEHVLSRIADGEAIARIAARAAETGEFEYTVE

SEQ ID NO: 34178 - protein, 397 aa, Burkholderia thailandensis E264
MTTVDQDPIVIASAARTPIAGFQGDFASLAAPQLGAVAIAAALERAGLKPEQIDEAVMGCVLPAGQGQAPARQAALGAKLPLSVGCTTVNKMCGSGMRAAMFAHDMLIAGSVDVIVAGGMESMTNAPYLLPKARAGMRMGHGQVLDHMFLDGLEDAYDKGRLMGTFAEECAGEYAFSREAQDAFAIESLARAKRANEDGSFAWEIASVTVAGKKGDTVVARDEQPFKANPEKIPTLKPAFSKTGTVTAANSSSISDGAAALVMMRASTANRLGVTPLARVVGHSTFAQAPSKFTTAPVGAIRRLFDKNGWRAAEVDLYEINEAFAVVTMAAMKEHGLPHDKVNVNGGACALGHPIGASGARILVTLIGALRARAAKRGVASLCIGGGEATAMGIELI

SEQ ID NO: 34179 - protein, 479 aa, Burkholderia thailandensis E264
MSPSAAVFSSDAARAASACPGLVRIVAARDGGLCRIKLPGGALGAAQARAVAAAARAFGSGVIEATNRANLQLRGVRAGSEACVSRALIDAGLGPLMDGPGAASLDACVAARDDVRNVMLSPMAGRDPDTLVDSAALAARLLTMLQTEPRCAALSPKFSVLLDGGERLAALDHPHDIWLSALRDARGDTRLAIGLAGCPPADGEPVMPSAPRTGALATIAPAQAVECVRALVTSFVELAPAGATRMRDLLATCPPDAFLSHVESKLSESQPPFALRRDADLAGWRRARVDATLRFGIRPERDPARCAVGAQPPLGRLDANALAALAALADSHGDGTLRITPWQGVMLPAVARAAAPDALARLAALGFVCDACAPLAHVVACAGSTGCARSPADTKTDALALAARLAAPVDVHVTGCARSCALPHPAAHTLVASAAGRYDLYRRDGATGFGLAVARQLTIDQAAAALARDARPTQDDLDA

SEQ ID NO: 34180 - protein, 469 aa, Burkholderia thailandensis E264
MQTESNGRPGAGGGAARPALQQTLGTWQLWGIAVGLVISGEYFGWSYGWASAGTLGFVVTALFVAAMYTTFIFSFTELTTSIPHAGGPFAYARRAFGPAGGYLAGVATLVEFVFAPPAIALAIGAYLHVQFPGLEPKHAAMGAYLVFMALNIVGVQIAATFELVVTLLAIFELLVFMGVVSPGFAWSNFMKGGWAGADHFSAGAFHGMFAAIPFAIWFFLAIEGVAMAAEEAKNPKRSIPIAYVAGILTLVALAIGVMVFAGGAGDWTRLANINDPLPQAMKYIVGANSGWMHMLVWLGLFGLVASFHGIILGYSRQIFALAREGYLPEWLAKVHPRFKTPYRAILAGGVVGIVAIYSDELIQFGGQTLTANIVTMSVFGAIVMYIVSMAALFKLRRAQPRMERPFRAPLYPFFPAFALVAALVCLGTMVYFNALVASIFVAFVALGYGYFLATRAQRAAAPADALLEE

SEQ ID NO: 34181 - protein, 187 aa, Burkholderia thailandensis E264
MPTSPSKKLVVLDRDGVINVDSDAFVKSPDEWVALPGSLEAIARLNHAGYRVVVATNQSGIGRGLFDMATLNAMHLKMHRAAAAVGGRIDAVFFCPHTADDHCDCRKPMPGMMKLIAERFEIDPADTPVVGDSLRDLQAGAALGFRPHLVLTGKGKKTLAAGGLPEGTRVHDDLRAFALDFLSKEHE

SEQ ID NO: 34182 - protein, 303 aa, Burkholderia thailandensis E264
MRRSARRRSTGVRSRASTRRCSATYRSASVERRARRMEAGRRRAARMPISSAPIRLPMRPIFRQLRGFRATSRIARPFDVERSNPERVGFGDSNPSRRAACQPYTARRAKPRGRHAMRGAIVSVSSRHQRIRSMSSRRIVVRRSGVHGKGVFAAVPIKAGERVVEYKGERISWKEALRRHPHDPNDPNHTFYFALEEGGVIDGKIDGNSARWINHSCAPNCEAEEVDGRVYIHALRDIGEQEELFYDYGLVIDARLTKKLKREYACHCGAATCRGTLLATSEDDEGKKKKKAKKGGKDKKKKK

SEQ ID NO: 34183 - protein, 402 aa, Burkholderia thailandensis E264
MTQMTAEQMARVKATAPVLAEHGATITKHFYQRMFGRHPELKNVFNQTHQKTGSQPETLAKAVYAYAANIDNLGALGGAVSRIAHKHASLNIRPEHYPIVGENLLASIVEVLGDAVDAHTLEAWRIAYGQLATILIGAEANLYENAAWSGFRPFKVAKKVRESDEITSFYLTPADGGAAPEFAPGQYISVKRFVGDMGVEQPRQYSLSDAPHGKWLRISVKREAGRSEEVPAGKVSTLMHDGVDVDSIVEVTAPMGDFTLNRDASTPVVLISGGVGITPMMSMASTLVASGSEREVRFLHACRSANVHAFRDWLNDTTDAHPNVKRTVFYEEVGPNDRVGVDHDYEGRITPAALERHALVPDADYYICGPIAFMKQQRDALVALGVAPERVQTEIFGSGALE

SEQ ID NO: 34184 - protein, 128 aa, Burkholderia thailandensis E264
MQRHMLKSKIHRAAVTHCELHYEGSCAIDEDLLEAANIVENERIDIWNINNGERFSTYAIKGERGSGMISLNGSAARRAQLGDLVIIAAFAMIDEEELKAGWKPDLVFVDEGNKIKGSRDHVPTQNWT

SEQ ID NO: 34185 - protein, 334 aa, Burkholderia thailandensis E264
MRVILFSSRQYDHDSFDAANQSFGYRLHFQPSHLDAETAILARGYEVVCPFVNDTLDAAVLETLAAGGTRVIALRSAGFNHVDLAAAARLGLTVVRVPAYSPHAVAEHAVALILALNRRLPRAVARTREGDFSLNGLLGFDLFGKTIGVIGTGLIGSVFARIMTGFGMRVLAHSLPPHDDALIALGVRYVPLDALLAESDIVSLHCPLMPATHHMIDADALARMKPGAMLINTSRGGLVDTQALIDALKTGQLGHLGLDVYEEESGLFFEDHSDRPLQDDVLARLLTFPNVIVTSHQAFFTREALAEIAHATLSNIRAWQDGAPQNVVDAGRQG

SEQ ID NO: 34186 - protein, 589 aa, Burkholderia thailandensis E264
MADSARTVQDSGAAWLGRRAVISSKPWGPRMYQYDQYDQTIVDERVAQYRDQVRRRLSGELSEDEFRPLRLQNGLYMQRHAYMHRIAIPYGNLRSVQLRMLARIAREHDRGYGHFSTRSNIQYNWVKLEETPEILAKLASVQMHAIQTSGNCIRNITADQFAGVAQDEEIDPRPWAEILRQWSTFHPEFAWLPRKFKIAVSGSKADRAAVQIHDLGVYLKKNEAGEVVASILAGGGLGRTPIVGAIIRENLPWQHLLTYCEAALRVYNRFGRRDNLFKARIKILVKALSPAKFSQMVEEEWQHLKDGPSTLTQAEVDRVSQFFQPPAYEKLADTDASFEQHLLENRAFARWVERNVAPHKVPGYAAVTLSLKNHRVAPGDASAEQMEQVADWADAYSFGELRVSHEQNLILANVKKRDLFAVWEKAKAAGFATPNVGLLTDIIACPGGDFCSLANAKSIPIALAIQQRFDDLDYVYDLGDVSLNISGCMNSCGHHHVGNIGILGVDKDGAEWYQVSLGGEQGTGAGGARLGRVIGPSFSAEEVPDVISKLIDTFVESRIDGERFIDTYDRIGIAPFKERVYAARQTAHA

SEQ ID NO: 34187 - protein, 571 aa, Burkholderia thailandensis E264
MARIGGRAEPIADACPPTEPIREGCYNNALSAGAPAGRSLARGPDGLKRRRRPAARRGFVFIPKWVASPVSRASRSCAGCPAAPFERNATMSDSVAKPVDATFDQFGLAAEILRAIAEQGYTTPTPIQANAIPVVLSGRDVMGAAQTGTGKTASFSLPIIQRLLPQANTSASPARHPVRALILTPTRELADQVAANVHAYAKHTPLRSAVVFGGVDMNPQMAELRRGVEILIATPGRLLDHVQQKTANLGQVQILVLDEADRMLDMGFLPDLQRILNLLPKERQTLLFSATFSPEIKKLASTYLRNPQTIEVARSNAAASTVTQIVYDVAEGDKQAAVVKLIRDRSLKQVIVFCNSKIGASRLARQIERDGIVAAAIHGDRSQSERMQALDAFKRGEIEALVATDVAARGLDIAELPAVINFDLPFNAEDYVHRIGRTGRAGASGDALSLCSPNERKQLADIEKLIKRTLSLETLELDLPRHRHDERGGRRERERDERRGASAGRRSAGGERAHHPRREAPIDDFFLKPYVPSSSANQPEEAKPAQPEKKAPKQPLAALLGGFGMPRKTSS

SEQ ID NO: 34188 - protein, 102 aa, Burkholderia thailandensis E264
MDTQQRIKQIVDENPVVLFMKGTAQFPMCGFSGRAVQVLKACGVDQFKTVNVLEDEEIRQGIKAFSNWPTIPQLYVKGEFVGGSDIMMEMYQSGELQQLFTA

SEQ ID NO: 34189 - protein, 416 aa, Burkholderia thailandensis E264
MALIVHKYGGTSMGSVERIKNVAKRVAKWHQAGHQMVVVPSAMSGETNRLLGLAKEISSQPSPRELDMIASTGEQVSVGLLSIAMQEIGVEAVSYAGWQVPIKTDSAYTKARIHSIDDERVRRDLDAGKVVIITGFQGVDPDGHITTLGRGGSDTSAVAVAAALEADECLIYTDVDGVYTTDPRVVEEARRLDSVTFEEMLEMASLGSKVLQIRSVEFAGKYRVKTRVLSSLTDPQIPLDEEMRSGTLITFEEDETMEKAVISGIAFQRDEARIAVMGVPDKPGIAYQILGPVADANIDVDMIIQNQSVEGKTDFTFTVGRGDYQKAMDILTNQVKGHVNAEQVLGDPKVSKVSVVGVGMRSHVGVASTMFRTLSEEGINIQMISTSEIKISVLIDEKYMELAVRALHKAFELDQA

SEQ ID NO: 34190 - protein, 468 aa, Burkholderia thailandensis E264
MQKGSAETDLHRGLGQRQMRLIALGAAIGVGLFLGSANAIKMAGPGIILSYIIGGAVIFVIMRALGEMAVHEPVAGSFSRYARNYLGPLAGYLTGWNYWFLWLVTCIAEITAVGIYMGIWFPDVPRWIWALAALATMGSVNLLTVKAYGEFEFWFALIKVVTIVVMIAVGIAMIALGIGNHGVPMGISNLWAHGGFFPNGAQGVLMSMQMVMFAYLGVEMIGLTAGEAENPQKTIPGAINSVFWRILLFYGGALFVILSIYPWNEIGTQGSPFVMTFERLGIKTAAGIINFVVLTAALSSCNGGIFSTGRMLYNLAQQGHAPRTFGETTASGVPRRAILVSMAALLVGVLLNYLVPEKVFVWVTSISTFGAIWTWGVILVAQMKFRASLAPAQERALRFRMPFWPYGSWVALTFLVLVVGLMAYFPDTRIALYVGPAWLVLLVVLYYALKLEPEGGKEAGLARGYERG

SEQ ID NO: 34191 - protein, 327 aa, Burkholderia thailandensis E264
MIAKINDDRALALARDVLDIEASAVRALADQLDGEFVAAVGLLLECRGRVVVSGIGKSGHIARKIAATLASTGTPAFFVHPAEASHGDLGMVTKDDVFVAISNSGESEELVAILPLIKRLGAKLIAMTGRPASSLATLSDVHLNAGVAKEACPLNLAPTASTTAALALGDALAVAVLDARGFGSDDFARSHPGGALGRRLLTYVRDVMRTGDEVPAVPLGATLSDALFQITAKRMGMTAVVDDAGRVAGIFTDGDLRRVLERDGDFRRLPIVDVMTRNPRTIAPDHLAVEAVELMERHRINQMLVVDEHGALIGALNMHDLFSKKVI

SEQ ID NO: 34192 - protein, 333 aa, Burkholderia thailandensis E264
MPLTRRRARRFPNTFIAYGGSQMNDYNYLDSARQVFDIESRALAGLSARVDESFGDAVDAILRSSGRVVVCGMGKSGIIGRKIAATLASTGTPSFFMHPGEAYHGDLGMVTPADTFLAISYSGETDEVIKLIPFLKSNRNYLVALTGNARSTLAQAAHSHLDAGVEQEACPLQLAPTSSTTAALAMGDALAVTLMKARGFRPENFARFHPGGSLGRRLLSKVDDEMAAGDLPFVDERAQAIDVLQVMTRGRLGLAIVRRETGFGIITDGDVRRAVEAYGDTLFRRVASDLMSKDPAMVPLGTRVEDALLMMETRRINALLVFDGEDVVGVFKK

SEQ ID NO: 34193 - protein, 318 aa, Burkholderia thailandensis E264
MSSHDGLMVFTGNANPALAQEVVKILGIPLGKAMVSRFSDGEIQVEIQENVRGKDVFVLQSTCAPTNDNLMELMIMVDALKRASAGRITAAIPYFGYARQDRRPRSARVAISAKVIANMLEIAGVERIITMDLHADQIQGFFDIPVDNIYATPILLGDLRKQSYPDLLVVSPDVGGVVRARALAKQLNCDLAIIDKRRPKANVAEVMNIIGEVEGRTCVIMDDMVDTAGTLCKAAQVLKERGAKQVFAYATHPVLSGGAADRIAASALDELVVTDTIPLSAESLACAKIRALSSAGLLAETFSRIRRGDSVMSLFAES

SEQ ID NO: 34194 - protein, 325 aa, Burkholderia thailandensis E264
MKHRIVVYKPLPGDVLATLRERADVVLVEGADALARALPDADGALGASLKITPELLDLAPRLRAWSTISVGFDNFDVADLTRRGIVLAHTPDVLTEATADTVFALILASARRVVELAEFVKAGQWRQSIGESLYGTDVNGKTLGIVGLGRIGAAVARRAALGFRMPVLYTNRSANLEAQAQFGARRVELDELLAESDFVCVQVPLSPQTRHLIGARELGKMKRGAILVNASRGPVVDESALIDALRAGTIRAAGLDVFEREPLAVDSPLLSMNNVVALPHIGSATHETRRAMARCAAENVIAALDGTLACNIVNRDVLRRAPSAP

SEQ ID NO: 34195 - protein, 372 aa, Burkholderia thailandensis E264
MKFIDEARIEVIAGDGGDGSASMRREKFVPFGGPDGGDGGRGGSVYVIADRNINTLIDYRYAKKHMARNGENGRGSDCYGKGGDDVTLRMPVGTVINDMDTGELIADLTEHDQKVLVAKGGAGGLGNLHFKSSTNRAPRQKTDGKPGERRMLKLELKVLADVGLLGMPNAGKSTFISSVSNAKPKIADYPFTTLAPNLGVVRVGPGKSFVIADIPGLIEGAAEGAGLGHQFLRHLQRTGLLLHLVDLAPFDESVDPVAEAKAIVGELRKYDESLYQKPRWLVLNKLDMVPEDERRTRVVDFIERFGWTGPVFEISALTGQGCEGLVYAIYDYLAEHSDAHRAELAEDLASDVRFRDASGAGGEPHEREADAP

SEQ ID NO: 34196 - protein, 650 aa, Burkholderia thailandensis E264
MGKIIGIDLGTTNSCVAIMEGNQVKVIENSEGARTTPSIIAYMDDNEVLVGAPAKRQSVTNPKNTLFAVKRLIGRRFEEKEVQKDIGLMPYSIIKADNGDAWVEAHGEKLAPPQVSAEVLRKMKKTAEDYLGEPVTEAVITVPAYFNDSQRQATKDAGRIAGLEVKRIINEPTAAALAFGLDKAEKGDRKIAVYDLGGGTFDVSIIEIADVDGEKQFEVLSTNGDTFLGGEDFDQRIIDYIIGEFKKEQGVDLSKDVLALQRLKEAAEKAKIELSSGQQTEINLPYITADASGPKHLNLKITRAKLEALVEDLVERTIEPCRIAIKDAGVKVSDIDDVILVGGQTRMPKVMEKVKEFFGKDPRRDVNPDEAVAVGAAIQGQVLSGDRKDVLLLDVTPLSLGIETLGGVMTKMINKNTTIPTKHSQVYSTADDNQGAVTIKVFQGEREMAAGNKLLGEFNLEGIPPAPRGVPQIEVTFDIDANGILHVGAKDKATGKENKITIKANSGLSEAEIEKMVKDAEANAAEDHKLRELAESRNQGDALVHSTKKALTEYGDKLEAGEKEKIEAALKELEDVLKNASSDKAAIDAKIETVATASQKLGEKMYADMQAQQAGAAGAAGAAAAEGAAQGGAQTADDVVDADFKEVKKD

SEQ ID NO: 34197 - protein, 412 aa, Burkholderia thailandensis E264
MKPIQKSNKLLNVCYDIRGPVLEHAKRLEEEGHRIIKLNIGNLAPFGFDAPDEIIQDMIRNLPTSSGYSDSKGVFAARKAIMHYTQQKGVHGVGLDDIYIGNGASELIVMATQALLNDGDEVLLPAPDYPLWTAAVSLSGGTPVHYICDESNRWMPDPDDIRRKITPNTKALVVINPNNPTGALYSDELLVELIAIAREHGLIIFADEVYDKIVYDGQSHTALASLAPDVITVTFNSLSKSYRSCGYRAGWMSVAGLTAENRRRAHDYLEGLGILSSMRLCANVPGQYAIQTALGGYQSINELIMPSGRLYKQRELAYDMLTAIPGVSCVKPEAALYMFPRLDPKLYPIENDQQFILELLLKERVLLVQGTGFNWPTPDHFRVVFLPNVDDLTDSIERIARFLDGYRKRHSA

SEQ ID NO: 34198 - protein, 596 aa, Burkholderia thailandensis E264
MSVKPTLSKPIGGQDASSPAVVMRRLWPYVKPLVWVLVAGVLAMAAVAATEAGIPALLKPLLDHGFGSKGDMTTKLYVPAAVVGLALARAIAQYASGYLLQYVSNRILLDLRIQMFERMIHTGVSFFQRETASTVINAVVFEVNQVLSVLMGVMITLVRDSLTVVFLLGYLFYLNWRLTLIVAILLPCIGWLVGKINRRLRRLNREHQTLTNQLAYIVEETVGGYKVVKVHNGESYEIGRFNELSRKLRGYSMRMTVSGGLAQPLTQFLASIALAVVLTIAVVQSSNDQTTVGGFVAFVTAMLLIISPLKHLMDVNQPLQRGMTAAELIFGLIDEPREPEGGGKPLARASGAIEFSHVSFSYGISRDGRQTLDDVSFTVAPGEMVALAGPSGSGKTTLVNLLPRFFDPSSGTVRVDGVALPEYSLHDLRNQIAMVSQDVVLFNDTIAANVAYGQTPERDGVEAALRAANLWETVTAMPDGIDTLVGDNGMRLSGGQRQRLAIARAIYKDAPILILDEATSALDSESERHVQAALETLMKGRTTLVIAHRLSTIERADRILVLEGGKIVESGSHRELLEQGGLYAHLHRIQFQQDAG

SEQ ID NO: 34199 - protein, 390 aa, Burkholderia thailandensis E264
MNAPHDMPTTPTLLSRLPDVGTTIFTVMSALAAEKGAVNLGQGFPDFDCDPRIVDAVARAMRDGRNQYPPMAGIAPLREAIADKIARLYGHRYDAATEITVTAGATQALLTAILCAVHPGDEVIVIEPTYDSYLPSIELAGATPVFVTLNAPDYAIPFDKLAAAITPKTRAILINTPHNPTGTVWREADMRALADIVRGTHLLIVSDEVYEHMVYDGTRHESVARYPELAARSIVVSSFGKTFHVTGWKVGYVAAPAPLTAEFRKVHQFNVFTVNTPMQFGLADYLRDPEPYLTLPAFYQKKRDFFRAGLANTRFKLLPCAGTYFQCVDYSTISDLPEAEFAKWLTTEIGVAAIPVSAFYHEPHESGVVRFCFAKREDTLATALERLARL

SEQ ID NO: 34200 - protein, 315 aa, Burkholderia thailandensis E264
MIGMMGGNFNRYSNERKGEDVDVGFCGPGLMGAPMIRHLLSAGHRVHVWNRTRAKADALAAHGAQVVDTPAELAARAQTVMLCVLDAQAVGDVVFGASGVLAGDAAARCVTRIVDHSSIPPAATRAYAARAAALGASWVDAPVSGGVPGAEAGTLAVMAGGAQADVDAVRGLIGAYASRVTHLGDAGAGQTAKLCNQAIVTASVTAIAEAVGLAQASGIDAARLAEALAGGWADSVLLQTFVPRMTSTGHPPIGALKTFQKDVDAIADAARDAGAVMPVAATVQQVLRLGAAMGLAQADFAAFIDIVRPQAKRGE

SEQ ID NO: 34201 - protein, 473 aa, Burkholderia thailandensis E264
MTSSSAFVDACRRAIGADHVLTDPHDTAPFLTDWRRRYQGAACAVLRPANTEEVAALVKLALAHRVALVPQGGNTGLAGGATPDASGAQAVLSLARLNRVRALDPHNNTITVEAGVILADVQARAQEADRLFALSLAAEGSCTIGGNLATNAGGTAVLRYGNARELCLGLEVVTPQGEIWDGLRGLRKDNTGYDLRDLFIGAEGTLGIITAAVMKLHPRPAAKVTALAALESPHAALDFLSLAQRAAGPLLTGFELMSDFCMKLVGKHYPQLRYPFDAAHPQTVLLELSDNESEAHARALFEKMMEEAFEAGLVVDAVVAENLAQSRAFWDLREHIPLAQADEGLNIKHDIAVPISSIARFIDETDAAIQAAAPGARMVTFGHLGDGNLHYNVQMPEGGDPKAFLAAHQAPINRIVYDNVHRHRGTISAEHGIGQLKIDDAQRYKAAVEIGLMRALKTALDPLNLMNPGKVLR

SEQ ID NO: 34202 - protein, 407 aa, Burkholderia thailandensis E264
MNNEIPHLPIYMDYSATTPVDPRVVDKMVPYLREQFGNPASRSHAYGWDAERAVEEAREQVAALVNADPREIIWTSGATESDNLAIKGAAHFYQGKGKHIVTVKTEHKAVLDTCRELEREGFEVTYLDVKDNGLVDLDVFKAALRPDTILASVMHVNNEIGVIQDIEAIGAICREKGIIFHVDAAQATGKVEIDLAKLKVDLMSFSAHKTYGPKGIGALYVRRKPRVRIEAQMHGGGHERGMRSGTLPTHQIVGMGEAFRIAREEMATENERIRMLRDKLLRGLSEIDETYVNGDLEHRIPHNLNISFNFVEGESLIMAIKDVAVSSGSACTSASLEPSYVLRALGRNDELAHSSIRFTVGRFTTEQEVDYVIDLLKSKIAKLRDLSPLWEMHQDGIDLSTIEWAAH

SEQ ID NO: 34203 - protein, 399 aa, Burkholderia thailandensis E264
MSKQLQDAYIVAASRTPIGKAPRGAFKNTRPDELLVHAIKSAIAQVPGFDTKLIEDAIVGCAIPEAEQGLNVARMGALLAGLPNTVGGVTVNRFCASGVTALAMAADRIRVGESDAILAAGVESMSMVPMMGNKPSMSPHIFDRSEDFGIAYGMGLTAERVAEQWKVSREDQDAFSVESHRKAIAAQQAGEFNDEIAPYTLVERFPNLATGEIETRTREIALDEGPRAETSLEGLAKLKTVFANKGSVTAGNSSQTSDGSGALLVVSEKVLKQFNLTPLARFVSFAVRGVPPEIMGIGPKEAIPAALKAAGLKQDDIDWIELNEAFAAQSLAVIRDLGLDPSKINPLGGAIALGHPLGATGAIRAATVVHGLRRRNLKYGMVTMCVGTGMGAAGIIERL

SEQ ID NO: 34204 - protein, 259 aa, Burkholderia thailandensis E264
MQQIVSLSLINPHGKLHAMTTQILIVDDDQELRDLLRDYLVRQGIEVSVLHDAASLEKRLERERPDLIVLDLMMPGVDGLTALRQLRAAGDDIPVIMLTARADDVDRIVGLELGADDYLGKPFNPRELLARAQAVLRRRRTTPSAAAPEQREPYAFGRFVLDFQSRTLSVDSKPATLSSSEFALLKIFVNHALRTLTRERLLELLHGPEYDGTDRGIDVQVWRLRRILETDPSTPRFIQTVRGRGYVFVPNGEAHAQTH

SEQ ID NO: 34205 - protein, 458 aa, Burkholderia thailandensis E264
MSRLIIVSNRVAPISEGEPAAGGLAIGVYDALKETGGTWFGWSGEVVASGAPQIRVEEHGPVTFATIGLSRRDYDQYYRGFSNATLWPAFHYRADLIQFDRHEFEGYSRVNVWLARQLVPLLRDDDVIWVHDYHLIPFAQALRAAGVKNRIGFFLHIPFPAAQVLVNVPPHRELVEALCSFDLLGFQTDTDLRAFFEYVECEAGGAVDRAAHPARVEAFGRTLRAAAYPIGVYPDEIAALAKAGENGRAVKALAASLRGRQLVMSVDRLDYSKGLVERFRAFEKLLEHETSFRNHVSFLQIAPSTRADLRAYQDIRRQLEGESGRINGRFAELDWAPILYIHRQYERPVLAALYRLARVGYVTPLRDGMNLVAKEYVSAQDPDDPGVLVLSRFAGAACELTGALIVNPIDIAGMADALSRALSMPLAERRARHADMLARLRENNVSVWRDNFLRDLGR

SEQ ID NO: 34206 - protein, 488 aa, Artemisia annua
MALSLTTSIALATILLFVYKFATRSKSTKKSLPEPWRLPIIGHMHHLIGTTPHRGVRDLARKYGSLMHLQLGEVPTIVVSSPKWAKEILTTYDITFANRPETLTGEIVLYHNTDVVLAPYGEYWRQLRKICTLELLSVKKVKSFQSLREEECWNLVQEIKASGSGRPVNLSENIFKLIATILSRAAFGKGIKDQKELTEIVKEILRQTGGFDVADIFPSKKFLHHLSGKRARLTSLRKKIDNLIDNLVAEHTVNTSSKTNETLLDVLLRLKDSAEFPLTSDNIKAIILDMFGAGTDTSSSTIEWAISELIKCPKAMEKVQAELRKALNGKEKIHEEDIQELSYLNMVIKETLRLHPPLPLVLPRECRQPVNLAGYNIPNKTKLIVNVFAINRDPEYWKDAEAFIPERFENSSATVMGAEYEYLPFGAGRRMCPGAALGLANVQLPLANILYHFNWKLPNGVSYDQIDMTESSGATMQRKTELLLVPSF

SEQ ID NO: 34207 - protein, 213 aa, Urochloa maxima
SKRRNGLLKKAYELSLLCDAEVALIIFSGRGRLFEFSSSSCMYRTLERYRSSNYTTQEVKTPLDGEINYQDYLKLKTRVEFLQTTQRNILGEDLGPLSMKELEQLENQIEVSLKHIRTRKNQMLLDQLFDLKSKEQELQDLNKDLRKKLQETNAENVLHVSWEEGGHSGTSGNAMEPYQGFLQHQENDPSLQIGYHQQAYIDQLNEDMADPNE

SEQ ID NO: 34208 - protein, 218 aa, Eleusine indica
SKRRNGLLKKAYELSLLCDAEVALIIFSAGRGRLFEFSSSSCMYKTLERYRTYNFNSHEVKAPLDSEINYQDYLKLKTRVEFLQTTQRNILGEDLGPLSNKELEQLENQIEISLKQIRSRKNQMLLDQLFDLKSKEQELHDLNKGLKKKLKETCGENATHISWEEGGNSGTSRNANEPYQGILQHAENNSSLQIGYHQQAYMEQLNNQDIGAAHNPNE

SEQ ID NO: 34209 - protein, 583 aa, Pediococcus damnosus
MQAQSKNNTKFNFKTFMGLINRIHPRYWQLLLGFFLGVVATAMQLMVPGIAKGIINSIGHSMDVGLIVAVILLFVFSTIIGAFSGSILGFFGEDVVYKLRTTLWDKILTLPVGYFDQTKSGEITSRLVNDSTQVKELLANSVPKTATSILQLVGALVLMLIMDWRMTIIMFIAVPLVLICLLPIVRQSQKVARARQDALADLNGKAGEMLGEVRLVKSSTAENLERTAGDKRMYRLYRIGLKEAIYDSIAGPVMGMVMMAMVLGILGYGAIRVREGAIGIGTLFSFLMYLVQMISPFAVLGQFMSDVAKASGSTTRIQALLQTHEEDRLTGTDLDIGDQTLQMNHVSFSYDQHHPILSDVSFTAEPNSVIAFAGPSGGGKSTIFSLIERFYEPNEGSITIGNTNITDIQLADWRQQIGLVGQDAAIMSGTIRYNLTYGLPGHFSDEQLWHVLEMAYATQFVQKMPRGLDTEVGERGVKVSGGQRQRLAIARAFLRNPKILMLDEATASLDSESEMMVQKALDQLMANRTTLVIAHRLSTITNADEIYFIENGRVTGQGTHQQLVKTTPLYREYVKNQSATSNG

SEQ ID NO: 34210 - protein, 587 aa, Lactobacillus plantarum
MMTKMIAGQALVKVLEAWGVDHIYGIPGGSINHTVEGLYLEKADIDYIQVRHEEVGALAASADAKFTGKIGVSFGSAGPGATHLFNGLYDAKMDHVPVLALVGQVPQATMNTNYFQEMDETPMFSDVAVYNRTVTTAGQLPYVINQAIREAYRQKGPAVVIIPENLSAEEIDYQPVSTPNTVSDTFEQRVDPQAITATLKMLKAAKHPLVYAGRGLLGAKADLVKFSEQFNIPVMNTVPATGVIPTNHPNAIGTFGRLGSKSGFEALQHADLILFLGSEFPFASFWPKGIKIIQVNNNSFDIGKMVPIDYAVISDAQAYLQAMIATGETLPETAWLTTNRQNKRNWDKWLQQLAADDHDGLAPEAVMHKVASMVGPRDTYGVDTGNVSEWAVRGLPMDQEQRFALSGLFATMGFGLPAGMAGALSVPDSQAWSFSGDGGFAMVAPDIITEARYGLPVINVIFSNQRFGFIYREQVDTKQHLYGVDLTDADWAKVADGLGGIGFTVQNNQEVETVFDQIKALQAKGNKRPIVVNAVIKNDDPIGTAYMPLDPELYGQAEVDAYAKANHIDIKEQPSLGALLRAQGDQL

SEQ ID NO: 34211 - protein, 307 aa, Clostridium beijerinckii
MERNNPNAQGLYNPCFEHDACGIGTIVNIDGEKSHEILSDCLTILEKLEHRGGTGADEHTGDGAGILFNIPHKFFQEELKSKGMTLGNEGDYAVAMVFLPQEEKARKEAMSLFEDISKEEGLELIGWREVQTKPSILGKASLEAMPAIMQAFVRRPNGIKPGKDFERNLYIVRRIIEKRAGWISKFLNETFYIASFSSKTIVYKGMLLSTQLREFYKDLEDERVETSLALVHSRYSTNTFPSWERAHPNRFMIHNGEINTLRGNVNKVYSRETNVKSRALGKDLNRVLPIINKEGSDSAIFDNNLEF

SEQ ID NO: 34212 - protein, 413 aa, Salinibacter ruber DSM 13855
MAIVLAFSGGLDTSFCVPYLQATHDAPVHTVTVDTGGLTDDDRTAIEARARHLGADRHHLIDGRAPLYEDHLSYLIKGNVLKGGVYPLCVGPERIVQARAVAEVAQAVGASTVAHGSTGAGNDQVRFDVALQLVGDDLDVIAPIRELGLSRDASTAYLEARGFSVPDDTTDYSINRGLWGTTIGGKETLTAKASLPTDAYPDTTAPADAPDAPRTLTITFANGLPVAVDDASLSGVEVVETLNEVGGRHGVGRDVHVGDTILGIKGRIGVEAPAAQILITTHRELEKVVLSEQQQVQKHTLGDVYGRLLHEGQYFDPVMRDVEAFLDHSQDVVAGTVTVKLFKGRATVQGVDSPHSLFDAGTATYGEENALWDGRDAEGYTTLAAIPSLLAKKARADTDPPGSEPMIAESTTG

SEQ ID NO: 34213 - protein, 231 aa, Salinibacter ruber DSM 13855
MPFFCLPRSFDTLHSLMAFSLSRLVPRLAERLGGPLPGHEAHLRMAPQNPSRRADLSVEARDCRDAGVLLLLHPDEADPSVVLTVRRDHLPDHAGQISFPGGRRERGESLSDTALREAEEEINLPPASVDVLGALTPLFIPPSNFCVHPFVGHTPSPASLRPTDAEVGRILQVPLARLLDPAARTTETRPLNGRDVDVPYYDVAGHTVWGATAMMLAEFLAVVRDATASAE

SEQ ID NO: 34214 - protein, 528 aa, Salinibacter ruber DSM 13855
MRRGSNEETTERRIRQGTSTAAEQHPPRALPSFVRTGMLVALIVRGAHARLDRRPGRAGPGPNHCFFDHAAPIALSLTVVANRVPIRQTDDGWETSVGGLTTALLPVLEEEGGMWVGMGEDPDLPERQEYPADDPDFLVRRVPLSSKELEGYYYGMANQILWPLSHYLIQHLNLDDQFIETYRQVNERFAEAVLAETETGDEDVIWIQDYHQMLSPNLIRQERPDATIGHFWHIPWPAMEIFRILPWSRELLRGMLGCDLIGFHVQEYVDNFIESAEVLLGAEVDGDRVRHNGHETRVEAHPIGIDVDRFKEMSRDDSIEQDAQKFRERLGSDHIVIGIDRLDYTKGIRSRMLAFEKFLEENPEYHGNVSFFQIATPSRTELESYQQIRREVDEVVGRINGRFAEENWVPVNYRYRTYTQYELCAFYRAADAALITPLRDGMNVVTQEFVTASQDGVLILSELTGAAYLLPEAVQVNPYDHGGVADAIRTALEMPTGEREERLAGLKDTIETLDVHNWAGNFLDSIQE

SEQ ID NO: 34215 - protein, 172 aa, Salinibacter ruber DSM 13855
MIGNGWAGIAWLSLGIHSKSGHSRVGSQPGAPKQRRLMYAVVDVKDKQFKVQEGDTLYVPYHSDATAGQELTLDRVLLVSDGDGDVTLGTPTVEDATATARVLEHVKGDKVIVFKKKRRKRYRVKRGHRQQYTQIEIESLNANGPASSDDEEAAETSDAEPDEDPEAEPAEA

SEQ ID NO: 34216 - protein, 410 aa, Salinibacter ruber DSM 13855
MLDLRPKTCSMAAPATAPDLDTYVSDRVRETPPSGIRRFFDIAATMDNVISLGIGEPDFNSPDAALEAGVDALENGRTSYTSNAGMEELRELIAEDYEERHGLSYDPESEIVATVGCSEAMQLAMQAFLEPGDEVLIPEPCFVSYGPSARFAGGEVVHVPTHVENDFQVTAADIEPHLSDRSKVLFLGYPNNPTGAVLRRDTLQEIAQLVVDNDLLVVSDEIYDQLIYGTAHDRGHVCVPTVEGLRERTVLLGGFSKNYAMTGWRIGFACAPKPLSQAMLKVHQYMIMSAPTMAQEGAIAALREARGDVEKMRQSYDERRRTIVSGLNDAGLPTFEPEGAFYCFPDVTSTGMTSEEFAQRLLEEEKVACVPGTAFGPSGEGYVRCSYATGLDDITEALTRIDRFVSRHQS

SEQ ID NO: 34217 - protein, 248 aa, Salinibacter ruber DSM 13855
MTAGIWTDEVRVRSYDVTPQGTASVLTLADYFQEAAGRHAAELGVSMTDLRADGQAWVLAFMHMQVERLPHQNESLRIETWPSGLESASAHREFVFHDEEGTVLAGGTSRWFVFDVDRRRPVRPPRVLADIEGPDRPGPIDQDLDALSAPAHTDREQTFTARYHDLDLNRHVNNVRYLEWALETLPAAVLDERRCLGFAVQFEAETRLGDPVRASAEQIEDGGTLRVRHRLAHAESDQTLALVRTTWL

SEQ ID NO: 34218 - protein, 401 aa, Salinibacter ruber DSM 13855
MKATNDAYIVSSVRTPVGKAEKGTLAHYRPEDLGAEAVTGALGRVDGLEPEMVDDVLMGCAFPEGPQGMNVGRLIAQKAGLPDHVPGATVNRFCSSGLQTIAQASQRIATGTADVIVAGGAESMSQVPMSGFFFQPDPELTEEKVGTYVSMGITAENVADEYGVSREDQDRFALRSHERAVDAIDQGRFEDELVPLTLEETHYQSANGHAGEATTETVTLEVDEGPRRDTNLDVLAKLPAAFREGGSVTPGNSSQRSDGGAATVVMSGDRVADLGVDPLGALRGFAVAGVDPELMGIGPAEAIPQALAQTGLSVDDIGLVELNEAFASQSLAVIREVGLDPNIVNVNGGAIALGHPLGCTGAKLTATLLHEMIRREVRYGLCTMCVGGGMGAAGVIENLRL

SEQ ID NO: 34219 - protein, 110 aa, Salinibacter ruber DSM 13855
MRTSTVKWFDAKKGYGFIHHPDDGEDVFVHYSNIQSDDDFKTLKSDQHVRFEMNDGPKGLHALEVAPLDDEEAPSADDDNEPELTPADVDPTATVDPSPSGDDSSSDSSW

SEQ ID NO: 34220 - protein, 396 aa, Salinibacter ruber DSM 13855
MRDVYIAAAARTPMGRLGGALKTHSPVDLAAPVMRAALDRAEVDGGGLDLYIFGNVLRAGQGQLVPRQAALQAGIPESVDGYAVDMVCASSMMSIMNGATMIKAGEADLILAGGTEAMSDAGFYLDSGARWGYTFSPGGEQLQDIMHRDGLSDPETGTAMGEQTERLCAEHDIGRAALDEVAAASQQRAAEATDEGRFDDEIAPVEYDTRSGPETLETDEGIRPDTTAEGLANLGPAFAEDGVLTAGNSSQISDGAAAVLLASADAVDAHGLTPLAKVHRGGWSARESWRFPEAPIPAVHNVLDATNTTLDDYDLFENNEAFAINNILFHRELDVPYDRLNVHGGAIALGHPIGASGTRITVTLLHALRQHDGTMGMASICHGTGGGVALAIERTT

SEQ ID NO: 34221 - protein, 428 aa, Salinibacter ruber DSM 13855
MHRIRLCRVRISRPAAPLDTFPKRPRPPHCFSTSRPSPSMERVYLDHAATTPLDPEVFEVMKPYLLEEYGNASSVHQLGRQARVAMEGARERVADCLWAESSEIVFTSGGTEADNLALKGVLGAASTEAGSEAGLVTSTAEHKAVVEPARRMMEQGRPVTLLSPDAHGAVTPEQVEAALDEDTALVSLMHTNNEIGVQTDIPAVAAVCDKHDVLLHCDAVQAAGLQPLDVEALGVDLLSLSGHKFYGPKGIGVLYVRNGVDLGPLVEGGSQERDRRGGTQNVAGAIGLAEALERAVTEAEERAERLTRLQRRLVVGLDEAVPGPYVCNTPLDEAPVAPHVVNVAFPPVGDEPLDGEMLILNLDMQGILVSAGSACTSGALEPSHVLTALGLDRPTASAAVRFSLGAKTTEEDIDEALDALHSTLQRMR

SEQ ID NO: 34222 - protein, 71 aa, Salinibacter ruber DSM 13855
MAERETGTVKWFSNEKGYGFIVAEDRDEDLFVHYSEIDTEGFKSLDEDDRVEFTVGHTDKGPNAQDVVVIG

SEQ ID NO: 34223 - protein, 453 aa, Salinibacter ruber DSM 13855
MAQSGDRSPTARLGLLDATMVGMGAMIGAGIFVLTGLAAEIAGPAAILVFALNGVVTVLTGISYAELASAIPKSGGGYVFVREVFSGPTSFLMGWMLSFAYMIAGALYALGFSSNFVEFVHLYWAGLPTGPVWHILYALTVVGLFALLNAVSTEASGGAETVVTIIKIIILLVFAGFGAFAVEGSNFEPFFAKDDSSVAILKAMGLTFIAFEGYDLIATVTEEVENPRENIPKAIFISLVATVAIYLIVVWVAIGTLGAEELGRAGETGIAEAATSFMPTIPLLGEGAALIVFGAVFSTVSALNAVVIASSRVVFAMGREDQLPNPLGQISARFGTPLAAVVVSAAVMLGSVVFLPIEQVGRVSSLFFLVSFVVVNWSVIRLRNRRPNMRRPFEMPFYPAIPILAIVLNLVLAYFLLRDDPYTLVLGVGWIAIGGLVYAALQWRRTETEAAGA

SEQ ID NO: 34224 - protein, 226 aa, Salinibacter ruber DSM 13855
MKFFVDTANLEDIREAAGMGVLDGVTTNPSLVKAEGNVDFHERVLEICQTVDGDVSAEVTATEFDGMMEEAHTLAQIHDNVVVKIPLIKDGIKALRALDEEGIKTNCTLCFSPTQALLAAKAGADYISPFIGRIDDISSDGMGLIEEIVQIYDNYGFETEILAASIRHPTHVKRAALAGADVATMPFSVLTNLLEHPLTDRGLERFLADWEDYKEARDETPATTTA

SEQ ID NO: 34225 - protein, 788 aa, Salinibacter ruber DSM 13855
MSTSDPSAERPRDNFIYDIIDEDLEHGTYDGRVVTRFPPEPNGYLHIGHAKSIVLNFGIKHDYADRADTRCHLRFDDTNPDTESTEYVESIKEAVQWLGYDWEEHEYHASDYFEQFYQYAVTLIEQGDAYVDSLSEEEIREYRGTVDEPGTPSPYRDRSVEENLELFRKMRDGEFDDGEHVLRAKIDMSSPHMIMRDPLLFRIKHAHHYRRGDEWCIYPMYDYAHPLEDAIENITHSLCTLEFDNNRRVYDWVMEHCLDENELPSRPRQYEFNRLNLGYTVMSKTKLRHLIEEDLVGGWDDPRLPTISGLRRRGVPPSAIRSFCRTVGVTRSQSRVQIGHFEHALRDDLNAKAPRVMAVLDPLKVVATNVDADAVDWIDANHWPRDIDKDETRPVPFTREFYIERDDFREDPPEDFIRLAPGREVRLRHAYFFTCEEVVRDEDGVVTELRGTIDPETRDSTAPDGRSPEGTLHWVSAAHGLPFEARLYDRLFEVPDPDARDEHFTEFLNPDSLNVRQGVLEPAVRDLEADQRVQFERQGYFWPDPEASRPDALVYNQIVPLRDTWGEDEDGLTQEELARRRRAKEQRKQEQRRRSLDGKTDPAEHLDDAQRDRFDRFHDELGIDREDAATIAGNGALAGFFEQALAHYDAPVPVANWTVNELLGRLQDQTVADLPFGPDAFAELVRLVDTEFISTRGGDAVLDALLEDGGSPERIVDDRGLRQVDDTEALRPTVQSVLDDHPDEVSRYRDGKKGLIGFFMGQVMDATDGAASPELARELLQQELDPSA

SEQ ID NO: 34226 - protein, 667 aa, Salinibacter ruber DSM 13855
MGKVIGIDLGTTNSVVAVMEGDDPEVIENAEGSRTTPSVVAYKDDGERLVGAPAKRQAITNPENTVSSIKRFMGRFYDEVEDEIEEVPYEVVRGENDTARVQIGDRKYTPQEISAVVLQKLKQTAEDYLGQEVTDAVITVPAYFNDAQRKATQEAGEIAGLNVQRIINEPTAASLAYGLDDESDQVVAVYDLGGGTFDVSILELGDGVFEVNATYGDTHLGGDNFDKRLIDHIADEFEQDTGIDLRDDPMALQRLKEAAEEAKIELSSAKTTTINLPFITATDEGPQHLNMDLNRATFENLIEDLVEKTVPQMEKALDDAGHSKSDVDEVILVGGSTRVPLVQETVEDFFGKQANKSVNPDEVVSLGAAVQGGVLSGDVDDVLLLDVTPLNLGIETLGGVMTTLIEANTTIPTKESEVFSTAADNQTSVEVHVLQGDREMAKDNRTLGRFHLDGIPPAPRGTPQIEVTFDINADGILNVSAEDKDTGKEQSIRVEANSGLSDEEIEKMKEEAEQHAEEDERRKERADTINEANSMAYSVEQGLEEYGDKIPEDKRSTLQEALDALNEELETASADEDITALEDALEELNAAWSAAGEEIREAQQQQAQQGAAAGAGAGAAGAGAAAGAEGPAGGPTGGPASGNGAADSDEEDVQDADYEVVDEGDDE

SEQ ID NO: 34227 - protein, 256 aa, Salinibacter ruber DSM 13855
MALLEIENLHVGVEDEDIHILKGVDLTLDTGDLHAIMGPNGSGKSTLASVLAGREEYEVLEGSIRYDGDDLLELEPEERAEEGIFLAFQYPVELPGVSMTNFLKEAVNSVREARGEDELSSTEFLQQMRERADMLGLDADLTKRSVNEGFSGGEKKRNEIFQLAMLEPRLAILDETDSGLDIDALQSVANGVNKLRDGDRGFLVITHYERILQYIVPDRIHVMMDGQIARSGDKDLAETLEEHGYEWIREEVAAAA

SEQ ID NO: 34228 - protein, 711 aa, Salinibacter ruber DSM 13855
MASGSSDLQKTLTLYDVYSISTGAMFSSGFFLLPGIAAAETGPSVILAYLVAGLLILPSMYSMAELSTAMPKAGGTYYFLDRALGPLAGTVGGLGTWLALVFKSAFALIGMGAYLAIYADVPIKPLAAALTLAFGVLNVVGAKESSLLQRVLVTILVGVLGFYAAQGVLSVWGGQSAVGGAAGEFTPFFTEGARGFLATIGIVFVSYAGLTKVASVAEEVKNPDRNIPLGMGLSLLTATGIYVVGVAIMVAILPATDLHADLTPVYTSGEVFFNWLPYTLGPILIVVAAVAAFASTGNAGIMSASRYPLAMARDRLLPDGFARIGRFNTPTRSIVVTVALMLVIIFVLSEEGVAKLASAFQLLIFALLNFAVIVMRESEIPSYAPGYRSPLYPWVQVAGIAIPFFLISEMGTLAIVFTGVVVLVGVGWYFYYASDVPREGAIFHLFARLGKQRYDGLDRELQTILEEKGVGHDTAFDRLVAESDVIHLDEPVPYADVVEDVSGRLAEELGLSTETLEHGFLEGAPYSAVSVSHGAALPYCRLDGISESKMVMVHCQSGICVDLEDEIEELDRSEPVYAFFFLVSPKDDEGEHLRTLATLANRTDEEQFLVEWRAAADEQEVKESLLHHERYLTLNLLSGTNTDEFIGQTVTDLNLPAGVLVALVRRDGQITVPSGATRLEEGDRVTIIGNPAGIDRLYELYRAGEQEGVVQ

SEQ ID NO: 34229 - protein, 472 aa, Salinibacter ruber DSM 13855
MASVSLPPQKILAFGMRIRTFVLAVVGLLFVPIGAAAMPLSDPANVAEALQSAEQTQTNLDYVWTILAAALVFFMQAGFALLESGFSRAKNAVNIIMKNVMDASAGALVFFAVGFGLMFGTSWGGLIGTDGFFLTGTGDQPQTWVYAFYFFQAVFAATAATIVSGAVAERIKFSGYLIFSVTITGLIYPVFGAWAWGGLFNGSGWLEALGFIDFAGSTVVHSVGGWAALAGALVVGPRVGKYADDGTPRSIPGHSLPLAALGVFILWLGWFGFNAGSTTAGSTAIAKIAMNTFVAAGAGAVAAMAITWIDGGTPDATMTLNGVLGGLVGITAGCAALTPPYAILTGAIAGAVVVYGTRALEWYVDDPVGAIAVHGLAGAWGTIAAGLFNSAGFSLSQVGVQVVGVAAAFLWTFPVSYLVFSIVDAAIGIRLNGKKETVGLDRMEHDVEAYPEFTTDGDRQAPAPEADEVVAR

SEQ ID NO: 34230 - protein, 325 aa, Salinibacter ruber DSM 13855
MPDDLRLFALSESRGFGEAIASALDTELDAHHERTFTDGEHEVRPEVNVRGRDVFVVQSLYADDTWSVNDKLCRLLFMLGALRDASAERVTAVIPYLCYQRKDRKTRPRGPVTTRYVAGLFEAVGVDRVLTMDVHNLAVLQNAFQARTEHLLGHPLFVHRLTDVVGAEEVAVVSPDEGGVKRAGKFAEGLGAVLNCEVPTAFVEKMRKDDGVTGGALVGSVEDRTAIVVDDMVSTAGTMTQAIRSCAEEGAESVYAVATHGLFVGEADERLETAPLDALFVTNTVAPRLTGAAAERLQICNAAPRFAAAIQAVHTETSVSALNEV

SEQ ID NO: 34231 - protein, 220 aa, Salinibacter ruber DSM 13855
MTPRVKQFILEAGDHTFSYQPGQHVVIKFEQNGDVVGRPYTPVNLPGTGALALGIKRYEDGTASTWMHDRSVGEEITITKPSGNLHLRDLDRDVVFLSTGTGITPMIAMLKQYLSEGSGRAAFLYGERTQEDIMYRETLDHLSAGRDNLEVLYSLSDEDWDGPTGHVQTHLGDVVDERFENPHYYICGIPPMVVDSEEMLQEEGVDDGRIFTEGWESDAV

SEQ ID NO: 34232 - protein, 304 aa, Salinibacter ruber DSM 13855
MEHSEPLFDDISDDHTSGYVAIVGKPNVGKSTLMNALLGEKLSIVTKKPQTTRHRVLGIHSGPEHQAIFLDTPGIIEPRYALHETMMGQVQGAIRDADLLLFLHEATQDEPDTQSLKKIGDTPAFLVLTKMDLIPKEETLPLVESYEDRRAFDEVVPTSAKEGFNLQTLLHLVLDTLPEGPPFYPKDRISEHPERFFVAEMIREKVYKHYHQEIPYSVQVNVVAYEERPEGTKDYIDAEIVVMEESHKGILIGEGGKALKKVGTTAREDIEAFVQSPVYLNLHVKVQENWRDRKTVLRSYGYLA

SEQ ID NO: 34233 - protein, 500 aa, Salinibacter ruber DSM 13855
MPEWAVILSICGLYLVLVLGLGVWSGRTVSASVDGYVAGDRTLGVIVLYFVLGASVFSSFAFLGAPGWAYSRGAAAFYIIAYGTVGMVPFYFLGPRARQVGEAFGFVTQAEMLAHRYDSRTLSVVLAALSVVAFVPYLTLQMKGAGLLLSTISDGVVPQWLGALAAYGVVLVYVFASGMMAIGWTNTVQGLFMMAVAWFLGLYLPETLHGGIQPMFEAIAASDKAAMLDVPGLAADGSPWSWAGYSSAVIVSAVGFSMWPHLFMRAFTAKSDRTLKLTVVLYPTFQLFLVPILLIGFAGVLAFPGVAPPDTIVPHLLTQIELSPVLVGLVCAGALAASMSSGDAILHAAASIGLRDGIKPLLAAPMTDTRQRQWIRGLVVATSATAYYFAVFSEVGIVALLLGAYGGVAQIFPLVFAAFYWPRATGAGALAGLLAGIGVNTLFLVAPHLRPFPLHEGVYGLAANIAVFLTVSLLTPPHDRDRLRAYTHSDRLAADETVAS

SEQ ID NO: 34234 - protein, 736 aa, Salinibacter ruber DSM 13855
MAKELERDLGLPSVLAISIGAMVGSGIFILPALAMKMAGPAVVLAYLLAGVLVLPAALSKAEMATAMPEAGGTYVYIERGMGPLLGTIAGIGTWFSLSFKGALALVGGAPYIVLLFDVPPQALALGIAGVLIVVNLLGVKQTGRIQVALVAVMLAAMVWFVGGSLGDVDPVRFEGFFDEGIGGLLAATGFVYVSYAGVTKVASVAEEIEHPDRNIPLGLLGSLAFTTLLYVLVVTVIVGAAPTAGLAGSSTPVADVAGSTLIQWGVLVVVAAAILALVSTANAGLLSASRYPFAMSRDKLVPDALQHVSDRFDTPTTAITVTGGVVLAMIAFVPIDDIAKLGSAFKILVFILVNLALVAFRESDLDDYEPAFRDPMYPWTQGVGVLGGLALLSQMGLVPLVGAVLITGAGALWYGAYARRRVGREGVVRDELRRRVGQQAAERTRVALDTGQRADRVVVGTTEDLRPDRETALVEVGAALTGAFEGGLTVVRFDAVPDQLPLDSAAEVQSPDDVDFETRMDRFGASVDGPFEYGEVVSHDVRHAVANFARHHAVDLLVLERTLSADRSWLDERDLDWISRHCSADLVLVEPTPLAVLDRIALVTDNGPFDPRKVELANGLAAAAGASLVLGHAVPADATEDQRATVRTYHEDLMGLCTVPVESNIVGTTTPAAMARAVSAADLVVVESDAAWWARLLDNREPQRIAGAFGGPAIVVRPQQAEGPSPVRRLLERVAF

SEQ ID NO: 34235 - protein, 896 aa, Salinibacter ruber DSM 13855
MNLQKFTVKAQEAVQKAMELAASKNHQGIEPPHLLEAFLSDPDSVAVSILRRVGVSLDRLRTEVEAALESLPTVTGASAGDQYVGEELKKVFDRARAEADVMDDEYVSTEHLLIGLVEGQNEIGQALRAQGGSKEHVMEALEDVRGGQGADDPHAESRYEALDRFAQDLNAMAREGDIDPVIGREQEIRRVLQILSRRTKNNPVLVGEAGVGKTAIAEGIATRIVQGDVPESMQSKRIVALDMGALLAGSKYRGEFEDRLKAVVNEVSESDGEIVLFIDELHTLVGAGASEGAMDAANILKPALARGELRAIGATTLDEFRKHIEDDRALERRFQKVLVEEPSVEDTVSILRGLKERYEVHHGVRINDSALINAADLSERYITDRQLPDKAIDLIDESAARLRMEIDSMPADLDQLEREIRQLEIEREAVKRDEGDQAEKLDEIDRKIADLEDERDELKARWTEEKDLIQTVRSAKERIDELRVKAENLEREGKYDAVAEIQYGEIPDLKEEAEAANQKLEEIQEDGALLKEEVDGEDIAEIVSNWTGIPVSKMLESERAKLLRMEEELSERVVGQDEAIEVVSNAVRRGRTGMQEGDQPIGSFIFLGTTGVGKTELAKTLATFLFDDEDAMVRIDMSEYQERHTASRLIGAAPGYVGYEEGGQLTEAVRRKPYSVVLLDEIEKAHPEIFNVLLQVLDDGRLTDNQGRTVDFTNTIIIMTSNMGSDVISERMDEVEGGYLSEREHQELEEEVLKMLRRQVKPEFLNRIDDIVMFRSLSREHIREIVEIQFGRVQQIADKNHDLSLELSDDAKDWLADRGYDPAFGARPLKRVMKRHVSNGLSQALLDGTIADGDHVRIERADDEEGLTFEAVAPAGAEQAADAAATGGDGAAAVDA

SEQ ID NO: 34236 - protein, 364 aa, Salinibacter ruber DSM 13855
MADVFQSPAAYVQGRGVVDAIGTHAASLGEQALLLADDTVLEIVEDRVRTSLAEAGLDATAAKFEGEASEAETERLTRIACTHDTDVVVGAGGGKALDTAKAVREGLDGGAMVSMPTVASTDAPTSALSVIYSDRGEFEEYWFYDAHPDLVLVDTEIIAAAPTRFFRSGIADGLATWFEADATFRSEGETIVGGTPTRAGHQLARLCYETLRDHGLSAIDAVERDAVTEAVEAVTEANTLLSGLGFESGGLAAAHSIHNGLTQLDATHEATHGEKVNIGIITQLLLEGRESSVVEDYIAFSRRLGLPVTLADIGIEDPTGRPLDTVAEAACDDAETIHNQPFRVTVPMVRDALKTVDGIADRVR

SEQ ID NO: 34237 - protein, 320 aa, Salinibacter ruber DSM 13855
MPRPLMRASSNEHRVAIFGGRSNPALANKIAEAYGTTLGDLSIRDFADGEIYVRFEESIRGADLFIIQSTHPKADNWMELLLLIDAAKRASAERVTAVIPYFGYARQERKDQPRVSIAAKLMANMLTSAGVDRILTMELHAAQIQGFFDVPVDHLYGSTVLTDHVRQFDLDDFVVLAPDVGGLKMARAYAQRLGVDLALIDKRRPRQNEARVMNVIGDVEGKDVLIIDDIVDTAGTLTRAAKALKDHGALKIMAACTHGLLSGPAYDRIENSPLERLMITDTVPLKRPSDCIEVVSVSNLFAKAIRHIYTDRSVSTLFTD

SEQ ID NO: 34238 - protein, 404 aa, Salinibacter ruber DSM 13855
MSSSPHSVRFNDRVAAMQPSATLAMKSRAEERRRQGHPVVALSAGEPDFETPKPISDAGVQAIRNGFTNYTENPGTLELREAICSKLDRDNDLSYTPEQVVCSNGAKQSLALAIHALCDEGDEVLIPAPYWVSYPEMARFSGAEPVPVPTDVDNGYRLTPAALEKAITERTRLLILCTPSNPTGTVYSPDELAALADVLRDHDGIYVVSDEIYEYVLYDAEHRAFASLPDMKERTVTVNGFSKGFAMTGWRLGYMAAPGPIAEAAGKIQGQFTSAPSSITQKAGVAALEMDKEPVEEMVSAFRRRRDVVLERLRAIDGVQCPTPEGAFYAYPDVSAFFGATAPDGSTIEDGGDLCFYLLEEQDVALVPGPAFGEPDGLRLSYASSMEDLETGLDRIEAGLAALR

SEQ ID NO: 34239 - protein, 224 aa, Salinibacter ruber DSM 13855
MQFFVDTADLDEIREASDMCILDGVTTNPSLVKEQGNVDFHEHVFAICEIVDGDVSAEVTATDFDGMMEEGRRLHQIHENVVVKIPLIKDGIKALRALDEEAIETNCTLCFSPTQATLAAKAGADYISPFIGRIDDISSDGIGLVEDIVQIYDTHDFDTDVLAASIRHPTHVKRAALAGADVATMPFETLLNLLEHPLTDRGLERFLADWEEYKDARKAEAGLA

SEQ ID NO: 34240 - protein, 665 aa, Salinibacter ruber DSM 13855
MRTHSPTRPCPLASPLRNNPEPEDQRNVIIATILVAVIMFAWIFWFSPSPQQQQSQQAAGPADTTEQTDPSAPAADTGADDAPSDAAPPSTADAGADASQPEADQPEAPAPDSVTAAALEGTQRRIVVESDLYTVVLSTKGGTIERFTLKEYKQFNQEDPVQIVDTTAGGTLSLSFTTPTRRRVDTRSLYFSADTEADTVRIEDESKTLTFEAQLGDGALRQSYTFHPDDYDLGLAIEQERPRSFLTSDGYELTWHGGMPYSEGGEEDELRYTGLFARNGEQIQSLTLSDADQNQKRIEGDVSWMAVKNKYFTAAVMPDRPATALGASLTGRKEGRATSEAAFKDLTGRLQMPLPRETTHVDKFHLYAGPIDYYSLADYGRNLYGMVNYGWDWFEWMTKPLAEYLYIPMLTYLGGGLPSWLFGGGLPYGVIVILMAVLIKTVVYPLTKSSYRSMAQMRELQPKMQEIKDKYDDEPEKQQEEMMQLYRETGVNPLGGCLPMFLQYPILISLYQFIPKSIQLRQESFLWAADLSAPDKILQLPFEIPFYGDYVAGFTLLMGLAMIVTMRVQSTGGGAAGGQAKIFMYAMPGVIFFIFNRFASGLSLYYLFYNIVTAAQQKWINMQLEKEKDDDGNLTNGRSDGEAEGEKGFFARLMERAEEVQKQQK

SEQ ID NO: 34241 - protein, 634 aa, Salinibacter ruber DSM 13855
MRKFDACARWGRRTTAPSGAPGPTRGRWHCRHAGWPATAATTGGVQNRREPTGPHRPVRRVVPRRAGARVRVGRRRLEGGQEDRKPRSRFCALTVTLSDARRAPRPSLLSFHVPLRPMLTTLDFVVLTVYLLGVAAFGVWAGGAQESTEDYFLGGRDLPWWAVCFSVVATETSTLTVVGVPAVAYGGTLTFLQITLGYLVGRILVGAYVLPRYYAGQLETAYAFLGDRYGSTMQGAASVTFLGTRLLADGVRLFATAIPLKVIANMSGVDATYFQIILVIGVATAVYTLVGGIRAVVWMDVVQMGLYVGGALAAIGFLLGDVPPGWWGKAAAAGKTNLIDLGLDASFGRWWTQPYTLGTAVVGGAIFSMASHGTDQLIVQRLLACRSEADSQKAVVGSALIVMVQFALFLGVGLLLWAHYDGASVEALGLQRGDEVFPKYIIEGLPAGLSGLILAGIVAAAMSSLSSSLNALASSSVNDLYERISGHSMSADRGLRVSRLLTLFWGVVFIGFASLFQDSSNPVVELGLSIASFTYGGLLGAFLLGLWHRGTRQVDALVAFVVSIGVMVLVIFGVWHSPTEGWLFVLNPSDARVEAANLRTIGWPWYTALGTAVNLVIGSVLALRHRDATKEGAE

SEQ ID NO: 34242 - protein, 339 aa, Salinibacter ruber DSM 13855
MKFLDQVDLRVSSGDGGKGVVAWRREKYVPKGGPSGGDGGDGGSVYVEADENLYTLMDLSHNTQVFAEDGEPGGRREQTGASGEDKVIRVPPGTVVKTQTGEVLGEVVEPGQRICVAEGGQGGRGNAFFKSSTNQAPRESQPGEPGEERDLTFELKLMADVGLVGFPNAGKSTLVSSVSAAEPEVADYPFTTLTPQLGMVYVSEYETFVMADIPGIIEDAHEGKGLGLQFLRHIERTSVLLFVIPITSQDLGEEYEALLHELESHEASLLDKPRVVALSKIDILAPDERALLPDVVADEFPDDVPLLPISAVADVGLDQLKYTLFDTVHSTQSADAIDA

SEQ ID NO: 34243 - protein, 683 aa, Salinibacter ruber DSM 13855
MADQTSQNDNQNGSGLPGGGPSGTGRGRLIIWVIAGTLLALWAYSYWGMGASGGERISYSEFRTQLQQENVERVEVKGNAINGSLKSQATRSEQGNTIEYQNFVTYLPSFGDEQLMDLLESQGVNVVTKPESSFPWGLVIMGLLPVLLLFGVGYIFLRRMQSQGQGLFSVRQSKAELYDKDEEDTTFDDVAGADSAKEELREIIKFLKNPKRFEGLGGKVPKGVLLVGPPGTGKTLLARAVAGEANAPFFSVSGSDFMEMFVGVGASRVRDMFSEAKETSPAIIFIDELDSIGRKRGAGLGGGNDEREQTLNQLLSELDGFEENEGVIVMAATNRPDILDSALTRPGRFDRQITVDLPTKQSRHEILKIHAREKPLSDDVDLEEIARSTPGFSGADLENLLNEAALLAGRHGHDAIQYSDIEQARDKVMMGLKRDGMVLDDEEKKLLAYHEAGHAIVGAVLPNADPVHKVTIVPRGKAMGVTQQLPEKDQYLYRHDYILDRLAVIMGGRAAEELIFDTATSGAENDLKQVRKMARKMVLDWGMGDQFKHISLGEDQGNVFLGDEIAKGREYSDDTAREVDEEIRRISEDAFQRAVDTLNEHHEAFDQLADMLIEQEEVSGKDVLNLVNGDTDEIGHMPTTNGAAASEENGSADDHEPDEATVIEEDGESGEGRASGSADASGS

SEQ ID NO: 34244 - protein, 780 aa, Salinibacter ruber DSM 13855
MAQDDLRRELGFWDALTIGAGTMIGAGIFLLAGVALELTGPAAIFSYLAAGIVCMITAASAAELATGMPTSGGDYFFVSRSLGPALGAISGVGIWLSLTFAISFYLFGLGEYLSQFLPLTPFWGAFAGGLLLTAINVYGAKESGQMQVIVVLTLMGILGAFCGIGAFYIEWSNFTPFFPFGGAPVASTTALVFVSFLGFVKIAAVAEEIKNPAKNLPRTLIGSVALVTLLYVVILLVIGGIFEQETIGEVRDPLTQAARTLAGPIGAGAIIFAGLLATVSSANASIMASSRINLAMARDRMVPNWLSAIHETLLTPHRAILLTGVLALAFLFIESLEQLAKIASVLQLYSYAALNVGCVALRVAQPDWYEPSYRTPGFPFVQGLAALACIGIILYSGPFAQIAIVVLILASLGWYYVWGRSRVEIEHAVPEFREQWAAQGWSALAAPAPEFAVQVPEVLSAAERAVDADGPRRVSVALANPEHEHDLLQLGRYIATGRTEGGHVAGIHLVDVPLQTPLRSARAQFTERPSLERAIADLPQEAAARPSTNDLDHTPLEATDIESVIDVAHDVFGGLIDETQAQTSDMLLMGWQGGFNVGRIYNSPIQRIVSDLPADLGVLKDRGFDSVDQILLPWGGGLHAQLGLEIAVRVARITDATVHLLRVVREDVDVEDEKAALDDTVQGLVDTDRVEYLVRQSDSVTGGIDATLTEADYDFAIIGASREWSLRQVLFGSIPDVVADRADCSVLMVRRYVPNTLSVRAVEGVKRLKETVGLTTSPEE

SEQ ID NO: 34245 - protein, 596 aa, Salinibacter ruber DSM 13855
MPTDTMPSSDAAAPPSNGASDAPILKGSEIFVRALEEEGVDRVFGHPGGAVIKIYDAMERIQPSYDHVLVRHEQGGTHAAEGYAKATGRVGTMLATSGPGATNTVTGIADAYLDSVPIVVFTGQVPTHLIGNDSFQETDTTGVTRSITKHNFLVRDVNELASTIRQAYHIARTGRPGPVVVDLPKDVQMDEAPFAYPEEPGLDGYSVPGAAAPTQVDRAAAMIEEAEKPLLYVGGGTINADAPEVLTAFARAANLPVTTTLHGLGAFPETDDLALGWLGMHGFYHTNMAVQNADLIMAVGARFDDRVTGDVEEWAPNAKIIHVDIDPSCISKNVYADCALIGDAQTVLQQLRPKVEPKDTSDWLAQIDEWRGECPPYEYESPEEDGIAPESVVGALYEKTQGDAVMVTDVGQHQMWVCQYYKFGRTRSHISSGGLGTMGFGLPAAMGAAFGMREGRNLDIVCVSGDGGFVMNAQELSVAARHGLPLKIAVINNNYLGMVRQWQSLFHEDRFSHTDLKPTNPDFVRLAEAHHCVGLRARSPDEVSDVIDEAWTVDDRPVVMEFQVPKEEMVFPMVPAGAASDDMLTEMFDKEAMAES

SEQ ID NO: 34246 - protein, 613 aa, Salinibacter ruber DSM 13855
MAASDRDDRESTLAILSRLWGVLSPYKARVIGVALLISFSAALEAAGPQFVRYAFDVVIPGGRSTLFLWFGLAFAGFYLFRAIVEYGGMYWSFALTQQVVSDVRMQAYDHLLTLPVSRFSNEQSGSLSSRVVSDPNALKGMIQAAASRLSGQLVAILVVAGLLVWMNWKLALVNLVVLPLLAFVTYYYQEPLRTASRSIRETVARLTATSTEAISNIRVVKAFVGEEQERERFGTHNQRYVDINLDRRKDVGKMEGLINITSNYGTGALLLVGGWMVVSGSLSLGELTAFIMYQRQLQGPVQSVMFFNDKLQAGMAALERLSELVDTDPETGGDREEVPVGPVELEDVRFSYPDADEPALRDLSLRIEPGETAALVGSSGAGKSTVANLIGRFWDPQEGRVTVDGIDLRSFELQALREHVALVPQDPTLFSGTVADNIRYAEPDAPDEAVRHAAEMANAHGFIQQLVDGYDTQIGERGVRLSGGQKQRVAIARAILTDARILLLDEATSDLDSESEAVIQDALDGLFARGDQLTSIVIAHRLSTIENADTIYVLEDGRLVEQGPHDELLAEGGRYAELWALQRRDADRSARPNPAEPPVVTSAPVDGSSSTRS

SEQ ID NO: 34247 - protein, 407 aa, Salinibacter ruber DSM 13855
MEIPSLQQGFERERGLMTQEKPLKQDDEQESLRIGVPREVGNEEQRVALAPSGTGALVANGHEVYVEEGAGHEAHFQNDEYVDAGAELVSAPDDLYERSDLIVKVGPPVEDEMELLQKGQILLSALNLGGTTAEFLHHLMRLQITGIGFEFIRDPDGTFPLVRMMHEITGSVSIQIAGRYLESNEGGKGVMLGGISGVPPATVVILGADVIGQWAARTALGYGAHVIVLDTELGSLRTLENTLDRSVTTAVASEHYLRRAVRSADVVVGAMVTGGERSPLLVTEDMVQSMAPGGVIVDAVMDQGGCIETSRPTTHSDPTYRRHDIVHYCVPNMPSNAARTASYALTHVLVPYLLRIGEAGSINEALWRDEGLRNGTYVYRQHLTKQNLASMFGMSHRDIELLIASGI

SEQ ID NO: 34248 - protein, 601 aa, Salinibacter ruber DSM 13855
MPETDSTSEEPSLRPERLWTSLRRILRLGWPYRVRLVGAVVLTVVGAAVALVVPLGLRELVDAVFQQENRALLDWLTVALIVLFLARSAAAFGGKYLLGWTGERVVADLRKKVYQHLHRQSLRFFTDHRTGDLTSRLTNDVGSVRSAVKDALPNFLTQSLSLVGSVALMVVLNWRLSLIIFLIVPAVTGFAIYFGRKIRALARDIQDRLADTTAVAEEALASIRVVKAFARSDYEVDRYNEAVEDLFGTARYRVVVTALFESTVGLLFFAALVAIFWYGGIEVLAGRLTEGDLVAFVFYAFNIARSVSSMSQLYSTFNSAAGATERLFDLLDTEPHLRDAADAIDLPPIDGRVRLDDVTFAYDEGRPVLKDISLDVAAGETVALVGPSGAGKSTLMSLIPRFYAPQEGRVRVDGHDLSDVSRQSLRAQIASVSQEVHLFNATIGENIRYGRLDASDEAVAEAARAANAHDFIVDLPEGYDSEVGERGVKLSGGQRQRVAIARALLRDARLLLLDEATSSLDSASEALVQEALERLMEGRTTFIIAHRLSTVQTADRLFVLDDGRVVQRGTHAELMQAGGLYRRLASYQFREPSGVDEGMLD

SEQ ID NO: 34249 - protein, 226 aa, Salinibacter ruber DSM 13855
MLIVEDDTDILMGLEEYFELEDYEVDTAEDGETALQKMKDMDKCDVVLLDVMLPEKDGFEVLEESQEMGFSAPVLMITARGEQESKLKGFGLGADDYITKPFNVEELAARVKAILQRTMPPAEAPMDVYEIGDVEVNFSTHEAYRNGDELNFTALEFDILRYLIQHKGRTVTRKQLLRDVWGIDENIITRTIDRHMASVRKKIEPDPSDPTYIETVYGIGYRFDEE

SEQ ID NO: 34250 - protein, 321 aa, Salinibacter ruber DSM 13855
MAHIVSTRPLIDGGLSGVRDEHTLTVCDPPDGSTRSVDELIALADGADVLLSVLADPITEALFEARPGLQMVSQYAVGVDNIDLEAAEAHDVAVTHTPGVLTDATADQAWALLLAAARHVPAADRYVRDGRFERWETTHLMGMELARKTIGIVGMGRIGTAVARRALGFGMEVIYHNRTRANPTVERQVSARHVGLGELLTTSDVVSLHCPHNDESHHLLDAAAFSKMKASALLVNTARGPVVDEAALVDALKSGEIAGAGLDVFEDEPEVHPGLMEQDRVVLAPHLGSATTDTRMRMAQMCVASITALLDGAESVPHRLV

SEQ ID NO: 34251 - protein, 397 aa, Salinibacter ruber DSM 13855
MDRAASPSLAARADDLQQSDIRSVTRRVEEVDGINLGQGVCDLPTPEPIKARAHQAIRDDASIYSHYAGIEPLRRAILEKEQAHNEVPATSPEDVVVGVGSTGVFVSAAFTLLEDGDEVVLFEPFYGYHRNILELTGATIRYVPLGGPDATFDRSAMEAVLTDDTKAVVVNTPANPSGKVWTREELSTLAGLLHAHDLVAITDEIYEYMLYDGAEHVSLASLPGAYERTITLSGFSKAYNVTGWRLGYGVAPAPIAEKIGLMNDLLYICAPRPLQHAALAAFEDLDDDYVAQLQADYAERRELLCETLEAIGFDVPWPDGAYYVLAHFGDLAGTQAGFADDAAACDTLIEDAHIGSVTGRSFYHDPADGQHELRLCFAKELPVLRRACEQLRAAFGG

SEQ ID NO: 34252 - protein, 146 aa, Salinibacter ruber DSM 13855
MDLSMLRAKLHRLRVTEADLYYEGSITIDEELLDAAGLLPYEKVQVVNVNNGSRLETYTIPGEAGERTVCLNGPAARLAAPGDEVIVIAYAELTPSEAREHHPRVVHVDENNDVTKTRTLDVAKETDENLAPDGMEDVLIAEGPQS

SEQ ID NO: 34253 - protein, 592 aa, Salinibacter ruber DSM 13855
MWNQAWAWLRDTLPLLQWLPDYTTEALRGDATAGLTVGVMLIPQGMAYAVIAGVPPIYGLYAGLVPLLVYPLIGSSRHLALGPVSIDMLIIAAGVGAIAQAGTERYVALAILLTAMVGLLQMAMGAMKLGFVANLLSRPVIAGLTTAASFIIAISQIGSLLGVELGRSQYIHVLLIEAVQNAGNTHLLTLGIGTASIVLLMGLPRWLPKVPEALIVVVAGTLAGWGFGLREKGVSVVGSIPQGLPAPELWTLSFSDLNTLLPAAITLALVQFMKDISLDRIFAARHGYTIDANRELIGVGAGNFFGSLFQSIPASGSFSRSAVNEQSGAQTALANVFAAGVIALTLLFLTPLFYHLPTPVLAAIIIVSGFGLFDLRELRSLFKARRRDGYIALFTAGCTLFIGIQEGILLGIGTSVVAMLYRISRPNVAELGHVPGTRLFRDLDRFEQAARLRDIMVLRVDAAFSFANAEYFKDFILEKSEREGRPVKVVIVDGSSINGLDTTAIDALFSVTESLEEEGIELHLTGLIGPVREVVRRSGLHALLGENKFHLDPHQAVVSVLERWDAAEGTDRVTHYFNMADSEETEATPAAS

SEQ ID NO: 34254 - protein, 220 aa, Salinibacter ruber DSM 13855
MTPRVKQFILEAGDHTFSYQPGQHVVIKFEQNGDVVGRPYTPVNLPGTGALALGIKRYEDGTASTWMHDRSVGEEITITKPSGNLHLRDLDRDVVFLSTGTGITPMIAMLKQYLSEGSGRAAFLYGERTQEDIMYRETLDHLSAGRDNLEVLYSLSDEDWDGPTGHVQTHLGDVVDERFEDPHYYICGIPPMVVDSEEMLQEEGVDDGRIFTEGWESDAV

SEQ ID NO: 34255 - protein, 478 aa, Salinibacter ruber DSM 13855
MAADISQSKYTNVIDLTSEAQQERRRDEVGSELREPDPPLDEVTVDELSGHMEQAVHAAGWTELMDVQRKAIPYTLDGRDLIVQSQTGSGKTGAFLLPLFDLVNPDKEEQQVLILTPTRELARQIHEEFEQMKIATPRTNRMEAVLIYGGVGYQPQIDGLKNGAQVVIGTPGRILDHIKKDNFDASTLRMLVLDEADEMLSMGFYPDMKDIVEHVPGDRVSYMYSATMPPKVRSVAREFLDDPGFLSLSTDKVSVEENEYRYYLVNPMDKDRVMAQLLELEEPESALIFANTKREVSYLNKFLSNKGYDIDEMSGDLSQRDREEALDRLREGKLRLLVATDVAARGIDVSDLSHVFIYDVPQDHEYIIHRSGRTARAGEEGTTIVLSTHEDEYELKRMANTYDIELEKAELPADPHSEARELLQERYANAEAPANGEEPGVEDFVPLVKELSDEQPELLASIITELYAEAKTEDEEEK

SEQ ID NO: 34256 - protein, 448 aa, Salinibacter ruber DSM 13855
MPESSANQEELERTLGLVPALAIGTGTMVGAGIFVFPGLAAGRAGPAAMLSFAIGAVIALLVALPTSELATAMPESGGGYFFVSRALGTLLGCMVGVGQWLGLIFASAFYLIGFGHYLSDLARELGVTLPLPVVGLAFGMGILLTGVSVTGTENTGDLQNWIVGSLLAILAGFLGHGGLDALGVFGRQQTPEAFFPYGTMPVLTTAALVFTSYLGFVQIATVAGEIKAPSRNLPRSMIGSVLLVGTLYVLTIFISTSLLGSESLAEMGETAAVNVGRSIAGTFGAAALLGGGLLATLSSANASILSASRSIYALSRDELVPSQVERINRRYRTPHVALLLTGGIIVALILFGRVEVLAEVASLLHLFMYGLICVALLVLRQSPPSGYQPSFRCPGYPVVPVLGALTSFGLVAFMNPLSIAIGGGILLATAGWYLLYARAVTISEISSS

SEQ ID NO: 34257 - protein, 870 aa, Salinibacter ruber DSM 13855
MMPASGRPWVVCKFGGTSVSSRARWDTIVEVVRTHRAEGRAPFLVCSALQGISDQLEALCAQLASAEPGAPESTLNTIRERHRALGQDLGVEAEAVLSGEFARLERWVDEIQATDGPSPRQRAAVLATGELLSTRLGAAYLSAQGLPAEWLDAREFLRATDDPHLPPRRQYLAANCTSHADPGLQARLADAPETVYLTQGFIASNALDETVLLGRGGSDTSAAHFAAKLEAERTEVWTDVPGLFTANPGEVPSGRLLRRLDYDEAQELATMGARVLHPRCLDPARRHQIPLHVRSTEAPSLDGTIVSGEGPDVGPQVKAISAKTDITAVSMDTLGMWQEVGFLADVFQVFKHHGLSVDLMATSESNVTVTLDPVANALDPDILDRLLHDLNRYCDAELIDPCAIVSLVGRHIRSLLSELGPAFEVFDEQKVHLVTQAASDLNMSFVVDEDQASRLVRELHAQFFGHRAPDAVFGPRWQELVEDGTPEETPDVWWRERREALLRLADDESPRYVYDPEVVTARSDEVQGLGPIDQSFYAVKANPHPEVLRLLERRGLGFECVSPGELDRVFEACPGLDPARVLFQPNFAAPAEYADAFERGVHVTVDNVQPLAEHPDVFAGEELFVRVDPGQGEGHHRKVRTAGAQSKFGVVPDDLGRLRAAVDQAGATVVGLHAHVGSGITDESTWAGLVDLLASLAAEFPAVRALNVGGGLGVPNASGGRPLDLDALDAALGKAAARHPQYDLWMEPGRYLVAEAGVLLARVTQTKTKDAAAYVGLDTGMNSLLRPALYGAHHEIVNLSRLDEPPAMTADVVGPVCETGDVLGHDRRLPPTEPGDTLLVATTGAYGASMSNRYNLREPASEVMLAPEPA

SEQ ID NO: 34258 - protein, 385 aa, Salinibacter ruber DSM 13855
MALTIGVPRETEPGETRVALVPDVADRLLATVDDLDIRVEEGAGQGAYHTDADYDAAGCLVVGRDATFDADIIAKVAPPSDDEVDRLGEGQVLVGFLSPLERPETAQALADRGVTALAMELVPRISRAQKLDALSAMSSIGGYRAAIGAAERLPAFFPLLTTAAGTVRPARVLVLGAGVAGLQAIATAKRLGAKVFGYDIREPTREEVESLGASFVELEVDIEADQDESGYAEQVEKEKQERQPELLQPHLAEADVVISTALIPGQPAPLLINEEAVAAMDPGSVIVDLAAPNGGNCALTETGEEIVAHNVQILGPTNLPAEMPVHASELYAKTVAAMIEEGLEADAFAPDFDDEIFAESCLTRDGTVQNDRVRGLLGTAEEAKA

SEQ ID NO: 34259 - protein, 340 aa, Medicago sativa
MELGLSLGDSSKPLIGLMEKHPHQASKELGLGFNTTLSIGPIISTTQRDQLQQQQQEEEKTQRDINNNSNRTENPNPVLHQLDLLPQLSFPWNPPSQNGNLLSTEFGGSSRGLDVNVVPPATVVVMANDEMALSSSRIVQHLLFRRDLCMYSRGGSGGRSLSGSGGNKREFSDGEGYDQRNSSRVSDEDDNCGVGNGNTRKKLRLSKDQSAFLEESFKEHHTLNPKQKLALAKQLNLRPRQVEVWFQNRRARTKLKQTEVDCEYLKRCCETLTEENRRLHKELQELRALKTSNPFNMQLPATTLTMCPSCERVATNSTATSSVTNTSATINGNNNNKINQ

SEQ ID NO: 34260 - protein, 536 aa, Sulfitobacter sp. EE-36
MRELASRLGLRTDPTIFFVSALCTALFVLALVLAPEPIGDAFAAGRAWIVSHLGWFFILGVNVWLGFLIWAAMSRHGHIRLGPRDSRPEYTNLSWFTMLFAGGIGTVLMFWGVAEPISHFSDPPLPGVEPFTEQAAQDAISIATYHLALHTWTIFALPGLAFAYFINRYDLPVRVSSVFYPLLKERIHGPWGKAIDIASILGTLFGVAVSLGLGSSQIAAGLSALFGWNDGVPLQVGILTALTAVAVVSIVAGLDKGVKLLSNLNIGMAVALMVFVLVTGSTLFLLRGMVETFGLYLSNLPRLAFWNDMLADTNPSNGDWGWQGSWTVFYWAWTVTWSPFIGLFVARISRGRTIREFVFGVLLAPSLFTLIWFSIFGWQAMEIDGIGTAARAALGAQAGSLSAAVADSVPLAMFAFFESFPFADIVQGIAVLVVAIFFATSSDSASLVVDMLCTGSPEPGPTRQRVFWGVSEGLVAAMLLILAGDLGLTALQQVITVVGLPIFLLVFAMIPSLIKGFRTEDIDHVSIGKRPGLGDL

SEQ ID NO: 34261 - protein, 757 aa, Sulfitobacter sp. EE-36
MTDAPNLRQAALDYHAFPKPGKLEVRATKPLANGRDLARAYSPGVAEACLEIKADPTTAAHYTTRANLVGVVTNGTAVLGLGNIGALASKPVMEGKAVLFKKFANIDCFDIELDQNDPEKLAELVCALEPTFGAINLEDIKAPDCFTVERICRERMNIPVFHDDQHGTAIVVGAAVKNALFVAGKKFEDIKIVSTGGGAAGIACLNMLLKLGVKRENVWLCDIHGLVYEGREIDMNPIKSEYAQKSDLRDLADVIHDADLFLGLSGPGVLSPEMVQKMAPQPIIFALANPTPEIMPDLARAVAPDAIIATGRSDFPNQVNNVLCFPFIFRGALDVGATTINDEMKIACIDGIAALARATTSAEAAAAYQGEQLTFGPDYLIPKPFDPRLIGVVSTAVAKAAMDTGVATRPIEDLAAYRHKLDSSVFKSSMLMRPVFEAARVAPRRIVFAEGEDERVLRAAQAMVEETKERPILIGRPEVIERRIEKAGLTIKLGETVDLVNPENDPRYRDYWETYHNLMARRGVSPDIARAIMRTNTTAIGAVMVHREEADSLICGTFGEFRWHMNYIEQVLGRDGRRPHGALSLMILEDGPLFIADTQVHLHPTPEQIAEIAIGAARHVQRFGIEPKIALCSQSQFGNQGEGSGKRLRAALRLLDAGNHDFCYEGEMNIDAALDPELRSRLLPSNRMEGAANVLVFAHADAASGVRNILKMKGGGLEVGPILMGMGNRAHIVSPSITARGLLNVGAIAGTPVAEYG

SEQ ID NO: 34262 - protein, 316 aa, Sulfitobacter sp. EE-36
MTKLLIARPAPPEVHEALEGFDVTYREDSAPLSEDEMQDALRDYDGVLATLGDRFTADVFGKVGMPRCKMLANFGVGYNHIDVDAAKAAGLQVSNTPGAVTDATADIAMTLMLMAARRAGEGERLVRSGQWSGWEPSQLLGMHLTGKTVGIVGMGRIGQAVARRCHYGFSMDVKYFSRSAKSVAYPAEHISDLKQLVAAVDVVVIAVPGGDDTQHLINADVLAAMQPHAFLINIARGNIVEEAALIEALQAGTIGGAGLDVYEFEPEVPQALRDLDNVVLLPHLGTSSREVRVDMWMMAVENLKAGVAGETPPNLV

SEQ ID NO: 34263 - protein, 604 aa, Sulfitobacter sp. EE-36
MDDQNKNLIFATVLSFIVILGWFVLFPPPETETITDPAATQQVTDATSTEAVVPSSAGAADNVTDASDEATAALEEAPRIPVETARISGSISLLGGRVDDLHLKDYNTTIEDDAPIVSLLSPAGTPDAYYALYGWAPGAGIAPEQVPGPNTLWTLSQGETLSVETPVTLTWDNDAGQLFSRTISIDENYMFKIEQKVENTSENSVSLAPYGLIARHGIPSDAQNFFILHEGLVAMNNGELLETAWDDIPELDAVNGVPSKRIDGVTNGWIGFTGHYFMTNLIPDPAQPTRLSVKYLPRTEIFQTESVMPTQTVARGQTATVTTQLFAGAKEWEILRDYEAQGVYKFIDSIDWGWFFFLTKPIFWVLHHLNLLIGNMGVAIIGLTLLIKALLFPLAYKSYVSMAKMKELQPQMEKLKKDAGDDRQRLQQGMMELYKREKVNPAAGCLPILMQIPIFFSLYKVIFVTLELRHAPFFGPFQDLSAPDPTSIFNFYGLLPWAAPEAGTVLALVFIGILPLLLGISMFLQQKLNPAPTDPTQQMIFAWMPWVFMFMLGGFASGLVVYWIANNTITFTQQYLIMRSQGYKPDILGNIKGSMKFGRKGDPK

SEQ ID NO: 34264 - protein, 531 aa, Sulfitobacter sp. EE-36
MAPKVLISDKLSDAAVQIFKDRGIDVDFQPDLGKDKDKLAAVIGDYDGLAIRSATKVTEKILANATNLKVIARAGIGTDNIDKDAASKKGVIVMNTPFGNMITTAEHAIAMMFAVARQIPEASASTHAGKWEKSKFMGVELTGKTLGVIGAGNIGGIVCDRARGLKMKVAAYDPFLSEEKAKKMGVEKVELDDLLARADFITLHVPYTDQTANILSKEALAKTKKGVRIINCARGGLVDEEALAEALKSGHVAGAAFDVFKEEPATENPLFGLPNVVCTPHLGAATTEAQENVALQVAEQMSDYLLTGAVTNALNMPSVTAEEAKVMGPWITLAGHLGAFIGQMTDEAVKAINILYDGQVSEMNLNALNCAVVAGIMKRANPDVNMVSAPVVAREKGIQISTTNQDKSGVFNGYVKVTVVTEKRERSIAGTVFSDGKPRFIQIKGINIEAEVGAHMLYTTNNDVPGIIGTLGQTLGANDVNIANFTLGRSTAKGEAIALLYIDGPLPEKALKDLRDTGLFKQVKELEFEVA

SEQ ID NO: 34265 - protein, 390 aa, Sulfitobacter sp. EE-36
MEKVVIAGAARTPMGGFQGAFADLTAADLGGHAIKAALDGAGTDTVDEVLMGCVLPAGQGQAPARQAGFKAGLGEEVPSTTLNKMCGSGMKAAMIAFDQIALGQTDTMIAGGMESMTNAPYVLPKMRGGARLGHGQVIDHMFLDGLEDAYDKGRLMGSFAEDCAETFQFTRAVQDDYALASLSRALDAQSSGAFDGEIAAVDLKSRKGSVTISADEQPGNARPEKIPELKPAFREGGTVTAANASSISDGAAALVLASETAAKSQGLNVRAHILGHASHAQAPGLFTTAPVPAAQKLLDRLGWQKDDVDLWEVNEAFAVVPLAFMHEMGLSHDIVNVNGGACALGHPIGASGARIIVTLLNALEKRGLKRGIAAICIGGGEGTAIAIERP

SEQ ID NO: 34266 - protein, 400 aa, Sulfitobacter sp. EE-36
MDAFICDAQRTPIGRFGGALSSVRADDLAAAPIAALMARNPDLDWSKIDDVIFGCANQAGEDNRNVARMAALLAGLPVDVPGATINRLCASGMDAVGVAARAIKAGDMDLAIAGGVESMTRAPFVMPKAETAFSRNNAVYDTTIGWRFVNPKMKAQYGVESMPETGDNVATDYDISREDQDAFAKRSQDRWEAADKAGVFADEISPVSIPQRKGDPIVFDRDEHPRPGTTIEALTKLRPINGPDLTVTAGNASGVNDGAAAMLMASEAAASQHGLTPIARVVGISAAGVEPRVMGIGPVPASQKVLARAGLTIDQMDVIELNEAFASQGIATLRALGVADDAPHVNANGGAIAIGHPLGMSGARLVMTAALQLKRTGGRYALCTMCVGVGQGVAIILERA

SEQ ID NO: 34267 - protein, 354 aa, Sulfitobacter sp. EE-36
MSQFLPLLVTDIQRTIRDAVVLTLQPEDPKAFAFKQGQYLTFKQDFDGTELRRNYSICAGLDDGVLQVGIKRVDGGAFSTFANEVLKVGDTLHAMPPQGTFSAGLEPDRARNYLGFAGGSGITPVLSILKTVLKREPKSTFTLVYANRAVNTIMFREELEDLKNRYMGRLSVIHMLESGQDIDLFTGRVDQNKCAELFKTWIDVSDMDMAFICGPEPMMLAIADALKTHGLEPEQIKFELFSESQQGRLAKQEMAKRSEGQAQTQVTVKIDGAQHSFTMAKGQSVLDAALENNLDAPFACKAGVCSTCMCKVTEGEVEMLSNHALEDYEVERGYRLSCQSYPLSDTLFIDYDHH

SEQ ID NO: 34268 - protein, 320 aa, Sulfitobacter sp. EE-36
MTTPFLDTARRVIRTEAQALEQLADSLDDRFRQAIDLLVATRGRVIVTGIGKSGHIAKKIAATLASTGTPAQFVHPAEASHGDLGMITGDDVVLAISNSGEAPELANLIAYSRRFSIPLIGITSRAQSSLGAQCDVVLELPQLAEACGTGVVPSTSTTMTLAMGDAVAIALMENRAFTAEHFREFHPGGKLGARLSRVADLMHTGDALPLVQVDAPMSDALMAMSSKSFGVVIVTDSNGALAGIITSGDLGRHLEGLMSKTAREVMTPTPVTVAPDALAEKAVGIMNARKITCLLVLDPAQGDVPAGLLHIHDCLRVGLG

SEQ ID NO: 34269 - protein, 538 aa, Sulfitobacter sp. EE-36
MKALKSLGRFGLFATVVVLFGAFAMLTALWSWWMAFPLVIFGILALMGVYDLIQTKHSILRNYPVLGHMRFFFEGIRPEIRQYLIESDQDEEPFSRDDRSLVYQRAKGVEDARPFGTRMRVYDAGYSWVTHSVQPVHITDTDFRVTIGNKDCKQPYDASIYNISAMSFGSLSANAISALNKGAKMGQFAHDTGEGGISRYHREGGGDLIYEIGSGYFGCRTEDGQFDPDKFKEQAASDQIKMIELKLSQGAKPGHGGMLPASKISAEIAAARGIPMGHDCISPAAHSAFTSPVQMMEFLGKLRDLSGGKPVGFKLCIGHQREFMCMVKAMLDTGIVPDFIVVDGTEGGTGAAPLEFANHVGMPMVEGLTFVHNTLRGAGIRDQVKLGAAGKVVSAFDIARALALGADWCNSARGFMFAVGCIQAQACHTNHCPVGVATQDPTRQRALDVDDKSQRVARFHRNTLMALGEMTGAAGLEHPSDFLPRHMMMRQSDNSMVQGDQVYGYLPEGYLLDDQSPDYNGNKTRWARAQADSFVPFD

SEQ ID NO: 34270 - protein, 752 aa, Sulfitobacter sp. EE-36
MTKNRITSEEALAFHLEPTPGKFEITATVPMTTQRDLSLAYSPGVAVPCEAIAENPELAYDYTNKGNMVAVISNGTAVLGLGNLGALASKPVMEGKSVLFKRFADVNSIDVELDTEDPEAFINAVKLMGPTFGGINLEDIKAPECFIIEQRLKEEMDIPVFHDDQHGTAVICAAGLLNALRISGKKIEDVQIVLNGAGAAGIACLELLKAMGAKHNNCIMCDTKGVIYQGRTEGMNQWKSAHAAQTELRTLEEAMKNADVFLGVSVKGAVTPAMVASMADNPVIFAMANPDPEITPEEAHEVRPDAIVATGRSDYPNQVNNVLGFPYLFRGALDIHARAINDEMKIACAHALADLAREDVPDEVALAYGKNLSFGRDYIIPTPFDPRLIHRIPPAVARAGMDTGAARRPIIDMDAYELSLKSRMDPTANILRGINARARANQARMIFAEGDDPKVLRAAVMYQRSGLGKALVVGRADDVKAKLTAAGMEDAYRELEVVNAANTQHLETYKSFLYNRLQRKGSDSKDIHRLAARDRHVFAALMLAHGHGDGLVTGATRKSAHVLERLNHVFDANAKHGAVGITALLHKGRIVFIGDTLVHEWPNEEDLANIAEKGAKVARHMGLEPRVAFVSFSTFGYPVSERAEKMQRAPDVLDARGVDFEYEGEMTVDVALNAESQKNYPFSRLTGPANILVVPARHSASISVKLMQEMAGATVIGPILTGLDKSIQICSTTSTANDILNMAILAACKVGE

SEQ ID NO: 34271 - protein, 406 aa, Sulfitobacter sp. EE-36
MSAPKKVVLAYSGGLDTSIILKWLQTEYGCEVVTFTADLGQGEELEPARAKAEMMGASEIYVEDVREEFVRDFVFPMFRANAVYEGLYLLGTSIARPLISKRLVEIAAETGADAVAHGATGKGNDQVRFELAAYALNPDIKVIAPWREWDLSSRTKLIEFAEKHQIPVAKDKRGEAPFSVDANLLHTSSEGKVLEDPAVDAPDYVYQRTVSPEQAPDTPEYVEIGFERGDAVSINGEAMSPATLLAKLNELGGKHGCGRLDLVEGRFVGMKSRGIYETPGGTLLLEAHRGIESITLDRGAMHLKDELMPRYAELIYNGFWYSPERTMLQAAIDASQTHVTGTVRLKLYKGHVRTVGRWSDHSLYSEAHVTFEDDAGAYDQKDAAGFIQLNALRLKLLAARDKRLKG

SEQ ID NO: 34272 - protein, 156 aa, Sulfitobacter sp. EE-36
MAPIVERGGRLELILTKRSSALKHHPGQIAFPGGKQDGGDADVVAAALREAREEIGLPSDLVDVLGTLPAHETVTNFLVTPVIAFVEKDFEIIPEPGEVEEVFTVPLDHVLNAENYVVQSRRWQGQRRYYYTVPYGPYYIWGATARMLRAWTERMM

SEQ ID NO: 34273 - protein, 1510 aa, Sulfitobacter sp. EE-36
MTKYDDAWVAREEAKRAFMAENGLYSEEEEHSSCGVGLVVNIDGSSSRAVVENGIKALKAIWHRGAVDADGKTGDGAGIHVQIPVNFFYDQVRRTGHSPREGELIAIGQVFLPRTNFAAQETCRTIVETEVLRMGYYIYGWRHVPVDTSVLGEKANATRPEIEQILISNAKGVDEETFERELYVIRRRIEKAALAAQVPTLYIASMSCRSIIYKGMMLAQDVANFYPDLMDERFESAFAIYHQRYSTNTFPQWWLAQPFRMLAHNGEINTLKGNVNWMKSHEIRMASGTFGDMAEDIKPIVAAGSSDSAALDSVFEVLVRAGRSAPMAKTMLVPESWSKQAVELPQAWRDMYSYCNSVMEPWDGPAALAMTDGRWVCAGLDRNGLRPMRFVVTGDGMLIAGSEAGMVPQDEANVVRKGALGPGQLLAVDIEEGKMFGDTEIKDKLAASRPFGEWVGKINELDKALGDVEEKALFSGDELRRRQVAAGYTIEDLEQILAPMAEDAKEPLASMGDDTPSAVLSNQYRPLSHFFRQNFSQVTNPPIDSLREFRVMSLKTRFGNLKNVLDESSAQTEILVLDSPFLANAQFDQLMTEFNANSVTIDCTFEPGGNSLSENLRRIRDEAEDAVRSGAGHIVLTDQFSDATRVAMPMILATSAVHSQLTRKGLRTFTSLNVRSAECVDPHYFAVLIGCGATVVNAYLAEDSLADRIGRGLLDMTLTTAMARYREAIDQGLLKIMAKMGISVMSSYRGGLNFEAVGLSRAMCAEYFPGMTSRISGIGVTGIQRKAEAVHDRGWQGDGVVMPIGGFYKARKSGETHAWEASSMHMLQMACNKASYQMWKQYSAKMQSNPPIHLRDLLDIKPLGAPVPIEEVESITSIRKRFVTPGMSLGALSPEAHKTLNVAMNRIGAKSDSGEGGEDPAHFVPEANGDNPSAKIKQVASGRFGVTAEYLNQCEELEIKVAQGAKPGEGGQLPGMKVTDLIARLRHSTKGVTLISPPPHHDIYSIEDLAQLIYDLKQINPRCKVTVKLVASSGVGTIAAGVAKAKADIILISGHNGGTGASPATSIKYAGLPWEMGLTEAHQVLAMNNLRDRVTLRTDGGLRTGRDIVMAAMMGAEEYGIGTAALIAMGCIMVRQCQSNTCPVGVCTQDEALRGKFTGNADKVVNLITFYATEVRELLASIGARSLDDVIGRADLLAQVSRGSAHLDDLDLNPLLITVDGAAEIVYDRNKPRNAVLDTLDSEIVRDAARFLEDGEKMQLSYAVQNTHRTVGTRVSSHIIRNFGMNNQLQPDHLTVKLTGSAGQSLGAFAAPGLKLEVSGDANDYVGKGLSGGTIVVRPSMASTIVASDNTIIGNTVLYGATKGFLFAAGRAGERFGVRNSGAHVVIEGCGSNGCEYMTGGVAVILGEIGANFGAGMTGGMAYLYNPDGKADKMLNRETLVTCPVTVEHWENQLKGLIERHLQETNSRKAEDILQHWDIEKDNFLQICPKEMLVHLPAPLSVEEHAIPAE

SEQ ID NO: 34274 - protein, 381 aa, Sulfitobacter sp. EE-36
MSEVVLNCGYVPLVDCAPLVIAKELGFAAEQGLALNLLRQPSWSALRDMLALGHLDAAHMLSPMPVAMSIGMGGLPARVDALMVLSVNGTVFGVSNAVASALEDVRFGDTTALLSGLSARGAKPLRVGIPFHYSMHRLLLSYWAAQAPDLQIEEVTVPPMRMADAVSDGFVDAFWVGEPWGGVAVQNNIAKLMMAGRDVWQFAPEKVLAARHEWASQNEDSVRRLMRAVYQASAWLDAPGNKPLSVEILGRSEHLSMSPDLIDPALTGHIVPRTGASPITVDRFLQFHSHAATFPWRSQAAWIAHHLGADAAGIEKAKTCFRADLFRQNLSDIGADMPQSSEKTEGAMTLPTSVASARGEMILSPDAFFDGRTFDFTAAVR

SEQ ID NO: 34275 - protein, 456 aa, Sulfitobacter sp. EE-36
MKNTFALLLASTSLLATAASAEMLALEKEELTFGFIKLTDMAPLAVAYELGYFEDEGLFVRLEAQANWKVLLDGVIDGQLDGAHMLAGQPLAATIGYGTKAHIITPFSMDLNGNAITVSNDIWDEMKPNVPTMDDGRPQHPISASALAPVVEGYKDRGEPFNMGMVFPVSTHNYEIRYWLAAGGLKPGYYSAQDISGQIDADVLLSVTPPPQMPATMEAGTISGYAVGEPWNQQAVFKGIGVPVITDYDMWKNNPEKVFGITAEFAEDNPNTTLALTKALIRAAMWLDANDNANREEAVEMLSRSEYVGADADVIANSMTGFFEFEKGDVRPAPDFNVFFRYNATYPFYSDAIWYLTQMRRWGQIDETKPDEWYFETAADVYRPDIYLQAARLLVDEGMADEAAFPWDSDGFKSPTPAADIIDGISYDGRAPNAYIDSLPIGLKSGQTVVDSKVEG

SEQ ID NO: 34276 - protein, 433 aa, Sulfitobacter sp. EE-36
MTSRLLIPLAAAATLLPSLGFAQEAEYATAADTAFIFNTILFLIGGFLVFWMAAGFAMLEAGLVRSKNVTTQLTKNIALFALAAILYWLVGYNIMYPGDAWIIPGVFGTFATKDIKTAIDAGGYSNASDFFFQLMFCATTASIVSGTLAERIKLWPFLIFTIVLTGFIYPIEASWQWGAGWLSDAGFSDFAGSTLVHAAGGFAALAGALVLGPRIGKYKDGRVIPMQGSNLPLATLGTFILWLGWFGFNGGSQLAMGSMIDADAVAQIFANTNMAAAAGAIAALVLTQMLYKKPDLTMVLNGALAGLVSITAGPLDPTLFGALWIGAVGGAIVVFAVPFLDKLKIDDVVGAIPVHLIAGFWGTLVVPVYTDGTSFVTQIIGFASIGAFVFIVSLIVWMILKATTGIRVSEEAEIAGLDVSELGMEAYPEFSKS

SEQ ID NO: 34277 - protein, 354 aa, Sulfitobacter sp. EE-36
MLAAMDVAGNPSSVHAEGRAAKMMVEKARGQVAALVGCDVSEVIFTSGATEAIAGVVQDAGNVTGAAVEHEAVRIWCPEAEQLPVDRNGHVDLNALPDGALAGKTLFLQRANSETGVLQPESLLAELARLGASPASVFRDAVQAAGKLSDLGRWRSDVGRHASLAVSAHKLGGPKGIGALIAGPEYTPGLMQPMLRGGGQELGRRAGTENVIGIAGFGAACAAAAQDLADGVWERVAELRNVLEKALEAASKKTIFVGKDVARLPNTSCFITPGWRGETQVMQMDLAGFAISAGSACSSGKVATSRVLTAMGFDDAEASCAVRVSLGPDTTEEQVLRFADAWTAKLKKHEARAA

SEQ ID NO: 34278 - protein, 251 aa, Sulfitobacter sp. EE-36
MLSIKGLKVKLEEEDKQILKGVDLEVEAGKVHAIMGPNGSGKSTLSYVLSGKDGYEVTEGSAHLGDIDLLDLEPEERAAAGLFLAFQYPVEIPGVGNMTFLRTAVNAQRKARGEEEMSAAEFLKVVRARAKELKIDADMLKRPVNMGFSGGEKKRNEILQMAMLEPKMCILDETDSGLDVDAMKLVADGVNALRTEGRGFLVITHYQRLLDHIKPDVVHIMADGRIIKTGGPELALEVENNGYADILSEVA

SEQ ID NO: 34279 - protein, 389 aa, Sulfitobacter sp. EE-36
MGISNAIVIGGGIGGLAAAAALSRRGMAVTLLEQAPAITEVGAGLQISPNGIAVLRAMGLDAKLTERAAVRGQAVVLQDYKAGARVARLDLMRGQGAYPYMFVHRADLVDILLGAAKRGNVTVELGAEVAEVTPGATPQLRLTDGSRRRAELIVDASGIHSRARAVLNGADQAKFTGQVAWRAVVRNDFNHPDEAHVTMGPGRHLVSYPLRGGQQVNLVAVEERESWAAEGWNHADDPANLRNAFAGFGGRAAAMINAVESCTLWGLHLHPVAQTWHQGGVALLGDAAHPTLPFLAQGANMALEDAWVLADSVLNHPAEQALARYQSLRQPRVTRVVKAAAGNAARYHLRPGPLRSAAHLGLKLGSTLAPWAMVGAFNWLYHHDVTAPK

SEQ ID NO: 34280 - protein, 306 aa, Sulfitobacter sp. EE-36
MSGQNCILLGAPLDSGKRRLGCLMGPDAYRTAGLAGALTDLGHSVTDRGNVAPAPFTPGQHPKLHALEETIAWTHSLAEATQAALQDGTPIIMGGDHALASGTVLGAMRHAQAQERPLFVLWLDAHSDFHTPESTDSGNLHGTPLGYVTGREGFDAFPDLPYPLPHDNIAIIGLRSVDAAERAALQETTIQRVDMREIDETGIATPLNTFLEKVAAANGMLHVSLDVDFLDPSVAPAVGTTVPGGATVREGHLVMEMLHDSGLMTSLDLVELNPFLDERGRTAQLMVDLAASAFGRRVFDRPTRAY

SEQ ID NO: 34281 - protein, 290 aa, Sulfitobacter sp. EE-36
MAKLAFLGLGVMGAPMAAHLQKAGHDVTVYNRTTEKARAWAETHGGKMAETPKAAAEGAEIVFSCVGNDDDLRSVCIGDDGAFAGMGEGTIFVDHTTVSAAVTRELHAAADARQISFVDAPISGGQAGAENGQLSIMCGGDSGAFDRALPVMEVYAKICRRLGDSGAGQMTKMCNQIAIAGLVQGLSEALHFAQKAGLDGRDVVEVISQGAAGSWQMANRYETMLDDKFDHGFAVDWMRKDLGICLDTGNEIDASLPVTALVDQFYKDVQKMGGGRWDTSALFKRLNALG

SEQ ID NO: 34282 - protein, 325 aa, Sulfitobacter sp. EE-36
MGLEDAKNQVDQAFTRDDLKGPSFENAFGGATSFLRRRYTKDLRGVDIAVTGVPFDQAVTNRTGTRLGPRAIREASSLQPYDPPYGWDFDVLSEFAIADYGDLAFDYGHTSQFPAALIRHIKGILDAGAASVTLGGDHYISFPILKAYAEKYGPISLLQFDAHSDTWPDDDMDRIDHGTMFYKAVKSGIVDPKTSVQVGIRTTNPDTLGVTTIDAREVHEKGPQAAVAKIKQVLGDRPCYLTFDIDALDPAFAPGTGTPVWGGLTSAQAAIMMRDLAGINIVGGDIVEVSPPFDTTGATAIAGAHVATEILCLLGWNMRQTKARA

SEQ ID NO: 34283 - protein, 237 aa, Sulfitobacter sp. EE-36
MFAVIKTGGKQYKVQSGDMLRVERLAADAGETVQFNEVLMLGGDSPKLGAPLVAGAGVQAEVVDQIKGEKVIHFVKRRRKHSSKRTKGHRQKLTLVKIGEILSSGADKSDVKAAIGTGSVSAAAVTAMEERYALNKTDQAEMAKRVKNNQAEEKSAKPAKAKKAKAAPAAEGADDLSKISGVGPVIVGKLNGEGITTFAQIAAWTDADVEAIEEKLSFKGRVGREDWIAQAKELAKG

SEQ ID NO: 34284 - protein, 345 aa, Sulfitobacter sp. EE-36
MKFLDLCKVYIRSGAGGGGCVSFRREKYIEYGGPDGGDGGSGGSVWAEAVDGLNTLIDFRYQQHFFAKNGQPGMGKQRTGKDGDDIILRVPVGTEILDEDQETVLADMTELGQRVELARGGNGGWGNLHFKSATNQAPRRANPGQEGVDRTLWLRLKLIADVGLLGLPNAGKSTFLAATSNARPKIADYPFTTLHPNLGVVGVDNTEFVVADIPGLIEGASEGRGLGDLFLGHVERCAVLLHLIDGTSNTIAEDYQTIINELEAYGGELADKPRITVLNKIDALDEDDRVTAREELEKACGAEVMMMSGVAREGVTEVLRALRGQIDDDRLRFRSEDEEEAPWQP

SEQ ID NO: 34285 - protein, 434 aa, Sulfitobacter sp. EE-36
MNETLKNTALFAIVALLIVLTGLAQSWNAALLIIAMGLISSIMALGVNLQWGFAGLFNVGIMGFVALGGLAAVLIGMPPTQGAWSAGGWGILTALLMGAATIILAVQVMKRMAKGWLRTLVVLVVLVAGFFIFRALLDPSVSAVEAVNPATTGYLGGLGLPVIIAWPVGGLFAAGAAWLIGKTALGLRSDYLAIATLGIAEIIIAVLKNEDWLSRGVKNVIGIPRPVPYEIDLQNNAGFVEQAAGFGLNPVEASTLWVKFLYVCLFAVVLLVLMWLSQRALNSPWGRMLRAIRDNEVAAEAMGKDVTARHLQVFILGSAICGIAGAMMTTLDSQLTPGSYQPLRFTFLIWVMVIVGGSGNNLGAVLGGFLMWYLWVMVEPMGLWLMQLVTAGMSDGYWLKDHLIESAAHMRLMTMGAVLLLVLRFSPRGLIPEK

SEQ ID NO: 34286 - protein, 392 aa, Sulfitobacter sp. EE-36
MQLSSRITGLLGGGSDGWGVFLRARQMIEQGTQVTELTIGEHDIRTAAPILQDMHRAALAGHTGYAAIPGTTGLRDAVAARLQERTGVPTTRDNVLITPGGQSALFAAHMATCNPGDTALYIDPYYATYPGTIRGVSALPHAIAARAEDAFQPRADVIAAAAKQTNAASLLVNSPNNPTGVVYSRKTLEGIAQVCRDHDMWLISDEVYDTQVWEGAHLSPRALDGMAEHTLVVGSMSKSHAMTGSRCGWIVGPVDAIEHLTNLATHTTYGVPGYIQDAALFALNQGTGFETEIAAPFQRRRLLAQDILARQNAVSLVPAQGAMYLMLDVRSTGMSGEDFAYALLEKHHIAVMPGESFGTAAAGHIRVAMTIEDTRFAQALATVCDFAEGLAA

SEQ ID NO: 34287 - protein, 524 aa, Sulfitobacter sp. EE-36
MKIGTPKETFEGENRVAMTPESALQLQKLGHSCMIEAGAGEAAGFSNDKYVEAGVEVIDTAAELWETADVVAKVRVPNTEEMAMLRSDQTLISFFSPVADEAKMKEAAEKGTTVVAMEMIPRISRAQKMDALSSMANIAGYRAVIEAGNNFGRFFTGQITAAGKVPPAKVLVVGAGVAGLAAIGTSTSLGAITLAFDVRPEVAEQVESMGAEFVYLDFEEEQQDGSASGGYASVSSPEFREAQLAKFRELAPEVDIVITTALIPNREAPELWTEDMVAAMKPGSVIVDLAAEKGGNCKLTKMDEKIVTENGVTIIGYTDFPSRMATQASTLYATNIRHLMTDLTPEKDGVVNHNMEDDVIRGATITHDKEVTFPPPPPKVAAIAAAPKKDKPKELTAEEKRANEVAAFKTQTRNQVGLLAIGGVLLLAVGLVAPASFMQHFIVFVLSVFIGFQVIWGVAHSLHTPLMAVTNAISSIIILGAVMQIGSGSFLVIILAALSVFMCGINIFGGFLVTRRMLAMFQKS

SEQ ID NO: 34288 - protein, 400 aa, Sulfitobacter sp. EE-36
MELLSKTLARVKPSPTIAVTQKAAELKAAGKDVIGLGAGEPDFDTPQNIKDAGIAAITAGKTKYTAVDGILELKQAICAKFKRDNGLDYTPSQVSVGTGGKQILYNALMATMNPGEEVVIPAPYWVSYPDMVLLAGGTPVIAPATLENDFKLTPEALEEAITPNTKWFIFNSPSNPTGAGYSWDELKALTDVLVRHAHVWVMTDDMYEHLAYDDFKFCTPAQVEPALYDRTLTVNGVSKAYAMTGWRIGYAAGPEKLIGAMRKVQSQSTSNPCTVSQWAAVEALNGTQDYIAENNKMFTRRRNLVVDMLSEIDGIVCPKPEGAFYVYPSIAGLIGKTTPSGVTITDDEVFATALLEDTGVAVVFGAAFGLSPNFRISYATSDEALKEACTRLQQFCAALS

SEQ ID NO: 34289 - protein, 68 aa, Sulfitobacter sp. EE-36
MPTGTVKWFNTTKGYGFIAPEGGGSDVFVHISAVERSGLTGLADEQKVSFEMSEGRDGRQMATDLELL

SEQ ID NO: 34290 - protein, 491 aa, Sulfitobacter sp. EE-36
MSFTLAIVGRPNVGKSTLFNRLVGKKLALVDDQPGVTRDLREGAARLADLRFTVVDTAGLEEVTDDSLQGRMRRLTERAVDMADICLFMIDARVGVTPSDLVFADILRKKSAHVILAANKAEGKAADAGVIEAYSLGLGEPIRLSAEHGEGLNDLYSHLMPIADGFAERAQTDAPETDVDLTEEEAELGDEEAPVPVPTKTKPLQVAVVGRPNAGKSTLINQIMGEDRLLTGPEAGITRDAISLQTDWFDVPMRIFDTAGMRKRAKVQEKLEKLSVSDGLRAVKFAEVVVVLLDADIPFEQQDLRIADLAEREGRAVVVAVNKWDLETDKQGKLKDLRESFERLLPQLKGAPLVTVSAKTGRGMDRLHNAIMRAYEVWNRRVTTAQLNRWLSGMMEAHPPPAPQGKRIKLRYMTQAKTRPPGFVVMCSHPDKVPESYNRYLVNGLRLDFDMPGTPIRLWMRGQSDANPYKGRKKAKPSKLRKHTDGHRKDR

SEQ ID NO: 34291 - protein, 120 aa, Sulfitobacter sp. EE-36
MTDAKTQIQETITANNVVLFMKGNKTMPQCGFSSRVAGVLNYMNVDYTDVNVLADEELRQGIKDFSDWPTIPQLYVKGEFVGGCDIITEMMLSGELDTLLEDNGVAFDKDAADKIREANG

SEQ ID NO: 34292 - protein, 554 aa, Sulfitobacter sp. EE-36
MYSYTEFDDAFIAERNAQFRAQVERRIDGSLTEDEFKPLRLMNGLYLQLHAYMLRVAIPYGTLSSRQMHKLADIAAKWDKGYGHFTTRQNIQYNWPQLRDVPDMLDALAEVNMHAIQTSGNTIRNVTADHFAGAAADEIADPRPVAELIRQWSTDHPEFQFLPRKFKVAVSGAPHDRAVIKAHDIGLQIVEKDGEIGYQVIVGGGLGRTPMIGKVLYDFVSSEDLLPTLEAIVSVYNLLGRRDNKYKARIKITVHENGIDDIRARVDARYALIRPQFTGVDQQMLSRIEADFASPTFKTAPTDAYTASYDSDPVFKSWADTNLTDHRDPSYAIVSISLKAHGKTPGDATAEQMHRMAELAAEYGHDELRISHEQNVILPHVHRGDLPALHAALKEVGLATANIGLISDIIACPGMDYCALATARSIPIAQEIATRFDELKLEHDVGPLKIKISGCINACGHHHVGHIGILGLDRAGVENYQITLGGDGTENAAIGERAGPGFSADDIIPAIERLVKGYLDLRSDAGETFLQTYRRLGLAPFKAVLYPEAQANAA

SEQ ID NO: 34293 - protein, 386 aa, Sulfitobacter sp. EE-36
MTEAYICSALRTPGGRRGGKVSGWHPVDLAARVLDATVQNTGIDPAAIEDVIMGCVGQSGEQGLHIGRNAVLASSLPESVPAVSIDRQCGSSQQSIQFAAQAVMSGTQDLVIAAGVESMSRVPMGTTGVFTRNFEPGSAKSPGLDAKYPGVAFSQFSGAEAIARKHNFSREDLDAFALLSHQRAAKATEAGAFDQEIVPLELENGEIHRTDEGIRADASMEALAGVKTLKEGGVITAGNASQICDGASAVLIASAAAVKAHGLTPLARIRSMTVTGGDPVIMLEEPLFATDRALARAGMTIDEIDLYEVNEAFASIPLAWLKHTGADPDRLNVNGGAISLGHPLGASGAKLMATLVHGLRARGKRYGLQTMCEGGGLANVTIVEAL

SEQ ID NO: 34294 - protein, 588 aa, Sulfitobacter sp. EE-36
MHHRLTALFLALSPARPWFKQVDRSTVRADAVAGLSNAAVVLPQGVAFAIIAGLPPEFGLFTAVVVSLIAGIWGSSMIMVSGPTTAISAVVFGSMSQFAVPGSDDYIAMVLSLTLMVGVIQIVAGVFKLGGLISFISHSVLIGFTAAAAFLIAASQLNGALGLAKGAGGGVFERLYHAAENIGGANATAMLISAATILTLVLLSRVSKKMPAYIIALAVGTAVAWVLDAPAQGVAMFSPLRSIVPSFGAPVISFDLVTELLPVAATVAFVGLLEAISIGRSFALRRDEPYNSSQEMVGQGLSNAVGAFFQCYAGSGSFTRSGLNADAGAQTPLSTIFAAGFLVILLFVLAPYLEYVPVPAMAGVILFVSYRLINFHEIRHILTSNKRETAILAATFLTGIFTELDLAIVIGVITSLCVFLYDSAHPIVAVGSPTEINGRRVFKNAANYGLPECPQISVIRVDGPLFFASVENVEQQFRQVEERSPVPKTKLMGLKGLWKIDLSGAGLLLKEIRRARRAGADFHIFTTNAPALRIMRQLHVFDELGEDNMHNNKGEAIAAAVKAADDDICRGCELRIFMECASKPGPEK

SEQ ID NO: 34295 - protein, 466 aa, Sulfitobacter sp. EE-36
MTKDVSTTPDQDGEKTELKRVMGPGLLLLFVVGDVLGTGIYALTGEVAAKVGGIVWLPFLVAFVLATVTACSYLELVTKYPKAAGAALYTQKAFGVHFLTFLVAFAVMSSGITSASTASQAFAENFGKSFGLGDGAFLITAISIGFMVLLGLINLRGVGESVKANVVLTCIELTGLLIIIMIGAAALMGGQGDFGRAFDFSSAGEQGLFWPVIAATTLAFFAMVGFEDSVNMAEEAKNPSRIFPKVLLGGLLITGVIYLLVSITAIALVDAEALGEGATPLLKVVEAGAPWFPLSVFGIITMCAVANSALINMLMASRLLYGMAQEKVLPSILGKVLPKRRTPYTAIVFTTGLAIALITFVGAVPDLGGTTALLLLAVFTLVNIAVLVLRSDTVDHDHFTSPLGLPYIGAISCAFFVGPWTGRDSVQYLIAAVLIGLGVVLWGATVFYMKSKGQDPLASDMDKLSE

SEQ ID NO: 34296 - protein, 547 aa, Sulfitobacter sp. EE-36
MTDETSPGIPTPDGAAAVIDTDYEIGQDNKEGSVGPFGFDIHNPVFAISGVCIVAFVFYTLALPEQSGALFTWLFSSVTKGFDWFFISAGNIFVLFCLFLIVTPLGRVRLGGAEASPDYTYLGWFSMLFAAGMGIGLMFYGVSEPLSHFSSSMGGTAVGEDGLRTDWAPLGAAAGDQAEAVRLGMAATIYHWGLHPWAIYAVVGLALALFSYNKGLPLTIRSAFYPILGERVWGWPGHVIDILAVFATLFGLATSLGLGATQANAGLNELFGVAVGPTTQVLLITGITAIATVSVLRGLDGGVKVLSEINMGLAFLLLAFVLLVGPTLAILSTFGSSLLAYVEYLPGLSNPIGREDVNFMQGWTSFYWAWWISWSPFVGMFIARVSRGRSVREFLTCVLLIPSLVCVLWMSVFGGMAIDQVISDGYTAAQEAELPRQLFAMLDALPLAGITSLIGIVLVIVFFVTSSDSGSLVIDTITAGGKVDAPAPQRVFWCIFEGAVAIVLLLSAGGLKSLQSMVISTGLPFTVVLLFMCYAIFRGLRAEMKTQ

SEQ ID NO: 34297 - protein, 575 aa, Sulfitobacter sp. EE-36
MRIPAAARRYLPVLDWGRDYDKAALSNDLIAAVIVTIMLIPQSLAYALLAGLPPEAGLYASIAPILLYAVFGTSRALAVGPVAVVSLMTAAALGNIADQGTMGYAVAALTLALLSGVMLLVMGVFKLGFLANFLSHPVISGFITASGVIIAASQIKHILGIDASGGNLAELLMSIWANLGTVNGTTVVIGVSATLFLFWVRKGLKPFLRARGVGPRAADVATKAGPVAAVVVTTLAVWAFDLAGQGVKIVGAVPQSLPPLTLPDLSFELMGSLLLPAFLISVIGFVESISVAQTLAAKRRQRINPDQELIGLGAANIGAAFTGGYPVTGGFARSVVNFDAGAQTPAAGAYTAVGLAVAALALTPLVFFLPQATLAATIIVAVLTLVDFSILKKAWGYSKSDFAAVLSTMLITLGSGVELGVTCGVVLSIFLHLYKTTKPHIAEVGLVPGTEHFRNINRHEVETCPTVLTLRIDESLYFANARFLEDCIYDRLAGNTCLRHVVLMCSAINEIDFSALESLEAINARLRDMGIKLHLSEVKGPVMDRLKKQHFISDLTGSVFLSQHAAYVALGKAAA

SEQ ID NO: 34298 - protein, 315 aa, Sulfitobacter sp. EE-36
MPEVVEKRLTELFHVTLRADDTPMTRSELGEAMKTADILVPTVTDEIDAALIGQAGDRLKLIANYGAGVDHIDVMTARQRGILVSNTPGVLTEDTADMTMALILAVTRRMSEGMAQMQKGDWQGWAPTALLGGRVSGRRLGILGMGRIGQAVARRAAAFGMQVHYHNRRRLRPEIEESLGATYWESLDQMVARMDVMSINCPHTPSTFHLMNARRLKLMKPDAVIVNTSRGEVIDENALTRMLRAGELQGAGLDVYEHGTDINPRLRELTNVVLLPHMGSATLEGRVEMGEKVIINIKTFEDGHRPPDQVVPSML

SEQ ID NO: 34299 - protein, 319 aa, Sulfitobacter sp. EE-36
MSKPVIWITRTLSNATLERARRDYEVIWNAADTPGSAEDIIKMSASVDGIIPCHSEHFSADVVAQLDPRLKIVANHSVGVDHCDLDALRGKGIVVTNTPDVLSDATAELAMMLMLGAARNAVAGDRTVRSGTWDFWSPAFLVGKQLTDARLGIVGMGGVGRAFARKARGFDMEIHYHNRSRLSPEDEAGAIYHETLESLLAVSDFLSLHCPATPETVGLMNADRLAQLPKGAVLVNTARGNLIDEAALVDALDAGHIGAAGLDCFVTEPGGNPAFASYDNVMMMPHVGSATVQTRDAMGFKALDNLDAFFRGESPPNAL

SEQ ID NO: 34300 - protein, 599 aa, Sulfitobacter sp. EE-36
MARTPTPGPGTEEREKSRELGALRALLPFLAPYRGLMIAAILALVLTAMISLTLPLAVRRVIDNFGTGEAELLDQYFVAALIIAALLAVGTGLRYALVTRFGERVVADIRKAVFDRVISMSPAFYENLMTGEVLSRITTDTTLILSVIGSSVSIALRNMLIVTGGLVLMLFTSAKLTAMVLLIVPAVIVPILVLGRRLRVLSRENQDWIAASSGNASESLGAVQTVQAFTNEAASQSQFAQMTEASYDAAQRRIKTRALMTIIVIFLVFAGVVGVLWMGARDVRADQMTPGALVQFVIYAVMVAGGVAALSEIWGELQRAAGATERLVELLRTEDTVQDPAAAIALPSPVAGRIAFEDVHFRYPARPDVQALDGVNLSINPGETVAFVGPSGAGKTTIIQLILRFYDPASGRITLDGVDLRDVSRAAFRRSVALVPQDPVIFAASARENIRFGRPDATDAEIDAAAEAAAAHGFISALPDGYDSYLGERGVMLSGGQKQRIAIARAILRDAPVLLLDEATSALDAESERAVQAAVDRLSADRTTLIVAHRLATVKKADRIVVLEAGRIVDMGTHDELVTKGGLYARLARLQFTDGRGDV

SEQ ID NO: 34301 - protein, 217 aa, Sulfitobacter sp. EE-36
MKFFVDTAEIDAIAELNDLGMVDGVTTNPSLILKSGRNILEVTKEICDLVDGPVSAEVVATKADDMIAEGRKLAEIAENITVKLPLTWHGLKACKVLSDEGKMVNVTLCFSANQALIAAKAGATFISPFIGRLDDINLDGMDLIQDIRTIYDNYGFETEILAASIRTVNHVLDAARIGADVMTAPPEVIKKLAAHPLTDKGLETFMADWAKTGQNIL

SEQ ID NO: 34302 - protein, 638 aa, Sulfitobacter sp. EE-36
MGNMRNLAFWVVLMLLVLALFNLFSGSTGGLQSREISYSEFVTAVEAGDVRNVTLDGEQVRFRRADGSDYVTIRPEDAEVTSLLMSKDIPVRAEPQQQSGFQTFLMSLLPILLLIGVWIYFMNRMQGGGKGGAMGFGKSKAKMLTEKHGRVTFDDVAGIDEAKEELEEIVEFLRNPQKFSRLGGKIPKGALLEGPPGTGKTLLARAIAGEAGVPFFTISGSDFVEMFVGVGASRVRDMFEQAKKNAPCIVFIDEIDAVGRSRGAGYGGGNDEREQTLNQLLVEMDGFEANEGVIIIAATNRKDVLDPALLRPGRFDRQVTVGNPDIKGREKILGVHARKTPLGPDVDLRIIARGTPGFSGADLANLVNEAALTAARVGRRFVAMMDFEAAKDKIMMGAERRSMVLTQDQKEKTAYHEAGHAIVGIKLPKCDPVYKATIIPRGGALGMVMSLPEMDKLQMFKDEAEQKIAMTMAGKAAEIFKYGAETVSSGPMGDIMQASQLARGMVMRMGMSDKVGNIDYSEAAAGYQANGGAGGFSVSAATKELIESEVKRIIDEGYDRAYKMITDHEEEFERLAQGLLEYETLTGEEIKRVMEGKPPQDPDGDDTSGMDKPSLTAIPKAKGKKTPPPSGMEPEPSV

SEQ ID NO: 34303 - protein, 386 aa, Sulfitobacter sp. EE-36
MAHAYIVETARTAGGRRGGALRDWHPANLGAEVLNALVARSGIDGAVIDDVIVGCVSQGGEQSFAFGRNCVLASNLPQSVPAVTIDRQCGSSQQAVQFAAQAVMSGTQDVVVAMGVESMTRVPMGSNVSLYAKAGLGEGPFSDRIEARYGTKNFSQFIGAEMVAQKHGFTRAELDAYALESHRRAAAARDGGAFDAEIIPLAIDGRMHTRDEGIRDDATLDGISSVKLLDPDGMISAANASQICDGAAGVLVVSEAALKKYKLTPKARIVNLTVTAGDPVIMLEEPLPATDRALERAGMKIDDIDLFEVNEAFAPIPMAWAKHTGADPAKLNVNGGAIALGHPLGASGARLMTTLVHSLHARGQRYGLQTMCEGGGIANVTIVEAL

SEQ ID NO: 34304 - protein, 372 aa, Sulfitobacter sp. EE-36
MKIGCPKEIKPQEFRVGMTPNAAYEAVNKGHEVVIEAGAGIGAGFDDAAYTDAGATILATAQEVFDSADMIVKVKEPQAAERKMLREGQILFTYLHLAPDPEQTKDLLASGATCIAYETVTDRNGGLPLLAPMSEVAGRLAPQVGAWTLQKANGGRGVLMGGVPGVGPARVVVIGGGVVGTHAARIAAGMGADVTVLDRSLPRLRYLDDIYGGVFNTSYASAGNTIELAREADMIIGAVLIPGAAAPKLISRAQLSELKPGAALVDVAIDQGGCFETSKATTHQDPVYDVDGIMHYCVANMPGAVARTSTIALGNATMPFMLALADKGWKQACADDPHLKAGLNVHAGQLTYAAVAEALGMEAITADQAIAG

SEQ ID NO: 34305 - protein, 68 aa, Sulfitobacter sp. EE-36
MATGTVKWFNTTKGYGFIAPDGGGKDIFVHISAVERAGLTGLADNQKVTFDVEAGRDGRESAANIALA

SEQ ID NO: 34306 - protein, 68 aa, Sulfitobacter sp. EE-36
MATGTVKWFNTTKGFGFIAPDGGSKDVFVHISAVERAGLTGLADNQKVTFDIEAGRDGRESASNIALA

SEQ ID NO: 34307 - protein, 538 aa, Sulfitobacter sp. EE-36
MTDPTSENGEIETDFEVGQDNIDGSLGPIGFDIHNPVFVISGITSVVFVLLTMIFPDQAGAVFLAVRNFATTKLDWMFMIIVNFFVIFCIVLIFLPMSKVRLGGEDAVPEYSYPAWFAMLFAAGMGIGLLFFGVLEPVYHMNVSGPLGVPSPIAADGSIIAENVEAARAMGLAATFYHWGLHGWAVYAIMALALALFTYNKGLPFSIRSCFYPILGERVWGWSGHIIDILAVFATLFGLATSLGLGAQQANAGFNFAFGLEISTNVQVIIIILVTAVALVSVWRGLDGGVKVLSEVNMGVAILFFLFVLFAGPTLIGLGGFWTGLIAYTQELIPLSNPFGRTDDAYREGWTAFYWAWWVSWAPFVGMFIARVSKGRTVREFIVCVLLIPSLIIFVWMGVFGGIAIDQILTSPETSLVKANVIDSYSPELSLFGMLNELPFTKTASTIAIVLALVFFVTSSDSGSLVVDTITAGGKIDAPVPQRIFWCVVEGLIAIVLLIGGGLSALQAGVTATGVPFSILMLVMCYTIYKGLRSEPRA

SEQ ID NO: 34308 - protein, 507 aa, Roseovarius nubinhibens ISM
MTPDSALQLQKLGHECAIEAGAGEKAGFADADYKAAGVEVINTAAALWKSCDVVAKVRVPTEAELKRLRKGQTLISFFNPGGNEEQMQAAAKKGATVVAMEMVPRISRAQKMDALSSMANIAGYRAVIEAGNNYGRFFTGQITAAGKVPPAKVLVVGAGVAGLAAIGTSTSLGAVTYAFDVRPEVAEQVESMGAEFVYLDFEEEQADGSSSGGYASVSSPEFREAQLAKFRELAPEMDIVITTALIPNREAPELWTEDMVKAMKPGSVIVDLAAEKGGNCKLTVMDEKIVTDNGVTIIGYTDFPSRMASQSSTLYATNIRHMLTDLTPEKDGVIVHDMEDDVIRGATVTHAGDVTFPPPPPKIQAIAAQPKKDAPKELTPEEKRAKEVAAFKAQTKQQVTLLAVSGGLLLLVGTVAPASFMQHFIVFVLSVFVGFQVIWNVSHSLHTPLMAVTNAISSIIILGALMQIGSGSFLVILLAALSVFMAGINIFGGFLVTRRMLAMFQKS

SEQ ID NO: 34309 - protein, 448 aa, Roseovarius nubinhibens ISM
MRVLGPVHVWALGVGIVLVGEFMGWNFSVGKGGAMGALIACWVIGLLYTCVAMIDSEVTSTVAAAGGQYAQAKHIMGPLMAFNVGLYLVMAYTMLEAADALIVGDLLTILAEQTGYDALDPKPFVILIISMLAFLNYRGVFMTLTLNFIITAAAFVTIVILFVGVQPWTAGAVLKHSDLLTDLPYGWIGVIAAFQFGIWYYLGIEGTCQAAEEVRSPSRSLPLGTMTGIMTLLIAATLTWYVCSGLLPWEYLGQATVPLYDAARMTGSTTLQVFLFVGTLFAATASANGCINDASRAWFSMGRDRYMPHWFGAVHPRYRTPYRSILFLIPIAVSFAFTGLLDQVITFSILSGLLGYTFMPINMIMFRRKWPLGSIRRGYVHPFHPIPAIVLMLLCITTFFATYLGFGTQLLAMMLFYVVVSLWFSMHRYKYVRRADQFTMNWPKPQGY

SEQ ID NO: 34310 - protein, 598 aa, Roseovarius nubinhibens ISM
MARRGGLDAELAKRESSKRIGGLSALWPFLRPYRLLLVAALGALILTASISLILPMAVRRVVDNFNAQDGALLDRYFTAALLIAALLALGTGLRYALVTRLGERVVADIRKAVFDRVIGMSPAFYERIMTGEVLSRITTDTTLILSVIGSSVSIALRNALIFIGGLTLMLFTSAKLAGLVLLIVPLILVPILTLGRRLRGLSRENQDWIAESSGNASEALLSVQTVQAFTHEDQSRARFGAVTEQSYDAARRRIFTRALMTVIVIFLIFAGVVSVLWIGARDVRLGTMSAGMLVQFVIYAVLVAGSVAALSEIWGELQRAAGATERLVDLLHAEDAVRDPEVPQPVPTPVRGGITFDHVNFAYPSRPDRAALDDLTLTIAPGETVALVGPSGAGKTTIIQLIQRFYDPASGTVSLDGVPLDQMARQAFRKHIALVPQDPVIFAASARDNIRFGRLDASDAEVEEAARLAAAHEFISALPEGYDSYLGERGVMLSGGQKQRVAIARAILRDAPVLLLDEATSALDAESERAVQQAVETMSRDRTTIVIAHRLATVKKADRIIVMEEGRIVASGTHDSLVAEGGLYARLARLQFTDGEVV

SEQ ID NO: 34311 - protein, 411 aa, Roseovarius nubinhibens ISM
MPVLVMKFGGTSVANLDRIRRAAKRVGVEVAKGYDVIVIVSAMSGKTNELVGWVGETSPLYDAREYDAVVSSGENVTAGLMALTLQEMDVPARSWQGWQVPVKTTSAHSAARIEEIPTDNITAKFGEGMRVAVVAGFQGVSPEGRITTLGRGGSDTTAVAFAAAFDAERCDIYTDVDGVYTTDPRIASKARKLDKIAFEEMLELASLGAKVLQTRSVELAMRYNVKLRVLSSFEEQSDAAGTLVCDEEEIMESNVVSGIAYSRDEAKMTLISVADRPGIAAAIFGPLSEAGVNVDMIIQNIAEEGRTDMTFSCPTDQVKRAEKAMADAKARGDINYHDLVADTDVAKVSAVGIGMRSQSGVAAKMFKTLSDEGVNIKVIATSEIKISVLIDRKYMELAVQALHDAFELDKA

SEQ ID NO: 34312 - protein, 323 aa, Roseovarius nubinhibens ISM
MSDTFFHPISGFELPRFAGVPTFMRLPHVAPDHARFGEVEIGLIGVPWDSGTTNRPGPRHGPRQLRDASTMMRAQHAVSGMRPFEAARCADLGDVGPNPADIQDSMARITAYYDKVIEAGILPLTAGGDHLTSLPVLRSVAKKSPVGMIHFDSHTDLFHSYFGGMMYTHGTPFRRAVEEGLLDPKRVVQIGIRGTMYDEEDRDFAKAEGIRLILIEEFHARGVEDVMAEAREIAGDGPTYVSYDIDFVDPTFAPGTGTPEVGGPNSYQALQVCRALEGVNIVGADMVEVSPPFDMSGGTAFLGMSVMYEILCVMAGQVAARSK

SEQ ID NO: 34313 - protein, 639 aa, Roseovarius nubinhibens ISM
MGNARTIAFWLVLFLLVVALFNLFSGTGSTLQSKPLAYSEFVSAVNEGTVSEVTLDGETVRFQDNAGVNYMTIKPEDAEVTKLLIEKGIPVQAESQEQSGFQAFLLTLAPFLLLIAVWVYFMNRMQGGGKGGAMGFGKSKAKMLTEKHGRVTFDDVAGIDEAKEELEEIVEFLRNPQKFSRLGGQIPKGALLVGPPGTGKTLLARAIAGEAGVPFFTISGSDFVEMFVGVGASRVRDMFEQAKKNAPCIVFIDEIDAVGRHRGAGYGGGNDEREQTLNQLLVEMDGFEANEGVIIIAATNRKDVLDPALLRPGRFDRQVTVPNPDIKGREKILGVHARKTPLGPDVDLRIIARGTPGFSGADLANLVNEAALMAARIGRRFVTMDDFEMAKDKVMMGAERRSMVLTQDQKEKTAYHEAGHAIVGLKLPKCDPVYKATIIPRGGALGMVMSLPEIDKLQMFKDELHQRIAMTMAGKAAEIFKYGADSVSSGPVGDIQQASQLARAMVLRYGMSDKVGNVDYAEAHEGYSGNTAGLSVSAHTKELIEQEVKKFIDDGYDIAFKIISENEEEFERLAQGLLEYETLTGEEIKRVMRGEPPHLSDDEDDGSDEGNAPSVTAIPKTKPKTPRGGDGGLEPEPSA

SEQ ID NO: 34314 - protein, 431 aa, Roseovarius nubinhibens ISM
MFDFDMLGLAPALNEALTRAGFSEPTPIQNQAIPLALEGHDILGLAQTGTGKTLAFGLPLINHLLAEPGKPAPKTAKALILAPTRELVNQIADSLRNLTDGTRLRVATVVGGQSINRQITFLARGTDILVATPGRLIDLMDRRAVDLGSVRHLVLDEADQMLDLGFIHALRKIAPRLGTPRQTMLFSATMPKQMEELSRAYLENPRKVQVSPPGKAADKITQSVHFLEKPAKPSKLREILSRDMDALTLVFSRTKHGAEKLMKGLVADGYNAASIHGNKSQGQRDRAIKAFRAGEINVLVATDVAARGIDIPGVAYVINYDLPDVPDNYVHRIGRTARAGREGEAIAFCSSEEADLLRQIQRLMKIDIPVASGTLPQGAADEARGAKPGGNRRRGGRGGPPAANRGGKPAHTKPGGQSKGRRPRRRSAAAS

SEQ ID NO: 34315 - protein, 269 aa, Roseovarius nubinhibens ISM
MKHAWKTVIASAAIVAFGTTAQADQLQEIKDEGKIVVGVKQDYKPWGYLTSDGELAGLEIDLARDVAERLGVEVELVPVVASNRMEFLSQGRIDLIIATMGDNPKRREVVGMIEPNYYAGGTNVLAPKAVGLKEWEDLRGKDVCALQGSYYNKRVTQLYGPNLVAFAGIPEVTSALKNGSCIGFLYDNTWIESQLASDEQWAEFEMPFPTEDPQAWSIAVPLEELDAPYGKLMSEIVTDWHKSGFLIERNEANGIAPSPFLQEQHDALQ

SEQ ID NO: 34316 - protein, 400 aa, Roseovarius nubinhibens ISM
MAEVFVCDYIRTPIGRYGGALAGVRTDDLAAHPLRALMARQGQLDWAAVDEVILGCANQAGEDNRNVARMAVLLSGLPESVPALTLNRLCGSGMDAVMTGARAIRAGEADLIVAGGVESMSRAPLVMPKAEAAYSRRAEIYDTTIGWRFVNPAIEAQYGIDSMPETAENVAEACGVSRADQDAFALASQERALAAQASGRFAQEIAPVSLAQRKGAAVEVERDEHPRETSLEKLASLPTPFRKGGTVTAGNASGVNDGAAALILASEAAVKRHGLTPLARIEGGASAGLAPRVMGLGPVPATERLCARLGINAQAFDLIELNEAFAAQAIAVLDQLGLDWRAEHINRNGGAIALGHPLGMSGARLVGTLARDLAAGHGRLGLASMCVGVGQGVSLVLRAV

SEQ ID NO: 34317 - protein, 400 aa, Roseovarius nubinhibens ISM
MRYSKTITGLTGGGSDGWDIYRKARRMQRDGTEVTMLTIGEHDIRTDAQILDALHRFAHAGHTGYTTFDGEPELKDRIATRLSERTGVPTTPANVLIVPGGQGGLFAAHHAICDPGDTALYIDPYYTTYPGTIRTVGAIPLAIEARPRHGFQPQPEDIARAADAAGNARSLLVNTPNNPTGVVYTRKTLEGIAEICTDKGLWLLSDEVYDTQVWNGDHLSPRALPGMAERTLVIGSMSKSHAMTGSRVGWVVGPEEAIAHMANLATHTTYGISGYIQHAAAFALDLGPAFEEQIAEPFRRRRDLVMAQMEGQNAARPIPADGAMYVMVDIRSTGLSGEAFADGLLDRHHVAVMPGESFGQAAAGHVRVALTVADDLLVAAVARLVELAAELAAQHAEPAQ

SEQ ID NO: 34318 - protein, 599 aa, Roseovarius nubinhibens ISM
MDDQNKNLILASILSLLVIIIWTVLFPAAETDLPADTVTTTASAPAGDTALTPGSAGGEVSTETTAPAEPLPESAARVAVETPSVTGSISLRGGRLDELALNNYRESLDPGAEIVTLLNPTGSASPYYALFGWAPGTGLNSDSVPGANTLWSVESGETLTPESPVTLLWENGQGLTFRREISVDAKYMFTIRQTVENTGDAAPVLAPYGIIARHGEPADLKNFFILHEGAVQMADGELNEIDYDDFEGAGNHTPLKVATNGWTGFTDHYWMTTLIPRGETGFDLSTFQDPRRNIYQTTVKQPAITLEPGQTAEATTQLFAGAKEWETIRNYQNKGGVDKFLDSIDWGWFFFLTKPIFALLHWLNQQIGNMGWSIIALTLIIKLVLLPLAYKSYVSMAKMKELQPQMEKIKERAGDDRQALQKEMMALYKKEKVNPASGCLPILLQIPIFFSLYKVIFVTLELRHAPWIGWIRDLSAPDPSSLYNLWGLLPWNAPEPGSLLALIFIGILPLLLGISMWLQQKLNPAPTDPTQKMVFAWMPWIFMFMLGSFASGLVVYWIANNTITFTQQYAIMRSQGYKPDVFGNIKSGFKRTRKTDDKK

SEQ ID NO: 34319 - protein, 300 aa, Roseovarius nubinhibens ISM
MSAYLISMGTYVGFFMILALALNLQWGIAGMVNFGIAGFYAMGAYVSGLLVAKLGVPVGLAIPAACVAGWVLGGAVALLSVRLREDFLAIVTLGVGEVIRLIVLNEDQITEGPRGLRIDGRPFGDLIGPELYPLFYLLLVAVCVLITYLVCERIRRAPMGRTLRAIREDDVVAEVLGKNVLMHRVLTFAIGGFFMGLAGALYAHYVQNISPEVFMPVVAMFIWMSVIVGGAGNNRGILIGAGTVMIFLEGTRFIGDFTDVLDAEKMSAMRIILIGFLLIVTLRLRPRGLLPEPKFNVKKT

SEQ ID NO: 34320 - protein, 68 aa, Roseovarius nubinhibens ISM
MANGTVKWFNTTKGYGFIAPDDGGKDVFVHISAVERAGLTGLADNQKVTYDLEAGRDGRESAGNIVLA

SEQ ID NO: 34321 - protein, 1508 aa, Roseovarius nubinhibens ISM
MTKFDQNWKAAEEAKRAWMAENGMYSEEEEHSSCGVGLVVSINGKPSRRVVQAGIDALKAIWHRGAVDADGKTGDGAGIHVQIPVPFFYDQIRRTGHEPHEDQLIAVGQVFLPRTDFGAQEVCRTIVETEVLRMGHTIYGWRHVPVDVKCLGEKANATRPEIEQILISNAKGIEEEDFERELYVIRRRIEKAVTAAGVRDFYIASLSCRSIIYKGMMLAEQVAVFYPDLQDERFKSAFAIYHQRYSTNTFPQWWLAQPFRMLAHNGEINTLKGNVNWMKSHEIRMASGAFGDMAEDIKPIIPGGSSDSAALDAVFEVLVRAGRSAPMAKTMLVPESWSKQAEELPQAWRDMYSYCNSVMEPWDGPAALAMTDGRWVCAGLDRNGLRPMRYVVTSDGLLIAGSEAGMVPLDERNVREKGALGPGQMLAVDMKKGLMFRDREIKDKLSQALPFSEWVSRINELDEKLAGITETPLFSGDELRRRQIAAGYTIEELEQILAPMAEDGKEAIASMGDDTPSAVLSKGYRPLSHFFRQNFSQVTNPPIDSLREYRVMSLKTRFGNLKNVLDEDSSQTEILVLDSPFVGNAQWDELQKHFNAEVGQIDCSFEPGPGALRRGLERIRAEAEDAVRSGSGHLVLTDQNVSEGRVGMPMILATSAVHSHLTRKGLRTFCSLNVRSAECIDPHYFAVLIGAGATVVNAYLAEDSIADRINRGLIDGSLTEAVARYRNAIDQGLLKIMSKMGISVISSYRGGLNFEAVGLSRAMCAEFFPGLMSRISGIGVSGIQAKLEAVHAQAYRGGDVLPIGGFYKARKTGETHAWGAQNMHLMQAACNAASYELWKRYSAAMQANPPIHIRDLMAIKPMGEAVPLEEVESVTAIRKRFVTPGMSLGALSPEAHKTLNVAMNRIGAKSDSGEGGEDPAHFTPEPNGDNPSAKIKQVASGRFGVTAEYLNHCEELEIKVAQGAKPGEGGQLPGMKVTDLIARLRHSTKGVTLISPPPHHDIYSIEDLAQLIYDLKQINPRAKVTVKLVAQSGVGTIAAGVAKAKADVILISGHNGGTGASPATSIKYAGLPWEMGLTEAHQVLAMNNLRDRVTLRTDGGLRTGRDIVMAAMMGAEEYGIGTAALIAMGCIMVRQCQSNTCPVGVCTQDEALRDKFTGNADKVVNLITFYAQEVREVLASIGARSLDEVIGRADLLTQVSRGSAHLDDLDLNPMLITVDGSAGLSLDRNRGRNEVPDTLDAEIVRDAQRFLNDGEKMQLHYAVQNTHRTVGTRVSSHIVRNFGMRNALQPNHLTVKLTGSAGQSLGAFAAPGLKLEVSGDANDYVGKGLSGGTIVVRPAMMSPLEASENTIIGNTVLYGATDGYLFAAGRAGERFGVRNSGAKVVIEGCGTNGCEYMTGGVAVILGRIGANFGAGMTGGMAYLYDPEGATELMLNRETVITCPVQEGHYMQQLEELIERHVEETGSAKAKQILQHWDVEKSKFVQVVPKEMLNKLAHPIELPEAIPAE

SEQ ID NO: 34322 - protein, 372 aa, Roseovarius nubinhibens ISM
MKIGCPTEIKPQEFRVGLTPNAAREAVENGHEVIVQAGAGIGAGFSDDDYIAAGAAIIDTAEEIFASADMIVKVKEPQAVERKMLREGQLLFTYLHLAPDPEQTKDLLASGCTAIAYETVTDRNGGLPLLAPMSEVAGRLAPQVGAYTLQKANGGRGVLMGGVPGVGPAKVVVIGGGVVGTHAARIAAGMGADVTVLDRSLPRLRYLDDVFGGTFNTGYSSAGLLAEHLTEADMVIGAVLIPGAEAPKLVRREQFATMKPGAVLVDVAIDQGGCFETSRATTHADPIYEVDGIMHYCVANMPGAVARTSTIALGNATMPFMLALANKGWKKACADDPHLLEGLNVHAGQLTYYAVGKALGIDVISPQMLVKA

SEQ ID NO: 34323 - protein, 205 aa, Roseovarius nubinhibens ISM
MTIDLQEGALDRVIRALARPMRPSSDFDLNPDVVLPEGRRLRPAGVLVPILLRPEGARVILTKRSSAMRHHPGQIACPGGKQDEGDADVVAAALREAHEEIGLDPRNAEVLGQLPAHETVTSFTVTPVVARVRDVFTPVPEAGEVAEVFEVPLDHVLDLGRYRIEARRWRGMRRRYYVAPFGPYYIWGATARFLRQLAEAVADED

SEQ ID NO: 34324 - protein, 408 aa, Roseovarius nubinhibens ISM
MSAPKKVVLAYSGGLDTSIILKWLQTEYGCEVVTFTADLGQGEELDPARKKAELLGINPDNIYIEDIREEFVRDFVFPMFRANALYEGQYLLGTSIARPLISKRLVEIAAETGADAVAHGATGKGNDQVRFELAAYALNPDIKVIAPWREWDLTSRTKLLEFAEANQIPIAKDKRGEAPFSVDANLLHTSSEGKVLENPGEEAPDYVYQRTVSPEDAPDTAEIIEIGFERGDAVSINGEAMSPATLLTRLNELGGKHGIGRLDFVENRFVGMKSRGIYETPGGTVLLEAHRGIEQITLDSGAGHLKDSLMPRYAELIYNGFWYSPEREMLQAAIDKSQEHVTGTVRIKLYKGAATCIARWSDHSLYSEAHVTFEEDAGAYDQTDAQGFIQLNALRLKLLAARKRRLGS

SEQ ID NO: 34325 - protein, 772 aa, Roseovarius nubinhibens ISM
MSWGRGADKDWETDLLEQANDMSKPKFTREEALAFHLEPTPGKFEITATVPMTTQRDLSLAYSPGVAVPCEAIAAAPETAYDYTNKGNLVAVISNGTAVLGLGNLGALGSKPVMEGKAVLFKRFADVNSIDIELDTEDPEKFIEAVRLMGPTFGGINLEDIKAPECFIIEQRLKEVMDIPVFHDDQHGTAVICAAGLINALHLSGKKIEDVKIVLNGAGAAGIACIELLKSMGARHENCIVCDTRGVIYQGRTDGMNQWKSAHAVKTELRSLEEAMVGADVFLGVSAKGAVTQEMVKSMAKDPVIFAMANPDPEITPEEAHEVRSDAIVATGRSDYPNQVNNVLGFPYLFRGALDVHARAINDEMKIACAEALARLAREDVPDEVDMAYGRKMSFGRDYIIPAPFDPRLIHTIPPAVARACMDTGAARRPIVDMEAYELTLKSRMDPTASMLRSINARARAAQARMIFAEGDDPKVLRAAVQYQRAGFGEALVVGREADVKAKLEASGLGDAVSELQIVNAANTEHLAEYKAFLYKRLQRKGHDRHDVHRLAARDRHVFASLMLAHGHGDGLVTGATRKSSHVLDLINHVFDADAEHGAVGVTAVMHKGRVVLIADTLVHEWPDETDLANIAERSAGVARHLGLEPRVAFVSFSTFGYPRSERSEKMHLAPNVLEARGVDFEFEGEMTVDVALNLQAQKSYPFQRLTGPANILVVPARHSASISVKLMQEMAGATVIGPILAGVDKSIQICSSTSTANDILNMAVLAACKVG

SEQ ID NO: 34326 - protein, 392 aa, Roseovarius nubinhibens ISM
MEDIVILGAARTAIGTFGGSLAGVAPAQLGAVATKAALARAGVAPDQVGHVVFGHVINTEPRDMYLSRIAAMEAGIPDTTPAMNVNRLCGSGAQAVVSAVQNLMLGDADFAVAGGAENMSRSPFIVPDQRWGAKMGDVRVLDMMLGALNCPFGTGHMGVTAENVAAEHGVSRADQDAFALESQRRAKAAIEAGHFDEQIVPVEVQKRRETVEFKVDEHPKPTTEEALAGLRPVFQKEGSVTAGNASGINDGAAAIVLARAGAAEAAGLAPKARVLGYAHAGVRPEVMGIGPIPAVENLLAKTGLSAGDFDLVESNEAFAAQAIAVNRGLGLDPAKVNPNGGAIALGHPVGATGAILVVKALYELERIGGKRALITMCIGGGQGIALAIERMS

SEQ ID NO: 34327 - protein, 320 aa, Roseovarius nubinhibens ISM
MMSLPPKPAEIAREVLTIEGEALLAMREALSESFDRVIELLLDVRGRVIVSGMGKSGHIAHKIAATMASTGTPAQMVHPGEASHGDLGMITAQDAVILISNSGETRELADMIAHTRRFSIPLIAITKKAESTLGQQADHVLELPDAPEACGIGMAPTTSTTCTLALGDALAVALMTQRGFERENFLDFHPGGTLGAQLLKVGSVMHKGDALPIVHEHSSMGETLIEMTAKGFGVAAVVERGILTGVITDGDLRRNLDGLMERKAGEIATRHPRSTRPDILLTEALGVMNANKISALFVVDAEGRLQGLVHIHDALRAGVA

SEQ ID NO: 34328 - protein, 504 aa, Roseovarius nubinhibens ISM
MTVNFAMNAFQLLALIVILSVLALCLLALVFFVVDKVQTGDAIRRNYPVIGRFRHLFTTLGEFFRQYFFAMDREEMPFNRAQRDWVKEAAHGHGNMVAFGSTRSLTVPGTPIFVPASFPPLSDEYTQTEPMQIGPYAAIPYTAKSIFNISGMSYGALSRPAVEALSRGAAKAGIWLNTGEGGLSPHHLTGGCDIVFQIGTAKYGVRDHLGGMDDERLREIGDNPHVRMFELKLAQGAKPGKGGILPGTKVTPEIAAIRGIPVGEPSISPNRHVEVADYAELLDMIDRIRRVTGKPVGFKTVIGSSDDWGQFFELILARGIESAPDFITVDGGDGGTGAAPMPLMDLVGMPLREALPRMVDMRDRHGLKERIRIIASGKLINPGDVAWAICAGADFVTSARGFMFSLGCIQALKCNKNTCPTGITTHDRRLQAGLVVEDKYLKVARYAAQIVAEVETIAHSVGVTEPRLMRRRHVRMVQPDGSSIPMNKIRPSINLEANPTPPKG

SEQ ID NO: 34329 - protein, 233 aa, Roseovarius nubinhibens ISM
MSDPAPHLLIVDDDERIRELLRKFLMRHGFLVSAARDAAHARRVLAGLEFDLIVMDVMMPGEDGVSLTRDLRATLATPILLLTAKGETSDRIAGLEAGADDYLAKPFEPRELLLRINAILRRMPEPEPDAVLPKILNLGAARYDIERSELLRGEELIRLTATETQLMRIFTDNLRQPVSRAKLVEDLGRDKGQAQERAVDVQITRLRRKIETDPKQPRYLQTVRGEGYMLSPD

SEQ ID NO: 34330 - protein, 460 aa, Roseovarius nubinhibens ISM
MEQELATLAATVAELQAKAAATGSIFSETFYYLTIPLMVLIHVGFLAYEMGASRSKNALASGIKNILAFAMIVPFFYYVGWWIYWAFPTGLSGAMGAMEISGFAYANEIASPTSPYMGPNLGDQASGVFWGAFVLFAATTASILSGAVIERIQLTGFIALAVVLGAFIWILAAAWGWHADGWLVTKLGYHDFGASGVVHMIAGFFALGVLINLGPRIGKFNADGSANQIAGHSMPMTLIGLMLIIAGFWGFLMGCVIVPGEAWSWSGKIETSIYGTPMTMSGMTFNVLMAFAGGIIGAWMTTRDPFWMMSGALGGIISAAAGIDLWWPPLAFVIGFIGASMMPFVASFIERMKIDDAVGAFTVHGFLGLWGVLAVGIVGSGYPALFGEADVIEISFMGQLGGAAVMALLGFVPGYAVSFVLKAMGMLRVPESAELLGLDLTKVPSSAYPESIHPSVSPAE

SEQ ID NO: 34331 - protein, 647 aa, Roseovarius nubinhibens ISM
MKKEGIENMSKVIGIDLGTTNSCVAIMDGSQARVIENSEGARTTPSIVAFTDSERLVGQPAKRQAVTNPENTVFGVKRLIGRRADDADLAKDKKNMPFNVIDGGNGDAWVEARGEKYSPSQISAFILGKMKETAESYLGEEVTQAVITVPAYFNDAQRQATKDAGKIAGLEVLRIINEPTAAALAYGLDKDETHTIAVYDLGGGTFDVTILEIDEGLFEVKSTNGDTFLGGEDFDMRIVNYLADEFKKEHGVDLTKDKMALQRLKEAAEKAKIELSSSSQTEINQPFISMGSDGQPLHMVMKLTRAKLESLVGDLIKASLKPCQAALKDAGLSASDIDEVVLVGGQTRMPKVIEEVTKFFGKEPHKGVNPDEVVAMGAAIQAGVLQGDVKDVVLLDVTPLSLGIETLGGVFTRLIDRNTTIPTNKSQIFSTAEDNQSAVTIRVFQGEREMAADNKMLGQFNLEDIPPAPRGMPQIEVTFDIDANGIVSVQAKDKGTGKEHKITIQASGGLSDEDIEKMVKDAEDNAEADKARRELVEARNQAESLINSTEKSVEEHGDKVDPTTVEAIELAIAALRDDLDKDDAAADKIKSGIQNVTEAAMKLGEAIYKASQEEAGSEPSAADEAGAGGDDDIVDADFEDLGEDKRS

SEQ ID NO: 34332 - protein, 441 aa, Roseovarius nubinhibens ISM
MTHLTKFALPAALVLLPTLASAQEADTTPLNEDIGFIFTTFMFLVSGFLVFFMAAGFAMLEAGLVRGKNVTMQLTKNMALFSLASIFYYVLGYNLMYPGDGWSIDGLLGAFSITSLEPVGLEGAEPDLTYASVGSDFFFQLMFCAATASIVSGALAERIKLWPFLAFTIVLTAVIYPIQASWKWGGGFLDAAGFQDFAGSTVVHSVGGWAALVGAIILGPRIGKYAKDGRVTPFPGSNLALATLGTFILWLGWFGFNGGSQLYMDTAGNVADISRIFSNTNTAAAAGAVAALILTQLMYNKPDLTMILNGALAGLVSITAEPLAPSLIEATLIGAVGGVIVVFTVPLLDKLKIDDVVGAIPVHLFAGIWGTIAVAFTNSDANILTQLYAIVVVGVFVSAASAVVWLLLKAIMGLRVDEEAEINGLDTTELGMEAYPEFTRS

SEQ ID NO: 34333 - protein, 606 aa, Roseovarius nubinhibens ISM
MSVKPPFTDLEIKTQDSGFYENNSLPIALVSKGIMVLLVVWALAFPANANGMLGKINGALLQYFNQFYIVIVGFFAFFLLVLAVLPATGSKLMGTEGERPEFSTFSWFSMMFGAGLGVGLMVFATAEPLGLWGSNPLVIAGEVAPNTEEALTGAYRWTFAHYGFHAWSIYVVTGLCLAYYAYTRDMPLTIRSALTPIFGSALNGFLGHVFDVLGVVATILGVSVTIGFGVSQFVDGLYAITGMEWMVSTDEVPVPTKTGLIAALLAIMFLSILSAVSGVGRGVKYLSNLNLVLSLILLATFVVFGSFAFAMTTYGSALVDYILNFASLSFNAYGPQSADAFAAALPEAARPLADQLYAGATNPWGSFAGFTGGLEGAAAELDEATLAAVYEAGNAGRQFAWQSGWTTFYWAWWIAFSPFVGLFLARISKGRTVREFIIGCVLAPALVCFAWMTILGGTAIDLELSGVAEGAITGASQTNQLFATLGQMIDGGLLQGLTVMCVVLIMTFLVTSADSGILVMNTIMSGGSQETSIRHRIVWGIILTLVIGTLILAAGENNPLDALKNAMIIGALPFTMVMGLMCISLIKALWMDNKREKYGVAEQPAE

SEQ ID NO: 34334 - protein, 400 aa, Roseovarius nubinhibens ISM
MSILSDTLARVKPSPTVAVTTLANELKAAGKDVIGLGAGEPDFDTPEHIRAAGKRAIDEGKTRYTAPDGIAELKQAICDKFKRDNGLDYTPKQVSVGTGGKQILYNALMATLNPGDEVVIPAPYWVSYPDMVLLAGGTPVVAEASLESRFKLTPDQLEAAITPKTKWFIFNSPSNPTGAGYSRDELKALTDVLLRHPHVWVMTDDMYEHLAYDGFEFCTPAEVEPALYDRTLTCNGVSKAYCMTGWRIGYAAGPEPLISAMRKIQSQSTSNPCTISQWAAVEALNGSHEFIAANNEVFKRRRNMVVERLNAIEGITCPTPEGAFYVYPSIAGLIGKVTPGGTKIADDETFAKALLEDKGVAVVFGAAFGLSPNFRVSYATSDAALAEACDRIEAFCKGLS

SEQ ID NO: 34335 - protein, 301 aa, Roseovarius nubinhibens ISM
MSTRAGFIALIGEPNAGKSTLLNRMVGAKVSIVTHKVQTTRARIRGVALEGEAQLVFVDTPGLFKPRRRLDRAMVAAAWGGASDADVVVLLIEAHRGLTEGVERILEGLGDVTRGRPVALAINKIDRVKSEELLALTEKMNTRHEFVETFMISAERGHGVDDLRKWLAEQLPEGPWLYPEDQIADLPMRMIAAEITREKLTLRLHQELPYQLTVETESWEERKDGTARIDQVIYVSRDGHKGIVLGHKGETMKAISKAAREELEEFLGRRVHLFTQVKVRPNWLDEAERYSEMGLEFKDGN

SEQ ID NO: 34336 - protein, 68 aa, Roseovarius nubinhibens ISM
MPTGTVKWFNTTKGYGFIAPDDGGKDVFVHISAVERSGLTGLADEQKVGYELQDGRDGRQMASDLTLL

SEQ ID NO: 34337 - protein, 786 aa, Roseovarius nubinhibens ISM
MSRGFAARPPASGPPRRNPQDTLPMIPPLSNALAARGYDSLTPVQEAMADPDLIGSDLLVSAQTGSGKTVAFGLAMAPTLLDEAEVFGPAAAPLALVVAPTRELAFQVMNELRWLYAETGARIASCVGGMDMRDERRTLERGAHIVVGTPGRLRDHISRGSLDMDDLRVVVLDEADEMLDLGFREDLEFMLEAAPENRRTLLFSATVPPAIARLAGQFQRDARRINTVSSTEQHADIAYQALRVAHGEGEAAIFNLLRFHDAEAAIVFANTRAAVNHLTTRLANRGFAVVSLSGELSQSERSHALQAMRDGRARICVATDVAARGIDLPNLNLVIHADLPKNTESLMHRSGRTGRAGRKGVSALIVAPRDLKKAERILKFAKITAEWTLPPSADAILEQDENRLLADPAWETPLTEAETAFAARLLAEQSPEAVVGAYLRLFRTRHAAPEELSAPEAGKAAPRRDHAEFGPATWISLSVGRKDRAEARWLLPLLLRSGNLDKANIGAIRVQDGETYVELSTPAVSGFFDALDNNTLEDGITVRQLDEMPDLGRPAPKPHRGARPAGGKPRHDGPPRGEKSWGDKPRGDKPRGDKPRGEKSWGDKPRGDKPWGDKPRSDKPRADKPRSKPRPLTETHAVEHKSPKPAPKPASKPAGKPSGKFGDKPAGKFGDKPGGKPAGKPSGKPGGKPSGKFGDKPGGKPSGKPGGKPAGKSFGKAEGKPAGKPAGKPAGKPAGKPGAKPAAKPARDGRDTSKRFTPPGGLKPGARQPRKPGSRPGGGEPPRRKG

SEQ ID NO: 34338 - protein, 328 aa, Roseovarius nubinhibens ISM
MRSQPLSVVVTRRLPERVEARLSELFGAELREGDAPLTREALIRAGREADVLVPTITDRIDAEMLDAMGDRLKLIANYGAGVDHIDVQAARQRGIMVTNTPGVSADDTADMTLALILGVARRLPEGMTTMQEGNWGGWSPSALLGARITGKKLGILGLGRIGQKVARRARAFGMEVHYHNRNRLRQETEEELGATYWESLDQMVARMDVISLHCPHTPSTFHLMNARRLKLMRPEAILVNTSRGEVVDENALTRMLRAGEIAGAGLDVYEQGSGVNPRLRALPNVMLLPHMASATREGRIEMGERVVINIKVYEDGHRPPDQVLPSHI

SEQ ID NO: 34339 - protein, 323 aa, Roseovarius nubinhibens ISM
MALEDAKTQVDQAFTRDSLRGLSAENAFGGATSFLRRRYRKDLAGVQLAITGVPFDQAVTNRPGTRLGPRAVREASTLQPFDAPYGWDGFSPLEELDIVDYGDLAFDYANVPAFPAALTAHIKGILDQGAASIAIGGDHYISFPILRAYAEKFGKLSLLHFDAHSDTWPDDDMDRVDHGTMFYKAVKSGLIDPATSVQVGIRTVNEDTLGVNTIDAREVHESGPAAVAQKIKKILGDRPTYVTFDIDALDPAYAPGTGTPVWGGLTSAQAAIMLRDIAGINMVGGDVVEVSPPYDTTGATAVAGAHVAMELICLWGWTRRKGA

SEQ ID NO: 34340 - protein, 319 aa, Roseovarius nubinhibens ISM
MSGHGYESGRLNLPFVGISTFGKSPYQPDWDAIEADVAILGAPFDFGTQWRSGARFGPRGIREASTLFSFGHGGAYDHEDDITYLPADKVRMVDLGDADIIHTDTEQSHANIEFGVRKILAAGALPVVLGGDHSINIPCINAFEGQEPIHIVQIDAHLDFVDERHGVRHGHGNPMRRAAEKPYVTGLSQIGIRNVSSTAKEGYDDARAMGSDILSVRQFRKLGVDAVLDRIPAGVRYYVTIDIDGFDPSIAPGTGTPSHGGFLYYEVLELLDGLARRGDVVGMDLVEVAPDYDHSGSTTILAAQILMNAIGRVLHHRAG

SEQ ID NO: 34341 - protein, 449 aa, Roseovarius nubinhibens ISM
MPKKPALARDVNRIGDSFIFPPRVMDDIHIKSELGRYRMRGFSLFKKIPHWDDLTFLPGTLTRFVIEGYREKCETKTVIGPRAKRPLELDIPVYITGMSFGALSYEAKTALARGATMAGTATCSGEGGMIPDERRYSSKWFYQCIQSRYGFNPNHLVLADACEFFIGQGCKVGLGGHLMGQKVTDQVAEMRSLPAGIDQRSPARHPDWLGPDDLALKIQEIREATDWQIPIQLKLGASRVYDDVRMAVKCDPDSIYIDGMEGGTGAGPHLATEDTGVPGMAAIRQARKAIDDLGKRGEISLVYAGGIRNGADVAKAIALGADAIAIGHSAMMALNCNKDIPEANFPEEIGAEPGYCYHCHTGRCPVGVATQDPKLRERLDPDAAAERVYNFLHTLTIEAQLFARACGKTYIHSLEPEDLAALTMEASAMAGVPLAGTNHTVGVEDYHHL

SEQ ID NO: 34342 - protein, 555 aa, Roseovarius nubinhibens ISM
MYSYNEFDAAFVAERNRQFRAQVERRIDGSLTEDEFKPLRLMNGLYLQLHAYMLRVAIPYGTLNSRQMRQLALLAEKWDKGYGHFTTRQNIQYNWPELRDVPDMLDALAEVEMHAIQTSGNTIRNVTADHFAGAAADEVTDPRPVAELLRQWSTDHPEFQFLPRKFKIAVTGSENDRAVIRAHDIGIQVVERDGQIGYRILVGGGLGRTPMIGKVLNDFVAQEDLLPYVEAVVSVWNLLGRRDNKYKARIKITVHEHGIDDIRARVDAAYARIRPSFGGLDLDLFEDIKSAFAAPAFSQKPTALFDTAYQTDPIFRAWADTNLAEHRAPGYAIVQISLKAHGETPGDATAEQMRVMADLAERFGHDELRISHEQNVILPHVHKSDLPEIHATLKKHGLATANIGLISDIIACPGMDYCALATARSIPVAQQIATRFDELKLEHEIGDLKIKISGCINACGHHHVGHIGILGLDRAGVENYQITLGGDGSENASLGERTGPGFAYDEIIPAIERLIAAYLQHRDNPEETFLAAYRRLGMAPFKAALYDEAQAYAAE

SEQ ID NO: 34343 - protein, 251 aa, Roseovarius nubinhibens ISM
MLEIKNLHVDLEEEDKSILKGVDLTVEAGKVHAIMGPNGSGKSTLSYVLSGRDGYEVTQGSATLDGEDLLELEPEERAAAGLFLAFQYPVEIPGVGNMTFLRTAVNAQRKARGEEEMSAADFLKVVREKAKSLKIDADMLKRPVNVGFSGGEKKRNEILQMAMLEPKMCILDETDSGLDVDAMKLVAEGVNALRDEGRGFLVITHYQRLLDHIKPDVVHIMADGRIVKTGGPELALEVENNGYAGILEEVA

SEQ ID NO: 34344 - protein, 347 aa, Roseovarius nubinhibens ISM
MTRVYLDHNATAPLRPEARAAMLAAMDLVGNPSSVHAEGRAAKSLMERARGQVAAALGAEGADVIFTSGATEAAALACAGRGLLGAGVEHDAVREWIDETLAVDAAGQVTVNEPGQSALQLANSETGVVQTLPQGLAVCDMTQGFGKLPLAFNWAGCEMALISAHKIGGPKGIGALVIKRGTDLAAQIRGGGQEMGRRSGTENLIGIAGFGAAAEAAARDLADGAWQQVEEFRNILENALVESSKETIFVGKSGPRLPNTSCFVTDGWKGETQVMALDLAGFAVSAGSACSSGKTRASHVLRCMGLSESQAGCALRVSLGPGITEDEIYRFAETWAKLRERHRARAA

SEQ ID NO: 34345 - protein, 349 aa, Roseovarius nubinhibens ISM
MKFLDLAKVYIRSGSGGNGCISFRREKFIEYGGPDGGDGGGGGSVWAEAVDGLNTLIDFRYQQHFFAKNGQQGMGNQRTGKDGDDIVLRVPAGTELLDEDQETVIADLAEVGDRVLLAKGGNGGFGNLHFKTSTNQAPRRANPGQEGVERTIWLRLKLIADVGLLGLPNAGKSTFLAATSNARPKIADYPFTTLHPNLGVVGVDGVEFVVADIPGLIDGASEGRGLGDLFLGHVERCSVLLHLVDATAENVVEDYQTIVREISAYGHVLAEKPRVTVLNKSDALGPELTQMVREELEEAIGQKVMTMSGVAGEGVTEVLRALRAEIAEDKLRQKIESEEDEGETGTWQP

SEQ ID NO: 34346 - protein, 236 aa, Roseovarius nubinhibens ISM
MNTRKGTTERGNTKEANMFAVLKTGGKQYKVQSGDVLKVEKLAADAGEKVQFNEVLMLGGDKPVLGAPLVDGAAVQAEVVDQIKGDKLIHFVKRRRKHGSQRTKGHRQQLTLLRITDILEKGAEKSGVKAAIGAGSVAGVAVAAAEKPAKKAEKKAEKKADAPKKAKAAAGGDDLKQLSGVGPALEKKLHEAGVTTFAQIAAWTEADVADMDEKLSFKGRIEREGWIEQAKEMTKG

SEQ ID NO: 34347 - protein, 447 aa, Roseovarius nubinhibens ISM
MAKDDSSAPRTEPIQSWTFSKNINAEIRRAAATGIYDIRGGGAKRRVPHFDDLLFLGASISRYPLEGYREKCDTRVTLGTRYAKKPIELDIPVTIAGMSFGALSGPAKEALGRGATLAGTSTTTGDGGMTPEERGHSKKLVYQYLPSRYGMNPDDLRKADAIEVVVGQGAKPGGGGMLLGQKISDRVAEMRNLPKGIDQRSACRHPDWTGPDDLEIKILELREITNWEKPIYVKVGGARPYYDTTLAVKAGADVVVLDGMQGGTAATQDVFIEHVGQPILACIRDAVQALQDLDMHREVQLIVSGGIRSGADVAKALALGADAVAIGTAALIALGDNDPRWEEEYQRLGTTTGAYDDWHEGRDPAGITTQDPELMARFDPIEGGRRLNNYLKVMTLEAQTLARACGKSHVHNLEPEDLVALTMEAAAMARVPLSGTDWWPGKPGTGF

SEQ ID NO: 34348 - protein, 376 aa, Roseovarius nubinhibens ISM
MSEIVQVSEAARAMRDAGHDVIALSTGEPDFPTPPHVVEAAHRAAVNGDTNYTPTGGTAKLRATVAEGAGVEPANVVISTGAKQSIANAMLATLDPGDEVVMPVPFWTSYADIVRMAGGVPVLVDCPMEAGFRLTPAQLETAITSRTRWLMLNAPSNPSGAVYSAEDYAGLAEVLERHPHVWIMADEIYEHLSFVPFVSFRETVPGLRDRTLVINGVSKAYSMTGWRVGWGIGPAPLIKAMTAVQGQVTSGGSSISQAAAVAALTGDQSLLAERNAAMKARRDRVVAALDAMPGVSCLVPDGAFYAFPNIEGAIKAGGFDEDGVFCKALLEAEALALVPGRAFGMPGHLRLSFAYADALLDEGLARMGRFVAGLGA

SEQ ID NO: 34349 - protein, 325 aa, Roseovarius nubinhibens ISM
MAGRAKILVTRAWPEAVEARLTELGAVTFRAPDTPMSAAEFIDAAGRYDAILPTVSDVIPPEFYPAAKGRLRLLASYGVGYNHIDITAARENGITVTNTPGVLTDCTADLAMGLLLAAARRIGEGERETRAGHWAGWRPTHMIGRKVSGATLGIVGFGRIGQAMSRRAHYGFGMEVVFQNRSTVDPEVARAAGNARQLASVIEVAKACDFLSLHCPGGAETAGLIGAEVLAAMKPGAILVNTARGDVVDEDALFAALERGHLGGAGLDVYRGEPALDPRFLDHDSLVLAPHLGSATEETRAAMGHRAIDNLAAFLAGAIPPDRVV

SEQ ID NO: 34350 - protein, 120 aa, Roseovarius nubinhibens ISM
MSDAKTRIDETVKSNDVVLYMKGTKEMPQCGFSSRVAGVLNYMGVNYADVNVLADEEIRQGIKEYSDWPTIPQLYVKGEFVGGCDIITEMTLSGELDTLFEENGVTYDKDAAEKIREANA

SEQ ID NO: 34351 - protein, 355 aa, Roseovarius nubinhibens ISM
MCERAGVDKGDVSETILGQVLTAGQGQNPARQAHVNAGLPIESAAWGINQVCGSGLRAVALGAQHIMLGDAKIVAAGGQENMTLSPHVAHLRAGHKMGDVKYIDSMIRDGLWDAFNGYHMGQTAENVAEKWQISREQQDEFALASQNKAEAAQKAGKFDDEIVPFTVSTRKGDIVVDKDEYIRHGATLEAMQKMRPAFTKDGSVTAANASGLNDGAAATLLMSAEEAEKRGITPLARIVSYATAGLDPAIMGVGPVNASRKALEKAGWKASDLDLVEANEAFAAQACAVNKEMGWDPEVVNVNGGAIAIGHPIGASGCRVLNTLLFEMQRRDAKKGLATLCIGGGMGVALCVERG

SEQ ID NO: 34352 - protein, 784 aa, Roseovarius nubinhibens ISM
MTDTPRDDIPRDPARQAALDYHEFPTPGKLEIRATKPMANGRDLSRAYSPGVAEACLEIKADPTTASRYTARGNLVAVVTNGSAVLGLGNIGALASKPVMEGKAVLFKKFAGIDCFDIEVNESDPEKLADIVCALEPSFGAINLEDIKAPDCFVVEKLCRERMGIPVFHDDQHGTAIVVGAAATNALHVAGKRFEDIKIVSTGGGAAGIACLNLLLKLGVKRDNIWLCDIHGLVYEGRTEDMNPQKSCFAQKTDKRTLADVMDGADLFLGLSGPNVLSPELVAKMAPKPIIFALANPTPEIMPDAARAVAPDAIIATGRSDFPNQVNNVLCFPFIFRGALDVGATEINDAMQLACVEGIAELARATTSAEAAAAYKGEQLTFGADYLIPKPFDPRLVGIVSTAVARAAMETGVATRPIEDIAAYKAKLNASVFKSALLMRPVFEAARHESRRIVFAEGEDERVLRAAQAMLEETSEQPILIGRPEVIETRCERLGLVIRPGAITVVNPENDPRYRDYWGSYHAIMQRRGVTPDLARAVMRTNTTAIAAVMVHREEADSMICGTFGEYRWHLNYVTQVLGDAHHHPHGALSLMILEDGPLFIADTHVRVFPTPEELAETAIGAARHVRRFGIEPKIAFCSQSQFGNQGSDSGKRLRAAIALLDAKPRDFCYEGEMNIDAALDADLRARLLPDNRMEGAANVLIFSNADAASGVRNILKMKAGGLEVGPILMGMGNRANIVTPGVTARGLLNMSAIAGTPVPNTAEHIKRGGRVSPKNGRSLLHTL

SEQ ID NO: 34353 - protein, 390 aa, Roseovarius nubinhibens ISM
MKDVVIAGAARTPMGGFQGAFDGVPAATLGGAAIRAALADAKAATVDELLMGCVLPAGQGQAPARQAGFAGGLGEEVPATTLNKMCGSGMKAAMMGFDQIALGHAETMIAGGMESMSNAPYMLPKMRGGARIGHGEVVDHMFLDGLEDAYDKGRLMGTFAEDCAEHYQFTREAQDAYAIGSLEGALAAQKSGAFAGEIAPVTLSSRKGDVTVSEDEQPAKARPEKIPTLRPAFREGGTVTAANSSSISDGAAALVLASRAAAEAQGLNIRARIVGHASHAQAPGWFTTAPVPAARKLLDRIGWSVSDVDLWEVNEAFAVVPMAFMHEMGLPRDVVNVNGGACALGHPIGASGARIMVTLLNALETRGLKRGVAAICIGGGEGTAIAIERD

SEQ ID NO: 34354 - protein, 531 aa, Roseovarius nubinhibens ISM
MAPKVLVSDKLSETAVQIFRDRGIDVDFLPDVGKDKDKLAEIIGQYDGLAIRSATKVTEKILDAATNLKVIGRAGIGTDNIDKDAASKKGVIVMNTPFGNMITTAEHAIAMMFAVARQLPEASASTHAGKWEKSKFMGVELTGKTLGVIGAGNIGGIVCDRARGLKMKVVAYDPFLSQEKADKMGVEKVDLDTLVARADFITLHVPLTDQTRNILSAERLAQTKKGVRIINCARGGLVDEAALAELLKSGHVAGAGFDVFSQEPATENPLFDLPNVVCTPHLGAATTEAQENVALQVAEQISDYLLTGAVSNALNMPSVTAEEAKVMGPWIKLAGHLGNFIGQMTDEPIKAINILYDGVVSQMNLEALTCSAVAGIMKSVNPEVNMVSAPVIAKERGVKISTTHQDKSGVFEGYIKLTVVTAERERSIGGTVFSDGKPRFIQIKGINIDAEIGAHMLYTTNEDEPGIIGMLGQTMGQNGVNIANFTLGRSQAGGEAIALLYVDAEVPAPVIKQLEDTGMFKQVRPLQFDVA

SEQ ID NO: 34355 - protein, 603 aa, Roseovarius nubinhibens ISM
MLFRASQPEDKPMKMTTEEAFVKTLQMHGIQHAFGIIGSAMMPISDIFGKAGITFWDCAHEGSGGMMADGYTRATGKMSMMIAQNGPGITNFVTAVKTAYWNHTPLLLVTPQAANKTMGQGGFQEVEQMAAFKDMVCYQEEVRDPTRMAEVLNRVILNAKRYSAPAQINVPRDYFTQVIDIELPKIVDFERPSGGEEALDEAAKLLSEAKFPVILNGAGVILAGAIPATAELAERLDAPVCCGYQHNDAFPGSHPLHAGPLGYNGSKAGMELISKADVVLALGTRLNPFSTLPGYGIDYWPKDAKIIQVDVKPERIGLTKPVAVGIVGDAKKVAKTILAKLSDTAGDADREERKATIAKTKSAWAQELSSMDHEQDDPGTTWNERARGAKPDWMSPRMAWRAIQAALPKEAIISSDIGNNCAIGNAYPSFEEGRKYLAPGLFGPCGYGLPAVVGAKIGCPDTPVVGFSGDGAFGIAVNELTAIGRGEWPAVTHVVFRNYQWGAEKRNSTLWFDDNFVGTELDEQVSYAGIAKACGLKGVVARTMDELTDALDQAIKDQKAGTTTLIEAMINQELGEPFRRDAMKKPVAVAGIDPADMREQQVD

SEQ ID NO: 34356 - protein, 328 aa, Roseovarius nubinhibens ISM
MLLAAPPANRATIALSEGEDPRIVEGALAAQAAGAADIILVGQGDAVRAELTRQGAEEGPGIAVHDPETSDLTDSFAKSFHALRQHKGVDEAAAARAVRAPLTYAAMLVREGHATGTVGGAVATTSDVVRTALQVIGKAPDAAMVSSFFLMYPPEGTETGRTMLYSDCGLVIDPAADELAEIAAMSARSCRALMREEPKIAMLSFSTMGSAKHDRVTKVTDALATLRARHPDLEADGELQFDAAFVPSVGTAKAPGSAVAGQANVMIFPNLDAGNIGYKLTQRLGGYAAIGPILQGLAHPANDLSRGCVAEDVTQMIAVTVLQSMAAG

SEQ ID NO: 34357 - protein, 571 aa, Roseovarius nubinhibens ISM
MTISSNLTPVPELYVSYDSAQKLKVEAADLVSWDLTPRQICDLELLMNGGFNPLKGFLSQEDYDGVVENMRLADGTLWPMPITLDVSEEFAAKLEDGQDIALRDQEGVILATMTITDNWTPNKAREAERVFGADDDAHPAVNYLHNTAGKVYLGGPVTGIQPPVHYDFRARRDTPNELRAYFRKLGWRKVVAFQTRNPLHRAHQELTFRAAKEAQANLLIHPVVGMTKPGDVDHFTRVRCYEAVLDKYPGSTTTMSLLNLAMRMAGPREAVWHGLIRRNHGCTHFIVGRDHAGPGKNSQGEDFYGPYDAQDLFREHEAEIGIEMVDFKHMVYVQERAQYEPMDEITDKDDVTVLNISGTELRRRLAEGLEIPEWFSFPEVVRELRRTRPPRSQQGFTVFFTGFSGSGKSTIANALMVKLMEMGGRPVTLLDGDIVRKNLSSELGFSKEHRDLNIRRIGYVASEITKNGGIAICAPIAPYATTRRAVREDVEQFGAFVEVHVATSLEECERRDRKGLYKLAREGKIKEFTGISDPYDVPENPELRVETENVDVDNCAHQVILKLEQMGLIAG

SEQ ID NO: 34358 - protein, 512 aa, Roseovarius nubinhibens ISM
MNTFMAVGSMVMILAFVLYTVRDVDASSEVFSAGKNFIIGSLDWFYVLVVNAALFFSVWLLFSRFGHVKLGKEEDEPDFSTFSWIAMLFSAGLGSGLIYWGVAEPMFHIQGNPFAEGAGIAAGGTDAAVKAVTVTIFHWGFHGWGLYVLAGMSLAYFAYRHDLPLTPRAALYPILKERIYGPWGHLVDLIAVFGTIFGIATSLGLGITPIAAGLERLGWLENNLTNQLILVAIITVMGTASAASGVGKGVRILSEMNVLFSLGLLLLFLILGPTAFLLGVTISGIGDYLWNVVPMGFKIIGDPENQWQSWWTIFYWGWWIAWCPFVGMFIARVSKGRTIKEFCLAVLFVPVTVVMVWMGVFGGAAAGVELFNEGAVVDAVNADYARGVFQTVAGFGYDWLTTPINFLITLLLISWFVTSSDSGTLVMCTMLSMGDENPPVRFRIFWGLSAGVVAAVLMLAGGLSALQTASIVAGLPIAVIVLLMIYGMVKTLHEEHPRPDYEDKFELEFLNR

SEQ ID NO: 34359 - protein, 317 aa, Roseovarius nubinhibens ISM
MTRVLITRRLPDTVLQEAEKHFEIELRDEAAPLKLGQMRGALALYDGILPTLGDLFSAEAFAEAENPRCKILANFGVGYNHIDAEAARAVGIAVTNTPGAVTDATADVAMTLMLMSARRAGEGERLVRSGRWTGWQPTQMLGLHLSGKTVGILGMGRIGQAIARRCHFGFGMDVLYANRSVKELDFPAEKLSPLALAARADVVVIAMPGGSETHHFVGTEFLRAMQGHAHLVNIARGNIVDEAALIRVLDEGGIAGAGLDVYEHEPEVPEALRAMENVVLLPHLGTAALEVREAMGYMAVENLRAFFAGEAPPNLVN

SEQ ID NO: 34360 - protein, 339 aa, Roseovarius nubinhibens ISM
MPQTAEPKLITGNANKPLANAVARRMSMHRGVQVGLCDARIERFNDQEIFVEVYENVRGEDMFIIQSTSNPANDNLMELLIMADALRRSSAQRITAVIPYFGYARQDRRTKARTPITAKLVANMIYGAGIERVLTMDLHATQIQGFFDIPVDNLYASPIFALDVKDQFKDCMDEVMIVSPDVGGVARARELAKRINAPLSIVDKRREKAGEVAEMTVIGDVSGKKCIIVDDICDTAGTLCKAAEVLLEHGASEVHAYITHGVMSGPAVERVSKSVMKSLVLTDTIAPSEAVRNAPNIRIVPTAPIFAQAILNIWNGTSVSSLFETDTLGPIYDGMYSAS

SEQ ID NO: 34361 - protein, 357 aa, Ocimum basilicum
MALQKVDISLSTEQLLQAQVHVWNHMYAFANSMSLKCAIQLGIPDILHKHGRPMTLSQLLQSIPINKEKTQCFQRLMRALVNSNFFIEENNSNNQEVCYWLTPASCLLLKEAPLTVTPLVQVVLDPTFTNPWHHMSEWFTHEKHATQFEAANGCTFWEKLANEPSKGRFFDEAMSCDSRLIAHVFTKDYKHVIEGIRTLVDVGGGNGTMAKAIVEAMPTIKCTVIDLPHVVAGLESTDNLNYIGGDMFQSIPSADAILLKSIIHDWDDVEGLKILKKCKDAVVMGGKVIIIDVVVGVNHDIDEVLEDQLHFDMAMMCYFNAKERTMSEWEKLIYDAGFKSYKLTPAFGVRSLIEAYP

SEQ ID NO: 34362 - protein, 755 aa, Pseudomonas anguilliseptica
MLLATDLDGTFLGGDPKDRLSLYQTIAAHPEIRLAYVTGRSLESVLPLLADPTLPQPDFIISDVGASLVHGDSLQPIQPLQSAVDALWPGDSQVASAIERFALERQDVPQVRRCSYFCNPEQAANPELLTIAESLGCDLLYSAERYLDFLPKGVNKGSSLQALIDWLELDNDQVLTAGDTLNDLSMLSGQFKGVCVGASEPGLLQATRQYSLVFHAERAGCGGILEAFVHFGFLGKQGIAAEGKQVAEPGKADLMMVYHRLPYEEFRGADGKLQRRRPTSPNGIIPTLLSFFGDGRAGSWVAWAEHDENSGETFDSHTTVDAERYPKLTAARVALSKEEVDIFYKRFSKEAFWPTLHTFWERGQFREDDWQVFLKVNRAFAERTALEAAEGATVWLHDYNLWMVPGYLRELRPDLRIAFFHHTYFPSADVFNVLPWRRQIIGSLLQCDYIGFHIPRQVENFVDAARGVMPLQTVSRQNCAPRFITYGCAVGLERMTTAVDTGNRVVKLGAHPVGLDIERVRSALAAPKIREMMERLRSELAGVKLILSVERLDYTKGILEKLNAYERLLEENPELLGKVTLVTVCVPAAKEMTIYDELQGQIEQAVGRINGRFARIGWTPLQFFFRSLPFEEVSAWYAMADVMWITPLRDGLNLVAKEFVAAQGLLDGRGVLVLSEFAGAAAELKGALLTNPHDPVDMTQTCYVALNMPKAEAQARLRELFDIVNYNDIRRWGDEFLAAVSDPQEQLDRALGLVG

SEQ ID NO: 34363 - protein, 356 aa, Ocimum basilicum
MALQNMDISLSTEQLLQAQAHVWNHMYAFANSMSLKCAIQLGIPDILHKHDHPMTLSQLLKAIPINKEKSQSFQRLMRALVNSNFFIEENSNNQEVCYWLTPASRLLLKGAPLTVAPLVQVVLDPTFTNPWHYMSEWFKHENHATQFEAANGCTFWEKLANKPSMGRFFDEAMSCDSRLVAHVLTKDYKHVIDGIRTLVDVGGGNGTMAKAIVEAVPTMKCTVLDLPHVVAGLESTDKLSYIGGDMFQSIPSADAILLKFIIHDWDDEEGLKILKRCKDAVGIGGKVIIIDVVVGVNHDVDEVLEDQLHFDMAMMSYFNAKERTMNEWEKLISAAGFTSYKLTPAFGVRSLIEAYP

SEQ ID NO: 34364 - protein, 386 aa, Helicosporidium sp. ex Simulium jonesii
MSPPTGEKYSLPPVFGTQGQITQLLDPIMAERFKDLSQHGKVMAEYVWIGGTGSDLRCKTRVLDSVPNSVEDLPVWNYDGSSTGQAPGDDSEVFLIPRAIYRDPFRGGDNILVLADTYEPPRVLPNGKVSPPVPLPTNSRHACAEAMDKAAAHEPWFGIEQEYTVLDARTKWPLGWPSNGFPGPQGPYYCAAGAGCAIGRDLIEAHLKACLFAGINVSGVNAEVMPSQWEYQVGPCTGIESGDQMWMSRYILIRCAELYNVEVSFDPKPVPGDWNGAGGHVNYSNKATRTAETGWAAIQQQVEKLGKRHAVHIAAYGEGNERRLTGKHETSSMNDFSWGVANRGASVRVGRLVPVEKCGYYEDRRPASNLDPYVVTRLLVETTLLM

SEQ ID NO: 34365 - protein, 97 aa, Vitis vinifera
RKGGWTLEEDLILINYIANHGEGVWNSLAKSAGLKRTGKSCRLRWLNYLRPDVRRGNITDEEQQLIMELHAKWGNRWSKIAKHLPGRTDNEIKNEWH

SEQ ID NO: 34366 - protein, 97 aa, Vitis vinifera
RRGAWTQEEDVLLRKCIEKYGEGKWHLVPLRAGLNRCRKSCRLRWLNYLKPDIKRGEFALDEVDLMIRLHNLLGNRWSLIAGRLPGRTANEIKNFWH

SEQ ID NO: 34367 - protein, 97 aa, Vitis vinifera
RRGAWTQEEDVLLRKCIEKYGEGKWHLVPLRAGLNRCRKSCRLRWLNYLKPDIKRGEFALDEVDLMIRLHNLLGNRWSLIAGRLPGRTANEIKNYWH

SEQ ID NO: 34368 - protein, 96 aa, Vitis vinifera
RGWWTQEEDVLLRKCIEKYGEGKWHLVPLRAGLNRCRKSCRLRWLNYLKPDIKRGEFALDEVDLMIRLHNLLGNRWSLIAGRLPGRTANEIKNYWH

SEQ ID NO: 34369 - protein, 95 aa, Vitis vinifera
GGWTLEEDLILINYIANHGEGVWNSLAKSAGLKRTGKSCRLRWLNYLRPDVRRGNITDEEQQLIMELHAKWGNRWSKIAKHLPGRTDNEIKNVWH

SEQ ID NO: 34370 - protein, 97 aa, Vitis vinifera
RKGGWTLEEDLILINYIANHGEGVWNSLAKSAGLKRTGKSCRLRWLNYLRPDVRRGNITDEEQQLIMELHAKWGNRWSKIAKHLPGRTDNEIKNFWH

SEQ ID NO: 34371 - protein, 97 aa, Vitis vinifera
RRGAWTLEEDLILINYIANHGEGVWNSLAKSAGLKRTGKSCRLRWLNYLRPDVRRGNITDEEQQLIMELHAKWGNRWSKIAKHLPGRTDNEIKNEWH

SEQ ID NO: 34372 - protein, 97 aa, Vitis vinifera
RRGGWTLEEDLILINYIANHGEGVWNSLAKSAGLKRTGKSCRLRWLNYLRPDVRRGNITDEEQQLIMELHAKWGNRWSKIAKHLPGRTDNEIKNYWH

SEQ ID NO: 34373 - protein, 97 aa, Vitis vinifera
RRGGWTLEEDLILINYIANHGEGVWNSLAKSAGLKRTGKSCRLRWLNYLRPDVRRGNITDEEQQLIMELHAKWGNRWSKIAKHLPGRTDNEIKNDWH

SEQ ID NO: 34374 - protein, 97 aa, Vitis vinifera
KRGRWTLEEDLILINYIANHGEGVWNSLAKSAGLKRTGKSCRLRWLNYQRPDVRRGNITDEEQQLIMELHAKWGNRWSKIAKHLPGRTDNEIKNYWH

SEQ ID NO: 34375 - protein, 97 aa, Vitis vinifera
KRGAWTLEEDLILINYIANHGEGVWNSLAKSAGLKRTGKSCRLRWLNYLRPDVRRGNITDEEQQLIMELHAKWGNRWSKIAKHLPGRTDNEIKNDWH

SEQ ID NO: 34376 - protein, 95 aa, Vitis vinifera
GAWTLEEDLILINYIANHGEGVWNSLAKSAGLKRTGKSCRLRWLNYLRPDVRRGNITDEEQQLIMELHAKWGNRWSKIAKHLPGRTDNEIKNYWH

SEQ ID NO: 34377 - protein, 399 aa, Ethanoligenens harbinense
MKILVINAGSSSLKYQLINVENKDVLAKGNCERIGIDGRFKHKTGDGRGFEREVALPDHRAAFRLVIEALTTGEFAVIGSTSEIDAVGHRIVHGGDKFTHSVLVTDEVLKEFQGVINFAPLHNPPALSGIEACRETLGKAVPNVMVFDTAFHQTMPPQAYIFGVPYKYYEQYRVRRYGAHGTSHRYVSLRCAELLGKKPEETKIVTCHLGNGSSISAVDAGKCVDTSMGFTPLGGIIMGTRSGDLDPSVVTLIMEKEGISPRDMENLLNKESGFIGISGISSDDRDLEEATAKGIERSKIAQDAQRYQIKKLVGAYSAAMGGLDALAFTGGIGENSSLLRAAVCENMEYLGITFDPAKNEETIRGKEGDLSLPGGEVRVYVIPTNEEYMIALDTKTLVG

SEQ ID NO: 34378 - protein, 651 aa, Trifolium pratense
MATYFHNNSEIQGGSADGLQTLIFMNPSGYINYSDTPQPPPHAGNLVFLNSAATLAGNGNTSIQQQHNLSHAPPQFVGVPLSAEQSVQAHHDISALHGFPPRMQYNMWNAADPNSAAREATRATQGLSLSLHAQGSGEDARVSAGGSCSSASNNGVSGIQSVLLNSKYLKATQELLDEVVNVNGGIKVESVKKSFEKNKVVGESSTAVSGDGGSVGGDGSGKRSTELSTTERQEVQMKKAKLINMLDEVEQRYRQYHNQMQMVISSFEQVAGIGSARTYTALALQTISKQFRCLKDAITGQIRAANKSLGEDDSFGGKIEGSRLKYVDHHLRQQRAIQQLGMMHHNAWRPQRGLPERSVSVLRAWLFEHFLHPYPKDSDKHMLAKQTGLTRSQVSNWFINARVRLWKPMVEEMYTEEMKEQEMNGSEDNKSSKHIDEDTSMKSTTPQQVPTSETESKSFNSKQDIPIVSVSTQSTSPIGVNVRNNNSGFSFTELDGITQASPKRTRNHEILQSPNHVKSNETNNNNNEQISMKFGDDRQSRDGYCFMGNQTNFIAGFGQYPMEEIGRFDAEQFTPRFSGNNNGVSLTLGLPHCDTLSGTHQSFMPNQNIQLGRRLDISEQNEFGDSSAAFESMNMQNPKRFAAQLLPDFVA

SEQ ID NO: 34379 - protein, 385 aa, Trifolium pratense
MCGGAIISDFIPAAAAVGGSRRVTADILWPNLRKTGSKKSSFLLDDDFEAGFRQFKDDSDFDEDEDEDDDEGLLVGVKGFTFAASNNKSSRNFSRGSAGAKSVASKSNEQAEKESKRKRKNQYRGIRQRPWGKWAAEIRDPRKGVRVWLGTFNTAEEAARAYDAEARRIRGKKAKVNFPDEAPNASSKRLKTNPDNQLLNKNLNSFKPNGNNKMFNFSENMENFYSPMDQVEQKPLVNNQYGAADIGAFTGNGVHLAPADVNAYFSSEHSSNSFDYSDLCWGEQGPKTPEISSVFSAPLEAEPQMNMQSNNSQDMLPMQAESAKTLSEELADIESQLKFFENSFDDNWSDASLASLLGADVTQDAGNTMNLWSFDDLPSIAGGVF

SEQ ID NO: 34380 - protein, 437 aa, Trifolium pratense
MNIKLATALTICYVIYISNINAIDPCASQPDDSDLNVIPMYGKCSPFNPPKADSWDNRVINMASKDPARMSYLSTLVAQKTATSAPIASGQTFNIGNYVVRVKIGTPGQLLFMVLDTSTDEAFVPSSGCIGCSATTFYPNVSTSFVPLDCSVPQCGQVRGLSCPATGSGACSFNQSYAGSTFSATLVQDSLRLATDVIPSYSFGSINAISGSSVPAQGLLGLGRGPLSLLSQSGAIYSGVFSYCLPSFKSYYFSGSLKLGPVGQPKSIRTTPLLHNPHRPSLYYVNLTAISVGRVYVPLPSELLAFNPSTGAGTIIDSGTVITRFVEPIYNAVRDEFRKQVTGPFSSLGAFDTCFVKNYETLAPAITLHFTDLDLKLPLENSLIHSSSGSLACLAMAAAPSNVNSVLNVIANFQQQNLRVLFDTVNNKVGIARELCN

SEQ ID NO: 34381 - protein, 692 aa, Trifolium pratense
MAASLACLFGSGLSTQTNKIILGKDVNGRHPVFSRRHSSLRRELKTILVKASLDQREHEGRRGFLKLLNVTVGLPALLGSAKAYADEQGVSSSKMSYSRFLEYLEKDRVKKVDLFDNGTIAIVEAVSPELGNRVQRVRVQLPGLSQELLKKFREKNIDFAAHNAQEESDSFFANLIGNLAFPLIVIGGLFLLSRRSSGGSGGPGGSGFPFSVGQSKAKFQMEPNTGVTFDDVAGVDEAKQDFMEVVEFLKKPERFTTIGARIPKGVLLVGPPGTGKTLLAKAIAGEAGVPFFSISGSEFVEMFVGVGASRVRDLFKKAKENAPCIVFVDEIDAVGRQRGTGIGGGNDEREQTLNQLLTEMDGFEGNTGVIVIAATNRADILDSALLRPGRFDRQVSVDVPDIRGRTEILKVHGGNKKFDADVSLEVVAMRTPGFSGADLANLLNEAAILAGRRGKVEISSKEIDDSIDRIVAGMEGTVMTDGKSKNLVAYHEVGHAICGTLTPGHDPVQKVTLVPRGQARGLTWFIPSEDPTLISKQQLFARIVGGLGGRAAEEIIFGEPEVTTGAAGDLQQITSLAKQMVVTFGMSDIGPWSLMDGSAQNGDVIMRMMARNSMSEKLAEDIDSAIKRISDEAYEIALKHIRNNREAIDKIVEVLLEKETITGDEFRVLLSEFVEIPPENVVSPSTPSPVAV

SEQ ID NO: 34382 - protein, 402 aa, Trifolium pratense
IQKNALSRGVDVVVGTPGRLIDLINGRSLQLSEIQYLVLDEADQMLAVGFEEDVESILETIPSQRQIMLFSATMPGWVKKLSRKHLNNPKTIDLVGDREEKLAEGIKLYAVPATSISKRRILSGLISAYGKGGKTIVFTRTKRDADEISYSLTSSIASKALHGDISQYQRERTLDGFRQGRFTVLVATDVASRGLDIPNVDLIIHYELPDGPETFVHRSGRTGRAGKEGAAVVMFTASQKRTVISLERDVGSRFEFIRPPPMEDLPELPTRQVVSTLGRDRSNQRGYRTGGDDWSSGGRRSGGDDWSSGGRRSGGDDWSSGGRRPGGDDWSTEGRRSNGYSSSNRSSSPNRYSSSNRSSSSNGYSSSNRSSPPNRGNYRGPCFNCGQSGHRALDCPNKEDLF

SEQ ID NO: 34383 - protein, 558 aa, Trifolium pratense
MGCHGSKEAKKSAAEHSRHRHQSSAAAGGAATGGTNFQYQIVQPSSSHVQTSPPPKPKPESHSHSHSHASTVTTTTTSNPKPSASENVRTVQKPDTTILGKPFEDIKKFYTLGKELGRGQFGITYFCTENSTGLNYACKSILKRKLVSKADREDIKREIQILQHLSGQPNIVEFKGAYEDRFSVHLVMELCAGGELFDRIIAQGHYSERAAASICRAVVNVVHICHFMGVLHRDLKPENFLLSSKDEGAALKATDFGLSVFIEEGKVYRDMVGSAYYVAPEVLRRNYGKEIDIWSAGIILYILLSGVPPFWAETEKGIFNAILEGELDFVSEPWPSISDSAKDLVRKMLTQDPKKRITSTQVLEHPWMREGGEASDKPIDSAVLSRMKQFRAMNKFKKLALKVMAENLSEEEIKGLKAMFANMDTDGSGTITYEELKSGLARIGSRLSEPEVKQLMEAADVDGNGSIDYLEFISATMHRHRLERDEHLYKAFQYFDKDNSGHITREELETAMTKHGMGDEATIKEIISEVDTDNDGRINYEEFCAMMRSGMPHQAQLF

SEQ ID NO: 34384 - protein, 702 aa, Trifolium pratense
MGTGPPLGTSSSACLVGNALSTHSNRISLGKDLNGRYIFSSWRFSSLNNKASKPFSIKASLDQTQQEGRRGILKLLLGNVGVGLPALLGNGKAYAADEQGVSSSRMSYSRFLEYLDKDRVTKVDVYENGTIAIVEAVSPELGNRLQRVRVQLPGLSQELLQKLREKNIDFAAHNAQEDSGSFLFNLIGNLAFPLAVIGVLFLLSRRSGGMGGPGGPGFPLAFGQSKAKFQMEPNTGVTFDDVAGVDEAKQDFMEVVEFLKKPERFTSVGARIPKGVLLVGPPGTGKTLLAKAIAGEAGVPFFSISGSEFVEMFVGIGASRVRDLFKKAKENAPCIVFVDEIDAVGRQRGTGIGGGNDEREQTLNQLLTEMDGFEGNTGVIVVAATNRADILDSALLRPGRFDRQVSVDVPDVRGRTEILKVHANNKKFDSDVSLEIVAMRTPGFSGADLANLLNEAAILAGRRGKSGISSKEIDDSIDRIVAGMEGTLMTDGKSKSLVAYHEVGHAICGTLTPGHDAVQKVTLIPRGQARGLTWFIPSDDPTLISKQQLFARIVGGLGGRAAEEIIFGEPEVTTGAGGDLQQITGIARQMVVTFGMSDIGPWSLMDSSAQSGDVIMRMMARNSMSEKLAEDIDTAVKRLSDEAYEIALEQIRNNREAIDKIVEVLLEKETLSGDEFRALLSEFTEIPVENRVPPATPLPVPV

SEQ ID NO: 34385 - protein, 458 aa, Trifolium pratense
MDQQNKQSFQNPKHIIFDKYEMGKVLGQGNFAKVYHCRSLSTNESVATKVIKKEKLRKERLVKQIKREVSVMRLVRHPHIVDLKEVMATKGKIFLVMEYVKGGELFAKVAKGKLKEDVARKYFQQLISAVDFCHSRGVTHRDLKPENLLLDENEDLKVSDFGLSALPEQHREDGMLLTPCGTPAYVAPEVLKKKGYDGSKADLWSCGVILYALVCGYLPFQGENVMRIYKKAFKGEYEFPEWISPQAKILISNLLVADPKKRYSIVDIMNDPWFRIGFVRPIAFSMNGSSIEDNDKDINIDFNEVGEDNVDVPELIMVKPSRPFYNAFEIISSLSHGFDLRNLFETRKKLPSMFISKFSASTVLEKLEVMAKKLNFRMTGKKEFVVRFEGTKDGRKGKVAVTMEVFGVAPDVAVVEFSKCGGDTLEYVKLCDEQLRPSLKDIVWSWQGDDNHNDNNSQ

SEQ ID NO: 34386 - protein, 297 aa, Trifolium pratense
GLTHNSEVVMAVSLSLQLPFLSSPTTKPHTRRKFACVAAAAAKSEIPLLQVNDLRAKIVESNVEILRGVNLTINRGEIHAIMGKNGSGKSTFAKVLVGHPDYEVTGGSVVFKGENLLELEPEERALEGLFMSFQSPVAIPGVSNDQFLLMAYNARRKKLGLPELGPLEGFSYLIEKLQLVNMKPDFLNRNVNEGFSGGERKRNEILQLAVLGADLAILDEIDSGLDVDALRDVASAVNKILTPENSLLMITHYRRILDLLKPSHVHVMDNGKIARTGDLSMVDAIEADGYELVSALT

SEQ ID NO: 34387 - protein, 401 aa, Arthrospira platensis
MYSPTGTGVAMRTGAAGRIFVFEVEGMRQGQNTDNFNYPIRRSGTVYLTVPYERMNQEMRRLSKMGAKIVNIYPAGETPPVRTQAAPENGQQSQSSGTQTPTMTQAKAKTDIPVNIYKPKNPYIGKCLSNEELVREGGTGTVRHLIFDISGGDLRYLEGQSIGIIPPGTDNNGKPHKLRLYSIASTRHGDHVDDKTVSLCVRQLEYKHPETGETVYGVCSTYLCNLEAGADVAITGPVGKEMLLPEDEDATIIMMATGTGIAPFRAFLWRIFKEQHEDYKFKGLAWLFFGIPYSPNILYQQELEELQQQFPENFRLTLAISREQQNPEGGKMYIQDRIKENADQLWELIQKPNTHTYICGLKGMEGGIDEGMSAAAGKFDVDWSDYQKQLKKKHRWHVETY

SEQ ID NO: 34388 - protein, 512 aa, Medicago truncatula
MEPVQLLELPSWVTLFATFVILLLFSRRLRRHKYNLPPGPKPWPIIGNLNLIGSLPHQSLHGLTQKYGPIMHLYFGSKPVIVGATVELAKSFLKTHDATLAGRPKLSAGKYTTYNYSDITWSQYGPYWRQARRMCLLELFSAKRLESYEYIRKQEMHDFLHKLFNSKNKTILVKDHLSTLSLNVISRMVLGKKYLEKTDNAVISPDEFKKMLDELFLLNGILNIGDFIPWIHFLDLQGYVKRMKTLSKKFDRFMEHVLEEHIERRKNVKDYVAKDMVDVLLQLAEDPNLEVKLERHGVKAFTQDLIAGGTESSAVTVEWAISELVRKPEIFKKATEELDRVIGKDRWVEEKDIANLPYVYAIAKETMRLHPVAPFLVPREAREDCKVDGYDIPKGTIVLVNTWTIARDSEVWENPYEFMPERFLGKDIDVKGHDFELLPFGAGRRMCPGYPLGIKVIQTSLANLLHGFNWTLPNNVKKEDLNMEEIFGLSTPKKIPLEIVVEPRLADHLYSL

SEQ ID NO: 34389 - protein, 522 aa, Clitoria ternatea
FLLREIGVSILIFMITHLVIRLVLKEKEQRKLPPGPKGWPIVGALPLMGSMPHVTLSEMAKKYGPVMYLKMGTNNMAVASTPSAARAFLKTLDLNFSNRPPNAGATHLAYDAQDMVFADYGSRWKLLRKLSNLHMLGGKALEEWSQVREIEMGHMLRAMYDCSGGGDGNNDNDGNKKKGTRHEPIVVAEMLTYAMANMIGQVILSRRVFETKGSESNEFKDMVVQLMTVAGYFNIGDFIPFLARFDLQGIERGMKTLHNKFDVLLTTMIHEHVASAHKRKGKPDFLDVLMAHHTNESHELSLTNIKALLLNLFTAGTDTSSSIIEWALAEMLINPKIMKKVHEEMDKVIGKDRRLKESDIENLPYLQAICKETYRKHPSTPLNLPRISSQACQVNGYYIPKNTRLSVNIWAIGRDPNVWENPLEFNPERFMGANKTIDPRGNDFELIPFGAGRRICAGTRMGIVLVQYILGTLVHSFDWKLPNGVVELNMEETFGLALQKKIPLSALITPRLPPTAYNVINS

SEQ ID NO: 34390 - protein, 465 aa, Verbena x hybrida
MAALSRVYGPLMHLKMGFVHVVVAASAGAAEQFLKVNDANFSNRPPNAGAKYVAYNYQDLVFAPYGPRWRLLRKICALHLFSAKALEDFRTVRQEEVGILTRALASAGQTPASLGQMLNVCATNAIARVMLGRRVVGHSSGGGDEKAEEFKEMVVELMKLAGVFNIGDFIPPLERFDLQGVTANMKKLHKRFDAFLGAIVEDHKINSLGRSGEPHVDLLSTLISLKDEDDGEEGKINDTEIKALLLNLFSAGTDTTSSTVEWAIAELMRHPKILAQAQQELDSVVGQNRVVSESDLTQLPFLQAIVKETFRLHPSTPLSLPRIAEKSCEINGYFIPKGSTLLVNVWAIARDPNVWADPLEFRPERFMPGGEKPNVDVKGNDFELIPFGAGRRICAGMSLGIRMVQLLTANLIHGFDFELGNGLSAQQLSMEEAYGLTLQRAEPLVVHPKPRLAPHVYQSSVASVG

SEQ ID NO: 34391 - protein, 663 aa, Lactuca sativa
MANCNVFCSSINPTATLHSKTHLPIEFLHSIHSKHHQFRSGSSSSSSLFKKLGVSSNVKAVLAESPPQAAERGGEKKKNVRVLVAGGGIGGLVFALAAKRKGFEVVVFERDLSAIRGEGQYRGPIQIQSNALAALEAIDFGVADEVMKAGCITGQRINGLVDGVSGNWYCKFDTFTPAVERGLPVTRVISRMTLQKILADAVGEEIILNGSNVVDFEDDGEKVSVTLESGERFEGDLLVGADGIWSKVRKNLFGPKDVTYSGYTCYTGIADFIPPDIDTVGYRVFLGHKQYFVSSDVGGGKMQWYAFHNEPAGGSDKPNGKKERLLEIFGGWCDNVVDLLLATDEEAILRRDIFDRTPKFTWGRGRVTLLGDSVHAMQPNLGQGGCMAIEDSYQLALELDKAWSRSIESGARVDIATSLRRYEDARRLRVAVIHGLARMAAIMASTYKAYLGVGLGPLSFLTNFRIPHPGRVGGRFFITIGMPLMLSWVLGGNGANLEGRPQQCRLTDKANDELQNWFRDDDAIERILGGEWFLLPVGSQNVGSDPISLSRDEKKPCIVGSVPHTSIPGNSIVISSPEISKLHARISCKDGAFFVTDLRSEHGTYITDNEDRRYRVPPNFPARFHPSDVLEFGPNKKVAFRVKVMREPPKMSKEGENRILQTV

SEQ ID NO: 34392 - protein, 408 aa, Desulfococcus multivorans
MIHEYRKTLKNYAIGLLWLLGLLWPLLGIHPDGTLSFDRTFTTWLYIAAGSFLCLLIYILNKSGLLRPVGNALSAPREKASRLIGAVPVWVWIGALLAAACLYPLFTGRYAQDVATNVLIYICLGLGLNIVVGLAGMLDLGYIAFYGVGAYTYALLNLHYGLSFWICLPIAAALACIAGCIIGYPTLRMRGDYLAIVTLGFGEIVRIILNNWMTLTNGPNGLLGIKPPSIYVPSFEAGFSFELLYIKKLQYLYYIALGLAILTITAVRRLNHSRIGRAWESIREDETAAELMGVNTFILKLLAYAMGALFAGLAGAFFCARMRFVSPESFTFIESAMVLSMVVLGGMASIPGIMLGAAALIVLPEVFREFETYRMLAFGLAMVVMMLFRPAGLIPAKRMGTRSEDREG

SEQ ID NO: 34393 - protein, 640 aa, Alopecurus myosuroides
MATATATSTAVAFSGAAAVALPKPTLPRYLPASRRALAARIRCSAVSPSPAPPATALRPWGPSEPRKGADILVEALERCGVSDVFAYPGGASMEIHQALTRSPAITNHLFRHEQGEAFAASGYARASGRVGVCVATSGPGATNLVSALADALLDSIPMVAITGQVPRRMIGTDAFQETPIVEVTRSITKHNYLVLDVEDIPRVIQEAFFLASSGRPGPVLVDIPKDIQQQMAVPVWDAPMSLPGYIARLPKPPATELLEQVLRLVGESRRPILYVGGGCSASGEELRRFVELTGIPVTTTLMGLGNFPSDDPLSLRMLGMHGTVYANYAVDRADLLLAFGVRFDDRVTGKIEAFASRSKIVHIDIDPAEIGKNKQPHVSICADVKIALQGLNTLLLNESKTRKCSDFSSWHEELDQQKREFPLGYKTFGEAIPPQYAIKVLDELTNGDAIIATGVGQHQMWAAQYYTYKRPRQWLSSSGLGAMGFGLPAAAGAAVANPGVTVVDIDGDGSFLMNIQELALIRIENLPVKVMILNNQHLGMVVQWEDRFYKANRAHTYLGNPENESEIYPDFVTIAKGFNVPAVRVTKKSEVRAAIKKMLETPGPYLLDIIVPHQEHVLPMIPSGGAFKDIIMEGDGRISY

SEQ ID NO: 34394 - protein, 411 aa, Salvia miltiorrhiza
MELQNPAQEIDAPTTITIKGILGLLMSSTDPKESGKRVISLGIGDPTAYSCFHASNAAQEGVVEALRSTKFNGYAPTAGLPQTREAIAEYLSRDLPYKLPADSVYVTAGCTQAIEIALSVLARPGANILLPRPCFPIYGLCASFRNIEVRYFDLHPEQGWEVDLDAVADLADHNTVAMVIINPGNPCGNVYSYQHLKKIAETAKRLGIVVIADEVYGHLAFGANPFVPMGIFGSIAPVVTLGSLSKRWLVPGWRLGWLVINDPDGSLMSPKFVERIKKYCDICGGPATFIQAAVPEIVEQTQEVFFRKTINILKQTSDICYQKIEDINGITCPTKPKGAMAFMVKLNLSRMKDISDDIDFCFKLAKEESVIILPGLAVGLKNWIRITFAVDVPALEEAMERLKSFCERHSY

SEQ ID NO: 34395 - protein, 382 aa, Cinnamomum camphora
MATTSLASAFCSMKAVMLARDGRGMKPRSSDLQLRAGNAQTSLKMINGTKFSYTESLKKLPDWSMLFAVITTIFSAAEKQWTNLEWKPKPNPPQLLDDHFGPHGLVFRRTFAIRSYEVGPDRSTSIVAVMNHLQEAALNHAKSVGILGDGFGTTLEMSKRDLIWVVKRTHVAVERYPAWGDTVEVECWVGASGNNGRRHDFLVRDCKTGEILTRCTSLSVMMNTRTRRLSKIPEEVRGEIGPAFIDNVAVKDEEIKKPQKLNDSTADYIQGGLTPRWNDLDINQHVNNIKYVDWILETVPDSIFESHHISSFTIEYRRECTMDSVLQSLTTVSGGSSEAGLVCEHLLQLEGGSEVLRAKTEWRPKLTDSFRGISVIPAESSV

SEQ ID NO: 34396 - protein, 382 aa, Umbellularia californica
MATTSLASAFCSMKAVMLARDGRGMKPRSSDLQLRAGNAPTSLKMINGTKFSYTESLKRLPDWSMLFAVITTIFSAAEKQWTNLEWKPKPKLPQLLDDHFGLHGLVFRRTFAIRSYEVGPDRSTSILAVMNHMQEATLNHAKSVGILGDGFGTTLEMSKRDLMWVVRRTHVAVERYPTWGDTVEVECWIGASGNNGMRRDFLVRDCKTGEILTRCTSLSVLMNTRTRRLSTIPDEVRGEIGPAFIDNVAVKDDEIKKLQKLNDSTADYIQGGLTPRWNDLDVNQHVNNLKYVAWVFETVPDSIFESHHISSFTLEYRRECTRDSVLRSLTTVSGGSSEAGLVCDHLLQLEGGSEVLRARTEWRPKLTDSFRGISVIPAEPRV

SEQ ID NO: 34397 - protein, 460 aa, Parvularcula bermudensis HTCC2503
MTENDTDQSPKTTPTFSELGLDTKILEALTESGYTHPTPIQADAIPEALRGRDVLGIAQTGTGKTASFVLPVIHRLARGRARARMPRSLILAPTRELAAQVSEQFEKYGKNHKLSMALLIGGVSFADQDAKLTRGVDVLIATPGRLLDHHERGKLLLTGLEVMVVDEADRMLDMGFIPDLERIFKLTPFTRQTLFFSATMPPEIQRLTDQFLSAPARIEVAKPATTAKTITQRIARLPSGEDKLKRAALRHLVETAENLKNGIIFCNRKKNVDVIAKSLQEHGFDARPIHGDLPQSFRTETLQMFRDGGLKLLVASDVAARGLDIPDVSHVFNFSVPINADDYVHRIGRTGRAGRLGHAVMLVTPDDGKAFDAVLKVTGLDKIEEHDISALLDDWNGAARPPEKGRNNRRGGPNKKEASSSRPTSNKGRDRRDDRHDDGPADPVVGFGDHTPDFLLKEMS

SEQ ID NO: 34398 - protein, 111 aa, Parvularcula bermudensis HTCC2503
MTASAREEIDSAIKSNDIMLFMKGTPQFPQCGFSSAVVQILDYLGADYGSMNVLEDQEIRQGIKDYSDWPTIPQLYVKGEFVGGCDIIREMFEQGELRPFLAEKGLITAEA

SEQ ID NO: 34399 - protein, 376 aa, Parvularcula bermudensis HTCC2503
MAVTQKARDLQAAGRDVLTLSMGELDFETPAPVKEAAIAAIAAGETRYTAVDGTPALKAAITEKYRRDHDFLLSPEEIVATTGGKFLIYAALRATLEPGDEVIIPSPYWVSYPGIVRMCGAVPVILATQAGQGFLPDPQTLKATMTPKTRWILLNFPNNPSGATLPLEHAAALAEVIEAHPRALVLSDDIYELIRFDASPPGPLFAKMKGMRERTLTVNGVSKSHAMTGWRLGFGAGPAPLMAAIRRVAGQTTSNPCSISQAAAVAALGMEPSFLTDWRTALRTRRDLVVRTLNRIEGISCLSPSGAFYVFPDINGVVKRKGLADDTAFCTALLDEEALALVPGSAFGAPGFVRLSFAAADSVLEEAMGRLKRFCA

SEQ ID NO: 34400 - protein, 407 aa, Parvularcula bermudensis HTCC2503
MGCSQLRNEKDITMTSNAVYIVSATRTPIGTFGGTLAPLAAADLGKIVITEALSRASVAPDRVNEVIMGNVLTAAQGQNPARQASIHAGIPKECPAMTINQVCGSGLRAAMLAAQIISAGDGDVVVAGGQESMSQAPHAQTLRTGQKMGPISLVDTMIVDGLWDAFNDYHMGQTAENLAERYQISREDQDAFAASSQQKAAAAQQAGRFDDEIVAVTVPGRKGDTTLEQDEFIRPGTTAEKLGGLKPAFKRDGGTVTAGNASGLNDGAAALVLMSEAALKESGATPLARVASLAHCGVDPAFMGIGPAPASRRALDKAGWSIDDLDLIEANEAFAAQSLSVGKELGWDAEKVNVNGGAIALGHPIGASGARILTTLLHELKRRGGGKGLATLCIGGGMGVALCVEVA

SEQ ID NO: 34401 - protein, 527 aa, Parvularcula bermudensis HTCC2503
MKRVLISDKLSEDAVEVLKTRGIEVTFEPGLGKDPEKLKAALPGHHGIAIRSATKMTAEMIEAGTDLKVIGRAGIGVDNVDIDAATATGIAVMNTPFGNATTTAEHAIAMMLSLARQIPQANESTHQGKWEKSRFMGREITGKTLGLIGCGNIGSIVADRAQGLHMKVVAFDPFLTEARAIDLGVERVELDDLLKRADFITLHTPLTDQTRNILSKQALAKTKKGVRIINCARGGLVDEEALYDGLESGHIAGAALDVFEKEPATEHKLFGRDDVICTPHLGAATTEAQENVAIQIAEQIADYLLTGAVTNALNMPSVSAEEAPKLRPYIDLAGRLGGLAGQLAPGAVTGVEMAFAGTAASLNPAPMTAAALTAVLRPAMREAVNSVNAGQLAKQRGIQVSETRTETSPNFGSTVSVKLTTDKGELSVTGALFGGEPRAVRIGNVRLESNFAPHMLYVQNKDKPGFIGNLGKLLSSKDINIATFNLGRAAPGGTAYALLAVDQPLDDDTLKALSDLPQIDEARMLSF

SEQ ID NO: 34402 - protein, 399 aa, Parvularcula bermudensis HTCC2503
MREAVIVSFARTPIGKAYRGAFNNTGATELAGHALKHAVDRAKIDPERIEDVVMGEAMQYNTGGFNLGRNAALRAGLPMSVPGQTMDRQCGSGMMAIATAAKQIIADNMDVCAAGGAESISTNQGPKMPTVMPNPWLLEHIPQTYMTMIETAEIVSDRYDIKRELQDEYGYQSQQRTAAAQEAGYFDDEIVPMSSVMIRKDKETGETSQQEVTLEKDEGNRPQTTLEGLNGLSPVFKGGQRVKEGSYITAGNASQLSDGAAAVVLMERKAAEQAGLEPLGAYRGMAVAGTDPDEMGIGPVFAIPKLLEKNGLSIDDIGLWELNEAFACQVVYCRDKLGIPNDRLNVDGGAISVGHPYGMSGARMVGHALLAGKRLGAKYIVSTMCVGGGQGAAGLFEVY

SEQ ID NO: 34403 - protein, 502 aa, Parvularcula bermudensis HTCC2503
MRRRPFLSALPYGVVIVIAGAALVWPAVLSRVLRQVSDGFLRNFDWFTLTLTATALVFCALAALHPKLAHRRLGGPAAVPEFRLVTWFAMLFAAGMGAGLVFWGAAEPLIFTKAPPPGGAVANTERATVEALALTQFHWSLHAWGVYAAAAIAVSVSLRPGEPPVPSAPFRRPGLRIFVDWLAVIAVLFGLVASVGQGVIQMGAGVERLSGGVVGDGTMTRLAVLMAVSAAYLLSVARGLRGGIALLSNINLAVAVALALFVLIVGPSRDILNTLIDGLTAYLEALPRLSLDLRPEGQARQWTRDWSITYFLWWIAWTPFVGVFIARVSYGRSLRAFALAVVLVPAIVTLLWFSIFGGTALALDHAGIDLRTTDFRSAPFATYRVLENLPLASITTVLTFVLVFIFILTSADSASLVLAMFAKRDPNPPLKERLFWGLMIAVLTAGAVLSEAGQSVTRAFAVAGAVPLSFLLLAQMLVAAWNRFGTPPATEKKGGNKTPVGR

SEQ ID NO: 34404 - protein, 589 aa, Parvularcula bermudensis HTCC2503
MVSRARRRQYLPILSWIGGYRGDTFAKDALAAVIVTIMLIPQSLAYALLAGLPPQVGLYASILPLVAYAVFGTSRSLAVGPVAVVSLLTATAVGQVAEQGTAGYLAAAILLALLSGAFLTAMGLFRLGFVANFLSHPVISGFITASGLIIAASQVKHILGVEAHGETLFRLVSALFHQLADTNIPTLMIGVMAIAFLFWVRRGLAPCLKKVGMKATTASMLAKAGPVLAIVVTIALTAIFRLDQQGVAIVGDIEGSLPPVAVPSVDLNLLRSLVGPAILISIIGFVESISVAQTLAAKRRQRIDPDQELIALGAANIASGLSSGYPVTGGFARSAVNFDAGAETPAAGAYTALGISLAALYLTPLLTFLPKATLAATIIVAVLSLVDIRAVGETMRYSKADGASMLATIIFTLGFGIETGVVAGVLLSLSLYLLKTSRPHMAIVGLVPGTEHFRNVDRHDVVTDDKVITLRVDESLYFANARGLEDIVYDLVADNPTLEHFVLMCPAVNSIDASALESLEAMNARLKDSGVTFHLSEVKGPVMDRLKRSHLLADLTGEVFLSQFAALSTLTPALVDGARDGAHPQAAAR

SEQ ID NO: 34405 - protein, 623 aa, Parvularcula bermudensis HTCC2503
MTLPTDTSGLPAPLSRALTAKGYDSLTEVQSAMLDEGVSGRDLLVSAQTGSGKTVAFGLAMGPDLMRGQARLPRGGVPLALVVAPTRELAMQVAREITWLYAETGATVATCVGGMDLRRERQALDRGAHIVVGTPGRLVDHISRDALDLSALRVAILDEADEMLKLGFRQELEAILDACAEDRRTLMFSATVGGGIGKLAAQYQRDALRISASGPARSHDDIAYKAMVTSQHDAEKAIINTLRFHEAENAIVFCGTRAAVARLTSRLANRGFSVVSLSGELSQQERTNALQAMRDGRARVCVATDVAARGIDLPGLELVIHADLPKDREGLLHRSGRTGRAGRKGTSVLVVPPRARRRVEQLFRDAKVDADWIAPPSAEAVLARDDARLLSDPILNEGGEADSLAQTLAEAYSAEHLAGAFIRLHRQNRSAPEEISELAVVPPGVKKGRTETTDGAWVMLSVGRAHRAEPRWLLPMLCKSAPVPKGSIGAIRVRETETYVQLDKEGAADFLNSLGTVGYLEDGIEVRRTDGPPDKEGPREAAVPVTRPRKGRTQRDGQSRSTESFDPLAPTPGQETGDSPRFKRKSRAKGKPSEGSGKPGGPKPRQTGPGGGKPLKRPKKRSS

SEQ ID NO: 34406 - protein, 640 aa, Parvularcula bermudensis HTCC2503
MAKVIGIDLGTTNSCVAVMEGADAKVIENAEGNRTTPSVVAFNDSGERLIGQPAVRQAVTNPSNTFYAIKRLIGRQFDDPTVKKDQGMVPYAIVKGDNGDAWVEAQGEKYAPSQISAFVLQKMKETAEAYLGETVTQAVITVPAYFNDAQRQATKDAGKIAGLEVLRIINEPTAAALAYGLDKQDGKTIAVYDLGGGTFDISVLEIGDGVFEVKATNGDTFLGGEDFDLRIVDHLADEFKKENGIDLRQDKLALQRLREEAEKAKKELSSAAQYEVNLPYITADASGPKHLNLKLTRAKFESLVEDLVKRTIDPCKAALKDAGISPSDIDEVVLVGGMTRMPKIQETVKSFFGKEPHKGVNPDEVVAKGAAIQAGVLQGDVKDVLLLDVTPLSLGIETLGGVFTRLIDRNTTIPTKKSQVFSTAEDNQSAVTIRVFQGEREMAADNKMLGQFDLVGIPPAPRGVPQIEVTFDIDANGIVNVSAKDKATGKEQSIRIQASGGLSDADIEQMVKDAEANAEADKARRETVEARNQAEGLVHSTEASLKEHGDKIGADEKKAIEEAIADARTTLEKDDATAEDISAKVQALASASMKLGEAIYGQGGDSDAEAQAAADAAADAAQDAEIVDADYEEVDGEEKK

SEQ ID NO: 34407 - protein, 783 aa, Parvularcula bermudensis HTCC2503
MTDDTTTKFTDAEALDFHSRGKPGKLEIMPTKPMATQRDLSLAYSPGVAVPVKKIAEDPESAYDLTTKGNMVAVISNGTAILGLGNLGALASKPVMEGKSVLFKRFADIDSVDLEIDTEDPEEFINAVKYLGPSFGGINLEDISAPESFYIEQRLKELMDIPVFHDDQHGTAIISAAGLINALDIVGKRIDEVKVAVSGAGSSALSVVGLIKAMGIKHENVILCDRQGTLYEGRTERMDQWRSAHAVPTDKRTLAEVMDGADVAIGLSAGGAFTKEMVKSMAKNPIIFAMANPTPEITPEEVAEVRGDAIMATGRSDYPNQVNNVLGFPYIFRGALDVRARTINEEMKIACAKALAELAREDVPDEVALAYGKRLQFGPGYIIPTPFDPRLLSKIPPAVAKAACETGVARRPLDDVAAYEGRLATRLDPSASFLQKIHANVKASETPKRIVFAEGEEEVIIRAAYAFQQQGLGQAILIGRDDLVNREFNRLGLSQTHNIEIWNARHSANGPAYTQYLYNRLQRDGYLERDCRRLVNQDRNVFAACMLALGHADGMVTGITRHYSAALNNVQLALDSRPSERVIGMSVLLARGRTVFMADTTIADLPQPEELADIAIQSAHAVRQMGFTPRVAFVSHSNFGNPNTEGVNRIAAAVRLLDESDQMADFEYEGEMTPRMALDHNRLKALYPFARLTGPANLLICPGLHSGGIASKLMAEIGGATVLGPLLIGLSRPVQILQTGAQSGDIVTMAAIAAYELDRDHRVWAEGSSGADQLRKTSRLLPL

SEQ ID NO: 34408 - protein, 556 aa, Parvularcula bermudensis HTCC2503
MYQYDKIDRQVVQARVDEFRDQVARRIDGQLTEDQFKPLRLMNGLYLQLHAYMLRVAIPYGTLSSDQLRALGRLAREYDRGYGHVTTRQNMQFNWIRLADMPDILQLLADHDMHGIQTSGNCIRNTTCDPFAGATSDEIEDPRVWCEIIRQWSTFHPEFSFLPRKFKIAVSAASSDRAAVQVHDIGLYLHRNEAGESGFRVLAGGGLGRTPYIGSVIRDFLPKEQLLGYLEAILRVYNLHGRRDNIYKARIKILVNALGEDEFRRQVEEEWTALLAEGPGGSVDLPEAERARIAAFFTGPSLVPDPDGQAHLDAASAEDGVLKRFVRNNLSAHKVEGYGIVTVSLKPVGSPPGDITSAQMSALADLADEYGCGEIRTTHEQNLVLPYIRLRDVPSLHGALVDIGLGTANAGQITDIIACPGLDYCNLANTRSIPLANRIQERFADPERGEIIGGLKIKISGCINACGHHHVGHIGILGVDKKGEEFYQVTLGGTADEQAAIGSIVGKGLSADEVVDAVDRVVETYLSIRSAAEESFIDVYRRVGDTPFKEALYAEA

SEQ ID NO: 34409 - protein, 208 aa, Parvularcula bermudensis HTCC2503
MPKGLADAGSCRAAATIILTRAPLRRTRATLLDRQEVGTEKGMPGLLSGQRKADSMYAVVKTGGKQFRVTPDDVIKVEKLDGQAGDIIQLETVLMLGGEGEAEIGAPTVSGASIAAEILEQGRDKKITVFKKRRRQNYRRKKGHRQPMTVLRVREILTGGASPSVTASTPKAKDPIDPAATPPRGATDNPVGAFTEDNVAEATETKDD

SEQ ID NO: 34410 - protein, 352 aa, Parvularcula bermudensis HTCC2503
MKFLDRTKIYIMSGGGGNGCVSFRREKFIEFGGPDGGDGGRGGHVIAEAVDNLNTLIDFRYQQHYKANRGENGAGRNRTGAGADDLIIKVPTGTEIYEEDEETLIADLKNTGDRVLLAKGGNGGFGNTHFKTSTNQAPRHANKGQLPEERTLWLRLKLIADIGLVGLPNAGKSTFLAAVSAAKPKIADYPFTTLHPQLGVVRLGPNRSFTLADIPGLIEGAHEGAGIGHRFLGHVERCAGLLHLIDGTEGDIVGAYRTIREELSAYSADLAARPEILALNKIDALDEDVREEKRAALAQVTGTTPFLVSGATGEGLSPLLEAMGALTAQRRAAAQERERLRDAAPDEEGWRP

SEQ ID NO: 34411 - protein, 424 aa, Parvularcula bermudensis HTCC2503
MKPKLLTTLPTTTRASLTADILAGITVALVALPLSIAIAIASGAAPETGLVTAIVAGFLISALGGSRVQIGGPTGAFIVVVAGVIAVHGYDGLVLATFMAGGILLIASVLRIGSLVEWVPEPVVDGFTVGIAIIIATSQLVDALGLTIQHVPAEFLAKLPVIWAARETLSLPALSITLLTSVLIISLRRLAPRLPGLIIAVALASIVAGGMNGIVQTPVETIVSRFGALASGLPAPHLPSFSMERVREMLPSALVIAFLAGIESLLSAVVADRMIGGKHRPNAEILAQGAANLGSALFGGLPATGAIARTATNVRSGGRTPIAGITHAVILLLIALFAAPIVGRLAMPALAALLILTAWNMSEPHRWPARLSKSRSDFALFALTLALTVLTDLTVAIAVGTGVGLALRLRRRNVSPTDWPTPKR

SEQ ID NO: 34412 - protein, 550 aa, Parvularcula bermudensis HTCC2503
MKASDLLVKCLENEGLKYIFGVPGEENADFMISLEGSSITFVMTRHEQGAAFMAEAYGRLTGEPAGCLSTLGPGATNLITGVADSNMDRAPMIVLTGQGATGRQHKESHQVMDVVRMFDPVTKWAHQIVDADTIPEIVRKAFRLAKEEKPGAVLIELPEDVAKRDATTAPLNVIRVRRPSIDDKTADYLYDELIKAKRPVILAGNGAIRRRASKQLRQFCEATGIGCLSTFMAKGAVDRHAPYSLFTLGLGSRDFVADAIDGADLVLVIGYDMVEYHPKLWNPWADKKVVHIDFIPAEVDRFYAPCLECVGDIAHTLWALNERIKTRGLPTYDLGYQANVRQRMIADFEAHKDDVGEGPIRPQKALWDLREVMGPEDVVLSGVGAHKMWTARYYQCDEPNTCLIPNGFCSMGQPLPGAVGARLSLPPERKIFGVVGDGDFMMNVQELETARRLNADINLMVWVDDGYGLIAWKQENEFHKHTDLSFGNPDWMKLAEAFDWHGQWVERPEDLKAALMAALNHQGPSFVALPIDYRENRKLTERLGEIEVQL

SEQ ID NO: 34413 - protein, 69 aa, Parvularcula bermudensis HTCC2503
MATGTVKFFNTQKGFGFIQPEDGSSDVFVHATALERSGLAPLNEGDKVTFETARDKRSGKMAVSTIQMA

SEQ ID NO: 34414 - protein, 531 aa, Parvularcula bermudensis HTCC2503
MQENDETSNDEIIGEADNPYETDYELGQDNVRFWGFDLHNPVFFVSAALILLFVSVTLLFQDSASSVLLGARDWVLSTLDWFFVSTINIVLLLAIAIGLSPLGKIRLGGEEAQPEFSLLSWLAMLFSAGMGIGMVFYGAAEPLAYYTDWSGTPYDVTPGTPEAERLAFSATLFHWGLAPWSVYAIVGLSLAFFTFNKGLPLTIRSAFYPLLGERIWGWPGHVIDLLAVIATIFGLATSLGLGAQQATQGLEILFGLENTTQTQIFFILGITSIAIISVVRGLEGGIRLLSNTNIIAAIGLLIFVIAAGPTLEILSAILINTRNYIVDMPKLSSPVGRGNIEWYRSWTIFYWAWWISWSPFVGMFIARVSRGRTIRQFLTAVLVVPTLAAICWFTAFGKIAINQTQANVGELADGVTEVSTVLFDMLALLPFGMLASGLAVALLIVFFVTSSDSGSLVIDSITAGGKLHAPVAQRIFWATMEGLIAIVLLVGGGATALGALQAGAVTAGLPFTFILLACSASLIVGLMRETP

SEQ ID NO: 34415 - protein, 638 aa, Parvularcula bermudensis HTCC2503
MQGRNWMVWGVMVAVAVTLLYVFSNANPGANPQAISYSDFRNQVESGGVAMAEIEENKVSGVLQNSQRFVTNVPESADVAELLYEAGVPVTVNAPEQMPWVLAAIIQLLPILLIVGLLFMAVRQMQAGSGRAMGFGKSKAKLLTERHGRVTFDDVAGIDEAKEELEEIVEYLRDPMKFQRLGGKIPKGALLVGPPGTGKTLLARAIAGEANVPFFTISGSDFVEMFVGVGASRVRDMFEQAKKNAPCIIFIDEIDAVGRSRGAGLGGGNDEREQTLNQLLVEMDGFEANEGIILIAATNRPDVLDPALLRPGRFDRQVVVPNPDLVGREKILGVHIKKVPLGPDVNVRTIARGTPGFSGADLANLVNEAALLAARRGKRMVTWKEFEDAKDKIMMGAERRSTVMTEDEKALTAYHEAGHAIVALNVPKTDPVHKATIIPRGRALGMVMQLPERDRFSMSKIEMESRIAILMGGRVAEELKFGKENVTSGASSDIEHATKIAKAMVTQYGLSDELGPIAYAEDEGEVFLGQSIARSNSISPETARKIEHEIKRIIDEGYQSARRILGVDNHDDWIKLSEGLLEYETLTGEEIRRLLKGEKIVRDEPTDLGPPPSSVPTSGPGHQATPDGPLSGPEPQGA

SEQ ID NO: 34416 - protein, 324 aa, Parvularcula bermudensis HTCC2503
MTEQLVPTRAGIVTVLGAPNAGKSTFVNQMVGAKVSIVTHKVQTTRTRIRGIAMAERTQMVFVDTPGIFVPRRTLDRAMVAAAWEGTDGADVTLLLVDAPAYLAMVNEDTADPASRRSAEDTDGIVARLKEAGQKAVLVLNKIDRMPRPPLLLLAETLNQEGVFTDTFMISAKKDLGTEGLRQFLIERMPEGPYLYPEDQLSDITDRLMAAEITREKLFLRLHQELPYSLTVETEEWGRTGKGELRIGQTIYVERDGQKALVLGQKGKTIAAVGKAAREDLAEMLGETVHLFLFVKVRENWTDDPARFREIGLEKPGRQTPRNG

SEQ ID NO: 34417 - protein, 327 aa, Parvularcula bermudensis HTCC2503
MPTNVSASDTIATGRAVLTTEANALHTLGEQLDDAFAAAVRHLTATSGFTVVTGVGKSGHIGRKMAATFASTGTPSFFVHPTEASHGDLGMLDPKGVLIAISNSGETRELRDILLYANRRHVPLIAMTARPDSFLAKRAEVTLLLPRTPEACPNGLAPTSSTTMTLALGDALAVAAMTARGFSKEDFGARHPGGRLGMQLQRIEEYLGLQAGRTIPTLPSAAPLTDVLQKISEGRVGAVAVVDAAGLLEGIVTDGDVRRGIMGYTDVQSLTAADLMSRSPITIAPHQRVSSAVEIFETRAISQILVIAEGQPIGVVHIKDLMADGYL

SEQ ID NO: 34418 - protein, 217 aa, Parvularcula bermudensis HTCC2503
MKIFIDTADTGELKEAFATGLVDGVTTNPSLIAKSGRDFKEVTAAICEMTEGPVSAEVASTEAATMVKEGRILADIAQNVVVKLPLTWDGLKACQDLSEDGINTNVTLCFTPNQAWLAAKAGATYISPFVGRLDDLGADGMELIGDIRALYDAQGYETEILAASIRGPHHVSQAALLGADVATIPPKVFWQLLNHPLTDRGLDAFVKDWASTGQSIL

SEQ ID NO: 34419 - protein, 314 aa, Parvularcula bermudensis HTCC2503
MKILAGNATPDLAEAIGKTLDVPLAQALVKSFNDGEVRVEIGENVRGEDVFVVQSTSEPANKHLMELLIMIDALSRASASRITAVIPYFGYARQDRKAGPRTPISAKLVANLITTAGADRVLTVDLHAGQLQGFFDIPTDNLYAVTVMEDEIRQTFGPDLSDLCVVSPDVGGVVRARTLARRLGDVDLAIVDKRRLAPGEAEVMNIIGEVDGRHCIMFDDIVDSGGTLVNAADALTKQGAASVSAYVSHGVLSGEAVARINKATNLHRLVVTDSIGNQARKAQSEKIKTISVARLLAEAIRRIANEESVSSLFE

SEQ ID NO: 34420 - protein, 118 aa, Parvularcula bermudensis HTCC2503
MLLTLLKAKIHGATLTMTDLHYEGSIAIDEDLLEASGILPYEQVDIWNVTNGARLSTYAMAGQRGSGQLLLNGAAARLAHVGDRVIISAFAQFEADEVERHRPSIVLVNPDNSVKSIL

SEQ ID NO: 34421 - protein, 386 aa, Parvularcula bermudensis HTCC2503
MDDRLYLDHNATSPLRPQVRDVMLDVLSSGPCNPSSTHSEGRAAKARLSNARTTLGEVLSAPIEGIVFTGGGTEAVGLAIHSAIRGAAGVKRIFLGATEHDAVRSTAHAYRDQGAVEIEDVPVLPTGQIDTDWLARRLDSYEADTDGPFLLCVMLANNETGVINEIGQLGPLIWPKGGYLFVDAVQGFGKLPIDFTACGADFMAICGHKIGGPVGAGALLLKPGLECVAVHRGGGQESYRRAGTEAVAAIAGLAKAAELASPLDYRGLAVSRDAIEKRLPKGVTIWGRSAPRLGNTSCFSAPGFWSETQVMVMDLDGIAVSAGSACSSGKVRRSGVLAAMGASDDLAGCAIRVSFGWSTPEGAADRFVRQWTQHYERVVGSSTAAA

SEQ ID NO: 34422 - protein, 250 aa, Parvularcula bermudensis HTCC2503
MPLLKIDDLHLSIEGNEILQGLSLEVPAGEVHAIMGPNGSGKSTLSYAVAGRPGYAPLSGEVTLNGESLLGLTPEERAAKGIFLSFQNPVAIPGVATMNFLRTALNAQRAARGEEEMSAAEFLKVFREKAALVGLSPDKLKRPFNDGFSGGEKKRMEMLQMALFAPRFAIMDETDSGLDIDALKMVGDVVNTLRGPDRGFLVITHYQRLLDHVKPDVIHVLSQGRIVKTGGPELAAQLEAEGYDQFTEAA

SEQ ID NO: 34423 - protein, 390 aa, Parvularcula bermudensis HTCC2503
MKIAVLASSRDPRVGASPESVKKLLALGADVAIESGAGVAAGFSDAVYQEAGAETGSAKDVLNGADAVFVTAPPEKAQLKQFASGAKLIGLLNPWDEQESLSDYATAGIDAFAMELLPRITRAQSMDVLSSQANLAGYKAVVDAAAAYDRAFPMMMTAAGTVPPAKVFVMGAGVAGLQAIATAKRLGAVVSATDVRAAAKEQVESLGGSFIFAKEAMEEGEGTGGYAKELTPEQRQKQQELVAEHLKKMDIVITTALIPGRPAPKTLTREMVEAMKAGSVIVDLAAPRGGNVEGGEDAETYTLGPATVLAPKNILAGLPGEASNLYARNLFNFVTLLTDKEEKRLAVDWDDDIVKGVALTRDGQIIHEQFGGNALDDTPAEVEIVESEES

SEQ ID NO: 34424 - protein, 402 aa, Parvularcula bermudensis HTCC2503
MSQKVVLAFSGGLDTSYCVLALKKAGYEVITYFVDTAGPGSAEASPEEVAARAKELGAVDHHNIEASQRLWDGIVVPLIQAGEWRQGRYPLLCADRYLIVEAGIELAKSVGAGAIAHGCTGMGNDQVRFDRSARALSDLEVLAPIRDIPASVGNVRDYERGVLEDAGFAVPASQKRYTINQNLLGTTFSGGEIDEWKKPDEAARSLTAAPADWPRSAHSAVIAFDQGKAISLNGQVLSGPELLSRLNHDFGAYGVGFGTYTGDTLPGLKGRIAFEAPGLVVLEAAHRALEHAVLTAEQNAFKPVAAAKWADLVYDGGYFDPLRAEIEAFISATQARVHGAVTVETHGGRVDAVEVDSPMILKSDTAVYAQRAGWSGEEAQGFTKLSGQSSALWSEVGRKVTS

SEQ ID NO: 34425 - protein, 464 aa, Parvularcula bermudensis HTCC2503
MSLGRLVSRYSVALVLPALTLSSVAVAQDATPDTSAALDTQFILNSFLFLFGGVLVMFMAAGFCMLEVGLVRTKNAAEICLKNMVLYALAGIAYYVIGYNLMYNGVESFVGSLGIWSPSELASDETISIDTGYAATSDWFFQMVFVATAASVVSGAVAERVKVFPFLIFVLVLTAIIYPIQGAWSWGGGFLSQSGFSDFAGSTIVHSVGGWAALTGVIILGPRAGKFVNGRINAIPGSSLPLATLGTFILWLGWFGFNGASQLAMGTVTDVVAISQIFANTNMAAAGGVTAALITTKLVYKKVDLTFVLNGALAGLVSITAEPLTPNIGEAILIGATGAVIVTFAVPMLDKFRLDDVVGAIPVHLVAGIFGTLVVPLTNSDAQFHTQLLGVAAVAAWVIPTSAIVWGVLKVTLGIRLSPEHESLGGDLSELGLEAYPEFGRGSIGPLESAEGAAVRMAKSSSKA

SEQ ID NO: 34426 - protein, 1487 aa, Parvularcula bermudensis HTCC2503
MTQQPPFGFYDPRDEHDACGVGLVAAIDGTPRREVVTRAVAALKAVWHRGAVASDGKTGDGAGLRIDVAQNFFREQVERSGHSAKDLDVCVGMIFLPRTDFAAQDRARAIVETHILNFGFRLFGWRQAPVEPGVIGAKANAARPEIEQILFFDPKGRDADELERTLYIVRRRIEKQALTERLPDFYVCSLSPRDIIYKGMFLAGDIDSFYLDLQDDRFVSSFAIFHQRYSTNTFPEWRLAQPFRMLAHNGEINTVRGNIAWMKAHEAKMAGAAFGDYGEDIKPVIQPASSDSAALDAAFELLVRAGRSAPMAKALLVPEAWSKRESVLGPEIRALYEYCNAVMEPWDGPAALCAFDGRWAIAGLDRNGLRPLRYARTTDGLLAVGSESGMCPLDGKEVIERGAVPAGGMICADLKEGKFYGIQESLDRLVEAHPYTDWLKEVTDLDPLIGPGPEDRLFDSETLNRRQLAAGYSQEDLELILKPMVMEAKEAIGSMGDDTPLAVLSSQYRPLSHFFRQRFSQVTNPPIDPLREGRVMSLKTRFKNLGNILAQDETQSDVYVLEGPILTNGMYDRLCERLDPVVIDCTYTEAKGDGRALSACVDRIRKEACDAVRSGASHIVLSDENQGPSRLPLPMILAAGGVHRRLIDEGLRSDCSFTVRSSEAIDSHYAAVLIGVGATCVSPYLAFETIADRLEAGKYRNVTLSEAVLAYKTAIENGLLKILSKMGVSVLSAYRGGCNFETLGLSRPLIAEFFPDASSRISGMGFVGLEQSMMRLHDSAWPREDEGSVKRLPVGSFYRVRTGGEAHAYEASSIKDLQIAVRENDQDAYRRFSTHLQKQSPIQLRDLLDFTKSGKPIPLESVESVNSIRQRFVTPGMSLGALSPEAHGVLNVAMNRIGAKSVSGEGGEDPKRYTPMPNGDNMNSAVKQVASGRFGVTAEYLNQCREIEIKVAQGAKPGEGGQLPGFKVNAYIASLRHSTEGVTLISPPPHHDIYSIEDLAQLIYDLKQIAPKARVCVKLVSSAGVGTIAAGVAKAKADAILISGNVGGTGASPQTSIKFAGSPWELGLAEANQILTLNDLREDVTLRTDGGLRTGRDIVIAAMLGAEEYGIGTLSLVAMGCLMVRQCHSNTCPVGVCTQDEALRKKFVGTADQVVNLMTFIADEVREILASLGVACLDDIIGRTDLLAQVGRGSPLLDDLDLNPLLVRATGGVPPRSDRTKRNEVAPTLDENIVKDAGAVWERREKMQLTYTVRNTHRAVGTRTSHHIVKHFGELPDGHLTVRLRGSAGQSLGAFGAKGLRIEVEGDSNDYVGKGLSGAHIVVRGFKDEPSGSVLIGNTCLYGATDGRLFVAGKAGERFAVRNSGAVAVVEGVGSNGCEYMTGGTVVILGEIGDNFAAGMTGGKAFVYDEHDLFVGRTNPEHVTWRALGDHEKACRTLIEQHLLETGSPKARDLLSNWDQVMPKFRFVLPKSLADKLDHQEVSAVSA

SEQ ID NO: 34427 - protein, 69 aa, Parvularcula bermudensis HTCC2503
MATGTVKWFNAEKGFGFIKPDEGGQDVFVHISAVQEAGLKGLDDNQRVSYEMVQDRRGRSSAGELKLMS

SEQ ID NO: 34428 - protein, 447 aa, Parvularcula bermudensis HTCC2503
MSEDDYKQGSLTLAGTVAMGTGVMIGAGIFALTGQVAEFAGDLFPLAFLTAAIISGFSAYSYIKVSNKYPSAGGIAMILQRAYGPSTVTGSAALLMAFSMIINESLVARTFGTYTLQLFGVEGGIFVPLLAIGLIILAFVINIAGNQVIGGVSKVTAILKIGGILIFALIAIWAAGFSFQPAADGFADSASAGGFLAGVALAILAYKGFTTITNSGDEVKQPTRNVGRAIMISLAICTFIYLLVCFAVGSTLTVSEIVAAKDYALAEAARPALGNYGLWFTVTIAIIATASGLLASLFAVSRMLAMLTDMNLIPHRHFGMPGTVQRHTLVYTVVAAGLLAAFFDLSRIASLGAIFYLVMDIIIHWGVFRHLRKDVGAAPAILICAIALDAVVLIAFLLLKWQADPVIILIAAFGMVVVFSFEHFFLKRLRDNPPGEESGNDQHKAHS

SEQ ID NO: 34429 - protein, 429 aa, Parvularcula bermudensis HTCC2503
MREEASAAAALTTRRDDRLVMKFGGTSVKSIDRIERVARHVMAGRAAGYKVCVNVSAMAGETDRLVDLATSAFGNKAARMAEYDTVVSTGEQVTAGLLSLVLQRHGIAARSWLGWQLPFQTDARHGAATIHEIDTSSLGDSLEAGEVAVVAGFQGIDEEGRITTLGRGGSDTSAVALAIALNAGRCDIYTDVDGVYTSDPRIVPSARRLDQISYEEMLEMASLGAKVLQTRSVGLAMRYGVPLRVLSSLGEPGESKVFTQIMSEQEIMERRVVSAVVPSRSEARVDLLGVPDKPGVSAMIFTALAAAKVNIDMIIQSQSRDSASVNLSFTLKEQDLSIAQSVLAERKSDIGYTEILADQNVAKVSIIGVGMNDRSGVAAQMFETLSSRGINILNISTSEIKISVLVSSEYTELAVRALHDSFGLRQSSA

SEQ ID NO: 34430 - protein, 221 aa, Parvularcula bermudensis HTCC2503
MALDSAGVPSIADRLRRLCEAEAARAERHLFRELNPDRLHSPQLSSPPKRFRPASVLIPIIEREGRHTVLLTVRSPTMPSHAGEISFPGGGQRQEESVIETALREAEEEVGLTPDAVDVVGTFAIHYGGLGYAVTPVVGLVTAPPPIIPCPREVDEAFEVPLDHFIDPSSHQVTERQFKDVVYRMYAAPYEGAGPRRNVWGLTAGILHTFMRAWHDRPIGS

SEQ ID NO: 34431 - protein, 634 aa, Parvularcula bermudensis HTCC2503
MCGIAGIVDLVGEREIPESPLDRMVKALAHRGPDGGGVYRVPGLAFGHRRLAIVDPDQAAQPYIGSEGSVLTYNGEIYNHGELRGDLDRARRPIKTRSDTEILCELMELRGEDALPSLDGMFAFAHWTPRTETLLLVRDRIGEKPLYLAQTPDNFLIFASEIDAILESGLISAEINPTAVADYLLYGYVPDPKTIYRGIGKLPPGHLLKIARGQPIAPAKPWWTLTFKPDDGCLYEAVVEELPLLLDRCVSAQMMSDVPIGAFLSGGLDSGAVTASMQKAATAPVTTCAMGFADPDFDERAAARETATHLCTNHFDWEAPLSPVEDVPRLAAIYGEPFADSSALPTAHLCAGARRHATVALSGDGGDEVFAGYDRYGGILNEARLRQAIPGVVRRSIVTKAGNAFPAFTDRVPKPLRLRTVLQSVGEDHAAAYARAVSAVLPDLSRTLLSEELRDYRPEHHVEEAVYKADTDDPILSAQAADFATWLPGRMLVKIDRASMAVGLEVRPPLLDHRLVEWAARLPRRIKYSEGKGKVILREAIGDRLPKGVSTRAKKGFGSPVDHWFRDQDGSLSRHLLDRTAWRECGFFDQSAVEDLVARHCAGRRNAGQALWSILMFDAFLIRKPSDRTSIASY

SEQ ID NO: 34432 - protein, 443 aa, Parvularcula bermudensis HTCC2503
MVNARLSRILATASVASVAIAPAVAQDGAPAPDTVFIFNTLLFLIMGMVVMFMSAGFCMLEAGSVRSKNVAAICLKNISLYAIAGLMVWLCGYNLIYGGEAGGYIGSLAVWSADDSAPLDVGYSASSDWFFQMVFVATAASIVSGTLAERIRVWPFFIFTAVLTGFIYPIQASWQWGGGWLSELGFSDFAGSTLVHATGGWAALAGALALGARTGRFTSDGSPVAFYGSSMPLATLGTFILWLGWFGFNGGSQLAMGSISDAVAVSDIFVHTNMAAAAGVVTVLILSTLLLGKINLPMVLNGAIGGLVSITAEPLIPAPLLGTPILTAVIVGSVGGVIVFLTMPLLESLKIDDVVGAIPAHLFCGIWGTLIVPFSNTDISIGAQATGVAANAIFVFGTSLVLWFLLRFTIGIRSSEAEEEIGLDLAETGAPGYDFVPVNVPAE

SEQ ID NO: 34433 - protein, 589 aa, Parvularcula bermudensis HTCC2503
MDRNVIIALVLSTLLLFGYEALVLGPKRAAYLEAQEKAQAIAAEQMDPADAGETFLPGTERSLSREQALAEGTARLPIETPTLSGSVNLEGLLFDDLILKTYRATLAADSPPIVLLSPRTATTPQFMRAGLSIGGVSDRTARWQAPEGAVLTPKTPVIVTRQEGDIQYRATLAVDEQFMFRVTYEVTNGSGETVVAQPYGAAYQRGIPADLQNFMILFEGPIGVVDHRLMDRKYKKLLSGGGIEDRGSGGWVGITDKYWLSAAIPPQDTPFKAELDVTDGAIPLFRASYLLETQSIAPGATIRTEAYLYGGSKEVEVLRMYQDQLGIDRFVWAVDWGHFSFLTRPIFGILAFFEGLTGNWGVAILLLTLVIKAVLFPLANMSYKSMAGMKKVQPELMKIRERYTDDKTKQQQEMMALYKKHKINPAAGCLPVLAQMPIFYALYKTLFVTIELRHEPFLYIPDLSEQDPTSVFNLFGLLPFDPTTVPLIGSFLGIGILPLLMGAAMFVQLKLNPPPPDPTQRMIFGLMPLIFMFIFAPFAAGLVLYWFWNTFLSVIQQYIIMKRQGADVDILGNIKQSFGKAPQANDNKA

SEQ ID NO: 34434 - protein, 511 aa, Parvularcula bermudensis HTCC2503
MSTKSKSDLVILYHRQPYEEVVENGQTTFKENKSPNGIVPTLKGFCASADKGTWVAWKQVAPKQQSKFQRRVTIEDDYGDYDVVRLPLSADQVKSFYHVTSKEAFWPVLHSFPWLFSSENSNWDTFREVNRLFAEAACEEVSDDGLIWIHDYNLWLAPYYIRKIKPDTKIAFFHHTPFPSADIFNVLPWREEIVDSLLCTDLLGFHIPRYAENFCGVARALRGVDLADRLDVFPPLVSSGMALSEPTVTPYIEHKGRRIVIDSRPIGTNPPLIQDYLSRFDAGERVAEIRSEIGDLHLIISVGRVDYTKGAKETLEAFDRLLSRRPELTGKVKLMMVCAAAAQGMTIYRTAQREIERLVGSINGKYGTLGWTPIMLTMRPIPFEELVSYFRVADTCWITPVRDGLNLVAKEYIAAKEGSSGALVLSEFAGVAVELPQAILTNPYSANDMDAAIDCAIDMSVEERKERMKALYETVTTWDIRFWAQHVTGLFDELRGKKSTKATTGAAEDAA

SEQ ID NO: 34435 - protein, 413 aa, Parvularcula bermudensis HTCC2503
MAKNTMTIGFIPLSDAAPLVLAKEEGLFDAFDIDVTLSKEHSWARVRDKLAIGDLDAAHMLSPMVIASALKLEPGCEPFATALGLNLNGNGITVSNSLYEEMLDVQPDTPNMQPVPAEALRTIAARRLHRGKSPITLAMVYPFSTHNYLLRYWLAASGLHPDRDVRLIVAPPPDMARLCEAESIDGFCVGEPWNSVAVHRGVGRRILAGAEVWAAAPEKVLGVRRSWLAENEEVYLRLVRAVLRALKRLGTEEGRQAAIRYLAREPYLGIGEDDIAPSFATGPAPVMASTFDPSVAGYPWHSKAHWLAMQMIRWGQITRPVDVASAVRESYRADLFGNVAREEGIPTPGSPHIIEGAHADDWVLGSGSSAISMPVDRFIDGSQFDSAAPLPYLEQFTRHSLRFPLTEMTDRAE

SEQ ID NO: 34436 - protein, 440 aa, Parvularcula bermudensis HTCC2503
MAKDQSYEQGSLSLWGTIAMGTGVMIGAGIFALTGQVAELSGDLFPLAFLFAAAISGFSAYSYIKVASAYPSAGGIAMILKKAYGQTTVTGAAALLMAFSMIINESLVARTFGSYALRPFGVADDSVLIPVLAVGLVVFAFVVNVANNKWIGGISQIAAILKIGGILVFGIVAMAAAGFSFEPYENGLANDTGAFGFLAGTALAILAFKGFTTITNSGDEVKNPEKNVGRAIIISLAICAIVYLVVAFGVASTLSVKEIVAAKDYALAEAARPAVGSLGVGFTVAVALIATASGILASVFAVSRMLTMLTEMKLIPHRHFGMSGPIHRHLLVYTVVLAGTLAAFFDLTRIAALGAIFYLVMDIIIHWGLLRHLREDVGAKGWVVITAITLDTVALLAFVVMKAQQDRLVVAIALVGIALTFVGERIFLQQSQGDEAGAAR

SEQ ID NO: 34437 - protein, 240 aa, Triticum aestivum
MAPRTSDKTATPPAAGAAATGLALGVGGGGNGGGVGPHYRGVRKRPWGRYAAEIRDPAKKSRVWLGTYDTAEEAARAYDAAAREYRGNKAKTNFPFASASAPPAAAALTGDGSRSSNSSTVESFGGDVQAPMQAMPLPPSLELDLFHRAATSTAGAGAGAGMRFPFSGYPVSHPYYFFGQAAAAAAGGCHMYSQAPKVTVASVSPSDSDSSSVVDLAPSPPSRKPVPFDLDLNCPPPAEL

SEQ ID NO: 34438 - protein, 236 aa, Triticum aestivum
MAPRTSDKTATPPAAGAAATGLALGVGGGNGGGVGPHYRGVRKRPWGRYAAEIRDPAKKSRVWLGTYDTAEEAARAYDAAAREYRGNKAKTNFPFATASAPPAAAAALTVDGSRSSNSSTVESFGGDVQAPMQAMPLPPSLDLDLFHRAATSTAGAGMRFPFSGYPVSHPYYFFGQAAAAAAAGCHMYSQAPKVTVASVSPSDSDSSSVVDLAPSPPARKPVPFELDLNCPPPAEL

SEQ ID NO: 34439 - protein, 236 aa, Triticum aestivum
MAPRTSDKTATPPAAGAAATGLALGVGGGNGGGVGTHYRGVRKRPWGRYAAEIRDPAKKSRVWLGTYDTAEEAARAYDAAAREYRGNKAKTNFPFASASAPPAAAAALTGDGSRSSNSSTVESFGGDVQAPMQAMPLPPSLELDLFHRAATSTAGAGMRFPFSGYPVSHPYYFFGQAAAAAAAGCHMYSQAPKVTVASVSPSDSDSSSVVDLAPSPPTRKPVPFDLDLNCPPPAEL

SEQ ID NO: 34440 - protein, 246 aa, Triticum aestivum
MAPRAAEKAPVSPPTGLGLGLGGGVGVVAGGAHYRGVRKRPWGRYAAEIRDPAKKSRVWLGTYDTAEEAARAYDTAAREFRGAKAKTNFPFPSSSSSSPVAGAGGGGSPSSDSTLDSSGGGSGGCAQAPMQAIPLPPALDLDLFHRAAAVTAVAGGGMRFPFNGYPVAPRQPMHPYFFYEQAAAAAAAASGYRALKVAQPVTVAAVARSDSDSSSVVDLSPSPPAVTAHKAVAFDLDLNRPPPSED

SEQ ID NO: 34441 - protein, 246 aa, Triticum aestivum
MAPRAAEKAPVSPPTGLGLGVGGGIGVVAGGAHYRGVRKRPWGRYAAEIRDPAKKSRVWLGTYDTAEEAARAYDTAAREFRGAKAKTNFPFPSSSLSPVAAAGGGGGSPSSDSTLDSSGGGSGGCAQAPMQAIPLPPALDLDLFHRAAVVTAVAGGGMRFPFNGYPVAPRQPMHPYFFYEQAAAAAAAASGYRALKVAQPVTVAAVARSDSDSSSVVDLSPSPPAVTAHKAVAFDLDLNRPPPSED

SEQ ID NO: 34442 - protein, 247 aa, Triticum aestivum
MAPRAAEKAPVSPPTGLGLGVGGGIGVVAGGAHYRGVRKRPWGRYAAEIRDPAKKSRVWLGTYDTAEEAARAYDTAAREFRGAKAKTNFPFPSSSLSPVAAAGGGGGSPSSDSTLDSSGGGSGGCAQAPMQAIPLPPALDLDLFHRAAVVTAVAGGGMRFPFNGYPVAPRQPLHPYFFYEQAAAAAAASASGYRALKVAQPVTVAAVAQSDSDSSSVVDLSPSPPAVTAHKAVAFDLDLNRPPPSED

SEQ ID NO: 34443 - protein, 219 aa, Triticum aestivum
MAPRAAEKAPVSPPTGLGLGVGGGIGVVAGGAHYRGVRKRPWGRYAAEIRDPAKKSRVWLGTYDTAEEAARAYDTAAREFRGAKAKTNFPFPSSSLSPVAAAGGGGGSPSSDSTLDSSGGGSGGCAQAPMRFPFNGYPVAPRQPLHPYFFYEQAAAAAAASASGYRALKVAQPVTVAAVAQSDSDSSSVVDLSPSPPAVTAHKAVAFDLDLNRPPPSED

SEQ ID NO: 34444 - protein, 497 aa, Streptomyces hygroscopicus subsp. limoneus
MTGSEIFLASKRAAITYDTDPATGEPRAWLAPGGTGNVVAEQAGVLNISWIASADSEDDRRASALNPDGVTMELHSGREILVRLIRHDPAVFRNVQNFMTANLMWAANNYGWDRWTQPSFGSDAREGWADFGRFTRDFADAILKSSAQSADPVYLVHDYQLVGVPALLREQRPDAPILLFVHIPWPSADYWRILPKEIRTGILHGMLPATTIGFFADRWCRNFLESVADLLPDARIDREAMTVEWRGHRTRLRTMPLGYSPLTLDGRNPQLPEGIEEWADGHRLVVHSGRTDPIKNAERAVRAFVLAARGGGLEKTRMLVRMNPNRLYVPANADYVHRVETAVAEANAELGSDTVRIDNDNDVNHTIACFRRADLLIFNSTVDGQNLSTFEAPLVNERDADVILSETCGAAEVLGEYCRSVNPFDLVEQAEAISAALAAGPRQRAEAAARRRDAARPWTLEAWVQAQLDGLAADHAARTATAERFDTAPAVSTRADL

SEQ ID NO: 34445 - protein, 479 aa, Nicotiana tabacum
MAGTTTAGDTSTSSRSNLAPTKSLSKKENQGLLSGRYEIGKLLGHGTFAKVYHARNVKTNESVAIKVIDKEKILKVGLIDHIKREISILRRVRHPNIVQLYEVMATKAKIYFVMEYVKGGELFNKVAKGRLKEEVARKYFQQLISAVAFCHARGVYHRDLKPENILLDEDGNVKVSDFGLSAISEQIKQDGLFHTFCGTPAYVAPEVLARKGYDAAKVDIWPCGVILFVLMAGYLPFHDQNIMAMYKKIYKGEFRCPRWFSPELTKFLRQLLDTNPETRITIQEVMNNRWFKKGFKHVKFYIEDDKLRSVNDDDYDGGVDYSSDRSESESEMEMRRKPATLPRPASLNAFDIISFSRGFDLSGLFEEGGDGARFVSGAPVPKIISKLEEIAKVVSFAVRKKDCRVSLEGSKEGEKGPLTIAAEIFELTPSLRVVEVKKKAGDRVEYEEFYHKELKPGLQNLTLEVDGPVDSSHLPSDTE

SEQ ID NO: 34446 - protein, 622 aa, Pisum sativum
MSYVPPHLRNASSTAVATTTRPSASSGTLDHHHHNTNLAFSSSYPHSNSSSLANGSRRTSAATSAISELVTVPDTVFPNWQPSERVSRMNPDQIEEVVRLNLDVTVSSDSTAAPGPIESFNDMCLHPSIMKDIAYHEYTRPSSIQAQAMPIALSGRDLLGCAETGSGKTAAFTIPMLQHCLVQPPIRRGDGPLALVLAPTRELAQQIEKEVQAFSRSLESLKNCIVVGGTNIEKQRSELRAGVEIAVATPGRFIDHLQQGNTSLSRISYVVLDEADRMLDMGFEPQIREIMRSLPEKHQTLLFSATMPVEIEALAKEYLANPVQVKVGKVSSPTTNVSQTLVKVSGSEKIDRLLDLLVEEASQAEKCGHRFPLTIVFVERKTRCDEVAEALVAQGLSAVSLHGGHSQNEREAALQNFRSSSTSILVATDVASRGLDVTGVSHVINLDLPKTTEDYIHRIGRTGRAGSTGIATSFYTDRDMFLVTNIRKAIADAESGNAVAFATGKVARRKEKEAAAAHKEANIASSRHLGLGAASINIEDKYRFMIAASNSRGEGAEIVHGMIDEVSDLPPIHLIYRYVVWQILEMDKLSLHAYVLFHTLLASKLVTGSFLDTICRISHVCR

SEQ ID NO: 34447 - protein, 160 aa, Alnus firma
MNTLEGRGFTEEQEAVVVKSWNAMKPNAGELGLKFFLKIFEIAPSAQKLFSFLRDSNVSLERNPKLKSHAMSVFLMTCESAVQLRKAGKVTVRESSLKKLGAVHFKHGVVDEHYEVTKFALLETIKEAVPEMWSPEMKIAWGEAYDQLVAAIKSAMKPSS

SEQ ID NO: 34448 - protein, 218 aa, Medicago truncatula
MVTKTKNAANLKIKKPSNNNNNATEIHFRGVRKRPWGRYAAEIRDPGKKSRVWLGTFDTAEEAARAYDNAARQFRGPKAKTNFPPPPSDVKEDSPSQSSTVESSVPAPDREVTRREVPTGGSVMDRFPFLSIQQQIMPFAGAGAGAVDGMVPVFFYDPAGRAEFLNQRFTNRFEPEPVQFNIGFGGGVQSDSDSSSVVDCQPKRALNLDLNLAPPMEY

SEQ ID NO: 34449 - protein, 509 aa, Nicotiana tabacum
MEGTNLTTYAAVFLDTLFLLFLSKLLRQRKLNLPPGPKPWPIIGNLNLIGNLPHRSIHELSLKYGPVMQLQFGSFPVVVGSSVEMAKIFLKSMDINFVGRPKTAAGKYTTYNYSDITWSPYGPYWRQARRMCLTELFSTKRLDSYEYIRAEELHSLLHNLNKISGKPIVLKDYSTTLSLNVISRMVLGKRYLDESENSFVNPEEFKKMLDELFLLNGVLNIGDSIPWIDFMDLQGYVKRMKVVSKKFDKFLEHVIDEHNIRRNGVENYVAKDMVDVLLQLADDPKLEVKLERHGVKAFTQDMLAGGTESSAVTVEWAISELLKKPEIFKKATEELDRVIGQNRWVQEKDIPNLPYIEAIVKETMRLHPVAPMLVPRECREDIKVAGYDVQKGTRVLVSVWTIGRDPTLWDEPEVFKPERFHERSIDVKGHDYELLPFGAGRRMCPGYSLGLKVIQASLANLLHGFNWSLPDNMTPEDLNMDEIFGLSTPKKFPLATVIEPRLSPKLYSV

SEQ ID NO: 34450 - protein, 509 aa, Nicotiana tabacum
MEGTNLTTYAAVFLDTLFLLFLSKLLRQRKLNLPPGPKPWPIIGNLNLIGNLPHRSIHELSLKYGPVMQLQFGSFPVVVGSSVEMAKIFLKSMDINFVGRPKTAAGKYTTYNYSDITWSPYGPYWRQARRMCLTELFSTKRLDSYEYIRAEELHSLLHNLNKISGKPIVLKDYLTTLSLNVISRMVLGKRYLDESENSFVNPEEFKKMLDELFLLNGVLNIGDSIPWIDFMDLQGYVKRMKVVSKKFDKFLEHVIDEHNIRRNGVENYVAKDMVDVLLQLADDPKLEVKLERHGVKAFTQDMLAGGTESSAVTVEWAISELLKKPEIFKKATEELDRVIGQNRWVQEKDIPNHPYIEAIVKETMRLHPVAPMLVPRECREDIKVAGYDVQKGTRVLVSVWTIGRDPTLWDEPEVFKPERFHEKSIDVKGHDYELLPFGAGRRMCPGYSLGLKVIQASLANLLHGFNWSLPDNMTPEDLNMDEIFGLSTPKKFPLATVIEPRLSPKLYSV

SEQ ID NO: 34451 - protein, 509 aa, Nicotiana tabacum
MEGTNLTTYAAVFLDTLFLLFLSKLLRQRKLNLPPGPKPWPIIGNLNLIGNLPHRSIHELSLKYGPVMQLQFGSFPVVVGSSVEMAKIFLKSMDINFVGRPKTAAGKYTTYNYSDITWSPYGPYWRQARRMCLTELFSTKRLDSYEYIRAEELHSLLHNLNKISGKPIVLKDYLTTLSLNVISRMVLGKRYLDESENSFVNPEEFKKMLDELFLLNGVLNIGDSIPWIDFMDLQGYVKRMKVVSKKFDKFLEHVIDEHNIRRNGVENYVAKDMVDVLLQLADDPKLEVKLERHGVKAFTQDMLAGGTESSAVTVEWAISELLKKPEIFKKATEELDRVIGQNRWVQEKDIPNLPYIEAIVKETMRLHPVAPMLVPRECREDIKVAGYDVQKGTRVLVSVWTIGRDPTLWDEPEVFKPERFHEKSIDVKGHDYELLPFGAGRRMCPGYSLGLKVIQASLANLLHGFNWSLPDNMTPEDLNMDEIFGLSTPKKFPLATVIEPRLSPKLYSV

SEQ ID NO: 34452 - protein, 509 aa, Nicotiana tabacum
MENSWVFLALAGLSALAFLCKIITCRRPVNRKIPPGPKPWPIIGNLNLLGPIPHQSFDLLSKKYGELMLLKFGSRPVLVASSAEMAKQFLKVHDANFASRPMLAGGKYTSYNYCDMTWAPYGPYWRQARRRIYLNQIFTPKRLDSFEYIRVEERQALISQLNSLAGKPFFLKDHLSRFSLCSMTRMVLSNKYFGESTVRVEDLQYLVDQWFLLNGAFNIGDWIPWLSFLDLQGYVKQMKALKRTFDKFHNIVLDDHRAKKNAEKNFVPKDMVDVLLKMAEDPNLEVKLTNDCVKGLMQDLLTGGTDSLTAAVQWAFQELLRQPRVIEKATEELDRIVGKERWVEEKDCSQLSYVEAILKETLRLHPLGTMLAPHCAIEDCNVAGYDIQKGTTVLVNVWTIGRDPKYWDRAQEFLPERFLENDIDMDGHNFAFLPFGSGRRRCPGYSLGLKVIRVTLANMLHGFNWKLPEGMKPEDISVEEHYGLTTHPKFPVPVILESRLSSDLYSPIT

SEQ ID NO: 34453 - protein, 508 aa, Nicotiana tabacum
MENSWVFLALAGLSALAFLCKIITCRRPVNRKIPPGPKPWPIIGNLNLLGPIPHQSFDLLSKKYGELMLLKFGSRPVLVASSAEMAKQFLKVHDANFASRPMLAGGKYTSYNYCDMTWAPYGPYWRQARRIYLNQIFTPKRLDSFEYIRVEERQALISQLNSLAGKPFFLKDHLSRFSLCSMTRMVLSNKYFGESTVRVEDLQYLVDQWFLLNGAFNIGDWIPWLSFLDLQGYVKQMKALKRTFDKFHNIVLDDRRAKKNAEKNFVPKDMVDVLLKMAEDPNLEVKLTNDCVKGLMQDLLTGGTDSLTAAVQWAFQELLRRPRVIEKATEELDRIVGKERWVEEKDCSQLSYVEAILKETLRLHPLGTMLAPHCAIEDCNVAGYDIQKGTTVLVNVWTIGRDPKYWDRAQEFLPERFLENDIDMDGHNFAFLPFGSGRRRCPGYSLGLKVIRVTLANMLHGFNWKLPEGMKPEDISVEEHYGLTTHPKFPVPVILESRLSSDLYSPIT

SEQ ID NO: 34454 - protein, 508 aa, Nicotiana tabacum
MENSWVFLALAGLSALAFLCKIITCRRPVNRKIPPGPKPWPIIGNLNLLGPIPHQSFDLLSKKYGELMLLKFGSRPVLVASSAEMAKQFLKVHDANFASRPMLAGGKYTSYNYCDMTWAPYGPYWRQARRIYLNQIFTPKRLDSFEYIRVEERQALISQLNSLAGKPFFLKDHLSRFSLCSMTRMVLSNKYFGESTVRVEDLQYLVDQWFLLNGAFNIGDWIPWLSFLDLQGYVKQMKALKRTFDKFHNIVLDDHRAKKNAEKNFVPKDMVDVLLKMAEDPNLEVKLTNDCVKGLMQDLLTGGTDSLTAAVQWAFQELLRQPRVIEKATEELDRIVGKERWVEEKDCSQLSYVEAILKETLRLHPLGTMLAPHCAIEDCNVAGYDIQKGTTFLVNVWTIGRDPKYWDRAQEFLPERFLENDIDMDGHNFAFLPFGSGRRRCPGYSLGLKVIRVTLANMLHGFNWKLPEGMKPEDISVEEHYGLTTHPKFPVPVILESRLSSDLYSPIT

SEQ ID NO: 34455 - protein, 508 aa, Nicotiana tabacum
MENSWVVLALTGLLTLVFLSKFLHSPRRKQNLPPGPKPWPIVGNIHLLGSTPHRSLHELAKRYGDLMLLKFGSRNVLILSSPDMAREFLKTNDAIWASRPELAAGKYTAYNYCDMTWARYGPFWRQARRIYLNEIFNPKRLDSFEYIRIEERHNLISRLFVLSGKPILLRDHLTRYTLTSISRTVLSGKYFSESPGQNSMITLKQLQDMLDKWFLLNGVINIGDWIPWLAFLDLQGYVKQMKELHRNFDKFHNFVLDDHKANRGEKNFVPRDMVDVLLQQAEDPNLEVKLTNDCVKGLMQDLLAGGTDTSATTVEWAFYELLRQPKIMKKAQQELDLVISQDRWVQEKDYTQLPYIESIIKETLRLHPVSTMLPPRIALEDCHVAGYDIPKGTILIVNTWSIGRNSQHWESPEEFLPERFEGKNIGVTGQHFALLPFGAGRRKCPGYSLGIRIIRATLANLLHGFNWRLPNGMSPEDISMEEIYGLITHPKVALDVMMEPRLPNHLYK

SEQ ID NO: 34456 - protein, 157 aa, Rosa chinensis
MSDEEHQFESKADAGASKTYPQQAGTIRKNGYIVIKARPCKVVEVSTSKTGKHGHAKCHFVAIDIFNGKKLEDIVPSSHNCDVPHVNRTDYQLIDISEDGFVSLLTENGNTKDDLRLPTDDALLTQLKDGFAEGKDLVVTVMSAMGEEPNCALKDIG

SEQ ID NO: 34457 - protein, 186 aa, Bacillus subtilis subsp. subtilis str. 168
MLFFVDTANIDEIREANELGILAGVTTNPSLVAKEANVSFHDRLREITDVVKGSVSAEVISLKAEEMIEEGKELAKIAPNITVKIPMTSDGLKAVRALTGLGIKTNVTLIFNANQALLAARAGATYVSPFLGRLDDIGHNGLDLISEVKQIFDIHGLDTQIIAASIRHPQHVTEAALRGAHTAQCR

SEQ ID NO: 34458 - protein, 83 aa, Panicum miliaceum
EPLVVGRVIGEVLDSFNPCVKMIVTYNSNKLVFNGHEIYPSTVVSKPRVEVQGGDLRSFFTLVMTDPDVPGPSDPYLREHLHW

SEQ ID NO: 34459 - protein, 83 aa, Sorghum halepense
EPLVVGRVIGEVLDSFNPCVKMIVTYNSNKLVFNGHEIYPSAVLSKPRVEVQGGDLRSFFTLVMTDPDVPGPSDPYLREHLHW

SEQ ID NO: 34460 - protein, 83 aa, Pennisetum glaucum
EPLVVGRVIGEVLDSFNPCVKMIVTYNSNKLVFNGHEVYPSSVVSNPRVEVQGGDLRSFFTLVMTDPDVPGPSDPYQREHLHW

SEQ ID NO: 34461 - protein, 83 aa, Setaria italica
EPLVVGRVIGEVLDSFNPCVKMIVTYNSNKLVFNGHEIYPSAVVSKPRVEVQGGDLRSFFTLVMTDPDVPGPSDPYLREHLHW

SEQ ID NO: 34462 - protein, 176 aa, Panicum miliaceum
KRRNGLLKKAYELSVLCDAEVALIIFSSRGRLFEFSTSSCIYKTLERYRSCSFASEASAPPEAELNNYQEYLKLKTRIEFLQTTQRNLLGEDLGPLSIKELEQLENQIEISLKHIRSSKNQQMLDQLFELKRKEQQLQDSNKDLRRKIQEIGEENVLRLTCQDLGPTGSSGHPDDA

SEQ ID NO: 34463 - protein, 214 aa, Arabidopsis thaliana
MGKNGSGKSTFSKVLVGHPDYEVTGGSIVFKGQNLLDMEPEDRSLAGLFMSFQSPVEIPGVSNMDFLNMAFNARKRKLGQPELDPIQFYSHLVSKLEVVNMKTDFLNRNVNEGFSGGERKRNEILQLAVLGAELAILDEIDSGLDVDALQDVAKAVNGLLTPKNSVLMITHYQRLLDYIKPTLIHIMENGRIIKTGDNSLAKLLEKEGYKAISG

SEQ ID NO: 34464 - protein, 211 aa, Listeria monocytogenes
RSREPITAKLVANLIETAGATRMITLDMHAPQIQGFFDIPIDHLNAVRLLSDYFSERHLGDDLVVVSPDHGGVTRARKMADRLKAPIAIIDKRRPRPNVAEVMNIVGNVEGKVCIIIDDIIDTAGTITLAAKALREAGATKVYACCSHPVLSGPAMKRIEESPIEKLVVTNSIALPEEKWIDKMEQLSVAALLGEAIVRVHENASVSSLFE

SEQ ID NO: 34465 - protein, 1130 aa, Solanum tuberosum
MASGSRTKHSHHNSSQAQSSGTSNVNYKDSISKAIAQYTADARLHAVFEQSGESGKFFDYSESVKTTTQSVPERQITAYLTKIQRGGHIQPFGCMIAVDEASFRVIAYSENAFEMLSLTPQSVPSLEKCEILTIGTDVRTLFTPSSSVLLERAFGAREITLLNPIWIHSKNSGKPFYAILHRVDVGIAIDLEPARTEDPALSIAGAVQSQKLAVRAISHLQSLPGGDIKLLCDTVVESVRELTGYDRVMVYKFHEDEHGEVVAESKRSDLEPYIGLHYPATDIPQASRFLFKQNRVRMIVDCHATPVRVTQDESLMQPLCLVGSTLRAPHGCHAQYMANMGSIASLTLAVIINGNDEEAVGGGRNSMRLWGLVVGHHTSVRSIPFPLRYACEFLMQAFGLQLNMELQLASQLSEKHVLRTQTLLCDMLLRDSPPGIVTQSPSIMDLVKCDGAALYYQGKYYPLGVTPTEAQIKDIVEWLLAYHGDSTGLSTDSLADAGYPGAASLGDAVCGMAVAYISSKDFLFWFRSHTAKEIKWGGAKHHPEDKDDGLRMHPRSSFKAFLEVVKSRSSPWENAEMDAIHSLQLILRDSFKDAEASNSKAIVHAHLGEMELQGIDELSSVAREMVRLIETATAPIFAVDVEGRINGWNAKVAELTGLSVEEAMGKSLVHELVYKESQETAEKLLYNALRGEEDKNVEIKLRTFGAEQLEKAVFVVVNACASKDYTNNIVGVCFVGQDVTGEKVVMDKFINIQGDYKAIVHSPNPLIPPIFASDENTCCSEWNTAMEKLTGWSRGEIVGKMLVGEIFGSCCRLKGPDAMTKFMIVLHNAIGGQDTDKFPFSFFDRNGKYVQALLTANKRVNMEGNTIGAFCFIQIASPELQQALRVQRQQEKKCYSQMKELAYICQEIKSPLNGIRFTNSLLEATNLTENQKQYLETSAACERQMSKIIRDVDLENIEDGSLTLEKEDFFLGSVIDAVVSQVMLLLREKGVQLIRDIPEEIKTLTVHGDQVRIQQVLADFLLNMVRYAPSPDGWVEIQLRPSMMPISDGVTGVHIELRIICPGEGLPPELVQDMFHSSRWVTQEGLGLSTCRKMLKLMNGEIQYIRESERCYFLIVLDLPMTRKGPKSVG

SEQ ID NO: 34466 - protein, 245 aa, Nicotiana tabacum
MGRGRVELKRIENKINRQVTFAKRRNGLLKKAYELSVLCDAEVALIIFSSRGKLSEFCSTSSMMQTLEKYQQCSYASLDPMQSASDHTQNNYHEYLRLKARVELLQRSQRNLLGEDLGTLNSGELEHLEHQLDSSLKQIRSRKTQNMLDQLADLQQKEQMLAEANKQLRRKLEESAARVPLRLSWDNGGQTMQHNRQLPPQTEGFFQPLGLNSSPQFGYSPMGGNEVNAAATANNMNGFIPGWML

SEQ ID NO: 34467 - protein, 86 aa, Saccharomyces cerevisiae
EVKPEVKPETHINLKVSDGSSEIFFKIKKTTPLRRLMEAFAKRQGKEMDSLRFLYDGIRIQADQTPEDLDMEDNDIIEAHREQIGG

SEQ ID NO: 34468 - protein, 404 aa, Picrorhiza kurrooa
MAPAAADSIKPRDVCIVGVSRTPMGGFLGSISSLPATKLGSIAIESALKRANVDPSHVQEVFFGNVLSANLGQAPARQAALGAGIPNTVICTTVNKVCASGMKAAMLAAQSIQLGINDVVVAGGMESMSNVPKYLAEARKGSRLGHDSLVDGMLKDGLWDVYNDYGMGVCAELCAEHHSVTREEQDNYAVQSFERGIAAKDSGAFSWEIVPVEVSGGRGGPSTIVDKDEGLGKFDAAKLRKLRPSFKETGGSVTAGNASSISDGAAALVLVSGEKALKLRLEVIAKITGYADAAQAPELFTTAPAIAIPKAISNAGLEASQIDYYEINEAFAVVALANQKLLSLNPEKVNVHGGAVSLGHPLGCSGARILVTLLGVLRQKGGKYGVGGVCNGGGGASAVVIELL

SEQ ID NO: 34469 - protein, 389 aa, Erythrobacter sp. NAP1
MTTAYIVDAVRTAGGRRGGRLAGVHPVDMLAKSLDAIVDRSGIDPAAVDDVITGCVSQAGEQAMQVGRMGVLSSKLPDSVPAVTIDRQCGSSQQAIQFAAQAVMSGTQDVVIASGVESMTRVPMGTNATLHMKEGLGHYKSPGLEEKFPGIQFSQFMGAEMIAKKHGFTKEQLDSFALSSHTKAKMATETGAFENEIVPVEIETPEGTEMHTVDEGIRFDATLEGISGVKLISPDGMVTAASASQICDGSSAVLVVSEEALKRYGLTPMARIHNLTVTAGDPVIMLEEPLFATDKALDRAGLKIDDIDLYEVNEAFAPVPLAWLKHTGADPEKLNVHGGAIALGHPLGASGTKLMATLVHALKRHDKKYGLQTMCEGGGVANVTIVESV

SEQ ID NO: 34470 - protein, 301 aa, Erythrobacter sp. NAP1
MTASKRIAFLGLGVMGGPMWGHLVRAGHEATGYNRNFAKAEEWSDRLGDEGLVAPIESDAATAVRGKDVVLACLGNDDDVASVLFGENGVLAAMKRGATFIDHTSVSPGLARRIADECERLGLHAVDAPVSGGQAGAENGKLSIMCGGSEEAMASAQPVMQAYAARIVHIGEAGAGQTAKAINQVCIAGVLAGLSEGVRLAQATGVDTYKVVEAISGGAAQSWQMENRWPTMVSGEFDFGFAIDWMRKDLAIALEEAGKHGLDMSVTKLVDQFYSEVQAAGGNRLDTSALVTRYPKASDTK

SEQ ID NO: 34471 - protein, 356 aa, Erythrobacter sp. NAP1
MHFLDQAKIYLKSGAGGPGAVSFRREKYVEYGGPDGGNGGKGGDIIFEAVPGLNTLIDFRYSQHFKAKRGNHGQGRDRTGAGADDLVIKVPVGTQVLSEDREEVLADFTEVGQRVTFLEGGLGGRGNASYKSATNRAPRQHQPGEPGEEMWVWLRLKLLADVGLVGLPNAGKSTFINAVSNAKAKVGHYAFTTLVPKLGVVRHKGREFVLADIPGLIEGAADGAGIGDRFLGHIERCRVLVHLIDIAGDDPVEAMRIVKEELEAYGAGLEDKPQLVALNKLDLADEELGVAFAEELIAAGADKVFAVSGASGEGIEELMDAVLSYLPDRTATETNAAPSESDGEESGDDTGDWSPI

SEQ ID NO: 34472 - protein, 547 aa, Erythrobacter sp. NAP1
MYKYDNYDQQMVDARVEEFRDQARRRLEGKLTEDQFKPLRLMNGLYLQLHAYMLRVAIPYGTLNSEQMIALGDIADKYDRGYGHFTTRQNLQYNWIKLEDAADILADLAKVEMHAIQTSGNCIRNISSDHFAGAAHDELVDPRPYAELLRQWSSFHPEFTYLPRKFKIAVIAAEKDRAAMRLHDIGIQIVKNDAKDGGSEIGARFFVGGGMGRTPMVAPMIRDFVPLDQLITYAEACLRVYNRYGRRDNKYKARIKILVHELGKDEYTRQVEEEFAHLLKQGVEPPREELERIKPYFSDPAFEDGPKSVDRSDPDFAVWVDRNTHRHKHDSYVSAVISLKPVGGIPGDATGEQMRLMARLAKQYSFDELRIMHTQNVVLPHVKIGDLHALWTELEAAGLGSPNMDTIEDMIACPGLDYCSLANARSIPLAQRISERFDASGKTSKLGELKLKISGCINACGHHHAGHIGILGVDRKGVENYQLSLGGSEAEDVSLAKITGPGFTEDGVIEAVDTVTNVYLANKQGEERFLDTYRRIGMEPFKEALYG

SEQ ID NO: 34473 - protein, 534 aa, Erythrobacter sp. NAP1
MTIGVLPMTKPKVLISDKMDPNAARIFEERGCEVDVITGETPEELKARIGEYHGLAIRSSTKVTAEILDAATNLKVIGRAGIGVDNVDIPYASGKGVVVMNTPFGNSITTAEHAIAMIMALARMIPAADARTQNGEWPKKDFMGIEVTGKTLGLIGAGNIGSIVASRALGLRMKVIAYDPFLTEDRAVEIGVEKVDLDNLLSRADFVSLHTPLTDETRNILSRERLENAKPGIRIVNCARGGLIDEVALKNCLESGQVAGAALDVFAEEPAKENPLFGAPNFICTPHLGASTTEAQVNVALQVAEQMSDYLVNGGVTNALNMPSLSAEEAPKLKPYMSLAEKLGSLVGQLAHGNLTKISIEREGAAAELNGKPITGAVLAGFMRRYSDTVNMVNAPYLAKERGLDVSEIRHQREGAFNTLIRVSVETDAGTRSVAGTLFGKDAPRLVEIFGIGIEADLDGNMLYVVNDDKPGFIGRIGTLLGSQGINIGTFNLGRRDAGGEAVLLLSLDDEPSADVMAEAEKVEGVKMVKALSF

SEQ ID NO: 34474 - protein, 360 aa, Erythrobacter sp. NAP1
MIYLDYQATTPLAPEARDAMMRWLDGPDGMGFGNPHSPHKLGRQAAAAIEAAREKVAALFPPGGQVIFTGGATEALNLAIRGSGTTGSVSVSAIEHAAVSDTAEAIGAKHVLNVSKEGQCNTAQDVPNDVRLIAVMQVNNEIGTIQPTIDWHRKAKENNALFLIDAVQAYGKIEVTQADMIAVSAHKFHGPKGVGALWVRNGIDLTAHQTGGGQEAGLRSGTLSPALIAGFGAAAALAQERMAEDEHHVEELWNRAREIFDGWELNGSDTARYKGNLNIRKDGLDVARLMSECRDVMFSAGSACASGSGRPSHVLKAIGLSDKQAKSSIRLGWGRYTTLEDIEKAAKQINAAAKEQDKWG

SEQ ID NO: 34475 - protein, 199 aa, Erythrobacter sp. NAP1
MSALFNTLSGLFEEGHSRKVDGLLTDSAFAQAERQTPAAVLIAITERERPGVLLTQRPNDMRDHPGQVAFPGGKVDAGEDAVTAALREAEEELALPRSEVSLIGTTDLYQTGTGFDITPVVGVVPPDLPLEPSPSEVAAWFEAPLDLLLDADSWTANEVFWRGRTRRYLEMDYEGFRIWGVTAAIIMNLSKRIDASRLR

SEQ ID NO: 34476 - protein, 373 aa, Erythrobacter sp. NAP1
MKIAVLKERSPGETRVAATPETVKKFIGLDTQVAVESGAGKHAAIGDDAYADAGAATGDLASTVKDADIVLGIQAPDAELLKGAKPGAWVAALFNPFQNGDLVEAYAKAGYEALSMEFMPRITRAQSMDVLSSQSNLAGYKAVLAAADTYGRAFPMMMTAAGTVQAAKCFIMGVGVAGLQAIATARRLGAQVSATDVRSATKEQIESLGAKAIFVTDVEGIEGEGSGGYATEMSDEYKAAQAKLVSEHIAKQDIVITTALIPGRAAPVLITDEQIATMKPGSVIFDLAVAQGGNVEGSKADEVTERHGVKIIGYANTPAHLAADASALFARNHFNFLSAFWDKEAGKPELDEEIGDAVRLTKGGEVVNERLKG

SEQ ID NO: 34477 - protein, 163 aa, Erythrobacter sp. NAP1
MFAIVRTGGKQYRVAAGDKIAVEKLAGEAGDTVTLGDVLLAGEGDSIADASKVTVSAEIIAQAKSEKVVVFKKRRRHNYRRKAGHRQQMTLLRITDVGEGKKAPAKKAAAPKKEEAEAKAAPAKKAPAKKAAPKTAAAKKPAGKKAPAKKAPAKKAAPKAEDK

SEQ ID NO: 34478 - protein, 562 aa, Erythrobacter sp. NAP1
MSQATQTAAELLVDCLKEQGTDRIFTVPGESFLAVLDALHERSDIETLVCRQEGGAAFMACADGAMSAAGDCLRPGIAFVTRGPGATNASIGVHVAHQDSQPMILFVGDVARPMRDREGFQEVNFKAFFGPIAKWAARIDDPARVPEYVARAYSVAVSGRPGPVVLALPEDMLCDPVSADIKPRPATVRPAQAVCPDAMQAMFALLADAASPIAIIGGAGWNSKAREHFQAFAESVGLPVATAFRRQDAISPDSPVYAGNLGYGPNPALVKRVKEADFVLAVGARLGEATTDGYSFPATDHPDQLLVHVHPDPNELGRVYLTELGLACAVDEFAEAAALWEDHSIIPFDAGKEAHAEWEAWASHKVSDNPPALDMGACVTAMRETLPADTIICNGAGNFAGWWHRYWRYAGYPSQLAPTAGAMGYGVPASVAAALRFPDRTIVAVAGDGDFLMNGQELATAAQYNANLIVLVVDNGAYGTIRMHQEREYPARVSGTELSNPDFAMLGASFGAWSATATTTQEFTAALTEAKERIGLRLIHMKIDVEQLAASGATVSGLRAKA

SEQ ID NO: 34479 - protein, 585 aa, Erythrobacter sp. NAP1
MLSRYLPILEWGRTYNRNVLTDDLMAAVIVTIMLIPQSLAYALLAGLPPVVGLYASILPLVLYAIFGTSRTLAVGPVAVISLMTASAAGAVAAQGTAEYLEAAITLAMLSGVMLAILGFLRAGFLANLLSHPVISGFITASGILIATSQLKHILGIQAGGANWPEMLGSLSSAIDETNVWTLAIGIPATLFLFWVRKGAKPALQRIGIPERAADMSAKAGPVVAVALTILAVLALDLGDKGVNLVGAVPQGLPPFALPSTDLSLIEKLWVPALLISIIGFVESVSVAQTLAAKRRQRISPDQELIGLGAANVASAFSGGYPVTGGFARSAVNFDAGAQTPAAGAYTAVGIALATLFLTPLLFSLPIATLAATIIVAVLSLVDLKTPGRLWRYSKADFAAHIATIGITLLAGVEMGVIAGVAVGLLLYLWRASRPHAAIVGRVPETEHFRNVERHKVITVPHILSIRIDEALTYLNARWLEEYVLEEVADRPAVRHVILMCSAVNEIDASGLESLEAINHRLGDGKIGLHLSEVKGPVMDRLKRSHFIEELNGEVFLSQSKAFEKLVVDDGAPPEPHDHYLARGLI

SEQ ID NO: 34480 - protein, 588 aa, Erythrobacter sp. NAP1
MRSKLSRYLPILEWGREYNRSILADDLMAAVIVTIMLIPQSLAYALLAGLPPVVGLYASILPLMLYAIFGTSRTLAVGPVAVISLMTASAAGSVAAQGTAEYLEAAITLAMLSGAMLAILGLLRAGFLANLLSHPVISGFITASGILIATSQIKHILGVDAGGDTWPAMLGSLAVAVGDTNVWTLVIGIPATLFLFWVRKGGSSALQAIGLRKRPADLVSKASPILAVALSIIAVIALDLGEKDVRLVGAIPQGLPPFALPGANISLIEQLWVPALLISVIGFVESVSVAQTLAAKRRQRISPDQELIGLGSANIASALSGGYPVTGGFARSAVNFDAGAQTPAAGALTAVGIAFATLFLTPLLFNLPIATLAATIIVAVLSLVDLKTPGQLWRYSKTDFTAHAVTIAITLIAGVEMGVIAGVGVGLVLFLWRASRPHAAIVGRVPETEHFRNIARHKVFTVPHVLSIRIDEALTYLNARWLEEYVLEEVADRPSVRHVILMCSAVNEVDASGLESLEAINHRLGDGGIGLHLSEVKGPVMDRLKRTHFIEELNGKVFLTQDKAFAEVSLDTGEPPAPVDHYMARGLI

SEQ ID NO: 34481 - protein, 459 aa, Erythrobacter sp. NAP1
MVISNRVAVPKARGVAGAQGGLAGALNAALKDRGGVWFGWSGQESEDRTGNMDLQRNDGVTTATIDLSTRDVGEYYNGYANSTLWPLFHYRIDLARFENRTGEGYERVNDRFAESALPLIEEDDLVWVHDYHLIPLGERLRSRGIKNRIGFFLHTPWPPTRLLTSLPFHERLVRTMLSYDLIGFQTKEWLSSFVHYCETELGAKVDHDTGRITHEGRTTTARAYPIGIDWKHFQAQGDTGEARNASQRLLASTRHRTAMIGVDRLDYSKGLPERIDGIGRFFDEHPERTRDLVFIQIAPPSREDVESYQQIRGLLEQKTGQINGARSEVDIVPIRYVNRGYTHAQLFGFFRAAKIGLVTPLRDGMNLVAKEYVAAQDPEDPGVLVLSEFAGAAHQLGCDGKGAVLVNPHSPDALAGAIRKALDMPLEERKSRYEAMIATVRDDDVRDWTQNFCTDLAAD

SEQ ID NO: 34482 - protein, 302 aa, Erythrobacter sp. NAP1
MSDTQTPTRCGVVAVIGAPNAGKSTLVNQLVGQKVAITSAKAQTTRARMLGIALHGSVQMILVDTPGIFAPKRRLDRAMVSAAWEGAESADAVLLIVDPIKQRRHELEPLLEALEQRSERKILVLNKVDKAKKEPLLELAQEMSQRIDFEEIFFVSALSGDGVAEMKEALAEQMPEGVWMYPEDQVSDASERLLAAEITREQLYQQLHEELPYDSAVRPEQYKTRPDGSLEIHQQIIVARETQRGIVLGKGGQKIKAIGEAARKELAEILGVKVHLFLHVKVLENWSEDKEVFEEMGLDWVR

SEQ ID NO: 34483 - protein, 484 aa, Erythrobacter sp. NAP1
MTQFSDLGLSQPVLQALDLKGYSTPTPIQEQAIPPVLEGRDLLGIAQTGTGKTAAFMLPSIDRLREADNRIPFKSCRMLVLAPTRELVSQIAASAKDYGALAGLKVQSIVGGTSVNKDRNKLHRGTDILIATPGRLLDLIDQKAFNLGSVEVLVLDEADQMLDLGFVHALRRISQLVPKERQTLFFSATMPKAIKELVSGYCNNPVQVSVTPESTTAERIDQYLFMVQQDEKQSLLELILSGRHKVPGEFERILIFTRTKHGADRVVKKLSRAGIPANAIHGNKSQPQRQRALDEFRRGKTMILVATDVAARGIDIPGVSHVLNYELPNVPEQYVHRIGRTARAGKDGVAIAFCAEDERAYLKDIRKTTGAELDRLNLPENFRAVVEGVGPTKPAPRGATRVSAKKIKPKPAGASAGKPAGDGSSKPKKPGGKHPSRKGRPSGRPGGGNPNGNSRRSGGPGRRGRRGKGGSPGGGGGHARSANG

SEQ ID NO: 34484 - protein, 574 aa, Erythrobacter sp. NAP1
MECLVDQGVEFVFGYPGGAVLPIYDELFGDERIRHILVRHEAGAGHAAEGYARATGKPGVVLVTSGPGATNAVTAIADAYMDSIPMVVITGQVPTALIGTDAFQEADTVGITRHCTKHNYLIKDPADLVATVEEAFRIATTGRPGPVVVDIPKDVQIAVPSQSSAYVAPGSHRYAPQMVAPAEQIAEAIELIENAQAPILYTGGGVINSGPEASELLRKLQDLTNAPITSTLMGLGAFPNTHPDWLGMLGMHGTYEANMAMNKCDVMICVGARFDDRVTGRLDAFSPDSKKIHIDIDRSSINKTVPVDIGIVGDCATVLGQLVEAWGTRKPQDLGEWKARIAGWRARECLAYPQRSKKNPEAIMPQKAVERLYALTKDRKPIVSTEVGQHQMWAAQYFGFDEPNKWLTSGGLGTMGYGMPAAIGAQLGCPDALVIDIAGEASIQMNIQELGTASQYRLPIKVFILNNEYMGMVRQWQELTYESRYSNSYSDSLPDFVALAEAYGWKGIRITEEAGLDAGIKAMIDHDGPVIVDCCVAKDANCLPMIPSGAAHTDMLLYGDSVDGTMDDEAKALV

SEQ ID NO: 34485 - protein, 342 aa, Erythrobacter sp. NAP1
MEILRCFSPERLADVLAIAARCATSRMMSDTILEISGLTKVYAGGTKALDNVDLSIRKGEIFALLGPNGAGKTTLIGAVCGIVRPSSGTITAFGHDLSNDWRKARARIGLVPQELSTDMFETVWRAVSYSRGLFGHPPDKARIEEILRSLSLWEKKDSQIRELSGGMKRRVLIAKALAHEPELLFLDEPTAGVDVELRKGMWEQISALRERGTTIILTTHYIEEAELMADRVGIIRGGKILMVDDKAAMMKRMGTTEAVFQLAEPLSELPASIAEFPVSLTDDGKELCYRGGDGSGSGSEQVAALTKALIAAGIDYRGIDIHDSSLEDIFVDLVSAREEETA

SEQ ID NO: 34486 - protein, 644 aa, Erythrobacter sp. NAP1
MGKVIGIDLGTTNSCVAVMDGGKPKVIENSEGARTTPSIVAFTKDGERLIGQPAKRQAVTNPDNTLFAIKRLIGRRFDDPTTKKDMDIVPYNIVKGKNGDAWVSAGGEEYSPSQISAFILQKMKETAESYLGETVEQAVITVPAYFNDAQRQATKDAGQIAGLEVLRIINEPTAAALAYGMDKEDGKTIAVYDLGGGTFDVSILEIGDGVFEVKSTNGDTFLGGEDFDNAIVEHLAEAFKKKENMDLKTDKLALQRLKEAAEKAKIELSSSATTEVNLPFITARMEGGSSTPLHLVETISRADLEKMVGDLINRTLDPCKKALADAGVSKDEIDEVILVGGMTRMPKVREVVEKFFEAKPHTGVNPDEVVAMGAAIQAGVLQGDVKDVLLLDVTPLSLGIETLGGVFTRMIDRNTTIPTKKTQTYSTAEDNQNAVTIKVFQGEREMAADNKLLGNFDLVGIPPAPRGVPQIEVTFDIDANGIVSVSAKDKGTGKEQTIKIQASGGLSDSDIDQMVQDAEKFAEEDKKRRAGAEARNQADSLVHATEKQLEENGDKIDAETKSAVEEAIAATKTALEGDDADEINAKAQELTQAAMKMGEQIYKQEQENAAPEGGDAGEEAAAEEESDEDVVDAEFSEVDEDKKG

SEQ ID NO: 34487 - protein, 398 aa, Erythrobacter sp. NAP1
MAQFSANDPIVILSYARTPMGGMQGALSDVSATDLGATAVKAAVERSGVLGEKFDRTYMGCVLPAGLGQAPARQATIKAGLPESVQATTVNKVCGSGMQTVIMGAEALASGTVDYVVAGGMESMTNAPYLLKKHRSGARIGHDTTYDHMFLDGLEDAYEEGRAMGTFAQDTANEYQLTREDMDEYSITSLDRANKAIESGAFADEVVPVTFATRKGEVTVDTDEQPGKGRPDKIPTLRAAFAKDGTITAATSSSISDGAAAVVLTRESVAKENGQQPVAKVVAMAAHARMPKDFTVAPVGAIEKVLEKAGWSVGDVDLWEVNEAFACVAMFAMRDIGIDHAKINVNGGATALGHPIGASGTRIIVTLINALKTQGKTKGVASLCIGGGEATAVAVELV

SEQ ID NO: 34488 - protein, 337 aa, Erythrobacter sp. NAP1
MAISETPPKFSSGKPRVVVTRHLAPAVEARMSELYDAVLNESDKPMSREQLVEAMASCDVLVPTVTDRINAEMIDGAGENLRLIANFGAGTEHIDLAAAAKRRIIVTNTPGVFTDDTADLAMAGIIGVPRRIREGVELVRSGKWTGWAPTGMLGRKIGGKVLGIVGMGRIGQAVAHRARAFGLEVSYHSRRPLPAALEQMLGVRFVDNLDDLVAEADILTLHCPLTDETRGMIDARRIALMKPGSSIVNTARGELIDEEALIEALQSGHLAGAGLDVYPDEPKVDRRLITNPNVMTLPHIGSATVEGREASGEKVIANIRFWADGHRPPDQVLTALV

SEQ ID NO: 34489 - protein, 632 aa, Erythrobacter sp. NAP1
MCGIAGIFHAETPKPVDPRRIERMCDAMAHRGPDGAGVWTEQGVGLGHRRLSIIDLEGSPQPMLSADGRAVIAFNGEIYNFRELRRELESQGAKFRTSGDTEVILAAWQRWGVDCLEKLHGMFAFALYDLDKRQLFLARDRFGVKPLFMTRLADGGLAFSSELKGLLAHPQMRRRVNPQAVDAYLTWGYVPDTHSILSGVEKLQAGHFLLLEQGRPIPAQRRWWDISFADRAKGSEADLSAELVHLMREAVQSRMVSDVPLGAFLSGGVDSSSVVALMSEASAEPVRTCSIGFDVAALDETNYASRIAQRFSTDHDSRIVASDDFEAVDQISAMFDEPFADASALPTWRVCQLAREKVTVALSGDGADEAFAGYRRQVFHHNEEKVRSLLPAGLRQPLFGALGRFWPKADWAPRPLRAKATLLALAESGESGYARALSVATHDQRASLYDPEFTRKLSGFRAEDELISLMKSAPARSGLDRAQYADLTFWLPGDILTKVDRTSMAVSLEAREPLLDHRLVEFAARLPEGMRVKGTTGKHLLKKCMERYLPNDILYRPKQGLVTPIAQWLREPLNSETRMIASSSTLSGLGWFKPNEIRRLADDHISGRSDHSRVLWQLLMLERSLKHLNVSG

SEQ ID NO: 34490 - protein, 598 aa, Erythrobacter sp. NAP1
MSFEILPPAIGEALAERGYSEPTPVQAAAMAPDSAGRDLIVSAQTGSGKTVAFGIALAQDILDQISGTPLQERPLVLAIAPTRELALQVSRELGWLYAKAGLRIATCVGGMDASKERRALRSGPAIVVGTPGRLRDHLERGALDLSGLIGVVLDEADEMLDMGFREDLEEILDATPDTRRTLLFSATMPQAIVRLAQKYQSDALRLSLGGKDRGHGDIEYQAITVAPSEIENAVVNLLRFHEAESAICFCATRESVRRLHSALQNRGFGVVSLSGENSQSERNQALQAMRDRRARVCVATDVAARGIDLPTLSLVIHVETPRDAETLQHRSGRTGRAGKKGTAAIIVPYNRRRRVDAMLNGAKIKAQWLDAPSPEAIRKKDHARLMEKLTQPAEYEADDRAIASELLARMSPEDIAAALVKAHRAELPEPEEMLANTPEAREKAKKERQRPGFEDTVWFKIGVGRRHNAEPRWLLPLICRRGHITRNEIGAIRVGQNESWFQIPRPIAAKFADTLEQTFSDKDDQDAILIEESAEGPRIEARNNRKNHSGKPFVKPFGKGKNASPRDGNPREKGAGFKSKHGKPNKGNGPKKPFKPKR

SEQ ID NO: 34491 - protein, 407 aa, Erythrobacter sp. NAP1
MSDIKRVVLAYSGGLDTSVIAKWLSVERGLEVVTFTADLGQGEEIEPAREKARAMGIPDEHIFIEDLREEFVRDFVFPMMRANARYEGDYLLGTSIARPLISKRLVEIAHETGADAIAHGATGKGNDQVRFELSAYALDPSIKVIAPWREWDLTSRTALIAWAEAHQIAVPKDKRGEAPFSTDANLLHTSSEGKVLEDPWEETPDYVYSRTDHPENAPDTPEHIEIGFERGDGVSLNGQAMSPATLLTALNDLGRKHGIGRLDLVENRFVGMKSRGMYETPGGEIYARAHRGIEQITLDRGAAHLKDELMPKYAELIYNGFWFAPEREMLQAAIDLSQEKVTGTVRLKLYKGQASVVGRKSPHSLYSEAHVTFEDDAGAYDQHDAEGFIKLNALRLKLLAGRDRKRD

SEQ ID NO: 34492 - protein, 202 aa, Erythrobacter sp. NAP1
MPTQYHDNVLSADVLGQLFNDARTYNGWLDKPVSDAQLKAIWDLMKMAPTSANMQPVRIIWVKSQEEKDRLAGLASEGNRDKIKAAPVTAIIGYDIDFHEELPWLFPHTDAKSWFEGDEEGRKEGAFRNSSMQGAYLILAARAVGLDCGPMSGFDADKVNEAYFGDNPRHRVNFLCSIGYGDPESIFDRSPRPDFEKFNSIV

SEQ ID NO: 34493 - protein, 552 aa, Erythrobacter sp. NAP1
MSDTKKASDVFIDCLEAEGCEYIFGVPGEENLDFLDSLGRSKKIKLILTRHEQGAGFMAATYGRHTGKTGVCVATLGPGATNFVTSAAYAQLGGMPVLMITGQKPIKKSKQGRFQIVDIVSLMEPVTKYSIQIAAGDNIPSRVREAYRLAEEEKPGATLIELPEDIAEEQATDFKPLPKSVARRPSAEPKAVRAAVKAIENAKNPVLVIGAGANRKLCGRMLEQFVEKTGIPFLTTQMGKGVIDERHPKFLGCAALSAGDFVHRAVEASDCIINVGHDVIEKPPFFMKDNGVTVIHVSTKTAEVDPVYFPQIEVIGDIANAVWQIKEDISPNRDWDFEQMLGYHKAELEHTGKLAADDRFPIFPPHLVQQVRDAMPRDGIICLDNGVYKIWFARGYTAYLPNTVLLDNALATMGAGLPSAMMSAMLYPDRKVMAICGDGGFMMNSQEMETAVRLGLNLTVLILRDDAYGMIRWKQANMGFDDFGLTYGNPDFVQYAESYGAKGHRVESSAHLAELLKHCNETPGLHLIDCPVDYSENDQILNIDIKKLSAEL

SEQ ID NO: 34494 - protein, 217 aa, Erythrobacter sp. NAP1
MKFFVDTAEIDPIKELAATGLLDGVTTNPSLIHKSGRDFMEVTKEICSIVDGPVSAEVVALDHDTMMKEAEVLRKIADNVCIKVPLTVDGLKTCKALTEDGTMVNVTLCFSANQALLAAKAGATFISPFVGRHDDNGFDGMDLIRDIRLIYDNYLFDTEILVASVRHTNHVLESAKIGADVMTAPPKVIHALFKHVLTDKGIEGFLKDWEATGQSII

SEQ ID NO: 34495 - protein, 71 aa, Erythrobacter sp. NAP1
MSSKTGSVKFFNADKGYGFIQPDDGSADSFVHISAVQAAGMQTLDKEQRLNYEVETGRNGKESAVNLSAAD

SEQ ID NO: 34496 - protein, 289 aa, Erythrobacter sp. NAP1
MTIAFIGLGNMGGGMAANLVKAGHHVRAFDLSEDALGAAKDAGCETFTSAREAVEGVDAVVSMLPNGAIVKSVYLNDVIGHAPHAATLIDCSTIDVATAREVADAAHAEGYKMVDAPVSGGIAAANGGTLTFMVGGEHHAFEAAEPILSAMGKAVIHAGSVGAGQTAKICNNMLLAITMIGTSEAMKMAEKLGLDPQKFYEISSQSSGYNWSLNAYTPLPGVGVESPADNDYKGGFATPLMVKDLRLAMEAAETADAAVPLGSRAAALYEDFLGAGNEALDFSAIIKTY

SEQ ID NO: 34497 - protein, 595 aa, Erythrobacter sp. NAP1
MDNQRNILLAVVLSGLLILSWDMGMRYFYPQSDVPAPSEVMSGAASDPADADTVTSSTDGPAGDLGEAAAEVGPVDLGTALASENRVIIDAPRVAGSINLVGARVDDLVLKDYDETTQEGSDPVRILAPDRTDEQHYAEFGFVVGGQRMSSRAIWEADGERLTPETPVTLSRTDENGITYRVAFSIDDNYMVSAQQTVENGSENAAIVQPFALIKRTSETASPDQFIAHAGPTGVFGGSLYDPNSYEELAELGRDNPAGAVSWLGFTDNYWASALIPGEGEADSAGWRSLGDQLFRADLIYDAQTVPAGGSLTRGTQLFAGAKESAILDQYEDAGITYFGKAISWGWFEWFEKPLLWLLRTLNGLVGNFGVAIILLTVIIRGLLFPIAQKQFASMAQMKAVQPKMKAIQERYKDDKQTQQQKIMELYKEEKVNPLAGCLPLLIQIPIFFALYKVLYLAIEMRHEPFLYMSDLSAPDPAKILNLFGLLPYDVPGFLGIGILAVLLGVTMWLTFKLNPSAMDPVQQQIFNLMPWFLMFVMAPFAAGLLIYWVTSNVLTLAQQSYLYSRHPQLKAAAEKEKAEMAKKKAREDAEKSKA

SEQ ID NO: 34498 - protein, 654 aa, Erythrobacter sp. NAP1
MSEQNDPNQQPPEGQNPWVKQLMIWGGIFMALLLVVSMFSGAGQTQGTAIRYSEFRDQVTAGAVQEVQLGDELITGTLKNGETFSTLPVPNDTEITQLLEANDVDFTGKQRDEPNVLLYILIQSLPFILILGIAFFALRQVQKGGGGGAMGFGKSKAKMLTERQGRVTFEDVAGIDEAREELEEVVEFLKDPQRFSKLGGQIPKGALLVGSPGTGKTLLARAIAGEAGVPFFTISGSDFVEMFVGVGASRVRDMFEQAKKNAPCIVFIDEIDAVGRSRGHGLGNSNDEREQTLNQLLVEMDGFEANEGIIIVAATNRPDVLDPALLRPGRFDRQVVVPIPDIDGREKILGVHMKKVPLAPDVNPRTIARGTPGFSGADLANLVNEAALLAARRNKRLVAMQEFEDAKDKVMMGAERRSMVMTEDEKKMTAYHEAGHALVSLNEPASDPIHKATIIPRGRALGMVMRLPERDSYSYHRDKMHANLAVAMGGRVAEEIIFGHNKVSSGASGDIQYATDLAKNMVTKWGMSDKLGPLQYEQQQEGYLGMGQSARTMAGAETNKLIDAEIKELVEGGLKRATDILTEQEDKLHLLAQALLEYETLTGEEIDALMKDGKIDRPDEPRGPAAIKPAQGSAIPKAGKRFGGSKGDEAPQGA

SEQ ID NO: 34499 - protein, 422 aa, Erythrobacter sp. NAP1
MKFGGTSMAGTERIRRVANIVRAQAAGKDGEANEVAVVVSAMAGETDRLVNFCREANALYDPAEYDVVVSSGEQVTSGLLALTLQSLGCKARSWLGWQLPVKTEEAHAKARISSIEAPDMVASLEAGEIAVVPGFQGITEEGRVSTLGRGGSDTSAVAVAAAVKADRCDIYTDVDGVYTTDPRIVAKARKLKAVTYEEMLELASVGAKVLQTRSVGLAMKEGVRIQVLSSFVDDDAALADDLPGTLIVSDEEMDQMVERGEMERQLVTGIAHDKNEAKVILTRVPDKPGAVAHIFEPLADASINVDMIIQNVGRDKGETDVTFTVPQADLARAQALLEDRREDIGFNRIITDSQIAKISVVGVGMKSHAGVASTMFRSLSDRGINIQAISTSEIKVSVMIDEDETELAVRVLHTAYGLDAEE

SEQ ID NO: 34500 - protein, 568 aa, Erythrobacter sp. NAP1
MANPLIPNLSSLKGYEGKTALADAIAGTILAILLVPQAMAYAQLAGLPPQAGLYAALVPPVLYLLFGTSPFVSVGPVALISLVIAEAASGTDVEVIEAAAIVGIEAGIILAAIGALRLGRLVNFISEPVLLGFTASVAILIFTSQLPTLIGTNPERAGNLPDALAAMWSVLPQWNVTTAAIGAAALALLLLFDWLAAPALWKIGVRPPWRQAIAKSLPLLVVVGCAIAASYVSADVARVSPPSGEMPSFSLPPLDPQLWLQFAPSALAVAVVIFATATAVAKSLAGSDRSRLDTSREAVALGLGNIGASLTGGYAVSASLSRSALVEDSGGKTPIAHVIGAALVLAVILFFAPILAFLPETALAALVISAVFGLIKPGEMKKVWQHDRLEGVVIAITFAATLLLGVMLGLAVGALAGLAHHLWISSLPRVTRVDTNDGGRSFRSIERDEMDLRTLPILILRIDRSLFFANAAFVEDEFFRLLGEHDVVTCLVIDMRAVNAVDASGAAMMQRLTERVHSQGIAIHFAAVHEPVRERLTRLDSNRCHFHRTVGDAMESCGSPQDEPIAPS

SEQ ID NO: 34501 - protein, 742 aa, Erythrobacter sp. NAP1
MPRTAFQQLGITEGDVVEISGKRATAAIAMAAYPEDDSLDVVRLDGLQRGNAEAASGEHVEIVVAESRPATRVVFAPAQREMRLQGPAQALKRNFFKKPITAGDLVATTGQQPVQNMPPDVRQMLRAPAYALTQIRLSVHSTSPKGIVHIDENTEVELRTEFEEPRDARGMVNYDDVGGMEDTIQQLREMVELPLRYPELFTRLGVDPPKGVLLHGPPGTGKTRLAQAVANESDAEFFTINGPEIMGSGYGESEKRLREVFEEATRASPAIVFIDEIDSIAPKRSGVPGEAEKRLVAQMLTLMDGIESRANLVVIAATNRPDAIDEALRRPGRFDREIVIGVPDQRGRREILAIHTRGMPLEEAVDLSELARVTHGFVGADIAALAREAAIDAVRRIMPRLNLEERTIPQDVLEDLCVTRADFFSALKRIQPSAMREVMVQVPNVGWDNIGGVGDAIDKLKEGIELPLKNAEAFRRLGIRPAKGFLLYGPPGTGKTLLAKAVAKEAEANFISMKSSDLLSKWFGESEQQIAKLFARARAVAPCVVFIDEIDSLVPARGSGQSEPQVTGRVVNTILAEMDGLEELQSVIVIGATNRPALVDPALLRPGRFDELVYVGTPDKEGREHILGIHTKDMPLASNVDLAEIAEKTDRFTGADLEDVVRRAGLGALRRMGGDVKAVEMQDFEDALEDSRATVTPRMEAEYRRMRGELKKRAAEANPIGFFAPDSLAPARAKKHGSDEEA

SEQ ID NO: 34502 - protein, 753 aa, Erythrobacter sp. NAP1
MADAPKGGFTSREALFYHETGRPGKIEIVATKPMTSQRDLSLAYSPGVAVPVEAIAEDPKLAARYTAKANLVAVISNGSAILGLGNLGALASKPVMEGKAVLFKRFADVDSIDIELDTEDPEAFINAVALMEPSFGGINLEDIKAPECFIIEQALRERMNIPIMHDDQHGTAIITAAGLLNACYLTDRKIEDVKVVVNGAGAAAIACTALVKAMGVRHENVIMCDRKGPITPGREGVDQWKSAHAVQTDATTLEEALKGADIFLGLSAAGALKPEWVAEMADKPIIFAMANPVPEIMPDEAKAVRADAIIATGRSDFPNQVNNVLGFPFIFRGALDVQATTINEEMKVAAATAIAELARERVPEEVASAYGKNQKFGTDYIIPAPFDPRLIEVVSSAVAKAAMDSGVAQTTIDDFEAYGISLRSRLNPTTSVLTGVYNEAKANPKRMVFAEAEEEVVLRAAIQFRDFGYGTPILVGRTKAVLDKLHQLSVSDPGGFEIQNSADSEHVPAMVDFLYQRLQRRGYTQRDVRRMVNQERNVFAALLVALGHGDGMISGVTRTYAQTMREVSLVLDKKADALAFGIHMMIGKNHTTFLADTTINERPTSEELAYIAKETAAVARRMGHEPRVAFLSYSTFGNPSGQWLGNIRDAVAILDRDGCDFEYEGEMAPDAALNDKVMGLYPFSRLSGPANVLIMPGLQSANLSAKLLRELGANTTVGPMLIGMEKPVQIVPMTAAAPDLLTLSVLSSAGIVG

SEQ ID NO: 34503 - protein, 262 aa, Erythrobacter sp. NAP1
MGYDRGRRRGRDKRDGFGEDSFDPFGGGDGFSPPSDYGNDRGGDRFGGGDRYGGGGGGDRFGGGDRNGGGGGFGGGPRGGGGGGRGGGAGGGGGGFNRMPAQVVGTGKGTVKFFNGQKGFGFIQQESGGEDVFVHISAVERAGLEGLAEGQELEFNLVDRGGKVSAQDLQVVGDVIAVQQAGGPPKRELTGEKATGTVKFFNSMKGFGFLVRDDGQPDAFVHISAVERSGLSAINEGERFEFDLEVDRRGKYSAVNLVPVQG

SEQ ID NO: 34504 - protein, 441 aa, Erythrobacter sp. NAP1
MKKPLLTGAALLAGSAFAAQPALAAVPDAEVVSAGTAYIFNTLLFLIGGFLVMWMAAGFAMLEAGLVRAKNTSTQCIKNIGLYSIAGLMFWVIGYSIAYPGFAEGSLGLFGIGAAPYSMQGVGEADTGTGYSVASDWFFQMVFCATTASIVSGTVAERVKIVPFFIFVTILTGIIYPVVVSWEWGGGYLDTVHGFSDFAGSTLVHSTGGWAALVGAVIIGARAGRYGADGKVNVFPGANIPLATLGTFILWLGWFGFNGASQLAMGTVGDASDVSKIFVNTNMAACAGVVVAIILTQVMYKKADVTMALNGALAGLVSITAEPLAPTVGQSILIGGIGGVIVVLTVPMLDKLKIDDVVGAIPVHLFAGIWGTLIVAWTGDATFLGQLVGVLLTAVWVSLASAVVWLALKYTIGVRPTEEEEMAGLDHAEIGVEAYPEFART

SEQ ID NO: 34505 - protein, 311 aa, Erythrobacter sp. NAP1
MKIMSGNSNLPLARAIAAYLEIPLTDASVRRFADEEIFVEIHENVRGEDVFLVQPTGYPANDNLMELLICIDALRRASAKRITAVIPYFGYARQDRKPGPRTPISAKLVANLITEAGADRVLAVDLHAGQIQGFFDIPTDNLYAAPVMAADIQARYGDQDLMVVSPDVGGVVRARALAKRLDNAPLAIVDKRRDRPGESEVMNIIGDVEGRHCIMIDDIVDSGGTLCNAADALLEGGAKSVAAYITHGVLSGGAVARIDGSQLKELVISDSIRPTEAAEASEKIRILTMAPLVGEAIRRIADESSVSSLFD

SEQ ID NO: 34506 - protein, 251 aa, Erythrobacter sp. NAP1
MLTINNLHAEVDGKAILKGLNLEVQAGEVHAIMGPNGAGKSTLAHVLGGKPGYDVTAGSVTFRGAQLFDLDPHERAATGLFLGFQYPVEIPGVSNVQFLREALNAQRKYRGEEPLSGGEFLKLAKEKAGLLKMDMEMLKRQVNVGFSGGEKKRAEMVQMGILDPAFAVLDETDSGLDIDALRVVGEGINSIMRAPDKGVLLITHYQRLLDVVKPDRVSVLADGRIVETGGPELALRLESEGYDAIMAEMSA

SEQ ID NO: 34507 - protein, 608 aa, Erythrobacter sp. NAP1
MSGEVSEISSDEVAGDVDNAAATKKSRSLAPLRMVYREAGKYPAQIGYALAALTVTALATLAIPWRFKVIIDDAFGGTAGPEEIAHAFQYLLMIVVILGIGTAARFYFVSWIGERVVADIRLKVQQNLLRLSPGFYEENSPKEISSRMTSDTAIIETVVGTTVSVALRNTLTGIGGIALLLYLAPTLTLGLLIGIPLVIAPIVFFGRKIRSVSRSSQDRVADVGAYVTEVLSAMKVVQSFGQEKREGDRFGGVVERTFDTAKKRIALRAGMTSIVILLIFGGITLVMWRGALAVSEGAISGGTIAAFVLTGGLVAGAFGSLTEVYGDLLRGAGAASRLAELLEARPAIAAPARPESLPVPPRGSLSFRNVTFRYPARPETPALKNFSLEIEPGETVAIVGPSGAGKSTLFQLVERFYDPQVGTIRLDGVPLTKADPAEIRDRIAFVPQDGVLFSADARDNLRYGRWDASEEEIWEAARAANAHEFLKALPAGLDTYLGEGGTQLSGGQRQRVAIARALLRDAPILLLDEATSALDAESEQLVQQALDELMKDRTTLVIAHRLATVRAADRIIVLDNGEIAEQGTHAELTAAGGLYARLASLQFAAEAA

SEQ ID NO: 34508 - protein, 394 aa, Erythrobacter sp. NAP1
MGKFLGGLSSLNAGELGAIILKALVERSGIDPERVDDVVFSQGYGNAEAPAIGHWSWLAAGLPLEVPGYQLDRRCGSGLQAVANAAMMVETGMADVVVAGGCESMSNVEHYTLQGRGGARMGDITLHDRLSRGRLMSQPIERFGIITGMIETAENLAKDYDISREEADAYAVRSHQNAAAAWDAGKFDDHLVPVEVPQRRGDPVMFERDEGYRADASVETLGKLRAIDLKRDPDAIVTAGNASQQNDAAAACLVVAEDKLAELGLTPSLWFGGWAAAGCDPSRMGIGPVPAVKRLFERRGYSWDDIDLVELNEAFAPQVLAVLKGWGWSADDNRREILNVNGSGISLGHPIGATGGRILADMAAEMHRRDARFGLETMCIGGGQGIAAVFERAA

SEQ ID NO: 34509 - protein, 328 aa, Erythrobacter sp. NAP1
MNQALLTTHVSSALKTLDIEIGGLKDLKRALSDSGLGNAFERAVDAFNSNKGRIIVTGIGKSGHIARKIAATFVSTGTSALYLHPGEASHGDLGTISRDDVVFAITWSGTTQELSDIVNFCGINNQQLVVATAHPQSWIGKAADICLTLPMVREACPNELAPTSSTTMQMVLGDALAVALIEARGFSPQNFGILHPGGLLGARLTTLEKVMATGEALPMVSLDATLRGATIEMSRKRYGCTAIVDQDNRLVGAFTDGDLRRSIAANDLDDNIASHMSPNPVTASPKMMAVDALALMNDSAVSVLFVTEQEDRLVGIVHMHDLVRLGIG

SEQ ID NO: 34510 - protein, 258 aa, Erythrobacter sp. NAP1
MIQVNAQADGCAHQTGILIKSRAPAAMTFPDLFERFSMTILPLGTSDATHLRFQAVARYASARAGDAPFTGNGSDQIAFVASGSTKLVAHASGGREQVVAFHFAGDLVSVPARAAHAYTLCALEDCELIYFPAEEFYKLARFEAGMVDEVLERVMKALARCREKTITLGRKNAQERLANFLLTMDERIGADNDGGRLLDLPMSRRDVADSLGLTIETVSRQFGELRDAGLLETMGRSKVMLLDLQGLAARAGHLFEPA

SEQ ID NO: 34511 - protein, 493 aa, Erythrobacter sp. NAP1
MNTATLASLAAYFVLMIAIGLYAWRKSTDTSEGYMLAGRNLPPSVAALSAGASDMSGWLLLGLPGALYIAGLSAAWIGIGLFVGAVVNWIVVAPRLREQTESYGNALTIPQFLANRFPDQGTNLRVISAIVIVVFFTVYTAAGLVGGGKLFETAFAGLLPGTGMSDYMLGIVITCGIVLAYTMVGGFLAVSLTDFVQGIIMMLALVIMPLVVMFGSGGDAGGSLAQVPVDGFLSLTEGLTLLGFISAVTWGLGYFGQPHIIVRFMAIDTVEKVARARTYGLSWMAVSLLGAVGMGLAGRAYAERNGLVVEDAETIFIVLSELLFHPAITGFLFAALLAAIMSTISSQLLVSSSSLTEDFYRLFLRKNATEREAVNVGRICVALVAVAAIVMASDPDSQVLGLVANAWAGFGAAFGPLIILALTWRGMTGAGAVAGLVTGAGVVMAWIALGWNASFMGGEGLYEIVPGFVAAWVAIVAVSKVTQGSNTAAQPAE

SEQ ID NO: 34512 - protein, 361 aa, Erythrobacter sp. NAP1
MLVGVPKEIKNHEYRVGLTPESAREYIAAGHRVMLESGAGTGISKTDDDYRAIGAEIVDTAEEVFASAEMIVKVKEPQPNEWVQLREGQILFTYLHLAPDPEQAKGLMESGVSAVAYETVTDRDGGLPLLAPMSEVAGRLSIEASAHSSHANNGGRGILMGGVPGVLPAKVVVIGGGVVGTQAARMAVGLGANVEILDRSLPRIRELDDMFQGRATTRYSNAGTIEDAITEADVVVGAVLIPGASAPKLVTRDMLGLMKHRAVLVDVAIDQGGCFETSKPTTHDAPTYMVDDIIHYCVANMPGAVPHTSSYALNNATLPFGLALANKGVVKACEDDPHLRLGLNVHEGKIVNEAVAESLGF

SEQ ID NO: 34513 - protein, 687 aa, Erythrobacter sp. NAP1
MAHATAQQSFPWHSGEVAVQERLGVAERMAKNGSQVVRDYMPEQHRNFYNSIPFMMIGSVDESGDVWASMVTGEPGFMRSPDPRELTIDFAPDSSDPAAAGLKDGKAIGMLGIELSTRRRNRMNGLVHSTTASGFAVSVGHSFGNCPQYIQLRDFEFVRDPQADFPIEVEELSSLDDEARTMIAAADTFFVASYVDLKEERQVDVSHRGGKPGFVRVDGEGRMTIPDFAGNLHFNTLGNFTVNPRAGLIFADFETGDVLQITGDTQIVFDGPEIANFQGAERIWHFTPRRIVRRRAALPIRWKLRAGDAFSPNSLMTGSWEETAARIEAQKAAKTWREFRIETITRETAEISSFTLVPMDGGGISTFKAGQHLPVRADIPGSATPVTRTYTLSSAPSDGTYRLSVKRQGLFSEHLHSLKEGDVIEARGPGGDFFIEGDEKRPAVLVAAGVGITPMLSMLRQIVFEGKRTRGTRPTWLVHAAKSRDLRAFHDEIGELVREAAGAVKFIAVHDAPGDDEKQGEDYSWHGRFRAADLGRFLPFGDYDFYMCGPPGFMQGVYDGLRDMNVSDARIHAEAFGPSSLIRRPDEGVAVTEVVPAATESVPVIFAGSNKEARWEPQGGTLLELAEARGIEAPFSCRRGTCGMCAVKLLKGKVAYTNKPSVEVAEGEVLTCSAVPHRDVDKLEIEL

SEQ ID NO: 34514 - protein, 110 aa, Erythrobacter sp. NAP1
MADINTRISTLVGENDVVLFMKGTPLFPQCGFSSRAVAILDHCGVQYESVDVLQDMEVRQGIKTFSDWPTIPQLYVKGEFVGGSDIMMEMFEAGELQQMMDENKVAKIES

SEQ ID NO: 34515 - protein, 571 aa, Erythrobacter sp. NAP1
MTSESADASSTGNYPIDPPIIELPISTHDSGFYDGFSREVTIPGKIIVSLIIMWAIFFPVSAMETLQVANSTIISSFSGWYVYLVAALIVVCGALALVPQTGSLRIGGPEEKPEFSRFSWFSMLFGAGIGIGMLTYSTGEPLAHFANNPDIIRGSIEAGTAEAVRPAYMWTFLHWGFGAWCTYALVGLAIGYVAHRRGLPLTIRSSLAPIFGKSMSGIAGHVVDIVAVVATILGVAVTMGLGVQQFVAGLYRVGMGDWLMVEAGDGSGLTASAAAIVTALLVLVGASTLSALSGVGRGIKWLSNINMALSFGLLALFATVGVGLGGLELLALGIWDYIVTLPANSLTLFTSDGSAAGDALVQWQLDWSVFYWAWWIAFAPFVGMFIARISRGRTIREYVLGVALVPSLMCFLWMALAGGTAIELELSGQAGGQILETGISDQLYATLAVLLSPGVALIVSGLVVLLLMTYLITSADSAILIVNTINGAGDDEGARRYHIIFWGMALAFVVGSMLILGGIEAIRITMIIGALPFSIVVVAMCVSIIKAVVFDLIRKRHGVPTTAEACESWAG

SEQ ID NO: 34516 - protein, 241 aa, Idiomarina baltica OS145
MGQETFKILVVDDDARLRSLLERYLNEQGFQVRVASDAEQMDRLLTRENYHLLVLDLMLPGEDGLSICKRLRQTNNTIPVIMLTAKGDEVDRIIGLELGADDYLAKPFNPRELLARIRAVLRRRGVEAPGAPSQDDQEITFGTYRLNLGTREMFDGDTPMPLTSGEFAVLKALVSHPREPLSRDKLMNLARGRDYSALERSIDVQVSRLRRMLETDPAKPRYIQTVWGLGYVFVPDGKLKN

SEQ ID NO: 34517 - protein, 253 aa, Idiomarina baltica OS145
MLTIKDLHARVEEKTIIKGLNLEIKPGEVHAIMGPNGAGKSTLGYVLSGRDGYEVEQGEVNFNGANLLDMEVEERAQAGLFLAFQYPVEIPGVSNMEFMKESVNAMRKARGEDELSSAEFLKMAKEACKQVNLPLDFLKRGVNEGFSGGEKKRNEIMQLIMLKPKLAILDESDSGLDVDALQVVANGVNSQRDGERSFIVVTHYQRLLDFIEPDYVHILAQGKIVKSGGPELAKEVEASGYAWLGQADEGEKA

SEQ ID NO: 34518 - protein, 374 aa, Idiomarina baltica OS145
MIYLDSVASYPSLPEVDEILYSTAKNNFANPSSSHSLGEQGKELVEGAREAAADSIGALSSEVVFTSGATESNNLIIKGVILPLLLKGQKPHLITSILEHKCVLSISRYLESLGCEVTYLHPNSDGEIQPSIVKNAFRENTALVSIMHVNNELGTINPIAEIGEVCMSEKIPLHTDAAQSYLKLETDVDELNVDFMSLSSHKVGGPKGVGIAYIRDLKDLDISPVVHGAGQEFGLRGGTLPTPLIAAFGVAIQSFSKYYTLEKTNKLKRQLLEGLEKANIKYRINGGRNVIPSCISLTLSSSNIQALLRCNHASLALSQGSACSARSIEPSHVLTALNFDREQASKTLRISFSHKNTGEDIKILLDEIIKFTGN

SEQ ID NO: 34519 - protein, 68 aa, Idiomarina baltica OS145
MSTTTGKVKFFNEAKGFGFIEQENGADVFVHFSAIQADGFKTLAEGQQVSFTVAQGPKGPQAENVVPM

SEQ ID NO: 34520 - protein, 387 aa, Idiomarina baltica OS145
MKDVVIVDCIRTPMGRSKNGVFRHTRAEDLSAALMKGLLERNPEVDVNELEDIYWGCVQQTLEQGFNIARNSALIAGIPHSVAGVTVNRLCGSSMQALHDATRAIMNGDGDIFMAGGVEHMGHVPMTHGIDFHPGMNKSVARAAGSMGMTAELLSRKFGISREQQDAFGARSHQRAHQATVEGRFAKEIYAINGHNEKGELVRVTTDEVIRPETTAESLAQLRPVFDPANGTVTAGTSSALSDGAAAMLVMSAEKAKALGLTPRVKIRSMAVAGCDPSIMGYGPVPATEKALKRAGVSMDDIDVVELNEAFAAQSLPVLKGLKLFDQMEDKVNLNGGAIALGHPLGCSGARISTTLINLMEEKDAKLGLATMCIGLGQGIATVFERV

SEQ ID NO: 34521 - protein, 856 aa, Idiomarina baltica OS145
MRHDKFTTKFQMAIADAQSLALGRDHQFIEPAHLMQALMDQEGGSVRPLFTIIGANISQFRSELGKLLDKMPEVQGAEGEVQLSQGTAKLLNLCDKYAQQRKDAYISSELFLLAATEDKGPLGELFKKLGIKKDALEKAINDIRDGQNVDDPNAEEKRQALDKYTIDLTERAAQGKLDPVIGRDEEIRRTIQVLQRRTKNNPVLIGDPGVGKTAIVEGLAQRIINAEVPEGLKNKRVLSLDLGALLAGAKYRGEFEERLKAVLNELAKEEGRVILFIDELHTMVGAGKADGAMDAGNMLKPALARGELHCVGATTLDEYRQYIEKDAALERRFQKVLVDEPTVEDTIAILRGLKERYEIHHSVEITDPAIVAAASLSHRYISDRKLPDKAIDLIDEAASSIRMQIDSKPEDLDRLERRIIQLKLERQALQKEKDDASKKRLEHLHDELDELEKKYGELEEVWNSEKAAVQGTQHIKSQLDQVRTEMDIARRAGDLNRMSELQYGRIPELERQLDLALQAEMQDMSLLKNRVTDEEIADVLSRWTGIPVSKMLEGEREKLVQMESLLHKRVVGQNEAVDAVANAIRRSRAGLGDPNRPIGSFLFLGPTGVGKTELSKALANFMFDTDDAMVRIDMSEFMEKHSVARLVGAPPGYVGYEEGGYLTEAVRRKPYSVILLDEVEKAHPDVFNILLQVLDDGRLTDGQGRTVDFKNTVIIMTSNLGSDLIQAHASDNSYDEMKAMVMDVLAGHFRPEFLNRVDETVVFHPLGREEIRSIAEAQLQRLYARLEDRDMSIELSVEALDFIASAGFDPVFGARPLKRAIQQELENPLAQRILSGDFKAGDTIHVDVADNRLAIE

SEQ ID NO: 34522 - protein, 461 aa, Idiomarina baltica OS145
MVSPIILIVEDDAALREAITDTLELAHYQCLHADNGESALLQLKKHRIDLVVSDVQMPGMNGLQLLRNIKHLKIDVPVVMMTAYAKVDDAVVAMREGAVDYLSKPFSIDELTQLVQRHAPIEPAAGHGVVAKDSASLALLELAKKVARTEATVLITGPSGTGKEVLARYIHQQSKRDKQPFVAVNCAAIPETMLESLLFGYEKGAFTGATQSSPGKFELAQGGTLLLDEVTEMDIALQAKLLRVIQERQVERLGARQAIRLDVRIIATSNRDIKAAVAEGIFREDLMYRLNVFPLRWLPLAERTEDIGPLAEALIARHRQRLGIREAVTLSDEALQHLKQYAWPGNVRELENVVQRALVLQQGGKIRPSDLMLDDALMDHVLPEQVSQDSQLLASQPEHENLDNEPAEELGESLFMQEYRIIKQALARHHGKRKPVAEELGISPRTLRYKLAKIRDNGLSV

SEQ ID NO: 34523 - protein, 304 aa, Idiomarina baltica OS145
MSEISLPVATNDPVRPFFGAERSFSIHPGSIHIIGFGFDGTACFRKGTKEGPDGLRSVSEDIESYSPYLDADLEDYEFFDLGNLRLGFDDDVEAQWHHANNDFNQIFEPLDLAATQTKLITLGGEHSISYAPIVKHLKQYPNMVLLHLDAHADLRDGFLGYHFSHASIIRRVVDHFGPKHQLIQYGIRSGTRDEYTWMNQQGTIRKSRQDFLTSVQEIAGDRPIYLTLDLDYFDPAFMPGTGTPEPGGEDFHSFVSLMKILREKNFIGADIVELSPKIDPTGNSDVFAAKIVREVLLTLEQAGA

SEQ ID NO: 34524 - protein, 544 aa, Idiomarina baltica OS145
MQWLHRWVSLVLVIQVALWLVSGLFFSLTGHHGMSGHQYMVSKNSEPPLKKIAPQIDVTEMHQRFPLAHSIELVSVAGVGQYQVSLPDGRLLYFNADTGERWSTDQALATQLALNSYNGPGQVERVERVKGSDEVNGWNASGFRIDIEDDLNTRIYIDEASSQVVEHRNTPWTIADWAFRLHFMDYTGGRSFNHLLIWSAGLFALWFSLSGLILLGRNITNGDFNPNRKRTWLEYFQQKGQPIASSCGGGGTCGLCKVTLQGNSIPSPTAAEKALLSATELEAGTRLSCQHRTSPDYDVKLHNAGVDDIALTLDSKRQLTPSIMELTFVSSDPVSYEAGQFMQFRIPHINEILSRHYSVATRPHPTQFVFNIRQLPSPSEGIPPGIGSNYLCNLEAGARVDAVGPFGDFQLTKQNSHTQVFIGGGAGVAPLRALIQSELAADSPRRCIFFYGARYEKELCYRNEFEREERLTYIPVLSESAKSDDWTGPTGFVHETAMKWLAGKNKETLDIYVCGPPPMLEATLKSLADFGVPRERIKFDDFGI

SEQ ID NO: 34525 - protein, 436 aa, Idiomarina baltica OS145
MAEHDHEHGHQDYQKSSLSLWGAVSLGTGVMIGAGIFALTGQVAQLAREWFVLAFVCGGIIAGFSAYSYVKLAKAYPSAGGIAMFLSKAYGKGSVTAIFALLMYFSMVINESLVARTFASYTSQLISFEAQWLVPLLAVGLLVFAFFINILSNQFIQTFSFFMAFVKALGLVILAAGGLWASGIQFESISAIPEEATGGGILAGIALSILAYKGFTTITNSGGEIVEPKKNVGRAIIISLIICALIYVLVTLAVGSSLSIDEIVKAKDYALAEAARPVYGETGLWVTVAFAIVATVSGVIASAFAVSRMLAMLTNMKLVPHSHFGMPGSIQKHTLVYTIVMAMVLAAFFDLSRIASLGAIFYIVMDIAIHWGVLRHLRQKVNANIYILVSAITLDVIVLAAFIWVKWTSDPQVIWASLIGMALIAAGEILFLRKKR

SEQ ID NO: 34526 - protein, 400 aa, Idiomarina baltica OS145
MNKVVLAYSGGLDTSVIVPWLRENYGCEVVAFVADVGQGAEELEGVEAKAKASGASECHIVDLKDEFAADYIYPSLKTGAVYEQSYLLGTAMARPVIAKAQVELARKVNADALAHGCTGKGNDQIRFESCYAALAPELTVIAPWREWDLSSRESLLAYLAERNIPCSASLKKIYSRDANAWHISHEGGELEDPWCEPSDEVWTLTCSPEQAPDEPEYISLAIEQGAVVSVNGEALSPLKCLEQLNKLGAKHGIGRVDIVENRLVGMKSRGCYETPGGTIMMYALRGIDELVLDKMTRSWKTQLSEQFAQLLYDGRWFTPNQASVLAAAESLNQVATGEVVIKLYKGNVTVTQKCSPYSLYSEAFATFGADNVYDQKHAAGFIRLYSLSSRIRALKQTAKV

SEQ ID NO: 34527 - protein, 409 aa, Idiomarina baltica OS145
MAVTSLAKDKIKVLLLEGVHDSAIELLKQQGYDQLEILKGSLDEDELCEKIKDVHMIGIRSRTQLTEKVFAAAEKLIAVGCFCIGTNQVDLKAAQKHGVVVFNAPFSNTRSVAELVLAETIMLLRGIPQKNAQAHKGGWLKSANHAYEVRGKILGIVGYGHIGSQLSVLAEQLGMQVIYYDVETKLPMGNARSSKRLDDLLAKADVVTLHVPETPSTRWMIGSAQLAKMKPNSLLINASRGTVVDIEALAEALTSGHLAGAAIDVFPVEPQSNQDLFESPLCGIENCLLTPHIGGSTVEAQENIGIEVAGKLVHYSDNGSTLSAVNFPEVSLPQHATARRLLHIHKNQPGMMNAINSILSDFEINVAGQYLQTDENVGYVVMDIDTDNGTELLDKMKAIPGTIRARQLF

SEQ ID NO: 34528 - protein, 392 aa, Idiomarina baltica OS145
MNAASLASTEYALNTLYILLSGALVMWMAAGFAMLEAGLVRSKNTTEILTKNIVLFALACIAYLIIGYTLMYGAGGTDNFADNADFFFQSVFVATAMSIVSGAVAERMKLLAFFIFAVVLSAFIYPFQGSWSWGGGFLAEAGFVDFAGSGIVHMAGASAALAGVLLLGARRGKYKDGKPTAIPGANMPLAALGTLILWFGWFGFNGGSQLAIHDIENANAVAKVFVNTNTAAAAGAIGALLITVFIWRKADLTMIVNGVLAGLVAITAQPLTPEPYTAAIIGASAGVLVVISIISLDRLRIDDPVGALSVHGVVGFYGLMLVPLTDASATWSVQLLGAAAIFGWTFVASLVIWYLLKVTVGIRVSEEQEYLGGDISECGVEAYPEFTGSTKR

SEQ ID NO: 34529 - protein, 560 aa, Idiomarina baltica OS145
MSETEHRPSNFIRQIIDKDLAEGKHTSVHTRFPPEPNGFLHIGHAKSIVLNFGIAEDYQGTCNLRFDDTNPLKEKVDYVESIKRDVAWLGYQWEGKPRYSSGYFDELHGFAMELIEKGLAYVDFSDQETMREMRGTLKEPGTNSPYRDTSVEENLDLFKRMTAGEYKDGECCLRAKIDMASPFMCMRDPVIYRVRHVHHHQTGDKWCVYPMYDFTHCISDALEGITHSLCTLEFQDNRRLYDWVLDNISIDCHPQQIEFSRLNLQYTVMSKRIINNLVEEGKVSGWDDPRVSSIAGLRRRGYTPSSIREFCRRIGVTKMDNQVEMGMLEACIRDDLNENAPRAMAVMDPIKLVIENYPEGQQELLDAPNHPNNPDMGCRQVTFSREVYIEREDFRESANKKFKRLVLDKEVRLRNGYVVKAERCDVDSDGQVTTVYCTYDPDTLGKDPADGRKVKGVIHWVSADTAKEAEFRIYDRLFRVPNPAAEDDLFAALNPDSLVVKHGFVEANLAEAKVEQPYQFERLGYYVLDSDAEKEQRLIFNQTVGLRDSWAKIEQQGDAA

SEQ ID NO: 34530 - protein, 671 aa, Idiomarina baltica OS145
MCGIAGVFNHRVNDPIDAQTLVNMAAIMHHRGPDGYGYHIQSEQGIGFSHARLSIIDLDEERAKQPFLSADERLMLTHNGEFYDFKRIRADLTARGARFRTKSDSEIVLHLFERYGLEATLKELRGEFAFGLYDKDEDALYLVRDRFGIKPLYWTETDEGVVFGSELKVLFAHPQVKRAFSAEGLYHQLIQVMVPGSTAFEGVHQVQPGQVVKIKRNNGTLNIDTLKYWDVDFPNEHDYPGDEVDETEYVEGVREKLLEAVQHRMTADVPVGCYLSGGIDSCSILGLASASTQTSVKAFTIGFDSDDYDETPIAREMAEATDADHHIMALKANDLYDHFVKTLWHTERTIYNTLGVAKYLMSQEVHEAGYKVVMTGEGSDELFAGYPAFRKDMFLHGLDHLPEIERLEWQKLLEKNNQLFKGAMLAREEFSSDALNKKVGFTPSCVQPWLSCSSVAKPLINRDLQKQLGNYDPGQAIADTLDETYLAGRHPLDRAQYVWIKTMLEGQILTWGGDRVDMANSMEARPAFLDHHLAEYAFTVPPHLRIKGNKEKYVLREAMKGLLPETLYKREKFAFMAPPAHTDPEKWKAVERLAEEFLSEQAVKDAGLLDFDAVQAVFARHSSSDVTAEEQVQLDAVINHMLGVQVLHHHFVATDVPKQAQQRAQELGWHA

SEQ ID NO: 34531 - protein, 69 aa, Idiomarina baltica OS145
MSNTVNGTVKWFNEAKGFGFIEQQGGADVFAHFSAITGDGFKTLNEGQRVSFAITQGPKGPQAENIVAL

SEQ ID NO: 34532 - protein, 423 aa, Idiomarina baltica OS145
MTFSELGLCPEILNALTRQGYTEPTPIQAQAIPAVMAGNDVMAAAQTGTGKTAGFTLPILEMLKGNERAKANTARVLILTPTRELAAQVGESVANYGKDLPLSYAVVFGGVKINPQMMKLRKGVDILVATPGRLLDLYQQNAIRFPQLETLVLDEADRMLDMGFIHDIKKIIKLLPAKRQNLMFSATFSDEIRKLAKSLVNNPVEISVAAPNATAERIEQTLYAAEKTHKPRMLMQILRNLNLPQVIVFSRTKHGANRLVKQLDKDGFLAAAIHGNKSQGARTKALSDFKSGAVQVLVATDIAARGLDIEKLPYVINYDLPQVAEDYVHRIGRTGRAGQVGHAISLVMDEEFRTLKAIEKLIGQPIERRTLDGFDEVELTGKTPPPKREQRPPRKSRGAPSDKQKSPGRAKHRRQGSNKSSQR

SEQ ID NO: 34533 - protein, 464 aa, Idiomarina baltica OS145
MSQAQHLWILDDDPSIRWVLHKAFERSGYQVQVFERADELTRALDSKVPDTIISDIRMPGTDGLALLKQIKQRDPDLPIVIMTAHSDLDTAVSAFKGGAFEYLAKPFDIEEARNVVAKAMAHRSKPEVRVSAQQANNDIIGESAPMQDVFRAIGRLSASSVSVLITGETGTGKERVARALHKHSPRSDKPFIALNMAAIPADLVESELFGHERGAFTGADKKRDGRFLQADGGTLFLDEIGDMPLSVQTRLLRVLAEGQFYPVGAHQPVQVNVRVIAATHRDLKEAVANNEFREDLYHRLNVIQLRLPALRERKQDIPLLARYFLKQSAIELEVSEKQLSDAALAQLEAYGWPGNVRQLENVCRWLTVMAPAQQVSPDELPHELLEQSEQLENGQSTGNWRELLAHELRTQTHNYDNMTPIIQDVERIALRIALEKCDGHKQKAAHWLGWGRNTLTRKLKLLSK

SEQ ID NO: 34534 - protein, 812 aa, Idiomarina baltica OS145
MTAEPSLDQIRTVADNVQVHKFGGSSLADAFCYRRVARIVTEYAGASDVVVVSAAGDTTNRILAIIKAQKESGDTADILLDQLERFQQGLIHELLGSEFAAPILEQSTVDFQRFRDFVAGKEIIEHEAELLSYGELWSARLLAALLRKQGTKADHIDARDFLKAEDAPEPVIQELESRHNLLNRVAPFPGTRFIVTGFIARGLNGESLTLGRNGSDYSATLVGSLLNSKQVTIWKDVAGVYSADPRKIERVVSLSTLDWSEAEELARLGSPVLHPRTFQPVDRDRMVISVRSSLKVENQQTRIGNFEHTEPKGKVFTSLSEVVLFKVELNDRELVKQLEALDLTPLVSWTEPEKHQQYLVFHQNHLNYISHWLDRINAGNAVTQIHGYSMVALVGNRIQETDQYNTFKLQLGEQKVRRFAVSEDGCSAVAILEQKLDNRLLNRLHSQLFNYRRSLGVLVIGRGNIGTAWLDLFRQQRDRINQVMDVRVIGIANSKKLWLDYSGVELSEWQAGFDRLSRPYVLTELLRELPNAPYDELVMIDLTDAKPVAQLYPSLFANGLHIISANKRAGSAEEALYREIRTIQHEYKREWLYNTTVGAGLPLNYAINDLRGSGDEIRSISGIFSGTMSWLFENFTDGVKFSDLVLEAKKRGYSEPDPREDLSCQDLVRKLLILAREIGLKLDWEDISVSSLVPESLRDISASEFLQRAHELDEPMDTMLKEAAKDGNVPRLLASFSVSEEGRVSAKIGVEYIPAGDMLANLIPGENIFVIYTDWYSEMPLVISGPGAGKHVTAGGVQSDLNQLLAKLTVTG

SEQ ID NO: 34535 - protein, 289 aa, Idiomarina baltica OS145
MKRNRAFLKWAGGKYGLVEPIKACLPEGRKLIEPFVGAGSVFLNTDYDRYLLNDINPDLITLYQFVKRRPKTFIADARRLFTARNNQSDAYYALRKSFNESNDPYYRSLLFLYLNRHGYNGLCRYNSRGIFNVPFGDYRKPYFPEAEIEVFAEKAKRAKFVCSSFEQVFRRARKGDVIYCDPPYAPLVQASNFTSYATGGFSLDEQSELARHAIRAACKRHIPVLISNHDTPLTRALYERAKISSLKVARNISQKGDARKPVAELLALFSHEHQQNVIPMKRDIKKVGT

SEQ ID NO: 34536 - protein, 554 aa, Idiomarina baltica OS145
MSENKDIDESKAEKDPMIPDGEVNPINTDYKVGQDNVVMNLGPFGLDFHNRVFAVSGLAIVAFVLFALIFQEQAEPLFSGIRGWLTSNLDWFFLSAANIFVVVALVLIFTPLGRVRIGGTEAKPDFSYMGWFSMLFAAGMGIGLMFYGVSEPISHFSSSLGGISMENGVRTDWAPLGAAGGNEAAARELGMAATIFHWALHPWAIYAILALGLALFSFNKGLPLTVRSIFYPILKERVWGWPGHIIDTIAILATLFGLATSLGLGASQAAAGLNFLFDVPKGDTTEILLVMGITAIALTSVLAGLESGVQRLSQINMTLAALLLLFVIIVGPTLAIITGFGENLVNYIANLPALSNPVGREDLNFTQGWTSFYWAWWIAWSPFVGMFIARVSRGRTVREFLVSVLLVPSLACVFWMSVFGNIAIEQVINGAQDLVDADLSLKLFVMLEGLPWASVTSFIGIILVIVFFVTSSDSGSLVIDTISAGGKVEAPVPQRIFWCTFEGLVAIALILGGGLVALQAMAVSAGLPFTIVLLAACVAVIQGLRSEPRIGKNG

SEQ ID NO: 34537 - protein, 578 aa, Idiomarina baltica OS145
MRKNAAQLAVAALEKLGVTHTFGIPGVHNTEFYDALHASEQITPILVTHEGGAAFMADGMSRVRQMHEGIGVLAIVPAAGFTHAASGIGEAYLDGVPMLVISGGVRTDTEFDFVLHGVDQLELAKGITKGAFRVNHQNDVTDVLYQAYQLATEGKPGPVLVEIPVNLQLFDATVAQPQQPPQPTTPAIDEQAIQRAVELISAGKRPGLFVGWGARHAQQQLIDLAEYLQAPVATTLQGLSVFPHDHPLHVGFGFSASAVPAAQASFKDCDLMIAIGTRFAEIPTGSFSAKVPENLIHIDIDESVFNRNYPSKVSIKGDATEVLKLLNNALSGQAARADSASLKATIKQLKQDYFDEWRAHDSHERINPYVFFTSIAAQMMDDAIIVLDDGNHTYLAAELLPLKAGMTLLTPTDYNAMGYAVPAAIGAKLAQPERQTIAIVGDGCFVMTGMELLTAQQQEVGVVCFVFNDGELSQIAQAQQTPYARKPCTALVGAKFEGMALATGAHYIRIETEAELDAYIAQAFDVAAKGQSVLVDVNIDYSKPTRFTQGTVKSTFKRFPTRQKLRIAGRAVKRKLFG

SEQ ID NO: 34538 - protein, 460 aa, Idiomarina baltica OS145
MTNPQHTFRVAKFGGTSVANYSAICAAVANVKSQNQPILVVVSACAGVTDRLVMLANESDNVESILSEIVHRHTEIADELSRLNRAGAVEKQLALDDLHDRLRQHVARRPTPHDASFVAWRDQLLSFGEYCSSLLFSWAWEAKTEQPSAVLEAKTWLFTDSRYGRARPQLKAMIEKAPQWLKTLEPGRLYVTQGFIGKNERGQTTTLGRGGSDYSAALLAVVVQAQELQIWTDVAGVYSTDPRLCSDAFAIAEMSFDEAAEMATFGAKVLHPASLLPAIEYQIPVFVGHAAYPARGGTRLVKNSTHKPDVRAVAVRKQQTLMTVHSIDMFHASGFLAQLFSIFAKYDISVDLITTSEVSIALTLDEGGSQANHAVSVPAAAIAEIELFAKVELEYNLTLIALIGNQIGRQSQLSQWVFDAVAPTPVRLICQGASEFNLCFLIPERDTVDVVTRLHERIKR

SEQ ID NO: 34539 - protein, 679 aa, Idiomarina baltica OS145
MSNAKGNWRNAILVPVFLPAVIVIALLVIGTLSAPELAGNLFSATLAGITEHFGWFYMLAVALFLIFIVGVALSRWGRIKLGPDHCEPEYSFTSWFAMLFSAGYGIALLFFGVAEPVLHYAEPPVGAAETVDAAKQAMQIAYFHWGFHIWAIYGLVGLVLAYFSFRHGLPLSMRSTLYPLIGDKIHGPAGHTIDTFAILSTLFGIATTLGLSVIQINTGLNYLWEDIPVDTTVQVIAIAVITLAAIASVVAGMDKGIKRLSLLNMALVMFLLIFVFAVGPTIHILETYLQNTGAYLSGIVERTFNLQAYTRSDWIGNWTLFIFGWTIAWAPFVGLFIAKISRGRTIRQFVLGVMLVPTFFTFFWFAVFGDTALNMIMNEGYTSLISEVQNNQAIALFKLFENLPLTNVLSFATVLLIITFFVTSSDSGSLVVDSLASGGVGETPVWQRVFWASTEGVVAAVLLVAGGLNALQTAAITSAFPFAIIILIAAVGMWRALVIEGHQYSSLKSHRQSHRRGVNEGPDYWKKRLRGLVKFPQQSEVKEFIYGRASEALEKVKAELETQDWPARFTKDEEHERIMLTVEREGDLDFAYEIRLREYSMPQFVLRPSHKNEHYYRAELFLRQGGQSYDLYGYEMTDIINDVINQFENYLHFRHHSPGVLPWEMEKHDEDLQDIETNK

SEQ ID NO: 34540 - protein, 393 aa, Idiomarina baltica OS145
MSNDSVVIVAANRTAMGGFQGSLSEVSAPNLGATAIKAALGNSGLKETDVSEVIMGNVLPAGLGQAPARQAMLYAGLPQSTGATTINKVCGSGLKAAMFATDLIRAGSADVVVAGGMESMSRAPYLLDKGRNGYRMGHGQLFDHMMLDGLEDAYEGKAMGCYAQDTADKYGLDRDAMDNFAINSLEKAQAAIEKGYFKGEITPLTYSTRKGDVTVDTDEQPGKARLDKIPQLRPAFKKDGTITAANSSSISDGAAALVLMRESEAAKRGLKPLARVKGHATHSQAPAEFTVAPIGAMDALLNQVGWSKEDVDLWEINEAFAMVTMLAINEMKLDANRVNVHGGACALGHPIGASGARLLVTLLHALKQRGEKRGITSLCIGGGEAVALAVEMM

SEQ ID NO: 34541 - protein, 326 aa, Idiomarina baltica OS145
MWEGYLAKQQKIDFIKREFLSRLCRQMQLVKCEGPLLTEQGTGLQDDLSGIERPVEVKVSALPDKQYQVVHSLAKWKRQLLADYQAPVGQGIVVTMSALRPDEETLDETHSVFVDQWDWEKVIAEEQRSIQYLKQQVQLIYAALTATEGKLRAIYGGLSILPRQLTFISSETLRAEYPELTAKQRENKITEAHGAVFVYGIGAPLSDGKKHDERAPDYDDWSTQTEHFGTGLNGDLLVWSPKLQKAIELSSMGIRVDAAALKKQLELTEQTDRLKLAWHQRLAAGELPLTIGGGIGQSRVVMLLLQADHIAQVQCGVWQPGIQEAL

SEQ ID NO: 34542 - protein, 507 aa, Idiomarina baltica OS145
METGTLISLALYFIVMLGIGLYAYKKSTDSVSGYMLGGRGLGPAVTALSAGASDMSGWMLMGLPGAIYVAGVSQLWIAVGLVIGAYLNYVIVAPRLRTYTEVADDAITIPDYFANRFNDKGRALRIFSSVVIIIFFTLYTSASLVAGGKLFDSSFGMDYTTGLWVTAGVVCAYTLFGGFLAVSMTDFVQGCIMFVALVLVPIVAFAELGGYSDVVGQVKDINPQFLDFFMDGSTGESLAALGIISLLAWGLGYFGQPHIIVRFMAIRSVSDIKNARRIGISWMFVSIIGAMATGFVGIAYVAETQMTLNDAETIFIIFSQFLFHPLIGGFLLAAILAAIMSTISSQLLVSSSSLTEDFYKAFLRKDASDKELVAVGRISVLLVSLVAIWLAWNPENTILSLVSNAWAGFGAAFGPVVILSLFWRRMNRHGALAGMLLGAITVLIWIYGPTVGGEHLSAYVYEIVPGFIISTIAIIVGSLVTAEPDQNLRDKFDEMEQIMDDHYHTAK

SEQ ID NO: 34543 - protein, 284 aa, Idiomarina baltica OS145
MTQIAFLGLGAMGIRMAQHLIDAGHSLTVWNRTESRAEPLLEQGAQWADTPAEAAQGAELVIAMVRDDDASAAVWLDEQTGAFKGMSDNAIAIESSTLSVDWVKELAQQAQQRGKQLIEAPVSGSRPQAQNAELVYLVGGDAHLVNRAEPVLSLMGKKVNHTGEMGSGALAKLVTNTLMGIQVTTIAELIGMLKRQGQDPDAILEAVSTTPVWSKTAGIVRKSMVSEAYDPQFPVDLIEKDLGYCLQAADQVAPMTSAARTVFNEAQEQQLGEWNMTVVAKLYE

SEQ ID NO: 34544 - protein, 375 aa, Idiomarina baltica OS145
MLIGVPKEIKNHEYRIGLTPAAVREYVANGHDVIVENNGGAAIGFTNEDYQAAGASIVETPEEIFERADMIVKVKEPQPNECKMLREGQILYTFLHLAPDPTQTKLLAESGCTAIAYETVTDNRNGLPLLAPMSEVAGRMSIQAGAHYLEKAHGGSGTLLGGVPGVAPGKVLIIGGGVVGTNAAKMALGLGADVTILDRSLPRLREIDDIFNGQVTTIYSTVDAIDKYSREADLVVGAVLIPGAAAPKLLTREHIKNMKPGSVLVDVAIDQGGCFETSYATTHQDPVYVIDDVVHYCVANMPGGVARTSTIALNNATLPYGIALANKGNQAMLENEHLLRGLNMHGGKITYKAVHDDLGEELSLDYIDPREALSK

SEQ ID NO: 34545 - protein, 396 aa, Idiomarina baltica OS145
MDYQLSKRVNSIQPSPTLAVTQKANELRSAGKDVIGLGVGEPDFDTPDFVKQAAIKAIEDGKTKYTAVDGIVELKQAVSDKFKRDNQLEYGLDEIIVSAGGKHSIFNLLSAWLNPGDEVVIPAPYWVSYPDMVKLVEAEPVIVHTDLEQRFKITPEQLRDSLTEKTRLMFINSPSNPSGTAYSAEELRALADVLVDFPNVLIATDDMYEHILWDRSQFANIVMVAPELRDRTVILSGVSKAYAMTGWRIGYAAGPAPIIAAMKKIQSQSTSNPASISQHAAVAALNGDQSCIDTMVSAFKERHDYLVSALNEIEGIECVKGDGTFYTFARIQNLIEKAGVANDVELCEKLLTEANVALVPGSAFGTEGYCRLSFATSLDTLKEAVARINQFVKALK

SEQ ID NO: 34546 - protein, 203 aa, Idiomarina baltica OS145
MIKTRAEFLRRFNLQPSPKIERRVDNVLKQKLRPAAVMIVLVERPHGLSLLLTQRAKTLRKHAGQISFPGGRFDQSDRNLLETALRETEEEIGLSRSDIEVIGRLQDYPVLSYYNIRPFIGFACIHHELKRQPSEVAEIFEVPLADILDPYNHYAYRIRKFIYDRIYFIPWQHRNIWGATAGILRELAEHLQPELKQQVSPLN

SEQ ID NO: 34547 - protein, 392 aa, Idiomarina baltica OS145
MKFVDEVEIRVEAGDGGNGCISFRREKYIPKGGPDGGDGGDGGDVYLEADENLNTLIDYRFERFHRAERGQNGMSKNCTGKRGEDITLKVPPGTRAKDIDTGEVIGDLTRHGQRIIVAKGGFHGLGNTRFKSSVNRAPRQKTNGTPGEVRQLQLELMLLADVGLLGMPNAGKSTFIRSVSAAKPKVADYPFTTLVPNLGVVRPAAHHSFVIADIPGLIEGAAEGAGLGIQFLKHLERCRLLLHLVDLAPFDESDPVEQARVIIEELEKYSPKLAEKPRWLVINKVDLVLEEERQELVDDLVERLGWEGPVYQIAALEGRNTQQLCHDVVEYIDTLPSPHEEAQKAQEEEAVDFKWDTYHDEVLEEYQDEDDFDDDDDDDDGVDDGVEVIYQK

SEQ ID NO: 34548 - protein, 504 aa, Idiomarina baltica OS145
MQSQSWFDNSALLTVAQWLVALFVLGIITLVVSVGVMYVVDKIQTRHTIRRNYPVVGRFRYIFERMGEFMRQYFFAMDREEMPFNRAQRSWVYRAAKNADRNVAFGSTRDLTRTGTIIFSNAPYPPLAEQSVSPQPVKIGPYCEKPYSPTSYFHISGMSYGALSPVAVKALSAGAKKAGCWLNTGEGGLSPYHLSGHCDVVFQMGTAKFGVRTKDGKLDESRLAELGRHDSVKMFEIKLSQGAKPGKGGILPGIKVNQEIAEIRGIKVGEDAISPNRHPEISNNEELLDFIDKVRTITGKPTGFKFVMGDPSWIDELVDSILSRGEEAAPDFITLDSADGGTGAAPQPLIDYVGLKLSESLPILVDKLTEAGLHKRIRIICSGKMISPADVAWAIAMGADFVVSARGFMFSLGCIQAMQCNKNTCPTGVTTDDPKLQRGLDPQDKSERVANYHKYLEYGVNIIAHSCGVTDPRQLNRRHARVIKPDGESISLAERYPLPPARRR

SEQ ID NO: 34549 - protein, 548 aa, Idiomarina baltica OS145
MKAADLMVKALENEGVQYVFGIPGEENLDLLESLSNSSIELVLTRHEQAAGFMAATYGRLTGKPGVCLSTLGPGATNLVTSVAYAQLGAMPMVVITGQKPIKDRPQGQFQIIDVIDMMTPITKYTQPIISAKTIPSHVREAFRRAEDERPGAAHLELSDDIAAEEVDATPITPSYSRRPITEHKSVDYVLKLLKEAKHPLIVIGAAANRKITAKMLRAFVDKTGIPFITTQMGKGVINEDHPRWLGNAAVSDGDYPHRAIEQADLILNVGHDVVEKPPFMMKPDQRKVVHINFQGAQVDSVYFPHASMIGDIGNSIWQLKEGIEPQSHWDFEFMLKVREHMRDHTDEGAHDEAFPMLPQRLVEEVREVMPDDGIIALDNGIYKIWFARNYPARQPNTVLLDNALASMGAGLPSAMAAKLVHPNRKVVSICGDGGFMMNSQEIETAVRMNLDLVVLILNDSAYGMIKWKQEHMGLHDFGLDFKNPDFIKYAEAYGANGYRLEATEKLQPLMRDCMEKGGVHIIDVPVDYSRNVELLNEEIPKRAKAIQA

SEQ ID NO: 34550 - protein, 554 aa, Idiomarina baltica OS145
MNSPRSILLVAFIVVSFFLFQQWTIDTAPGTKAPQQTQQTTQQTEDQNSSTVPQSGSNTADTAVPESNSPNAITSNGRLITVVTDELELKIDLNGGDIVSAKLLEFAATLDSEERFQLLKRNSNHIYIAQSGLIGPQGIDSNNGRAQYQAAQERYRLTGDTLEVPLTTQTESGLNVTKTFVIKRGHYDIGVNYAIENQSSEAAQLQFYGQLQQTMTAGESGSMIMPTYFGAAYSQDEDKFEKYPFDDMREKKLSVTTQTGWVSMLQHYFVAAWVPTQTQQNKFYSQVTPSNQAVIGVLYPSTTVQPGASKTIDATIFVGPKDQDAMAKVAPYLDLTVDYGFLWWLAQPIFKLLQFLQSFVINWGLAIILITVIIKALLFPLTKAQYVSMAKMRLLQPKMKSLRERYGDDRQKMGQAMMKLYKEEKVNPLGGCLPMLLQLPIFLSLYWVLLESVELRHSSFVFWIQDLSTKDPYYILPILMGISMFVMQRLQPTPATDPMQQKLFQYMPVIFTVFFLWFPSGLVLYWLVSNLITITQMLIIYKGLEKKGINVRGK

SEQ ID NO: 34551 - protein, 358 aa, Idiomarina baltica OS145
MNQQRWLFIDRDGTLVLEPPVDKQLDSVSKLEFEPNVIPALLKLQQAGYRLVMVSNQDGLGTDSFPQADFDAPHDLMMAVFASQGVRFDDVLICPHFEEDNCSCRKPKLGLVQDYLQKGLIDFTDSYVIGDRETDIKLAESMGIRGIRYDRANLDWNAIVRDLTQRSRSAKVIRTTHETDIRIAVDLDNATPRSFSTGIGFFDHMLEQIATHAGISLTVNVTGDLHIDDHHTIEDTALALGQALRQALGDKRGIGRFGFALPMDECRAECLIDLSGRPHLKWQADFTRDKVGELSTEMVEHFFRSLTDAMAISLHLSTTEGNTHHQVESLFKVFGRALRQAVAKTGDQQLPSSKGMLA

SEQ ID NO: 34552 - protein, 383 aa, Idiomarina baltica OS145
MKRPIYLDYAATTPVDKSVADAMMKYLTADGVFANPASRSHRLGWQAEEAVDIARNQVADLINADPREIVFTSGATESDNLALKGVMHQARNKGKHLITVATEHKAVIDPALQLEREGFDVTFLSVDKDGLIDSQALQQAMREDTVLVSVMHVNNELGVIQDIPAISACCREHNVLLHVDAAQSAGKLPLDVEQLGVDLLSISAHKMYGPKGIGALYVRRKPKVQLEAEMHGGGHERGMRSGTLATHQIVGLGEAAQLARQRLGDDREHYRALSQLFLDKLLAEPGIKLNGDVSQRVPNIMNLRFANVEGELLLMSLKDLAISSGSACTSASVEPSYVLRAIGLSDELAHASLRFSLGRDTTLQEMEYAADHVLNTYRVLAAQ

SEQ ID NO: 34553 - protein, 587 aa, Idiomarina baltica OS145
MKNDTTAVSFQDMALPSVVLNQLEALGFTQPTPIQQQAIPSLLEGNDVLGEAQTGTGKTAAFSLPALASIEANQRQTQMLVVTPTRELAIQVADAIESFSKQMKGMEVATVYGGSAFGPQIQALKRGASVVVGTPGRLIDLLNKKVLKLDGLRFAVLDEADEMLNMGFIEDIETILQSVPDTAQRALFSATMPTAIRKLAKTYLTDPVNIRIAPVEQAKANIRQRAWKVMGMTKMTALTRLLEVTEYQRALVFVRTRQDTMDVAELLQRQGFRAAPLSGDLNQAQREQTVTQLRSGHIKVLVATDVVARGLDVPEITHVINYDLPSDTESYVHRIGRTGRAGRSGEAILFYRGKERHLLRHYEKLTNGSIEYFDVPSAEELSRFRQEQLQQSLLKQLESDVDSNVQKLLSSWLADGSMTAEQIALSLLAQRNQQQPLFVKEERRPRPERAERADRDNGRPQRGEKRVRATTKRVPDSEFDTYKIQVGRDHGARPGDIVGAIANEAEIDSQFIGQIQLFAQHSLVQLPKGMPAELKKALQRTRVRQQPMALELSDSPLKKMPPRASKGNGDNRRRAPRKGQPAARRFN

SEQ ID NO: 34554 - protein, 641 aa, Idiomarina baltica OS145
MGKIIGIDLGTTNSCVAVLDGGKPRVIENGEGDRTTPSVVAFTDDGETLVGAPAKRQAVTNPNKTLFAIKRLIGRRFQDDEVQRDIGIMPYNIVKADNGDAWVEIDGDKKAPPQISAEVLKKMKKTAEEFLGEKVTEAVITVPAYFNDAQRQATKDAGKIAGLEVKRIINEPTAAALAYGMDKKSGDNVIAVYDLGGGTFDISIIEIDEVEGEHTFEVLATNGDTHLGGEDFDNRLINYLVEQFEKDQGIDLRKDPLAMQRLKEAAEKAKIELSSAQQTEVNLPYITADNTGPKHLAIKVTRAKLESLVEDLIKKSLEPLKQALADADMSVSDVKDIIMVGGQTRMPKVQQAVTDFFGKEPRRDVNPDEAVALGAAVQAGVLQGDVKDVLLLDVCPLSLGIETMGGVMTKLIEKNTTIPTKESQTFSTAEDNQSAVTIHVLQGERKRSSDNKSLGQFNLEGIRAAARGVPQIEVTFDIDADGILHVSAKDKDTGKEQKITIKASSGLDEDEVEKMVKDAEAHAEDDKKFEELVQARNQADGLVHATRNQLKEVGEALSEDDKKAIETACDELEQASKDGDKDAIEAKSQALMEASQKLMEAAQQQQAQQGGAEAGAEQAQSSKDDDVVDAEFEEVKDDDKK

SEQ ID NO: 34555 - protein, 641 aa, Idiomarina baltica OS145
MAKNLILWLVIAVVLMSVFQSFSPGENAGSRMAYSEFLKQVDNGNVRRADFGEDGRTITVMTRNGQSYKTVIPTQSDPKIVDQLANKNVEFSGTPPEEPSILTSIFISWFPMLLLIGVWIFFMRQMQGGGGRGAMSFGKSKARLMSEDQTKTTFRDVAGCDEAKEEVTELVDYLKDPSKFQRLGGKIPKGVLMVGPPGTGKTLLAKAISGEAKVPFFSISGSDFVEMFVGVGASRVRDMFEQAKKSAPCIIFIDEIDAVGRQRGAGLGGGHDEREQTLNQMLVEMDGFEGNEGIIVIAATNRPDVLDPALLRPGRFDRQVVVGLPDVRGREQIIKVHMRKVPLGDDVRADLIARGTPGFSGADLANLVNEAALFAARGNKRVVSMEEFDKAKDKIMMGAERRSMVMTDDEKAMTAYHEAGHAIVGRLVPEHDPVYKVSIIPRGRALGVTMYLPEQDRVSHSKQHLESMISSLFGGRLAEQIIYGVDKVTTGASNDIERATEIARKMVTQWGLSEKMGPLLYAEDENEVFLGRQVTQHKHMSDDTARAIDQEVKSVIDQNYQRAKTILEENIDILHAMKDALVKYETIDAGQIDDLMNRRDVRPPKGWDDRDDNDNGTNGGTAEKAGEEERPDRPINVDKPG

SEQ ID NO: 34556 - protein, 315 aa, Idiomarina baltica OS145
MNLDDMLNNALGGAGQIDENKQCGFVAIVGRPNVGKSTMLNRILGQKVSITSSKPQTTRHRILGVDTEGDYQTVYVDTPGMHLEEPRAINRVMNQTASSALKDVDLILFVVENTRWNDDDVMVLEKLKKTETPIVLVVNKVDQIKDKNKLLPHLQWLSQQLSVKEIIPVSAKTGDNLEPLRDIVKGFLQSGYHFYPADYVTDRSVRFMTAEIIREKLMRFTGEELPYETTVEIEQFGQSERGTHHIHALILVEREAQKRMVIGEKGQKLKTIGTEARKDLERLLNNKVLLKLWVKVKSGWSDDERALKSLGYRED

SEQ ID NO: 34557 - protein, 325 aa, Idiomarina baltica OS145
MKQITHDFCTLAREVIEIERDAIEGLKTFLDDNFNRACQAMFDCKGRIIVTGMGKSGHIGGKIAATLASTGSPAFFVHPGEASHGDLGMVTDSDIVIAISNSGETGEILNIIPVMKRLGVTIIAMTGNPESTLATLADVHVCIRVEQEACPLGLAPTASTTASLVMGDALAVALLNARGFTADDFALSHPGGSLGKRLLLRLSDVMHTGDRVPQVEQDALIRDALLEISRKGLGMTSIVDEHGRLAGIFTDGDLRRILDSRVDVHTSKIADFMTRTCVTADENMLAAQALKLMQDRKINGLIIVDHDGKPHGAMNMHDLLQAGVV

SEQ ID NO: 34558 - protein, 410 aa, Idiomarina baltica OS145
MDIQLISLSVAMFTIIVLILVAIIMFAKSKLVPQGDVEILINDDEDKKIVTQPGTKLLGALANAGIFVSSACGGGGSCGQCRVTIKDGGGDILPTELDHITKKEAREGVRLSCQVNVKQDMKIELPEEVFGIRKWDCVVKSNDNVATFIKEFVVQLPEGEEVPFRAGGYIQIECPPHHVKYKDFDIGPEYRGDWERFGFLDVESKVDEEVVRAYSMANYPDEKGIIMLNVRCATPPPNDLSLPAGKMSSYIFSLKPGDKVTISGPFGEFFAKETEAEMVFVGGGAGMAPMRSHIFDQLRRLNTDRKISFWYGARSKREMFYTEDFDMLQEENDNFEWHVALSDPQPEDDWDGDTGFIHNVLYERYLKDHDAPEDCEFYMCGPPVMNAAVINMLKELGVEDENIMLDDFGG

SEQ ID NO: 34559 - protein, 695 aa, Idiomarina baltica OS145
MKPFALNSDSKEIYLDCNATTPVLPQIADAVSHTMETIFGNPSSSHVTGLKARYILDTTRQLARRVVGASSGKLIFTSGATEGIQTAVVSAIRAAVDNPQSPRSYLLYGATEHKAVPQALQHWNQLLGLNAELKAIPVNEQGILDHEFIAEHVGQAAMICTMAANNETGVKQDLSALEQTIRTHAPEVPWMVDCVQALGKLPLALDDISIDYAPFSGHKLYGPKGIGFMAVRESAPFTPLIIGGGQESGYRSGTENLPGIAALHALFELMLDPTQTTFVDPTTLEHYREQLARALRRAFPSIVFNHDFSVSVPTTLNFSVKGVSSKDIMDVLDASHIRVSSGSACSSKVTRSFVLDAMGLSDWQSESAIRMSFGPATTQATVDKACERIQLVAQALQQSCLIVADTNNDHDAQLDGVVQLKYDDHCCYVLIDREAREVAIIDPHPALAGRLENLVRCQNYDVQGVLVSSDDSDVQQAASMLRAMLIGAEPNTDMWGWPEHAIAGCDAVPAECDCGVQGCLSVGQRRLFKLGDELPTFLLSEPVKAAESLRVDFAFLGAHQAIRDIQHCISDTTLVCPRKDGEHQLVLAKSMQSGAASIVEDTQALWERDDITIIDVRERQEHVVDDLPAHASVVNVPLTEAIQFIHEHPQLKSSPLVCVCRSGQRSGVMADALTRLGFTKVQHLSGGLALASTPV

SEQ ID NO: 34560 - protein, 1453 aa, Idiomarina baltica OS145
MQHRGGIGADGKTGDGCGLLLQIPEQFFREYAEQQGWNLGKKFAVGMVFFSRNADKREAARHLIEQELQKETLSIVGWRKVPVDDSVLGDAAKAAEPKIEQVLISAPTGWRKKDIERRLYMARRRVEQKVEQGVFSADELYICSMSSLLLVYKGLMMAGDLPRYYPDLANPALKTAICVFHQRFSTNTQPRWRLAQPFRFLAHNGEINTIRGNRQWAQARLYKFHSPLLPDLQQAAPLVGQSGSDSASLDNMLELLLAGGMDLFRAMRLLIPPAWQGDSTMSDDMRAFYEFNALHMEPWDGPAGVVMSNGRHVACSLDRNGLRPARYVLTKHGILTIASEVGIWDYDEQDVQEKGRLGPGQMMAVDTYTGRIWHNGEIEADLKSRHPYRQWLTEHRRRLVPFDRCSADKIGQRLYDDRTMQVFHKTFLYTREELQQVVAVLAKDGQEAVGSMGDDTPTAVLSQQPRLLYDYFRQQFAQVTNPAIDPIRERHVMSLETIIGREHNVFSEASGDADRVVFESPILMYTDLKQLRELDDKHYGHVTLSLAFKPTETSLQTALHKLVEAAIDVVKNQQRVMVILSDREFTKDQLVIPAPMAVGAVQQALVKAQLRCDSNIIVETGSARDPHHMAVLLGLGATAVYPFLAYESVEQLVQQGKLSMEVKQAVMNYRQGLNKGLLKILSKMGIASIAGYRGSSLFEAVGLNQDVLDACFANAPARINGSGFEDIQTDLQRTAQHAWLHRKPLSHGGLLKYVHGGEYHAYNPDVVTSLQAAVKSGKREDYAVYQRYVNERPVAHIRDLLKLNPNAAKPIALEQVEPKEALFPRFDTAAMSIGALSAEAHEALAEAMNQIGGHSNSGEGGEDPKRFNSPKNSRIKQVASGRFGVTPHYLVNADVIQIKVAQGAKPGEGGQLPGEKVTAEIAQLRFAVPGTTLISPPPHHDIYSIEDLAQLIFDLKQVNPTALVSVKLVSTPGIGTIATGVAKAYADLITVSGYDGGTGASPLTSVKYAGSPWELGLAEVHQALVENNLRHKIRLQVDGGLKTGLDVVKAAILGAESFGFGTAPMVALGCKYLRICHLNNCATGVATQDETLRKEFFRGLPERVVTLFEFIAEEVREWLAKLGLNRITDAIGRVDLLERLPGDTQRQQHIDLEPLLAAAGSRSEHPKYCVENNPPYDKGELNQRLMALTQTAIDERQGGSWSLAIRNDDRSVGATLSGYIAKRYGNQGMASHPIQLDFLGTAGQSFGAFNAGGLKLKLTGDANDYVGKGMAGGRIVVRPRPGVSFASQDATIMGNTCLYGATGGQLYAAGCAGERFAVRNSGATAVVEGIGDHGCEYMTGGIVVVLGECGINFGAGMTGGFAYLRDKHGDLHRRLNTELVEAVAVDKPIIKEHLRGLIHEHHEATQSEYSRMLLTEFDTRVNEFVIVKPKSADMASILGHRARSTAELRVQVM

SEQ ID NO: 34561 - protein, 312 aa, Idiomarina baltica OS145
MKLFAGNATPELAQKIADRLYIKLGDASVGRFSDGEISVAINENVRGADVFLLQSTCAPTNDNLMELIVMVDALRRASAGRITAVMPYFGYARQDRRVRSARVPITAKVVADFLSSVGVDRVLTVDLHAEQIQGFFDVPVDNVFGTPVLLEHMRNQKFDNPVVVSPDIGGVVRARAFAKLMDDTDLAIIDKRRPSANVSQVMHIIGDIKDRDCIIVDDMIDTGGTLCKAAEALKQHGAKRVFAYATHPVFSGNAVSNIKESAIDELVVTDSIPLSEEMKATGKVHQLTLSGMLSEALRRVSNEESISAMFDY

SEQ ID NO: 34562 - protein, 359 aa, Sinorhizobium meliloti
MMGVRHATADAHAGGTVLESIGRTLTTATNGIKALADHLTSDQDFAGALVDAVELMGDGDGRVVVSGVGKSGHIGRKIAATLASTGTSAYFVHPTEASHGDLGMITAQDALVLLSWSGETAELANMLTYAKRFKVPIVSICSNRESTLARNSEIALVLPKVPEACPHGLAPTTSAMLQLAVGDALAIALLERRGFSAEDFKTFHPGGKLGAQLRLVQELAHGTGQMPLLSVGRPMSEAVIEMSAKGFGVVGITDESGKLIGVITDGDLRRHMAGDLLAQPVQEVMSRNPRVIKGDVLASAAMEFMQDHKVHRAVPRRRGRRPGRHPAHSRSAARRRRLIFAEFHRLLAGAAGRRRAPVH

SEQ ID NO: 34563 - protein, 453 aa, Atriplex hortensis
MSSYDPENAATNGVPPVKNDNSNHQQQHQQTVVVPETAHQISTDSWLQVGFVLTTGINSAYVLGYSGAIMVPLGWIPAVLGLIAATLISLYANSLVAKLHEYGGKRHIRYRDLAGFIYGPKAYSLTWALQYINLFMINTGFIILAGSSIKAAYHLFTDDPALKLPYCIIISGFVCALFAIGIPHLSALRIWLGVSTFFGLIYIIIAIALSLKDGINSPPRDYSVPTERGKVFTTIGAAANLVFAFNTGMLPEIQATVRKPVVGNMMKGLYFQFTAGVVPMYAIVFIGYWAYGNKTDSYLLNNVHGPVWLKALANISTFLQTVIALHIFASPMYEYLDTRFGITGSALNPKNLGSRVLIRGGYLAVNTFVAALLPFLGDFMSLTGAISTFPLTFILANHMYFKAKRNKLSMAMKIWLWINIVFFSCMAVASFIAALRLIATDSKQYHVFADLEG

SEQ ID NO: 34564 - protein, 240 aa, Atriplex hortensis
MSYSYPPPLPSNTLNNFLSPKPVTMKTTGGPPKPTKLYRGVRQRHWGKWVAEIRLPKNRTRLWLGTFDTAEEAALAYDKAAYKLRGDFARLNFPNLRHEGSHIGGEFGEYKPLHSSVNAKLEAICESLAKQGNEKQGKSGKSKKKDVANNNNNTSSSSSSSCCTTATAAADAPQQQQRMPENGGDVKTESTSDSEVGSGGSSPLSDLTFGDNEEMGSENFLLESCPSHEIDWDAILSSES

SEQ ID NO: 34565 - protein, 166 aa, Capsicum annuum
MTPPPTTTVPPYVSLIVRILTLICLLISFIVIATNNQTVSTVAGDVKIKFKDFYAYRYLIATVIIGMAYTLLQIAFSISLLTTGNRIGGEGFLLFDFYGDKFISYFLVTGAAASFGMTQDLKQLEGSDNYSKFLNTSNAAASLCLIGFFFAVASSIFSSYNLPKRI

SEQ ID NO: 34566 - protein, 970 aa, Pisum sativum
MEEHSVGPLVPAVVKPEPSKNFSTDTTAAGTFLLVPTMSDLDKDFLCPICMQIIKDAFLTACGHSFCYMCIITHLRNKSDCPCCGHYLTNSNLFPNFLLDKLLKKTSDRQISKTASPVEHFRQAVQKGCEVTMKELDTLLLLLTEKKRKMEQEEAERNMQILLDFLHCLRKQKVDELKEVQTDLQFIKEDIGAVEKHRMDLYRARDRYSVKLRMLDDSGGRKSRHSSMDLNSSGLASSPLNLRGGLSSGSHTKKNDGKSQISSHGHGIQRRDPITGSDSQYINQSGLALVRKKRVHTQFNDLQECYLQKRRQAADKPHGQQERDTNFISREGYSCGLDDFQSVLTTFTRYSRLRVIAEIRHGDIFHSANIVSSIEFDRDDDLFATAGVSRRIKVFDFSALLKKTSDRQISKTASPVEHFRQAVQKGCEVTMKELDTLLLLLTEKKRKMEQEEAERNMQILLDFLHCLRKQKVDELKEVQTDLQFIKEDIGAVEKHRMDLYRARDRYSVKLRMLDDSGGRKSRHSSMDLNSSGLASSPLNLRGGLSSGSHTKKNDGKSQISSHGHGIQRRDPITGSDSQYINQSGLALVRKKRVHTQFNDLQECYLQKRRQAADKPHGQQERDTNFISREGYSCGLDDFQSVLTTFTRYSRLRVIAEIRHGDIFHSANIVSSIEFDRDDDLFATAGVSRRIKVFDFSAVVNEPTDAHCPVVEMTTRSKLSCLSWNKYAKNQIASSDYEGIVTVWTMTTRKSLMEYEEHEKRAWSVDFSRTDPSMLVSGSDDCKVKVWCTNQEASVLNIDMKANICCVKYNPGSGNYIAVGSADHHIHYYDLRNISRPVHVFTGHKKAVSYVKFLSNDELASASTDSTLRLWDVKQNLPVRTFRGHANEKNFVGLTVRSEYIACGSETNEVFVYHKEISKPLTWHRFGTLDMEDAEDEAGSYFISAVCWKSDRPTILTANSQGTIKVLVLAA

SEQ ID NO: 34567 - protein, 857 aa, secondary endosymbiont of Glycaspis brimblecombei
MRLDRLTNKFQQALADAQSLAIGQDNQFIEPVHLLIALLDQEGGTLRPLLTSIGVNISQLSNKLNYILNTLPQVHGTAGDIQPSNDLIRHLNLCDKLAQQRGDTFISSELFLLAIFDAKTSLADTLKTMGANKANIEKAIEQMRGGDNVNDQGAEEQRQALKKYTIDLTERAEQGKLDPVIGRDEEIRRTIQVLQRRTKNNPVLIGEPGVGKTAIVEGLAQRIVNGEVPEGLKNKRVLSLDMGALLAGAKYRGEFEERLKDVLNDLAKQEGSVILFIDELHTMVGAGKAEGAMDAGNMLKPALARGELHCVGATTLDEYRQYIEKDAALERRFQKVYVAEPTVEDTIAILRGLKERYELHHHVQITDPAIVAAASLSNRYISDRMLPDKAIDLIDEAGASLRMQMDSKPEALDRLERRVTQLKLEQQALKKESDDASKKRLKMLEEELTEKEREYSELEEEWKAEKAELTGTQHIKAELENARISMEQARRSGDLAKMSELQYGKIPELEKQLEAATKAESHSMKLLRNKVTDAEIAEILARWTGIPVSKMLESEREKLLHMEQDLHKRVIGQNEAVDAVSNAIRRSRAGLSDPNRPIGSFLFLGPTGVGKTELCKALANFLFDSDDAMVRIDMSEFMEKHTVSRLVGAPPGYVGYEEGGYLTEAIRRRPYSVILLDEIEKAHPDVFNILLQVLDDGRLTDGQGRTVDFRNTVVIMTSNLGSDLIQERFGSLGYDEMKELVMEVVSRSFRPEFINRIDEVVVFHPLDKEQITEIAQIQLSRLYKRMEEQGYKVKITPAALEKLGEAGFDPVFGARPLKRAIQQEIENPLAEQMLSGKLVPGKQVTLDIKKGVIVAKQ

SEQ ID NO: 34568 - protein, 162 aa, Streptomyces hygroscopicus subsp. hygroscopicus
MNAAPPPGLYLTRPEELRLLPGAAEAVRTLNRRGHRVVVVTNQRGVARGLVTWVELAAVERRLAELLGAQGAHWDGYYVCPHAENSCRCRKPRPGLLEAAARDIPRLSLADAVMIGDSETDVGAGRAAGCRTVRLAPPGTPSAADRVVADLRSAVRILTEGE

SEQ ID NO: 34569 - protein, 348 aa, Nicotiana tabacum
GDVTTRQNWQIRGVVLPDVPEILKGLDEVGLTSLQSGMDNVRNPVGNPLAGIDPHEIVDTRPYTNLLSQYVTANFRGNPAVTNLPRKWNVCVIGSHDLYEHPHINDLAYMPASKDGRFGFNLLVGGFFSPKRCAEAVPLDAWVPADDVVPVCKAILEAYRDLGTRGNRQKTRMMWLVDELGVEGFRAEVVKRMPQQKLDRESTEDLVQKQWERREYLGVHPQKQEGYSFVGLHIPVGRVQADDMDELARLADNYGSGELRLTVEQNIIIPNVENSKIESLLNEPLLKNRFSTNPPILMKNLVACTGNQFCGQAIIETKARSMKITEEVQRLVSVTKPVRMHWTGCPNS

SEQ ID NO: 34570 - protein, 456 aa, Nicotiana tabacum
MMRLKLPNGVTTSAQTRYLASVIRKYGKEGCADITTRQNWQIRGVVLPDVPEILKGLAEVGLTSLQSGMDNVRNPVGNPLAGIDPEEIVDTRPYTNLLSQFITGNSRGNPAVSNLPRKWNPCVVGSHDLYEHPHINDLAYMPATKDGRFGFNLLVGGFFSAKRCDEAIPLDAWVPADDVVPVCKAILEAFRDLGFRGNRQKCRMMWLIDELGVEGFRAEVEKRMPQQQLERASPEDLVQKQWERRDYLGVHPQKQEGYSFIGLHIPVGRVQADDMDELARLADEYGSGEIRLTVEQNIIIPNIETSKIEALLKEPVLSTFSPDPPILMKGLVACTGNQFCGQAIIETKARSLKITEEVQRQVSLTKPVRMHWTGCPNTCAQVQVADIGFMGCLTRDKNGKTVEGADVFLGGRIGSDSHLGEVYKKAVPCDDLVPLVVDLLVNNFGAVPREREETED

SEQ ID NO: 34571 - protein, 572 aa, Coffea arabica
MDKGWGVTVDNSDKIGFFGNKPVFGFNLSPRLNPSKGSLSMFPAAEFLANQNRREDSHAAASSDGEKRVVVGEVDFFSDKKKANDILIKKEDCHGEDKMKTNMDVVNTGLQLVIANTGSDQSTVDDGVSSDIEDKRAKLELAQLQVELEGMNAENRRLREMLSQVSNNYTALQMHLMTLTHQQQQNAKPQTTQDHEIGERKSEENKPENGGVVVPRQFLDLGPSGTAEMDEPTNSSSEERTLSGSPHNNMELSRNKGVGREESPESQGWAPNKVAKLNASSKTVDHAQAEATMRKARVSVRARSEAPMITDGCQWRKYGQKMAKGNPCPRAYYRCTMAVGCPVRKQVQRCAEDRTVLITTYEGTHNHPLPPAAMAMASTTSAAANMLLSGSMSSADGLMNPNFLARTILPCSSNMATISASAPFPTVTLDLTQTPNPLQFQRQPSTPFQLPFGTPPQNFPPVANPQMHQVFGQALYNQSKFSGLQVSQDIEAAGAAAQMQNQGQHPQVQQGQHHPSFADTLSAATAAITADPNFTAALAAAISSIIGGSHPSSSNNSNPTTSTPPTANFPGN

SEQ ID NO: 34572 - protein, 573 aa, Coffea arabica
MDKGWGVTVDNPDKIGFFGNKPVFGFNLSPRLNPSKGSLSMFPATEFLANQNRREDSHAAASSDGEKRVVVGEVDFFSDKKKANDILIKKEDCHGEDKMKTNMDVVNTGLQLVIANTGSDQSTVDDGVSSDIEDKRAKLELAQLQVELERMNAENRRLREMLSQVSNNYTALQMHLMTLMHQQQQNAKPQTTQDHEIGERKSEENKPENGGVVVPRQFLDLGPSGTAEMDEPTNSSSEERTLSGSPRNNMELSRNKGVGREESPESQGWAPNKVAKLNAPSKTVDHAQAEATMRKARVSVRARSEAPMITDGCQWRKYGQKMAKGNPCPRAYYRCTMAVGCPVRKQVQRCAEDRTVLITTYEGTHNHPLPPAAMAMASTTSAAANMLLSGSMSSADGLMNPNFLARTILPCSSNMATISASAPFPTVTLDLTQTPNPLQFQRQPSTPFQLPFGTPPQNFPPVANPQMHQVFGQALYNQSKFSGLQVSQDIEAAAAAAAQMQNQGQHPQVQQGQHQPSFADTLSAATAAITADPNFTAALAAAISSIIGGSHPSSSNNSNPTTSTPPTANFPGN

SEQ ID NO: 34573 - protein, 343 aa, Coffea canephora
GKKERLLKIFDGWCDKVMELLLATDEDAILRRDIYDRTPSFSWGRGRVTLLGDSIHAMQPNLGQGGCMAIEDSYQLALELDKAWEQSIKSGSPMDVVSALKSYESARKLRVAIIHGLARLAAIMASTYKPYLGVGLGPLSFLTKFRIPHPGRVGGRIFIDIGMPLMLSWVLGGNGSKLEGRPLHCRLTDKASDQLQKWFQDDDSLERALNGEWFLFPIGQANPDPVAIFLGRDEKNICTIGSASHPDILGASIIINSPQVSKLHAQISYKDGLFFLTDLQSEHGTWITDNDGRRYRLPPNSPARFHPYDIIEFGSDKAAFRVKVTNQPPFSGKKRETKVLSAV

SEQ ID NO: 34574 - protein, 215 aa, Arabidopsis thaliana
EMKRIENATSRQVTFSKRRNGLLKKAFELSVLCDAEVALIIFSPRGKLYEFSSSSSIPKTVERYQKRIQDLGSNHKRNDNSQQSKDETYGLARKIEDLEISTRKMMGEGLDASSIEELQQLENQLDRSLMKIRAKKYQLLREETEKLKEKERNLIAENKMLMEKCEMQGRGIIGRISSSSTSSELDIDDNEMEVVTDLFIGPPETRHFKKFPPSN

SEQ ID NO: 34575 - protein, 185 aa, Coffea racemosa
PNKVAKLNASSKTVDHAQAEATMRKARVSVRARSEAPMITDGCQWRKYGQKMAKGNPCPRAYYRCTMAVGCPVRKQVQRCAEDRTVLITTYEGTHNHPLPPAAMAMASTTSAAANMLLSGSMSSADGLMNPNFLARTILPCSSNMATISASAPFPTVTLDLTQTPNPLQFQRQPSTPFQLPFGTP

SEQ ID NO: 34576 - protein, 185 aa, Coffea humilis
PNKVAKLNASSKTVDHAQAEATMRKARVSVRARSEAPMITDGCQWRKYGQKMAKGNPCPRAYYRCTMAVGCPVRKQVQRCAEDRTVLITTYEGTHNHPLPPAAMAMASTTSAAANMLLSGSMSSADGLMNPNFLARTILPCSSNMATISASAPFPTVTLDLTQTQNPLQFQRQPSTPFQLPFGTP

SEQ ID NO: 34577 - protein, 185 aa, Coffea congensis
PNKVAKLNAPSKTVDHAQAEATMRKARVSVRARSEAPMITDGCQWRKYGQKMAKGNPCPRAYYRCTMAVGCPVRKQVQRCAEDRTVLITTYEGTHNHPLPPAAMAMASTTSAAANMLLSGSMSSADGLMNPNFLARTILPCSSNMATISASAPFPTVTLDLTQTPNPLQFQRQPSTPFQLPFGTP

SEQ ID NO: 34578 - protein, 184 aa, Coffea canephora
PNKVAKLNAPSKTVDHAQAEATMRKARVSVRARSEAPMITDGCQWRKYGQKMAKGNPCPRAYYRCTMAVGCPVRKQVQRCAEDRTVLITTYEGTHNHPLPPAAMAMASTTSAAANMLLSGSMSSADGLMNPNFLARTILPCSSNMATISASAPFPTVTLDLTQTPNPLQFQRQPSTPFQLPLEP

SEQ ID NO: 34579 - protein, 162 aa, Parasponia andersonii
MSSSEVNKVFTEEQEALVVKAWAVMKKNSAELGLQFFLKIFEIAPSAKNLFSYLKDSPVPLEQNPKLKPHATTVFVMTCESAVQLRKAGKVTVKESDLKRIGAIHFKTGVVNEHFEVTRFALLETIKEAVPEMWSPEMKNAWGVAYDQLVAAIKFEMKPSST

SEQ ID NO: 34580 - protein, 687 aa, Brachypodium sylvaticum
MAGTSDRGSIMEDWMAMPPTPSPRTLMSSFLNEDFSSGPFSNLFSENGSNKPHDHSEKRGEFVDLRDQVPAQSAEATLQKDISLEPNLFNANQKPNPHGGLAERMASRAGFSIPKIDTSRVGSSTVIRSPIAIPPGLSPTTLLESPVFLYNSMAQPSPTTGKLPFPATNANSTIPPAARMNEDHTFSNDVFSFQPHLGSKAPSFSTVEKGYNACPSNQSLSNIHQRESSLQLSFTAVKDTADETIVKPKTSDSMFGDDHSYSEEQEDDETDQNGEYSSATISTPDEDGYNWKKYGPKQVKSTEYPRSYFKCTHPNCPVKKKVERSQVGQITEIIHKGTHNHPLPPLNPHSGVPLSHISDPQVNARKNPGLQAGLNSASLWENGKSGCIQDVQSEGVDARPATRLPVSAYGDTSIVESQDAVDVSSTLSNEEIDRATHGTVSLDCDGGEDETESKRSTITAAAATTSTTSTIDMVTAASRSVREPRVVVQTTSEVDILDDGYRWRKYGQKVVKGNPNPRSYYKCTHPGCSVRKHVERASHDLKSVITTYEGKHNHEVPAARNSGHASSGSGSAPASVPQVNLSHRWQEQAQGSFGQFGGSTPFGSFGLPPRGHLGAAGNFRFGMVPPGMSIPMPAAHQQSMMQGYPGLMMPEGQPKTEPGPQSGFPEANAASSAYQQMMSRPPFGSQM

SEQ ID NO: 34581 - protein, 443 aa, Brachypodium sylvaticum
MLIYRSFRPAAASNSSTSAFSVMHRHGPCSPLQTPDDAPSDADLLEHDQARVDSIHRMIANETAVVGQDVSLPAERGISVGTGNYVVSVGLGTPARDLTVVFDTGSDLSWVQCGPCSSGGCYHQQDPLFAPSSSSTFSAVRCGEPECPRARQSCSSSPGDDRCPYEVVYGDKSRTVGHLGNDTLTLGTTPSTNASENNSNKLPGFVFGCGENNTGLFGKADGLFGLGRGKVSLSSQAAGKYGEGFSYCLPSSSSNAHGYLSLGTPAPAPAHARFTPMLNRSNTPSFYYVKLVGIRVAGRAIKVSSRPALWPAGLIVDSGTVITRLAPRAYSALRTAFLSAMGKYGYKRAPRLSILDTCYDFTAHANATVSIPAVALVFAGGATISVDFSGVLYVAKVAQACLAFAPNGNGRSAGILGNTQQRTVAVVYDVGRQKIGFAAKGCS

SEQ ID NO: 34582 - protein, 1128 aa, Brachypodium sylvaticum
MPPRPRAVALAPPRRLALLVSSAFAALLLIVSPCHCVNEQGQALLEWKRSLRPAGGALDSWKATDAAPCRWFGVSCDARGDVVSLSVTGVDLRGPLPASLPATLATLVLSGTNLTGPIPPELGAYSELTTVDLSKNQLTGAIPPELCRLSKLETLALNTNSLRGAIPDDLGDLASLTHLTLYDNELSGTIPGSIGKLKQLQVIRAGGNVALKGPLPSEIGGCTNLTMLGLAETGMSGSLPETIGRLEKLQTLAIYTTLLSGRIPESIGNCTELANIYLYQNSLSGPIPPQLGRLRKLQTLLLWQNQLVGAIPPEIGQCEELTLMDLSLNSLSGSIPASFGRLKNLQQLQLSTNRLTGAIPPELSNCTSLTDIEVDNNALSGDIRLDFPKLPSLTLFYAWKNGLTGGVPASLAECASLQSVDLSYNNLTGPIPRELFALQNLTKLLLLENELSGFVPPDIGNCTSLYRLRLNGNRLSGTIPAEIGNLKSLNFLDMSSNRLVGPVPAAISGCASLEFLDLHSNALSGALPDVMPRTLQLVDVSDNQLAGPLRPSSIVSMQELTKLYLGKNRLTGGIPPELGSCEKLQLLDLGENAFSGGIPAELGELPSLEISLNLSCNRLSGEIPPQFAGLDKLGSLDLSHNQLSGSLDPLAALQNLVALNVSFNGFSGELPNTPFFQKLPLSDLAGNRHLVVGDGSGDSSRRGAITTLKAAMSVLAVVSAALLVAAAYILARARRRGGTGGSTAVHGHGTWEVTLYQKLDISMDDVLRGLTTANVIGTGSSGVVYRVETPNGYTLAVKKMWSPSPDETAAAAAAFRSEIAALGSIRHRNIVRLLGWAAANNGSTATRLLFYSYLPNGNLSGVLHGSGGASVAKQSAQPGSDWAARYDVALGVAHAVAYLHHDCVPAILHGDIKSMNVLLGPAYEPYLADFGLARVLSAAQSKLDDDSSKPRPIAGSYGYMAPEYASMQRISEKSDVYSFGVVLLEILTGRHPLDPTLPGGAHLVQWVTQARRRACDGDDALLDARLRERSAGEADAQHEMRQVLAVAALCVSQRADDRPAMKDIVALLEEIRRPGTAAADDVKPAPAPAASLPAAVAAAPVLSPARGGAHSRGVSSSCSFAGVSDYSA

SEQ ID NO: 34583 - protein, 397 aa, Brachypodium sylvaticum
MSGTGKRGALTEDWMLPTPSPRTLMLSLFNDDLSSGPCSDAFGDNKPQDGIDGGKPCLVDSSWEETTQVAEAPPHFEPNLFGAKEKPISGNSLAERMAPGNGLCALQIDTSRVGSSASIWSPVVIPPGVSPRELLESPVFLPNAIAQPSPTTGKLPFLMRANANLAIPSVHKKDEDLSSRDGCTIFFQPILRPKPPIFPTTNKPSVGDNRQDLSLQSSSTATKDVTGTTSVKPKKLDSMFDNNHPIPIPDNEQEECDADRDGNYSLAPAIAAEDGYNWRKYGQKQVKNSDHPRSYYKCSHPNCPVKKKVERCQDGHITEIVYKGSHNHPLPPPSHHFQDVHGEVLGTKLSASLNTADQLAHISETREAVDISPVLSNEDDNKGTHGTVSLGFDGGGD

SEQ ID NO: 34584 - protein, 275 aa, Triticum aestivum
MRTASVEQAQSGVARMLREGILTDITVNAAGGSMRAHRAVLAARSPVFLSMFSHNLREKELSTVDISDMSIGACKALVRYLYGDARSEWELLEHRSELVAAGDKYGIANLKKACEESLREDVGVENMLDRLQMAHTYSLPALKRTCVRLLVDFGKMYEIPEDFEAFMAAADQDLADEIRSTAILRGRKLAAKEKKPAAKKTRRPKSTPGKASGSSIPARRSKVPTSTPKLDASNTAAGKRGRRRKSTSSQDPDGGAPDKRARRLNVRLAGDEWAK

SEQ ID NO: 34585 - protein, 315 aa, Shigella boydii
MPDMKLFAGNATPELAQRIANRLYTSLGDAAVGRFSDGEVSVQINENVRGGDIFIIQSTCAPTNDNLMELVVMVDALRRASAGRITAVIPYFGYARQDRRVRSARVPITAKVVADFLSSVGVDRVLTVDLHAEQIQGFFDVPVDNVFGSPILLEDMLQLNLDNPIVVSPDIGGVVRARAIAKLLNDTDMAIIDKRRPRANVSQVMHIIGDVAGRDCVLVDDMIDTGGTLCKAAEALKERGAKRVFAYATHPIFSGNAANNLRNSVIDEVVVCDTIPLSDEIKSLPNVRTLTLSGMLAEAIRRISNEESVSAMFEH

SEQ ID NO: 34586 - protein, 315 aa, Shigella boydii
MPDMKLFAGNATPELAQRIANRLYTSLGDAAVGRFSDGEVSVQINENVRGGDIFIIQSTCAPTNDNLMELVVMVDALRRASAGRITAVIPYFGYARQDRRVRSARVPITAKVVADFLSSVGVDRVLTVDLHAEQIQGFFDVPVDNVFGSPILLEDMLQLNLDNPIVVSPDIGGVVRARAIAKLLNDTDMAIIDKRRPRANVSQVMHIIGDVAGRDCVLVDDMIDTGGTLCKAAEALKERGAKRVFAYATHPIFSGNAANNLRNSVIDEVVVCDTIPLSDAIKSLPNVRTLTLSGMLAEAIRRISNEESISAMFEH

SEQ ID NO: 34587 - protein, 315 aa, Shigella boydii
MPDMKLFAGNATPELAQRIANRLYTSLGDAAVGRFSDGEVSVQINENVRGGDIFIIQSTCAPTNDNLMELVVMVDSLRRASAGRITAVIPYFGYARQDRRVRSARVPITAKVVADFLSSVGVDRVLTVDLHAEQIQGFFDVPVDNVFGSPILLEDMLQLNLDNPIVVSPDIGGVVRARAIAKLLNDTDMAIIDKRRPRANVSQVMHIIGDVAGRDCVLVDDMIDTGGTLCKAAEALKERGAKRVFAYATHPIFSGNAANNLRNSVIDEVVVCDTIPLSDEIKSLPNVRTLTLSGMLAEAIRRISNEESVSAMFEH

SEQ ID NO: 34588 - protein, 315 aa, Shigella dysenteriae
MPDMKLFAGNATPELAQRIANRLYTSLGDAAVGRFSDGEVSVQINENVRGGDIFIIQSTCAPTNDNLMELVVMVDALRRASAGRITAVIPYFGYARQDRRVRSARVPITAKVVADFLSSVGVDRVLTVDLHAEQIQGFFDVPVDNVFGSPILLEDMLQLNLDNPIVVSPDIGGVVRARAIAKLLNDTDMAIIDKRRPRANVSQVMHIIGDVADRDCVLVDDMIDTGGTLCKAAEALKERGAKRVFAYATHPIFSGNAANNLRNSVIDEVVVCDTIPLSDEIKSLPNVRTLTLSGMLAEAIRRISNEESISAMFEH

SEQ ID NO: 34589 - protein, 315 aa, Shigella dysenteriae
MPDMKLFAGNATPELAQRIANRLYTSLGDAAVGRFSDGEVSVQINENVRGGDIFIIQSTCAPTNDNLMELVVMVDALRRASAGRITAVIPYFGYARQDRRVRSARVPITAKVVADFLSSVGVDRVLTVDLHAEQIQGFFDVPVDNVFGSPILLEDMLQLNLDNPMVVSPDIGGVVRARAIAKLLNDTDMAIIDKRRPRANVSQVMHIIGDVAGRDCVLVDDMIDTGGTLCKAAEALKERGAKRVFAYATHPIFSGNAANNLRNSVIDEVVVCDTIPLSDEIKSLPNVRTLTLSGMLAEAIRRISNEESISAMFEH

SEQ ID NO: 34590 - protein, 315 aa, Escherichia coli
MPDMKLFAGNATPELAQRIANRLYTSLGDAAVGRFSDGEVSVQINENVRGGDIFIIQSTCAPTNDNLMELVVMVDALRRASAGRITAVIPYFGYARQDRRVRSARVPITAKVVADFLSSVGVDRVLTVDLHAEQIQGFFDVPVDNVFGSPILLEDMLQLNLDNPIVVSPDIGGVVRARAIAKLLNDTDMAIIDKRRPRANVSQVMHIIGDVAGRDCVLVDDMIDTGGTLCKAAEALKERGAKRVFAYATHPIFSGNAANNLRNSVIDEVVVCDTIPLSDEIKSLPNVRTLTLSGMLAEAIRRISNEESIFAMFEH

SEQ ID NO: 34591 - protein, 254 aa, Clostridium perfringens
MQKSMLKPPITRLGGKSKLRKEIISMMPDHVCYVEPFFGAGWVYFGKEKSKIEVINDIENEIPNLFKIIKYHAPEMKRLLSYEISGRSIFDEYKNATLEHLTDIQRAIRFMYLITQSFGGQGNHYGYGTNTLPSQKIFDCNLDELQERLKNTYIENLDFQKIIEKYDREYTLFFLDPPYYGTAGYEAKFGIKEQLKLRDILKNIKGKFILTINDCKETRSWYKDFNIKEVEVHYSVSRQSEGRKRNKELIITNY

SEQ ID NO: 34592 - protein, 579 aa, Nicotiana tabacum
MLDSGKNVNFSKGKKKLFLTVVASVLLVAAVIGVVVGVKFRSNNSDDHADIQAITSAAHAIVKSACENTLHPELCYSTIASVSDFSKKVTSQKDVIELSLNITCRAVQHNFFKVEKLIKTRKGLKPREKVALHDCLETIDETLDELHTAIKDLELYPNKKSLKAHADDLKTLISSAITNQETCLDGFSHDDADKKVRKALLKGQKHVEKMCSNALAMICNMTDTDIANEQKLKGTTTNRKLREDNSEWPEWLSAGDRRLLQSSTVRPDVVVAADGSGNFKTVSEAVAKAPEKSSKRYVIRIKAGVYRENVDVPKKKTNIMFMGDGRSNTIITGSRNVKDGSTTFHSATVAAVGEKFLARDITFQNTAGAAKHQAVALRVGSDLSAFYRCDILAYQDSLYVHSNRQYFVQCLIAGTVDFIFGNAAAVLQNCDIHARRPGSGQKNMVTAQGRSDPNQNTGIVIQKCRIGATSDLRPVQKSFPTYLGRPWKEYSRTVIMQSSITDVINSAGWHEWNGNFALNTLFYGEYQNTGAGAGTSGRVKWKGFKVITSATEAQAYTPGRFIAGGSWLSSTGFPFSLGL

SEQ ID NO: 34593 - protein, 67 aa, Frankia sp. CcI3
MAQGTVKWFNSEKGFGFISVDGGGSDVFVHYSAIQMDGYKALEEGQRVEFQVTQGQKGPQADAVRVV

SEQ ID NO: 34594 - protein, 422 aa, Frankia sp. CcI3
MALLVAKFGGSSVADADRIKRVAERIVENRRAGNDVVVVVSAMGDTTDELLDLAEQVSPLPPARELDMLLTAGERISMALLAMAITTLGAEARSFTGSQAGVITDSVHGKARIIDVTPGRIRAALDSGAIAIVAGFQGVSQDTKDITTLGRGGSDTTAVALAAALGADACEIYTDVDGVFTADPRIVPDARRIDTISYEEMLEMAACGAKVLMLRCVEYARRYSVPVHVRSSFSAKPGTWVTEIPEEQLVEQAIIRGVAHDLSEAKVTVVGCPDKPGVAAAVFRAVADTDVNLDMIVQVGSVAGSGRTDISFTLPKADGRTALTALTKVQSEIGFERTLYDDHIGKLSLIGAGMKSHPGVSARFFGSLADAGVNVEIISTSEIRISVVVRDTDLPLAVRAVHGAFDLGDPNGGAIVYAGTGR

SEQ ID NO: 34595 - protein, 872 aa, Frankia sp. CcI3
MRRVRAGSSGGARWLGAESGAHRRDSADCRSSGKVGSPPVHTGKRRPPLSAPVKAATGGNRSQTFGPGVRPTDEGVAGGFVDIATICPLETWTGGAVGEPILAIDYGTCSASAALAVDGRIEPVKEPASGSASWPASVFVDGGSLIVGTLAERRKRIWPAAYRGEVKRDLARDSAVSLDGRSYPAHVLVTAVLSALKAEAEQQLGGAALSRAVVTIPASYDPAGPLRRTMIAAAEAAGFVDVDLLAEPVAAAWSPVVGVAPEPGSLMLVYDLGGGTFEGALVAVGEDGRHEMLSHSALHDCGGRELDQILFDEILGLYGPGLEPLLNPPGIGETFQTTANRTRHELLDFARAVKHQLSDIAVVEDVFSPAGLLVSMQRDRFAQLASPILARTMACCQHLLKSSGYGPDKLSGVLLVGGSSRIPVVTDILEGRLGVGTDWPGQQIYLPADPELAVVLGAAAWASSVSTRRTTAARPNPVLQPARWDIPGGRATMVRWLVEPGERFDASAVLARVRLTDGSLFDLAAEAPGSLIHTHAAPGTPVRDADWLATTLPSGPVPMGSAVPADLRGFERSSRPSHHVEVTARATLKGHERDVTSAAFSPDGKLLATTSKDGTRLWDVATGRTSVTLSGRKSLVVHGCAFSSDGKLLATTGSDKTARIWDVDAARQTVTLTGHRGPVYGCAFSPDGSLLATTSTDRTVRLWGSSTGKNLATLNGHRGSVYGCAFSPDGRLLVTAGAESTLLWNVTVGEIIMSLPGHTNFAGGCAFSPDGRLLATSGNEGTRLTDASSGTTVLTLPGSAQSCAFSPDGHLLATASTDDTAQLWDVATGSAIATLTGHSSTVMSCAFAPYGLLLATTSTDMTARLWDIIYTP

SEQ ID NO: 34596 - protein, 473 aa, Frankia sp. CcI3
MVAGPDFGPAPDRGHRSRQTEVPMGSPVGKSSAWRNWAGNETVRSVRLARPRDAEEISALVGTAIRDGHQIRAIGSSHSMSAIGRPDPGSVQVRLDRCADLVALDGGSGLVTVRGGMTMRRLNRLLAEAGLALTNQGDVDEVTIAGAISTGTHGTGSRFGGLCTQVRALEVVLGDGSVVTCSRGERPELFAAARLGLGAVGVVTSVTLQAVPLFALQVQEGPMRLDEVLDTYDDLVDQTDHLRFSWFPHTTTALVRRGQRRPLDDGLAPLPRLRCWVDDELVSNTLFGALMTTGRRMPAAVRPIAHVSARASGSRTFRDLSYRVFTSHRRVRFKEMEYALPRADLAATLRELVYAMGSADVRAVFPVEVRCAAADEIPISTAYGRDTAYIAVHVDHRGAHGDYFGLAEKIMLSVGGRPHWGKLHSLDAATLRGLYPRFDDFLAVRDAADPTGVFANAYLDRVLGSPACATNAR

SEQ ID NO: 34597 - protein, 569 aa, Frankia sp. CcI3
MTSPARPARSARPSRPKGAGQWALGYSEPLNANERMKKDQGGLEVRDRILNLYPRTGFDGIDPQDLRGRFRWWGLYTQRRPGISGGRTAILEPEELDDSYFMQRIRLDGGRMTSDQLRVIADVSTCYGRDVADVTDRQNIQLHWIRIEDVPAIWAALENAGMTTAEACGDTPRVILGCPLAGVDGDEIIDGSEAIDEVVRRFVGDPTLANLPRKFKSAISGCADHCTLHEINDIAFVGVVHPELGAGYDLWVGGGLSTNPRLGVRLGAFVPPARVAEVWHGVVSLFRDYGYRRLRTRARLKFLVADMGAEWVRATLEKEYLASALPDGPPPAPPRSEGRDHIGVHRQRDGRNAVGFAPRAGRLSGTTLSAVADLADRFGQGRIRATTTQKLVILDVADADVNALEAELGALDLVVRPSVFRRGTMACTGIEFCKLAIVETKGRARDLIDELERRLPDFDEPIGINVNGCPNACARFQVADIGLKGSLVPDDATGEMVEGFQVHLGGHLGTRSRLGRKSRGLKVTADGLVDYVVAVLETYRADRTAGESFADWAERADEAQLTALGAADG

SEQ ID NO: 34598 - protein, 402 aa, Frankia sp. CcI3
MAAMSRISHRIGGIAPSATLAVDATAKAMRAAGRDVIGFGAGEPDFPTPDHIVAAAEKACREPRMHRYSPAAGLPELKQAIAEKTARDSGVIVSPSQVLVTNGGKQAVYAAFATLLDPGDEVLLPAPYWTTYPESIRLAGGVPVDVVTGPEAGYRVTVEQLEAARTPRTKVLLFNSPSNPTGAVHTPEEVRAIGRWAEQAGIWVISDEIYEHLVYGETRFASVLAEVPELAERCIIVNGVAKTYAMTGWRVGWLVGPADAVAAATNLQSHATSNVSNVAQAAALAAVAGPLDAVATMRTAFDRRRQTMHRLLSQTPGIRCPLPDGAFYCYPSVRDVLGRTLRGRIPTTSADLCQLILEEAGVAIVPGEAFGTPGFARLSYALSDDDLVKGVSRLSALLAEAA

SEQ ID NO: 34599 - protein, 302 aa, Frankia sp. CcI3
MRVAFVGLGTMGFPMAGHLVRAGFSTTAFNRTAATAARWAEEHSGRIAPSPAAAATEVDVVCLCVGADDDVREVVLGADGVLGALRPGAIIVDHTTTSAELAEEIAARTAEVGVGFVDAPVSGGEAGAMAGRLSIMCGGDPETIERARPVLAAYGATITRIGPVGSGQLTKMVNQILVAGAVEGAAEAINFAIAAGLDTDLVLSAVAGGAANSWYLANRGQTMVRDEFDFGFAVDWMRKDLRICLAEAGRRGIPLPMIELAERDLAAAQADGEGGLDTTVVIRQRRRATRPGGAGGEVSPAS

SEQ ID NO: 34600 - protein, 340 aa, Frankia sp. CcI3
MTARNGDREPGPDAPGYAGLATFCGLPWLPGTEALAARRPDVAVVGAPFDISTTHRPGARFGPRAMRANAYNPGTYHLDLGIEIFDWLDVVDAGDAHCPHGLTEASHRNIRAKVARIAGLGTIPLVIGGDHSITWPAATGVADAVGWGELGLLHFDAHADTADVIDGNLASHGTPMRRLIESGAVRGRNFVQVGLRGYWPPPDVFAWMREQEMTWHLMHEIWERGSRDVVVDAIAQATDGCRAMYLSVDIDVLDPGFAPGTGTPEPGGMTPADLLRAVRQIALDTPLVAADIVEVSPPYDHAETTVNSAHRVAMEVFAGLAYRRREAAGGVPDLPGSAPA

SEQ ID NO: 34601 - protein, 290 aa, Frankia sp. CcI3
MKIGFIGLGGMGSAMARNLIDAGHTVLAWNRSPDPVTELAAAGAVPASISEAFATGIVLSMLADDQAVTDRLLDPRVLTAAPAGALHVNMATVSTALAIQARREHAEHGLRYLAAPVFGRTDAARAGNLTIVTSGDPDTIAEVQPLFDVLGRRTWTVGDAPEHANLVKILGNYLIACSIEAMAEASAVIEAGGMNPATFIEVLTDNLFTGPVFTGYGRMIGNRDYEPVNFRLPLGLKDVQLALASGLERNVPLPFGGVLRDAFVDALAHGQTDQDWAAVTETARRRAGLA

SEQ ID NO: 34602 - protein, 154 aa, Frankia sp. CcI3
MIYREMLKSKIHRAVVRQADLHYVGSITIDATLMAAAGLWPGEKVDVLDITNGARLSTYVIEGEADSGTIGINGAAAHLISPGDLVIIVGYALMAEEDARSYQPNVVFVNGDNQLVRMGTDPAEAYDGVGLVRGDTNSPQPSLSEQAGDPRRAQ

SEQ ID NO: 34603 - protein, 529 aa, Frankia sp. CcI3
MPTFVDRVVLHATAGDGGHGCASIHREKFKPLGGPDGGDGGRGGDVRLVVDPSVTTLLDFHFHPHQRASRGRPGQGSNRHGADGADLVLPVPDGTVVLTEDGEQIIDLVGPGSAFVLARGGRGGRGNAALASARRKAPGFAELGEPGEQLDAVLELKTVADVALVGFPSAGKSSLVSVLSAAKPKIADYPFTTLVPNLGVAQAGDRPPYTVADVPGLIPGASEGRGLGLEFLRHIERCSVIVHVLDCATLEPGRDPMTDLDVIEAELAAYSADLSDRPRLVVLNKIDVPDAAELAELVAPELRARDLAVFAVSTATRRGVHALSLALADLVAQHRAAAPARAATRIVLRPRAVNEPDFTVRPLGDGFLITGSKPERWVRQTDFTNDEAIGFLADRLARLGVEKELARLGATAGAEVTIGEVTFDWEPTLSGGGLGNGGLGVDDHPGGDGLAETGPGGRGPAGTAASGAAPSPGRGGDTGSSVSLGPRGTDDRLRASVRLTRAERMARRAAAVVDPAVRGEPAGRGEEEG

SEQ ID NO: 34604 - protein, 307 aa, Frankia sp. CcI3
MSTTTSVPFRAGFACLVGRPNAGKSTLTNALVGTKVAITSGRPQTTRHAIRGIVHRDDAQLVLVDTPGLHRPRTLLGQRLNDVVRATLSEVDVVGFCMPADEPVGRGDRFIAEELSRLPKRTPVVAILTKTDRVADPDRIGARLLEIAGLGEFSDIVPVSAVRSYQVAVLADVLVARLPAGPALYPGGELTDEPEQVMVAELVREAALEGVRDELPHSLAVVVEEMVSREGRPAQRPLLDVRVNVFVERPSQKAIVIGTGGSRLKEVGSRARTQIEALLGTPVFLDLHVKVAKDWQRDPRQLRRLGF

SEQ ID NO: 34605 - protein, 510 aa, Frankia sp. CcI3
MSDFNPLDLSLDLPLVLLSNRGPVRFDRDATGRTVTRGAGGLVSALSGLAEHLDDAVWVCGAASEEDVAVAGESAGSSILVQTYPSPRLVEGDPDGPAIRVRLVVTDPTAYADFYSVWSNPVLWFIQHGLYGRSLSPVFTRAEHDAFENGYAAVNRAYADAVVDEVRARGGKALVLLQDYHFYLVADWVREQCPDAVLTHFIHIPWPGPDEWRILPADIRERLLRGLLGSDVVGFHTRRYARNFVLCAQELLGLPIDLEQLTVTVADRVVRARYHPISVDPAALDATQASEEVAAHVAMLRYIFLDDDRQLILRVDRTDPSKNVVRGFLAFGTLLDQHPELVGKVSFLALLQPSRTDVPEYADYIALIGAVVAEINARHTKEGRQPIDLRMVEDFPLAVAAYSICDVLIVNAIADGMNLVAKEVAVVNRRGGVLALSEMAGAHEELGEFAVTLHPFDVQQMADALYTALTMPMEERHRRLAAAARQVRTHDVRRWLDDQLVDLRRVAGFG

SEQ ID NO: 34606 - protein, 264 aa, Frankia sp. CcI3
MSTLEIRNLHVSVETDGEGTREILRGVDLTVRKGETHAIMGPNGSGKSTLSYSIAGHPKYTVTEGSITLDGEDVLAMSVDARARAGIFLAMQYPVEIPGVSVSNFLRSSVTAVRGEAPKLRTWVKEVKTSMAALEMDPAFAERNVNEGFSGGEKKRHEILQMALLKPKIAVLDETDSGLDVDALRIVSAGIESVRAKGETGILLITHYTRILRYIRPEFVHVMAAGRIVDEGGPELAAVLEESGYDRYVKGGGAATPAGVGAVS

SEQ ID NO: 34607 - protein, 641 aa, Frankia sp. CcI3
MRPGTDGWSTMRTFQQDRSVTRTSLRPGTLRRIVAFARPHRRQLAYFLALIVLSSAVGAVVPMIFKTIIDDGIVRHRVGFVQALAAVVAGLAFLDAGLSLAQRWFSARIGEGLIYEMRSQVFRHVQCQPLAFFTRTQTGALISRLNNDVLGAQSAFTNTLSSVLSNILSAGFVLAAMLVLSWRITLVSLVLLPVFIIPARLLAPRLARLTRESYGLNAEMNTTMTERFNVSGAMLAQLYGSAEREDENFRVRAGRVRDIGVTQAMYGRIFFVSLTLVASLATAIVYGIGGRFAAQGSLEVGTLVALTAYLGRLYGPLTQLSNVHVDVMTALVSFERVFEVLDLEPAIADRPGAVDLPAGAATIEFDHVGFRYPAADEVSLASLESVAVLDPRVPTPVLHDVTFRVEPGQVIALVGPSGAGKTTISQLVPRMYDVRSGSVRIGGHDVRDLTLRSLRSAVGVVTQDAHLFHDTIRANLAFARADASDEQMWTALDAARIGPLVRSLPDGLDTVVGDRGYRLSGGEKQRLAIARLLLREPGIVVLDEATAHLDSESEAGVQQALTAALVGRTSLVIAHRLSTVRDADRILVVDDGRIVQSGTHEELLARGGLYAELYRTQFAPVTPVGADAGWAEGASAPPVGV

SEQ ID NO: 34608 - protein, 385 aa, Frankia sp. CcI3
MKNSGPRVGILGAGIAGVTLALMLADSGVPSVLFEQAELSGEIGAGVQLAPSAVRLLHRLGLADALREIAVEVESALMCQWDDGTVVARTPFGKDCADRYGAPYYTVHRADLHALLTSRLETPVATGRRCVEVTEDDESVRLLFADGSTEEVGLLIGADGIRSVVRSRISADVPCFSGELIYRGLVDARRLPGAFGNSIRVWKGTDGHAVMYPVRRGQLISVAATVPAEEGGHESWSRRGDLTAMRARYDCWHDSVRSVLAALDEVTVWALHDREPIECWATDRTVLIGDAAHPMLPFLAQGANQAIEDATVLALCLADAADSHRAAFDRYQRLRVPRAREILLSSRQNAEHLRAEEPASRQDAAVTELPLEDHDWLFGHHAEEV

SEQ ID NO: 34609 - protein, 408 aa, Frankia sp. CcI3
MAIIVQKYGGSSLATIEKIRGVARRVVDTAAAGKQVVVVVSARGRTTDELLGEARALGGHWRSRESDQLVSTGEVVSAATTALALRELGQPAVSMTGGQAGIQVSGEFGSAAVHSVTPDRLRTSLEEGKVVVVAGFQGVDASGDVRTLGRGGSDTTAVALAAALGATCEIYTDVDGVYTADPRLVPRARLLPTVPAPLMHEMAHTGAGILHPRAVDLAATRRIPVQVRNSLGTNPGTVVEVVPGNPLESDGVVAAVTQDEDTTLVMMRGRGEPLDSWAALARMASAKVAPADLFALADSTHGSTLGFTSSPARQIDLAHIARQAGGTVELRDDLGRLSLVGTRMNLCGAVIETLAEILSTHGIRSPWIAISERRISILVPRGGMRRLALTIHDALVLGRGLEAHSSDR

SEQ ID NO: 34610 - protein, 343 aa, Frankia sp. CcI3
MMIIRVATARAVTVLITVALAVGVTACGTVDSPLPAQARPLAPATPTPPRPAALTPAALTPAAAAVTPTPTCDDPQASWRPPGRLPSPGAMPTGTVLETIERRGYLIAGVLADVPPFGSISPFTGQFEGFDVEIANLVGRRIFGADGHVRFRAVTYAERIPVLRDGAVDVVVATMTTNCERRALVDFSAVYYNETQRVLVPRDSPYQGMDDLGGRRVCTAAGAAAGAAATIRRAPSRPVLRTVPNIADCLVLLQAGEVDAVMTTTAILNGMAAQDPRLYVVGPALSDEPDAVAVSLDHPELTRFVNGVLARAIADGTWKRLARRWLSAPFAPPPTPPVARYRD

SEQ ID NO: 34611 - protein, 515 aa, Frankia sp. CcI3
MADGTTVAGFTVAIAGTSLLSVRARAFHRRDELPSPEGWALAGRPFGGVLTWFLLGGAIYTAYTFAAVPGLVYGVGALGFFALPYTIIVYPLAFVLLPRLAETARRHDYVTVGDYVRERHRSPLLALAVALTGIVATTPYIALQLVGVRAVLVAGGLTPPGLPGDLVLASVFGVLAVATYRSGIRAPALVSVAKGILIFLAVFAVVGLVLARLGGPGEIFAAARRNMATDGLPDPSLTLEPSTFASFASLVLGSAMALLVYPHVLTAAFAAKDPDVLRRSAVTLPAWTGLLGLFGLLGVAALATGVRTPRGQAEAAVPLLVQQLAPPVVTGVVFGALVVAALVPAAVMSVAVAMLFVRNVYVEYFHPTATPKHQVRVARGVSLVTKIGAFAFVLGLRDQDAIDLQLLGGVWILQTFPAVGIGLFSTWLHRGALLAGWAVGMAAGTCLVTSGEFSAVVNLHLFGASVPLYTALLALGLNLAVATALTPVLHRVGVARSSRTSQVDRLPRPDAPGWR

SEQ ID NO: 34612 - protein, 350 aa, Frankia sp. CcI3
MSDTHRVRFEPVDVEIEVTEDETVLDAAFRQGVNLMHGCKEGQCSACKSFLLDGDVQMGRYSTFALADYESDEGYILLCRAHAFSDLSVELVNYDEDMIRSGLPVRTIESTVVETEDLTHDITRLRLDITGSPDFMFHPGQYVDITIPGSSEHRSFSMANISAAEGYLEFIIKKYPGGRFSGLLEDGLRPDDPLTVTGPYGAFTLRVSSDRRIVFIGGGAGMAPILSLLRQLATKNSEREVVFYYGARAPRDLFYVDEILQTGASIPGFTFVPCLSDSMPENSDDIGHPVENGLVTDIVDRRETDIASCDVYLCGPPPMIDAALPRLESSGVPKEQIFYDKFTITAAAES

SEQ ID NO: 34613 - protein, 313 aa, Frankia sp. CcI3
MRDIAVFSGSAHPSLAEEICTHLDVPLHRVRVQRFANDCLEVQLPANCRERDVFLIQPLVAPVQENLVELLLMLDAARGASAARTTVVLPHYAYARSDKKDAPRISIGGRLVADLLVTAGANRVLAMTLHSPQVHGFFSVPVDHLHALRELAAHFRHYELSNTTVVSPDLGNAKEAAAFARMLGVRVAAGAKQRFADDRVSISTVIGDVAGRDVIVLDDEIAKGSTVLELLERLRELNVRSVRVACTHGLFAAGALKRIGDQPEVAEIVCTNTVPIPAGDRVPKLKILTVAPALAEAIRRIHNGESVSALFDA

SEQ ID NO: 34614 - protein, 594 aa, Frankia sp. CcI3
MCGLSGELRFDGRGANVDAVVRMTATMVPRGPDGVGVWSAGPVAFGHRRLKIIDLSECGAQPMVDNELGLTTVFNGCIYNYQELRDELIAAGYRFFSTSDTEVIGKAYHRWGRRCVDHFAGMFAFAIAERDSGRLILARDRLGIKPLYLTGNSERLRFASTLPALLAGGGVSSDIDLVAFHHYLSFHSVVPAPHTILAGVRKLPAATVRVVEPDGTSTDDLYWRPSFTRDPAHADWTARDWQDAIAERLRLAVRRRMVADVPVGVLLSGGLDSSLIVALLAEAGQKDLATFSVGFEAVGGEPGDEFVYSDVIARYFDTDHHQIRVPGTRLLPAVDAAVAAMSEPMVSHDCVAFYLLSQEVSRHVKVVQSGQGADEVFAGYSWYPPLAGVGRTDAVDAYLRVFADRPHRDLPAMVEPHHLIEADASRHFVASHFARPGAETAVDAALRIDSTIMLVDDPVKRVDNMTMAAGLEARTPFLDHELVELAAACPPELKLASGGKGVLKNIGRPLMPVDVIDRPKGYFPVPAIRHLDGPFLDRVREALTDPAAKARGLFRPVWVQTMLAAPNDNRTALGANALWQAALLEMWLQTHTVA

SEQ ID NO: 34615 - protein, 395 aa, Frankia sp. CcI3
MSPLTVGVAMETAPGERRVAMVPQVVGRLVGSGLDVLVETGAGRGAWFPDGAYAEAGATVVARLDLFARADVVVSVSLPDPRTRALLRGGQTLVGLLAPLPRPQVMAQLAEAGVTAVSLDGLPRTLSRAQSMDALTSQANVAGYKAVLVAADAYPRYFPLLMTAAGTARPAEVLVLGAGVAGLAAIGTAHRLGAVVRGYDVRPEARGEVTSLGASFLDLGGPDLGGVAGGAGQGGYARALTAEELAGQQEALAAAVARHDVVITTAQVPGRRPPLLVTEEAVKTMRPGSVVVDLAASPLGGNVEISAPDETVVTAGGVTVIGAGNLPALMPAAASAAYARNVAALLGHLVHDGALTIDTADEIQAGVVITHAGRVVHPATAALLTGGSAESQSGA

SEQ ID NO: 34616 - protein, 397 aa, Frankia sp. CcI3
MENAVIVDGVRTASGRGKPGGALSETHPVELLATVLKALIARNDLDPALVDDVIAGCVDQAGEQAVNIGRTAVLSAGFPESVPATTIDRQCGSSQQAAHFAAQGVLAGAYDIVIAAGVESMSRVPMGSTTFGKDPNGPSLHARYPEGLAHQGIGAELVSARWKINREDLDIFSARSHQLAAASVAAGDFAGEIVPVEITLPDGTTAQHTVDETVRATTTVETLAKLKPSFYTEAYAARFPEITWNITPGNSSPLTDGASAVLIMSETRANKLGLRPRARFHTFALAGDDPLLMLTAPIPATRKALKRAGLSIDDIDAFEVNEAFAPVPLMWARDTGADPAKLNPRGGAIALGHPLGGSGTRLLTTMLNYLEATGGRYGLQTMCEGGGMANATIIERL

SEQ ID NO: 34617 - protein, 436 aa, Frankia sp. CcI3
MSPRRSNRTTCCLRHAVDGAAAAYLSSREPSRLRPPSAPVTHAPPGRSRRTVSQVPAYLDHASTTPLHPAAREALLMALQDGWADPARLYREGRRARMLLDAARETVAGVLGARPDEISFPASGSAAAHLALLGTAAARRRAGDVVMVSAVEHSSVLHAAQRHEQAGGRVVRIGVDHLGRVDPADFTPVAGTAVASLQHANHEVGTIQPVAEVAERMRAAGVPLHTDAAVTVGHIPVDLADLGVDLLTASAHKFGGPPGVGVLAVRTGTRWRSPGPVDEREGGRVAGYPNVPAVVAAAMALSARAGELAAEAPRLAGYVAELRRRLPELVNGVELLGDPDRAATVPHISAFSCLYVEGEALLTELDRTGIAVSSGSSCTSDTLIPSHVLVAMGALTHGNLRISFGRESTQADLDALLTALPAAVRAVRDRLGAAGL

SEQ ID NO: 34618 - protein, 353 aa, Frankia sp. CcI3
MSYQAEYIWIDGTEPEPLMRSKTRIIRDGKEPEIWGFDGSSTNQAPGSNSDCVLRPVFVTPDPLRGGDNLLVLCEVELTDFTPHPTNTRAAARTVAEKYADMTPMFGIEQEYTFFKDGRPYGWPEVGYPAPQGPYYCGVGGSKMPGRQIVERHAQACLDAGLAIEGTNAEVMMGQWEFQIGVLPAPAIGDQIWLGRWLLHRIAEDYGVEVSFAAKPIPGDWNGAGAHTNFSTRQTMEGWDAIVACCEALGTRVLEHVTHYGHGIQDRLTGKHETAPWNKFSWGASDRGASIRIPWAVEKAKKGWLEDRRPNANMDPYLVSALMIDTCCSALAGDKPTLFVPSQTTPTPAEATV

SEQ ID NO: 34619 - protein, 400 aa, Frankia sp. CcI3
MTERVVLAYSGGLDTSVAIGWIGAETGADVVALAVDVGQGGEDLEAIRQRALTCGAVESIVVDAREEFAESFVAPAIKSNALYMDRYPLISSLSRPVIVRHLVAAAREHGADAIAHGCTGKGNDQVRFEVGVAALAPGLSVLAPVRDSGMTRDKAIAFAEERGLPIDVSKKSPYSIDQNLWGRTAECGVLEDPWAQPPEDVFVYSADPTVARIPDEVTISFIDGVPVGLDGRSLPLADLVAELNVRAGAHGVGRIDLIEDRLVGIKSREIYECPAAITLLTAHRDLEDLTLERDVARFKRGIDQRWGEIVYDGLWYSPLKSALDAFVDSASAGVSGEVRIRLVGGVAQVVGRRSPASLYDHALATYDAGDQFDQRDARGFIELWGLPTKVWAAREQRLNP

SEQ ID NO: 34620 - protein, 302 aa, Frankia sp. CcI3
MSGEGGLSPGTVVGLGPMGRAMAASLLRSGHPVTVWNRTEGRADDLIVRGATLAPTATAAVAASELTILSLTDYQAMYDILDPVAESSRPSAVLAGKVLVNLSSDTPDASRDAAGWAARHGASFVTGGVMVPAPAVGGPGAHVFYSGPRAVFDIHEPTLRLIGEPRYLGEDPGLAQLFYQAHLDVFLTALSSLLHATALVTAAGVPAADFLPGALNTLTDIPTMIGDGWDLARRLEAGEHPGDLSTARMMGATANHIVWTSEKAGIDTQLPKAVKAHYDQAVTAGRGTENWTVLYEMLKGCD

SEQ ID NO: 34621 - protein, 296 aa, Frankia sp. CcI3
MSRERRRRRGGALLAGATLLAALGLSACGSSGDDTSTPTPSVTFTAGTTMARLHDAGKIIIGTKFDQNLFGLKNLSGQPEGFDVEISKIVTDALGIPRDKVSYVETVSANREPFIQQGRVDLVVATYTINDKRKKVVDFAGPYYVSGQSIMVSKNNTDITGKDTLAGKKVCSVSGSTPAENIRRVAPTAQLVLFDVYSKCADALKNGQVDAVTTDKGILLGLVDKDPDAFKVVGGTFTKEPYGIGLKKGDDAFRNFINDTLEAAYKDGRWEKAYTSTLGKVEPTVPTPPAVDRYTS

SEQ ID NO: 34622 - protein, 433 aa, Frankia sp. CcI3
MALLSLAPTEPRPVAMNVLVVNAGSASLKLRLIGPDDVLLAARDLTAPAGRVDPAGVIAALRELTHEGGQPGAVGHRIVHGGTDFTAPVVVDRAVAERLRRLTALAPLHQPAALAALDEVGAAVPEVAQVACFDTAFHSRMPAEAITYAIPAEWRERYGIRRYGFHGLSHAHVSRRAAALTGARRIVTCHLGSGASLAAVLDGVGVDTTMGFTPLEGLVMATRSGTVDPGALLWLQTEAGLSAHELTDRLFTSAGLRALAGTADMRDVESGVAAGEPAAALALAVYLHRLRAGIAAMTAALGGLDALVFTGGVGENSASVRAGAAAGLGYLGVAVDPERNDPARAGGTGLPGGTGPSGGTGPSGGTGPSGGTGPSGGTGPSGGTGPSGGTGPSGGTEREIGVPGAAVRTLVIEAREDLEIARGTRAALAGGNG

SEQ ID NO: 34623 - protein, 529 aa, Frankia sp. CcI3
MPVVLVAEELSPAGLEVLSGDFEVRHVDGADRSALLPAIADVDAVIVRSATKIDAEVLATAGKLKVVARAGIGLDNVDVAAATQRGVMVVNAPQSNIVSAAEHAIALLLAVARRVPAASEALRGGEWKRSKYVGVELVEKTAGVVGLGRIGVLVAQRLAGFGMKVIAYDPYVSVARAAQHGVTLVDLDELLRQSDVITIHLPKTPETLGLIGTDELARTRPGVIIVNAARGGLVDEAALAEAVRSGQVGGAGIDVFAKEPTTASPLFGLDNVVVTPHLGASTQEAQDKAGLAVARSVRLALQGEFVPDAVNVQAGGVVAEDLRPGLPLAEKLGQLFSGLAGSLAAAITVEVRGEIAVHDVSVLQLAVLKGVFTDVTEEQVTYVNAPLLAKERGVDVALETAEDSPDYHNLVTVRGVLADGTPVSVSGTLVGSRQVEKITAIDGFEVDIRPEAHLAFFRYEDRPGIVGAVGALLGEAHINIASAQVSRLQAGGEALMSLSLDDAVAPDILAEIAKIIGASYARAVSISSD

SEQ ID NO: 34624 - protein, 608 aa, Frankia sp. CcI3
MTREITGAQSLVHSLEAVGADVVFGIPGGAILPAYDPLFDSTRVRHVLVRHEQGAGHAAEGYAQATGRVGVCMATSGPGATNLVTPIADAYMDSVPIVAVTGQVPSPSIGTDAFQEADICGITLPITKHNFLVQSADDIPRIIAEAFHLAATGRPGPVLVDLPKDILQSATSVLPHDVWPPALDLPGYRPVTRPHGKQVREAAKMISAARRPVLYIGGGVLRARAAAELRTLAELTGIPVVTTLMARGAFPDSHPQHLGMPGMHGSVAAVTALQKADLLITLGARFDDRVTGRLSSFAPGAAVIHADIDPAEIGKNRTADVPIVGDCRDVINELVAALVLEERPDLAAWWRTLDGWRRTYPLGYDQPADGSLAPQYVIERLGKIAGPETIFAAGVGQHQMWAAQFISYENPYTWLNSGGAGTMGYAVPAAMGARVGRPDATVWAVDGDGCFQMTNQELATCALEGIPIKVAVINNGSLGMVRQWQTLFYDKRYSNTELGTHPDSPRTGGAGASGRGSGASRRVRVPDFVRLAEALGCVGLRCETAADVDATIEKAMAIDDAPVVVDFVVHPDAMVWPMVAAGASNDDIRIARDTAPDFDYSGDAEVNI

SEQ ID NO: 34625 - protein, 416 aa, Frankia sp. CcI3
MTYLDHGATTPMRPEALAAYTAVLADTGNASSLHASGRRARRIVEESRETLAGVLGARPSDVVFTGGGTESDNLALKGLYWSRRRAEPGRRRVLVSAVEHRAVLDTVDWLGRAQDAEVELLAVDAAGTVRPDTLAAALERDPDSVAVVSVMWANNEVGTVQPIAELATIAHRHGVPFHTDAVQAFGQIPIAVTDEGPDAITVSAHKIGGPIGVGALVVRRGLAMEPLTHGGGQERDIRSGTLNTAGVAAFAAAAARACAEAPQESVRLAALRDDLVRRVRAEVPEAVLNGAPLLGDGGGGDGGGGDGGGPGPHRLPGNAHLTFPGCEGDSLLMLLDARGIECSTGSACSAGVARPSHVLLAMGVDEAHARGSLRFSLGHTSRACDIDALVAAIGPVVERASRAGALAGTSGSMSGT

SEQ ID NO: 34626 - protein, 394 aa, Frankia sp. CcI3
MPGSVIVAGVRTPFGKLSGGLKSFTATDLGGIAISGALARAGLSGDAVDYVIMGHVIQAGAGQITARQAAVAAGIPLSVPAITINKVCLSGLDAIALADTYISSGEFDLVVAGGMESMTGGPHLLRSLRSGVKYGRAELLDATEHDALFCAFDQIAMGASTERYNAGLGIGRAEQDEFGAQSHQRAAAATKNGLFDDEIVPVAVPQRRGEPLVVNQDESVRPDTTVEVLAKLRPAFDGNGTITAGSSSPISDGAAAVIVASRAKAEQLGLPILAEVGHHGFVAGPDTSLQSQPSRAILAALAKERLTPADLDLVEINEAFAAVAIQSMRDLGIGPEITNVNGGAIAIGHPVGASGARIALTLANELKRRGGGIGAAGLCGGGGQGDALVLRVPA

SEQ ID NO: 34627 - protein, 427 aa, Frankia sp. CcI3
MRIALLGCGVVGSETVRLLQANAADLAARVGAPLELAGIAVRRPGRARALDVDPALFTGDAAGLVARDDVDIVIELVGGIEPARSWLLSALRGGKSVVTANKALLASDGATLHDAAAAAGTDLYYEAAVAGAIPLIRPLRESMAGDRVHRVLGIVNGTTNFVLTRMDEIGASFTEALAEAGALGYAEADPSADIDGFDAAAKAAIMAQLAFHSRVTIDDVYRVGIGEVTTADIASARELGCTVKALVVAERSAETEGISVRVHPAMIPRTHPLAGVREAFNAVFVESEAAGQLMFYGQGAGGAPTASAVLGDVVAVARNRIAGRRGPGESSYAALPVLPMGRTVTRYHVNLDVTDKTGVLATVAGAFARHDVSIRSVRQDGRGDDASLVLVTHAAPDAALSATVEELRGLAGVRAVSGVMRVEGGEP

SEQ ID NO: 34628 - protein, 649 aa, Frankia sp. CcI3
MSPRPPCSRRRLVTCAPRVAIEGTGAHGFSGRGRRAAHRERVQRRHRSEKTRSVPLSVTAEVPTDDLTPYEPQTTPSTPGSPAAPTFAELGVRAETVSALTEAGIVHAFPIQELTLPLALARNDIIGQARTGTGKTLAFGVPVVQTVLAAKEGADGRPQALVVVPTRELCVQVTADVTRAGARRGLRVLSVYGGRAYEPQLSALRAGVDIVVGTPGRLLDLARQHVLDLAGVGTLVLDEADEMLDLGFLPDVERIMSQLPTERQTMLFSATMPGPVISLARRFMKRPVHVRAEQPDEGRTVPTTRQHVFRAHALDKMEVLARVLQAGGRGLAMVFVRTRRTADKVAEDLAKRGFAAAAVHGDLGQGQREQALRAFRSGKVDVLVATDVAARGIDINGVTHVVNYQCPEDENVYLHRIGRTGRAGESGVAITFVDWDDLPRWTLVNKALALPFDGPVETYSTSPHLYEALGIPAGAKGTLPHAARTRAGLAAEDIEDLGQSGRGGRRGSRTGRDQDRSEPAAVPTRTRARRRTRGGGAAAAGAGLAIAADPADPADPVDEDGRKAGAPVVDGAGQTGLVEFTGTAPLTDTDTDTARVVSALASETGVEAEESPRRRRRRRGNRGRGTGTMREAGDGTEADADAPPRAESA

SEQ ID NO: 34629 - protein, 324 aa, Frankia sp. CcI3
MAYQTENRRNLMLFAGRSHPGLTAEVAAALDVEPVPTHAYEFASGEIFVRFSESVRGCDAFVLQCHSAPVNTWLMEQLIMVDALKRASAKRITVVAPFYPYARQDKKHRGREPISARLVADLFKTAGAHRLMSVDLHTAQIQGFFDGPVDHLFALPLLTDYIESKLDTSEVTVVAPDSGRVRVAERWTDRLGCPLAIIHKRRDPDVPNQVKMFDVVGEVHGRTCVIVDDMIDTAGTITKAAESLKEHGAAGVIAAATHGVLSGPAADRLKNSEISEVVLTNTLPLPSEARIDKITELSIAPLLAAAIKAVFEDGSVTGLFGGDA

SEQ ID NO: 34630 - protein, 406 aa, Frankia sp. CcI3
MVQGRNTPAVAVIGAGIGGLTLALALARAGVPCRVYEQAENLSEVGAGIQLAPNAVRLLNRLGLTDSLRVIAVAPQAIEIRRWHDDQLLSLTSLGSLCQELYRAPYYTLHRAHLHDVLKRAVGMERVSLGSRLVRVVEQEHGVELHFADSTVRTADLVIGADGIHSAVRDALIRDEQVYSGNVVYRGLIPAERLSGLGRIPKVRIWIGPGKHCVSYPVAGGRLISFAATAPRPHVSESWSADGDQEELLAEYAGWNGTTRRILEAGDSVRCWALHDRDPLRTWCSQRIAVLGDAAHSMLPFLAQGANQAIEDAAALAVCLAQADDIPDALGRYQQLRVPRTTLIQRESRHNARVMHLADGPEQHRRDPAWLGNVQLRRMAWLYGYDVLQEARQAGGPRINGTPASA

SEQ ID NO: 34631 - protein, 241 aa, Frankia sp. CcI3
MLSADSPGMLRTVEDLLARVPLFVGLSEQDRMALSDHLDRQDVTRGDVLFREGDVGDRVFIVLSGKVKIGRQSADGRENLLSVMGPGDLFGELSLFDPGPRTATATAVTDASLLLLEHTALRPWLRSRPEAGAMLLRELARRLRRTNDNVADMVFTDVPGRVAKALLDLAERFGEPAQPGNEAAGVRVEHGLTQEELAQLVGASRETVNKALADFATRGWLRLDSRAVVLLDRERLSRRAR

SEQ ID NO: 34632 - protein, 300 aa, Frankia sp. CcI3
MTELPANADGAFDTDGTTVPPPPAWLRALAEKAGQALVTSRTHPGHAGADARPAAVLILFGDDGPEGPDILLLERAAELRSHASQPAFPGGATDATDESRVHTALREAEEEVGLDPAGVEVLAVASPLYLHASRYLVTPVIGWWHTPCAVVPVDPAETSSVARVPLAELADPANRVMLRHRTGLAGPAFRVRGMLVWGFTAGILDVLLRLGEWERPWNDTELIDYPVARATTSGTPVVPAQTTSPPAPSHPPAPSHPPAPSHPPAPSHPPLQSGPLDKSPPLDKSSPPAAPASPCDERHS

SEQ ID NO: 34633 - protein, 616 aa, Frankia sp. CcI3
MIERHTDMARAVGIDLGTTNSVVSVLEGGEPTVIANAEGSRTTPSVVAFAKNGEVLVGEVAKRQAVTNVERTIRSVKRHMGTDWKMKVDAKDLTPQEISAFILQKLKRDAESYLGETVTDAVITVPAYFDDAQRQATTEAGTIAGLNVLRIVNEPTAAALAYGLDKGEKEQTILVFDLGGGTFDVSLLEIGDGVVEVKSTSGDTHLGGDDWDQRITDHLIKTFNGQHGVDLGKDKMALQRLREAAEKAKIELSQSTQTAINLPYITASAEGPLHLDVSLSRAEFQRMTSDLIDRCRHPFQQAVKDAGIKVSDIDHVVLVGGSTRMPAVVELVRELTGGKEPNKGVNPDEVVAVGASLQAGVLKGEVKDVLLLDVTPLSLGIETKGGIMTKLIERNTTIPTKRSEIFTTAEDSQPSVQIQVFQGEREMAAYNKKLGMFELTGLPPAPRGMPQIEVTFDIDANGIVHVSAKDLGTGKEQSMTITGGSALPKDDIDRMVRDAEQYAEEDRRRREEAETRNKAETLVYSTERFLAENGEKIDAAVKSDVEEKLGTLRGAVAGTDTAAIREAADALAAASQAMGQAMYAQAAQEGAGASGGAGAADDDVVDAEIVDEEDKK

SEQ ID NO: 34634 - protein, 160 aa, Frankia sp. CcI3
MLRTMLTAKIHRATVTQADLHYVGSVTIDADLLAAADLLPGEQVTIVDINNGARLETYAIAGPAGSGIIGINGAAARLVQPGDLVIIIAYGLMDDAEARRHVPKVLFVDAANRIIGHGDDPAEPLPGDPSSLRGDIPVDIPVDIPVPTAAAAVRSAMATQ

SEQ ID NO: 34635 - protein, 561 aa, Frankia sp. CcI3
MDRRTGLSGWPTLRSVRRMPGAEEDTLPRLWPTGTARVLVASNRGPVAFAVGDDGRLRIRRGAGGLVSGLSRVAADNGDGPMAWVCAALSDADRRAARSAPAGRLDLAGHDTDGTAVRMLDVDQVVFDRAYNAVANRTLWFIHHLLYAPASQPVFGPAFRRDWQAYETYNEMFAQALAHEAAPGASVLIQDYHLTLVAARLRALRADLRIAHFSHTPWAPPEYFRILPDDVSEQILRGMLGADRLGFLTDAWADAFQECCRDLLGLRIDRRAVTIGTAGSGRGAGSGRGAGSGRGAGSGREAGSGREAGSGREAGSGREAGRHRTVRIGVHPLGVSADELLGRAAATDVAARAAELVDLAGGRRLIVRVDRTELSKNIVRGLDAYRELLRTRPEWRGKVMHLVCAYPSRHDLPEYREYTAAVQRLAAEIEDEFATDTWLPLRLEITDDYPRSIAALSLAEVLVVNPIRDGMNLVAKEGPIVSTRDAVLVLSREAGACAEMGTAALVVNPFDIQATARALHAALTMPAPERRRRAEELAAVAGRLPPQRWFADQLHALAADR

SEQ ID NO: 34636 - protein, 406 aa, Frankia sp. CcI3
MTEAVVVAATRSPIGRAFKGSLRGMRADDLAAIIVRAALDQVPALNPADIDDLILGCGLPGGEQGHNISRVVAVSLGFDTVPGTTVSRYCASSLQALRMAAHAVRAGEGDAFIAAGVEVVSGFVRGNSDSLPDTQNPRYCEAQARTAARAQAGSAPWTNPRAAGELPDVYIAMGQTAENVAQLAGVSRLEQDEYACRSQNLTERAVADGFFKREIIPVPLPDGGVIDSDDSPRPGTTMRALAALRPVFRPDGTVTAGNACPLNDGAAAVIVMSDTRARELGITPLARIVSTGVSALSPEIMGLAPVEASRRALARAGMTIDDVDLVELNEAFAAQVIPTYRALGLDVAKLNVHGGAIALGHPFGMTGARLLTTLLNGLRTTDTTIGLETMCVGGGQGMALVVERLS

SEQ ID NO: 34637 - protein, 67 aa, Frankia sp. CcI3
MAQGTVKWFNAEKGFGFISVDGGGPDVFVHYSSIVADGYKSLDEGQSVQFEIVQGQKGPQADNVQPV

SEQ ID NO: 34638 - protein, 450 aa, Frankia sp. CcI3
MIYLDHNATTPVDPEVVRAMLPLLRDHFANPASSHPAGQAVARLVEGARRDVANLAGAQPRDVIFTSGATEAANLAIAGVLATAPPSCRRVLVGATEHRAVLAAAEAAARVHGAIVQTIRVHPDGTIDLNHLRALLQPVWDGSAVAGNGGVLGASVSKVALVAVMTANNETGTLNDPRPIAELAHGAGAFYLADITQTLGRMPVSVADAGIDLALASAHKLYGPKGTGALIAGRHARSQLAPLIHGGGQERGLRAGTVNTAGVVGFGAAARIAAAVMDDEAPRQRAQTELLHDLLVEWLGVDAVELNGPSERGGSRECRLPNTINLRFVGADADAVQACLPDVAVSAGSACHGGGAEPSHVLTAMGRSTTAAMESLRFSVGRFTSVDQIHAAAAAVARAVLRVRALEQNRSNDLFDGPTTEFRAQEIPTDRVFSRALRMPEVPAPRSAYP

SEQ ID NO: 34639 - protein, 462 aa, Frankia sp. CcI3
MLDPLYHLAANAIVFFHRGFAPIFGADSFFSWAFSVVLLVVCVRILIFPLFVKQVKSQRTMQMMQPRIKEIREKHGHDKPRMQQEMMALQREHGNPLLGCLPIFLQIPLFISLFHVFTHLAPMNEGPNHSLVWRPRVGLSADQVEQIASAKVFGISLASKFTSDGDFSHFLGVDSTHVRILAIVLIVLMGLTTFLTQRQIMARTGPLDPQQAMVQKALLYGSPLMLAFFGFRFPIAVLLYWLTTNLWSMGQQFFIMKKMPPIKPADANGRLPGARPAAGGAVTPARPAPGVRAGAKSKNRPRSASVTPTKGGDSGAAAAGRTSSTAPPGTRSRNGTSTASRTTTTPKAATTPKSGKAGAPGGPGANGVSGGGVSDNGVSDNGVAATTAASTGRSAEAKTSAAGRRNAPGKNAGQSAASGPTAPSDGESTPRPAPVPAGVRRQVGGSRPAKRRGKSKRPGGRR

SEQ ID NO: 34640 - protein, 218 aa, Taihangia rupestris
EISVLCDAEVALIIFSGRGKLYEFCSSLSMMKTLEKYQRCSYGDLDANQPVNETQSSYQEYMKLKARVEVLQRSQRNLLGEDLGPLNTKELELLEHQLESSLKHIRSTKTQFMLDELSDLQNREQMLVETNKTLRRKLEETAPLRLPWDGGYGHNNIQQHNRQLPPQSQLFFQPLHGNNNTSPMPIGYSPLGSDNHHLQMNVGNPGQNVNGFVPGWML

SEQ ID NO: 34641 - protein, 325 aa, Taihangia rupestris
MGRGRVELKRIENKINRQVTFAKRRNGLLKKAYELSVLCDAEVALIIFSNRGKLYEFCSSSSMLKTLERYQKCNYSTPETHVSTGEALELSSQQEYLRLKARYEALQRNQRNLLGEDLGPLNSKELESLERQLDMSLKQIRSTRTQCMLDQLTDLQRKEQMLNEANRSLKQRLFEGYNVNQLHQFQLNANAEDVGYGRHQQAHQPHSDVFYHPLELEPTLQIGYHQSDPIQVVAAGPSVSNFMGRMVAMILITRRRRRRRRENYHGCVGEPMDDDPWIHVMMDYISSSSCMFMLFDYVVLFDEFDKNNYLQFVIVGNYPIINSPH

SEQ ID NO: 34642 - protein, 249 aa, Taihangia rupestris
MGRGRVELKRIENKINRQVTFAKRRNGLLKKAYELSVLCDAEVALIIFSSRGKLYEFCSSSSSMLKTLERYQKCNYSTPETHVSTREALELSSQQEYLRLKARYEALQRNQRNLLGEDLGPLNSKELESLERQLDMSLKQIRSTRTQCMLDQLTDLQRKEQMLNEANRSLKQRLFEGYNVNQLHQFQLNANAEDVGYGRHQQAHQPHSDVFYHPLELEPTLQIGYHQSDPIQVVAAGPSVSNFMGGWLP

SEQ ID NO: 34643 - protein, 904 aa, Candida albicans
MEDKNAATQLNLPNVQSIGSHLSIQDHEIALQQVIDNPLSIGEVATTLTESQKWFVLKRLHFDALVSLEELPPQASFIFEKIEQMTTEEAVEILEKNIEEHETDVNIPENDLVLWKELVENSHKFTKVQLQEKLGSNSSSSVEGEKTADVEKGHEIVDWDLQVRLEAVLVAYWSPYPEVRAVTFPYDDPTIPVETFRVYLIGIIWTAIGAVINQFFTERQPAITLAMAVVQVFLYPSGLLCEWFLPKWKFKIWKYTIDLNPGPYTYKEQMLATIFCGVTGGSTSYVSSNILMQKSEIFYDNKWVDFGYQVLLILSTNFLGVGFAGIMRKFAVYPTKAVWPSILPGLALNKTLLTPAKKEVINGWKISGYNFFFITFVASFLYFWIPDYLFQALSTFNWMTWIKPDNQNLAVITGSVGGLGLNPITTFDWNYFSSMLQPLQVPFFYPLNNIIGMFFAFFCIIGVWYSNYKWTGYLPINDNGLFTNTGERYSVASVVNKDSLFDNAKYQEIGPPFYSAANLVVYGAFFAIYPFHFVYEIGMNYDQMWDACTSFWRVIKDFRKSTYDGFDDPHSTMMRAYPEVPEWAYLIIVVISLVLAILCVKLYPAQTPVWGIFFALGINFVFLIPLTTIYARTGFAFGLNVLVELIVGYAIPGNGLALAFIKALGYNIDAQAQNFVNDLKQGHYAKLPPRAVYRVQLLSIFVSSFIQLGILNFQINGIKDYCKPGNTQKFTCPGGRTFFSASVLWGVIGPKKVFNGLYPVLAWCFLIGFLLAFPCIAIKKYAPRKYVKYFEPSIVIGGFLKYAPYNLSYYIPGVYVSYAFMSYIKRKYEAWWQKYTYVLSTGLNAGIAFSSIIIFFAVMYHEKDINWWGNTVMYSGVDYAMTGWLNATVDAPDGYFGPRRGNFP

SEQ ID NO: 34644 - protein, 904 aa, Candida albicans
MEDKNAATQLNLPNVQSIGSHLSIQDHEIALQQVIDNPLSIGEVATTLTESQKWFVLKRLHFDALVSLEELPPQATFMFEKIEQMTIEEAVEILEKNIKEHETDVNIPENDLILWKELVEMSHKHTKAELQEKLGNNSSSSVEGEKTADVEQGHEIVDWGLQVRLEAVLVAYWSPYPEVRAVTFPYDDPTIPVETFRVYLIGIIWTAIGAVINQFFTERQPAITLAMAVVQVFLYPSGLLCEWFLPKWKFKIWKYTIDLNPGPYTYKEQMLATIFCGVTGGSTSYVSSNILMQKSEIFYDNKWVDFGYQVLLILSTNFLGVGFAGIMRKFAVYPTKAVWPSILPGLALNKTLLTPAKKEVINGWKISGYNFFFITFVASFLYFWIPDYLFQALSTFNWMTWIKPDNQNLAVITGSVGGLGLNPITTFDWNYFSSMLQPLQVPFFYPLNNIIGMFFAFFCIIGVWYSNYKWTGYLPINDNGLFTNTGERYSVASVVNKDSLFDNAKYQEIGPPFYSAANLVVYGAFFAIYPFHFVYEIGMNYDQMWDACTSFWRVIKDFRKSTYDGFDDPHSTMMRAYPEVPEWAYLIIVVISLVLAILCVKLYPAQTPVWGIFFALGINFVFLIPLTTIYARTGFAFGLNVLVELIVGYAIPGNGLALAFIKALGYNIDAQAQNFVNDLKQGHYAKLPPRAVYRVQLLSIFVSSFIQLGILNFQINGIKDYCKPGNTQKFTCPGGRTFFSASVLWGVIGPKKVFNGLYPVLAWCFLIGFLLAFPCIAIKKYAPRKYVKYFEPSIVIGGFLKYAPYNLSYYIPGVYVSYAFMSYIKRKYEAWWQKYTYVLSTGLNAGIAFSSIIIFFAVMYHEKDINWWGNTVMYSGVDYAMTGWLDATVDAPDGYFGPRRGNFP

SEQ ID NO: 34645 - protein, 945 aa, Candida albicans
MTKKGHEYIQLSTFSEHENEHEPESSSTTSSPPPPGIRQYEKQHEWNFTDLQLQFVLLRLGVISDEVYHNQNFSLSDPDIHISKEVEYMINKIDQLSISEAIEIIRDALADHNGDVNFLIEDYQLLERLISQIPNNIESQKSNQNVETNLDELPEMKYPMQSTFKNKTYLTIIDWSLQIRLEAALIHYHSPYPEIRAITDPFDDPNTPVETFRAYFIALFWTFIGSLINSFFYHRMPGISLGTHTIQILLLPSGKLWEKLIPLNKTITINNTKINLNPGPWNFKEMMLSTIIYSCSASTPYSINNIFVMKLDRFYGLKWVNWIFQILFTVSTQLLGFSFAMIMKKVCVYPSKAIWPTILPTIALNRALMNQDNASNNSIVHGWKISPYSFFLVTFTLSFIYNWIPSYFFKALSLFNWPTWFNPNSIHLVNITGSNIGLGFNPIPSFDWNVIGGSSMVIPFYTFVNRYLGTFLGFIIILIVYYTNNNWTAYLPINSNRLFNKKAQLYNVHDILNDDNKLFDNEKYQQIGPPYFSAANLVIYGAYFCLYPFAILYHGLTEWNSMKTSFINVWTSIIDAFKSESEMGVGVESNNDNNLSSHRQYGRYANDPHCKMMAHYPDVPDWWFITILVVSTSFAIAAVWFYPVETPIWGIFFTIAINFIFLIPLTSIASVTGFSFGLNVLVELIVGYAIPNSGIALITLKAYGYNIDSQASNYITDQKLAHYAKIPPRAIFKGQLLSTLLNIIISLSVANWQLNNVENICDPHQKDNFKCPGANTYFYSSIQYGEIGPAKVFGGLYPILKWCFLLGVLLVFPCVWLKRNGPTKIFQRYFQPTIIIGGMLDFAPYNLSYFTGGLYISYIFMFYIKKNYLLWWEKYNYILTSALSAGVAFSALIIFFTVQYHPHPLHWWGNSIGQQGIEGGEISPIWKNIDTAPDGYIGLRKGHFP

SEQ ID NO: 34646 - protein, 945 aa, Candida albicans
MTKKGHEYIQLSTFSEHENEHEPESSSTTSSPPPPGIRQYEKQHEWNFTDLQLQFVLLRLGVISDEVYHNQNFSLSDPDIHISKEVEYMINKIDQLSISEAIEIIRDALADHNGDVNFLIEDYQLLERLISQIPNNIESQENNQNVETNLDELPEMKYPMQSTFKNKTYLTIIDWSLQIRLEAALIHYHSPYPEIRAITDPFDDPNTPVETFRAYFIALFWTFIGSLINSFFYHRMPGISLGTHTIQILLLPSGKLWEKLIPLNKTITINNTKINLNPGPWNFKEMMLSTIIYSCSASTPYSINNIFVMKLDRFYGLKWVNWIFQILFTVSTQLLGFSFAMIMKKVCVYPSKAIWPTILPTIALNRALMNQDNASNNSIVHGWKISPYSFFLVTFTLSFIYNWIPSYFFKALSLFNWPTWFNPNSIHLVNITGSNVGLGFNPIPSFDWNVIGGSSMVIPFYTFVNRYLGTFLGFIIILIVYYTNNNWTAYLPINSNRLFNNKAQLYNVHDILNDDNKLFDNEKYQQIGPPYFSAANLVIYGAYFCLYPFAILYHGLTEWNSMKTSFINVWTSIVDAFKSESEMGVSVESNDDNNLSLHRQYGRYANDPHCKMMAHYPDVPDWWFITILVVSTSFAIAAVWFYPVETPIWGIFFTIAINFIFLIPLTSIASVTGFSFGLNVLVELIVGYAIPNSGIALITLKAYGYNIDSQASNYITDQKLAHYAKIPPRAIFKGQLLSTLLNIIISLSVANWQLNNVENICDPHQKDNFKCPGANTYFYSSIQYGEIGPAKVFGGLYPILKWCFLLGVLLVFPCVWLKRNGPTKIFQRYFQPTIIIGGMLDFAPYNLSYFTGGLYISYIFMFYIKKNYLLWWEKYNYILTSALSAGVAFSALIIFFTVQYHPHPLHWWGNSIGQQGIEGGEISPIWKNIDTAPDGYIGLRKGHFP

SEQ ID NO: 34647 - protein, 747 aa, Candida albicans
MSKEAEFVKTISKEGDPQVDVLERDAESNSENALEPDVEELPKVVREIVPLEDDPTIPVLTFRYFILSIIFIIPGAFIDTMNSFRTTSAAYSIFFVQIASHWCGKWLARILPKKQVGFGRLSFNLNPGPWSIKETALITITANSGATGSMGTNPLALAELFYGETVNPAVAIFFMWMIVFIGYSFAGIARNFLLYDPQFTWPQALMQTTLFQTQSKSDKDAKQASKQMKVFFFVLIGLCIWQFFPEYIFPMTSSLAFLCWVAPENYTANFIGSGLGGMGFLNLSLDWSNITSSIMLYPYWVQVVQFAAFVLGAWILIPAAKWGDLSSYPYGLMSNSLFLGNGTKYPTTELLTPNLRLNETRYEELGPVHLGAQRAWNMFFDYAAYVSGFMWVVAFGYKSLSGSLKRLVKSRKQKGSINLQYTDRLNKLQAAYEEVPLYWYAILFLCAFVTLLVIFATDSLFMPWWCLLVGVAFGAVIVTPLVWLYALSNFQLPIGTFNELLYGYMIQNKTSRHPAGAMVYGAVGGDLFYRAQYILNDQKIAHYMHISQRAVFFSQIFGELIGVPINYAALRWVISSKRDFLDGTKVDKLHQWTGQTIVSYNTNAVQYVILGPDRLFKNYPVLPYGFLLGAGAPLVLYLLHRLFPKSKLKFHLWNTTVFFSTMSTFYGNLSTGYFSRFIGGTITMFWAFRYKHSLWKKYNYLLAAALDTGLNLSILLIFLFFSAGKTVNFPEWWGNNGKSVERCFAMS

SEQ ID NO: 34648 - protein, 249 aa, Taihangia rupestris
MGRGRVELKRIENKINRQVTFAKRRNGLLKKAYELSVLCDAEVALIIFSNRGKLYEFCSSSSSMLKTLERYQKCNYSTPETHVSTREALELSSQQEYLRLKARYEALQRNQRNLLGEDLGPLNSKELESLERQLDMSLKQIRSTRTQCMLDQLTDLQRKEQMLNEANRSLKQRLFEGYNVNQLHQFQLNANAEDVGYGRHQQAHQPHSDVFYHPLELEPTLQIGYHQSDPIQVVAAGPSVSNFMGGWLP

SEQ ID NO: 34649 - protein, 525 aa, Synechococcus sp. RS9917
MPSAPDAVPSSPNAPRPWWRQPPLWIGALPLVLFLVLAAADLAAARAFTESGKAISSALLGSLWQWMAVVLFLIAVGLAISPLGRLRLGGVDARPSLKFFDWCAVLICTLLAGGGVFWSAAEPLFHFQTPAPYFAGIEGSTAAAVDPALAVSFLHWGFLAWALVATTVTITLSIRERRGEPLRPRSLLVGLLPRTWVEGGMGDLADGVSVVAAIAGTVGPLGFLSLQLSHAAGQLPGLQDSASLQSLVVVMLTAIFASSTVSGIQRGIKWLSELNVWLTLAMAAGLLLLGPGLWLMRHFLTAFGTYLLNLPQMALAANSSPDNWVNGWTVFYWGWFLGYAPLMGLFTAGVSRGRSVRELVLAVAILCPIVTNLWFTLLGGTGMALELSNSGSVSGPLSNNGAAAALLAILGQLPLAWLLIPVGLVLVVLFMATSADSMSYAAAMVVSGQRTPPALLRLFWALMIGSLTLVLLRIGSGLGDSTSIDALQAFIVITAVPVTPLVLTSLWSAPRLAWKEWRQQEASTP

SEQ ID NO: 34650 - protein, 328 aa, Synechococcus sp. RS9917
MSALTRCLQEEAAAIAAAAERLSGEQVEGALALLERCADRKAKLVITGVGKSGIVARKIAATFSSIGLMALYLNPLDALHGDLGVVAPDDVCLLLSNSGETSELLEVLPHLKRRGTARIALVGRAESSLARGSDVVLEASVDREVCPLNLAPTASTAVAMAIGDALAAVWMERRGISPADFALNHPAGSLGKQLTMTVADLMVPAAQLAPLRPTTPLPEVIGRLTQGAIGSGWVEDPQQAGRLIGLITDGDLRRALRNHGSERWASLTAADLMTADPITVAADLLAVEALQRMEHNRRKPIGVLPVVDTSDRLQGLLRLHDLVQAGLA

SEQ ID NO: 34651 - protein, 350 aa, Synechococcus sp. RS9917
MAPLTLVINLGSSSLKAALLEQGGLACWHRGRSLAHGEELHSVLDDWLAPALADHRQALVRIGHRVVHGGERFIAPTRIDAAVEQELQTLIPLAPLHNPPALTGIAWARAWAPELPQWACFDTAFHSTLPEAARTYALPAELRARGLRRFGFHGLNHQHVAETVAAQWQAQGRDSSQLRLISAHLGAGASLAAVRGGRCIDTTMGYTPLEGLVMATRSGSVDPGVLLELMREGFSEAELAELLQKRAGLKGLSGLSGDMREIREQAAAGHAGASLALAVFRHRLLQELGAMAASLGGVDVLALTGGIGEHDGALRQELADALSWIPDLEIQVVPADEEGMIARLSERVSQ

SEQ ID NO: 34652 - protein, 570 aa, Synechococcus sp. RS9917
MNESLPLADDPTMAAPSVAQYTLSRLAQLGIDQIFGVPGDYAFSIDDAAEEVPGLSWVACANELNAAYAADGYARIRGAALLTTTYGVGELSAINGVMGSKAHRLPVFHLVGMPSERIQKQGLITHHNLGDAVYDRFQVLSAEAACVSAVLTPDNCIDELERVIREALRQSRPAYLVISEVNGGQPVLGTPVQGQPLVAIKRQHSVPQELEAAVGTILARLAAAQKPVAVLTHLVSRYGVRDQALELIRKTNLPTALTPNDKGTIDESMPQYAGLYAGDWSSSDAVRDLVGNADLVLDIGGIITTELNTGLWTGNYDPAKVVSIQDNFVRAGSKVFVNVAIDDVLNALCERVSTRCNDHGLKLEPMPLVGAAGDATCSATFYPRLQRRLRAGDTLVIETGTCMTHLNKVLLPEGVSAEGQGLWGSIGWGTPACLGVAMAKTSGHTWMVTGDGSHQLTLNELAVMGRYGVKPRIFVLNNGLFGIEDVISERGHGYDDLAPVNYHLLPEAFGCRNWLSARVSTVAELDAVLDQIDAHDGAAYIEVMIPNEESQPLPQSTIDSGYKLSTPPIG

SEQ ID NO: 34653 - protein, 600 aa, Synechococcus sp. RS9917
MALLVQKFGGTSVGSVERIQAVARRIANRRDEGHDLVIVVSAMGHTTDELTAKARALCSNPPQREMDMLLATGEQVSIALLSMALHALGVPAMSMTGAQVGIVTESAHGRARILDVRTDRLRSRLGDGQVVVVAGFQGTSQSSGGTAEITTLGRGGSDTSAVALAAALGADACEIYTDVPGVLTTDPRKVADAQLMEQISCDEMLELASLGAAVLHPRAVEIARNYGVTLVVRSSWSEEPGTTLTSRSARPIGREGLELGRPVDGAELVERQAVLALSHVPDQPGVAARLFEALSAGEVNVDLIIQATHEGNSNDITFTVAETDLESARRICTDLVDAMGGELVAEGGMSKLSISGAGIMGRPGIAAGLFDTLSRQGINLRLIATSEVKVSCVIAAAMGGKALRAASEAFELSERQLQINPPASGAGEPEVRGVALDRDQAQVSVRHVPDRPGTAAALCSALADAGISVDAIVQSERQHADGSRDISFTLKREDRAAADQALGSLLAQWPGALLEDGPAIARVSAVGAGMPATAGTAGRMFRYLAEAGLNIELIATSEIRTSCVVAEADGVAALQAVHAGFGLGGAVRHAAQGTASPLDS

SEQ ID NO: 34654 - protein, 401 aa, Synechococcus sp. RS9917
MGRAKKVVLAYSGGVDTSVCIPYLKQEWGVEEVITFAADLGQGDELEPIRIKALEAGASQSLVGDLIDPFIREFAFPAIRANALYEGCYPLSTALARPLIARRLVEVAREVGADAVAHGCTGKGNDQVRFDVAIAALAPDLKVLTPAREWGMSREETIAYGERCGIPAPVSKQSPYSIDLNLLGRSVEAGPLEDPMVAPPEEVFAMTRPVADTPDAAEEIEISFEAGNPVAINGQRLDPVALIREANRLAGLHGIGRLDMIENRVVGIKSREIYETPGLLLLIQAHQELESLTLAADVLRTKRQLEMQWADLVYQGLWFGPLKEALDGFMDRTQEHVHGVVRLRLHKGSAMVTGRASSTSSLYVPAMASYGSEDQFDHRAAEGFIYVWGLPIRLWAAARRR

SEQ ID NO: 34655 - protein, 636 aa, Synechococcus sp. RS9917
MGKVVGIDLGTTNSCVAVMEGGKPTVIANAEGFRTTPSVVAYTKNQDQLVGQIAKRQAVMNPDNTFYSVKRFIGRRVDEVNEESKEVSYSVEKAGSNVKVKCPVLDKQFAPEEVSAQVLRKLAEDAGKYLGETVTQAVITVPAYFNDSQRQATKDAGKIAGLEVLRIINEPTAAALAYGLDKKSNERILVFDLGGGTFDVSVLEVGDGVFEVLSTSGDTHLGGDDFDKVIVDHLADSFKANEGIDLRQDKQALQRLTEAAEKAKIELSSATQSEINLPFITATPEGPKHLDLTLTRAKFEELASKLIDRCRVPVEQALKDAKLSAGELDEIVMVGGSTRIPAVLELVKRITGKDPNQTVNPDEVVAVGAAIQGGVLAGEVKDILLLDVTPLSLGVETLGGVMTKMIPRNTTVPTKKSETYSTAVDGQTNVEIHVLQGEREMASDNKSLGTFRLDGIPPAPRGVPQIEVTFDIDANGILSVTAKDKGSGKEQSISITGASTLSEQEVESMVKDAEANASADKEKRERIDLKNQAETLVYQAEKQLGELGDKVDAAAKAKVEEKRTQLKEATEKEDFDSMKSLLEQLQQELYALGASVYQQAGADGAAAPGADGAAGAAGSTSDAGDDVIDAEFTESK

SEQ ID NO: 34656 - protein, 300 aa, Synechococcus sp. RS9917
MSASASQMDYVLPNELVDGMIAAGGKKATVSVKNLLLRGFYSGAILGLAVILALTVAIQSKLPFLGSVLFPFGFASIVLFGMELVTGNFALLPMATWAGKSTWGATFRNWSWVWIGNFIGTLLVAVIMAVSLTSGGTVDPSADGGVWPQVAQKIISLNIANVEKKYEALGSLGFFLAILRGIVANWLVCLGVTMALVSKSVPGKILACWLPITAFQTLGMEHIVVNQFLHTAGPILGSGVPFYKVIVWNFLPVTIGNIIGGMVFIGMLFYSTHRSTVENVLPREHDEKLERELAAELGAR

SEQ ID NO: 34657 - protein, 513 aa, Synechococcus sp. RS9917
MHTSAPSRPYLEGKKLNKIEQNKAAKDGLLVGPELEYFARIGWEEVDETDLQLRLKWYGMFWRPKTPGLFMLRLRIPNGVLSAHQLRVVASIVERYGDNGSCDITTRQNLQLRGVLLSDLPDILKRLNHAGLSTIQSGFDNPRNVTGNPLAGIDPHEIVDTRPYTQALNDFLTSNAEGNSNYSNLPRKWNTAVAGSRDNFLLHNDIVFHPVEHNGELGFGVWIGGILSSQMNAYALPLNAWVKPDQLCAITDAVISIWRDNGERDKRPKGRFRLYLDQVGLETFRAMVEERFGPLTPDPGSTFEAAPRSHYGIHPQKQHGLHFAGLHVPVGRLTADDLHDLASASLEHGCGEVRFTEDQNVILPGIPTDQLGALEADPLLQRFPLAPGSIAAGTVSCTGSTYCGFALTNTKDQALQAARALDAELDLPEELKIHWTGCPNSCGQAYMGAIGLTGTKAKNANGAMGEGYTLTLGGSQGANPQIGSIAEKAIPAEQIQSVLRQVLIEHFGARPRH

SEQ ID NO: 34658 - protein, 373 aa, Synechococcus sp. RS9917
MMTRRRFPWSWLLWAVVIVAVLLAPSVLPVFRLNLLGRYLALAIVALGIDLIWGFTGLLSLGQGIFFALGGYAAAMFLQLGSASDAAHGLPEFFSLYGVDQLPLFWEPFRSPLFTLIAIALIPALVAAGLGYLVFRNRIKGVYFSILTQAALLVFFNFFNGQQKLINGTNGLKTDVTMLFGQMVGSEGMQRGFFWLTAALVIVSWLFVRWLVRGRFGDVLIAIRDDESRLRFTGYNPTQFKTIVFALAGALAGVSGALYTVQSGIVSPQYMTVPFSIEMVIWVAVGGRGTLLGAVLGAVLINYAKSLVSEAIPESWMFIQGGLFILVVTVLPQGLLGWWRSDGPRNLLLRLGVPRRLATYPRLELDGDEEVQP

SEQ ID NO: 34659 - protein, 286 aa, Synechococcus sp. RS9917
MTYRPRFDTDGAIFMGSRRDPGGCRVGLFGVPYDGTTSFRPGTRFGPAAIREVSSGLETYCPQLDLDLEAMAFADLGAVDIPFGDPEPVVEAVKQATDAVLSLGLKPLMLGGEHSISSGAVAAVADKHPDLALVQLDAHADLRHDWLGAHHSHACAMRRCLEVLPSQQLLQLAIRSGTREEFLELRQTGRLIARERMLEALQPLRGIPLYLTVDLDWFDPAVMAGTGTPEPGGFLWSDFAELVAELSHHNLVAADVVELAPQLDPSGVSSVLASKVVRSLLMLLHQ

SEQ ID NO: 34660 - protein, 390 aa, Synechococcus sp. RS9917
MLPSPAKTDPICLDYQATTPCAAEVIEAMAPWWREHWGNPSSRQHRLGLMAAAAVSEARERLGRCLGVTPERIVFTSGATEANNLALLGHARALARQRGRPGHLISVATEHHAVLDPLRQLEREGFQLTLLTPAEDGLLQPAQLEAALRDDTQLVSVMAANNEIGVLQPLASLGRLCRERGITLHSDGAQAFGAMAFEPDALGIDLTSLSAHKIYGPKGIGALVRPLALPIEPLQWGGGQEGGLRPGTLPVPLIVGFATAAELALRDQDRRTQRLRQWRDRLWRGLRTALPDLLCNGTLEQRLAHNLNITIPGVSGSRLHQQLRRHVLCSSGSACSRGEPSHVLRALGRSRQEAEASLRLSLGWATTEHEIDAAIAAIAETVTRLRASAL

SEQ ID NO: 34661 - protein, 528 aa, Synechococcus sp. RS9917
MTKVLVSDPIDQAGIDILGQVAQVDQRTGLSPDELKAIIGDYDALMIRSGTQVTADVIAAGDRLRIIGRAGVGVDNVDVPAATQRGVLVVNSPEGNTIAAAEHALALLLSLSRHVPQAHASMRQGAWDRKKYVGNELYKKTLGVVGLGKIGSHVARVAKAMGMDVIAFDPFISADRAQQMQVRLTQLNELFRTADYITLHIPRTPDTENLVNAELLRSMKPTARLVNCARGGIVDEAAIAEAINTGVIAGAGLDVFASEPLAVESPLRAVERGLVLTPHLGASTEEAQENVAIDVAEQIRDVLLGLPARSAVNIPGLSAEIMERLKPHLQLAETLGLLVSQLSGGQVQELEVRLQGEFAEHPSQPLVVAALKGLLSSALGERINYVNAALEAKGRGIHVLEIKDDASRDFAGGSLQLTTRGGQGGHSVTGAVFADGDLRVTSIDEFPVNVPPSRHMLFTRHRDMPGIIGHLGSLLGEHNVNIASMQVGRRIVRGDAVMVLSIDDPIPPSLLATIHAINGIQEAHPVTL

SEQ ID NO: 34662 - protein, 116 aa, Synechococcus sp. RS9917
MADPNPDTYAIVEASGQQFWLQPNRYYDLDRLQAAVDDTVTLDNVLLVKDSKGTTVGQPYVKDASVSLKVMDHRRGPKVIVYKMRPKKKTRRKNGHRQELTRVMVESISVGGKAIS

SEQ ID NO: 34663 - protein, 381 aa, Synechococcus sp. RS9917
MIGYISDNLLIPILDFFYGLVPSYGLAIVALTVVIRLALFPLSAGSIRSARRMRIAQPVMQKRQAEIKSRFANNPQKQQEELGKLMKEFGSPLAGCLPLLVQMPILFALFATLRGSPFADVPYTLNLKVLPAEQIAAVDPKPFNSASHSIFITETNHVPVIASLPGGTKLGQGDSAKIQLKTKDGESFATVLEGVEDGPSFLPDWTVTKGEGVVSVADDGTIQALSPGDATVEGKIPGLAARSGFLFIKALGQVGFYTDGAINWDIAILVGAFGLSLFASQLLSGMGMPANPQQATANKITPVMITGMFLFFPLPAGVLLYMVIANIFQALQTFLLTREALPENLQAILDDQLRQQTVTATASSGGGGNPAGRLPFEPRSK

SEQ ID NO: 34664 - protein, 590 aa, Synechococcus sp. RS9917
MDALRRHGVDTIFGYPGGAILPIYDALHVAEREGWVQHILVRHEQAGTHAADAYARATGKVGVCFGTSGPGATNLVTGIATAQMDSVPMVVITGQVPRAAIGTDAFQETDIFGITLPIVKHSWVVRDPADLGAIVAQAFLIAASGRPGPVLIDIPKDVGQEEFDYVPVEPGSVIPAGFRQPAAPEDGAIAAALDLIEQANRPLLYVGGGAISACAHDSLRVLADRFQIPVTTTLMGKGAFDENDPLSVGMLGMHGTAYANFAVTECDLLIAVGARFDDRVTGKLDTFAPRARVIHFEIDPAEIGKNRQADVAVLGDLGLSLARMVEMSLQRHEEPRTAAWLQRIEAWKQRYPLVVPSPEGAIYPQEVLMAVRACSDDAIVTTDVGQHQMWAAQYLRNGPRGWISSSGLGTMGFGMPAAIGAQMACPERQVICIAGDASILMNIQELGTLAAYGLPVKVVIVNNHWQGMVRQWQESFYDERYSASDMLNGMPDFIALARSFGVDGVKISDRESLRSDLSAALQAPGPMLIDVHVRRGENCYPMVPPGKSNAQMVGLPAHPELAMDTTRSCAACGATTAHEHRFCPSCGASL

SEQ ID NO: 34665 - protein, 289 aa, Synechococcus sp. RS9917
MTKVALLGAGLLGSAIGHRLLTVGCSLWVWNRDPARCELLVSAGAQRLEDPAQAIEEAGTVITVLRDGPVTAEVVARIGSLRGACVMPMGTMGISESVALETQAQGQGGCYLEAPVLGSRPEALQGRLLVMAGGDEAVFARQLPLLRGLASEPRLMGAVGTGAAAKLALNQLIASLTHGYSLALRLVQAAGLDVERFMAVLRPSALYAPTVDKKLTRMLEHHYADPNFSTSLLRKDLNLFLREASLAGVNAEALEGLAALLARAEGTDLDGADYSALHELTAAERTSIS

SEQ ID NO: 34666 - protein, 674 aa, Synechococcus sp. RS9917
MCGIGGVFSAQAHQRVDPQLLVNMAAIQEHRGPDGFGYRSLDDAGVGFCHARLSIIDLNETRARQPFLSEAAGPGARLLMAHNGEFYDFQRIRADLTARGVRFDSKSDSEILLRLYEQQGLEATLPQLRGEFAFAIYDEADDALHLVRDRFGIKPQYWALTPAGLVFGSELKVLFAHPAVERRFTSEGLFHQLMQTMVPGTTAFAGVHQVPPGHGITVRRRDGQLTVEHWKYWDLDFPRQGERDASITEQEHIDAIRAALLDAVELRMVADVPVGCYLSGGIDSCSILGLAAAVSQNPVKAFTIGFDDARYDESPIAREMAEATGAEQDLMRLSGKELYGWMERTLWHTERTIYNTLAVAKFLMSRHVNAVDYKVVMTGEGSDELFGGYPAFRRDMFLHGFNDLPEAERRSWEDLLQQSNALVQGAMLAADQVDDPDLDAVVGFTPSCLQPWLACAPLVPDLLSEPHRQALEGYAPGKAIAATLDADQLEGRHALDKAQYVWIKTMLEGQILTWGGDRVDMAHSMEARPAFLDHHLAAAAVQVPPELRIKGKTEKYVLREAMAGLLPEVLYKREKFAFMAPPAHTEPDKWNQMRQLADDYLSDAAIAEAGLLSAEGVRDLFARHEDPATTDADRVQMDALINHLLGVQMLHRMFIATDVPAQARQKADALGWHV

SEQ ID NO: 34667 - protein, 638 aa, Synechococcus sp. RS9917
MNQRWRQIALWILPIGVALLLGWQLLGQGGLQALRPGGPTVAPRNAAVARMSYGRFLDYVESGRVTAVDIYDGGRNAVVEAVDPDLDNRVQRLRVDLPGLAPELINTLKQEGISFDIHPPRTTPPALGILGNLLFPLLLIGSLIFLARRSSGMPGGPGQAMQFGKTKARFAMEAETGVKFDDVAGVAEAKQDLQEVVTFLKQPERFTSVGAQIPKGVLLVGPPGTGKTLLAKAIAGEAGVPFFSLSGSEFVEMFVGVGASRVRDLFKRAKENSPCLIFIDEIDAVGRQRGAGIGGGNDEREQTLNQLLTEMDGFEGNSGIIIIAATNRPDVLDSALMRPGRFDRQVTVDAPDIKGRLSILEVHARNKKLDSELSLDSIARRTPGFTGADLANLLNEAAILTARRRKEAIGLAEIDDAVDRIIAGMEGQPLTDGRSKRLIAYHEVGHALVGTLVKDHDPVQKVTLIPRGQAQGLTWFSPDEEQMLVSRAQLKARIMGALGGRAAEDVVFGHQEVTTGAGGDIQQVASMARQMVTRFGMSDLGPMSLEGGSQEVFLGRDLMTRSDVSDAISRQIDEQVRAIVKCCYEETVALVQANRDLMDRLVERLIEIETMDGDEFRDMVAKATTIPEKERFSPILNL

SEQ ID NO: 34668 - protein, 499 aa, Synechococcus sp. RS9917
MLKEEGKSSFILLYHRTPFDEGKDEQGKRIWIDQKSPNGIIPTLRNLFRSRLDGTWIAWRQVESTEGVEDERIAMKAPAEFTLRRIPLEQEQISSFYHVTSKESFWPILHTFPTYFDVNNTDWTIFQDVNRRFAQAACHEAGHGATVWVHDYNLWLAPGYIREQRPDLKIAFFHHTPFPGNDVFAILPWREQILESLLSCDLVGFHIPRYTENFARAANCLLGARKGPKQPVNARFLSTGSALTEPSETPWLDYKGRRIQLLSSPVGTSPDVIQALVNRDDIQDYAARIEDDTRKGRQLILSASRVDYTKGNEELLLAFERLLERRPELHGQVVLMLACVSAASGMKIYDDTQRSIEEMAGRINGRFSLMDWVPIRFSTRRIPYEEMVAWFSKADVCWITPLRDGLNLVAKEYAAARRDHGGVLVLSEFTGASVVLDGAVLTNPYSHRRMDEAIDQALAMPPEEQQQRMRKMSAAVEAFTVSDWAEEQMGALREESAAA

SEQ ID NO: 34669 - protein, 407 aa, Synechococcus sp. RS9917
MVLELTPDLGAGLYLDACATAPPRADVLQHMVAVQRSAWGNASSLHPQGLRAAEQLERSRLELAQAFEADLDEVIVTSGATESIHFALLGVARCQPPGRLVISAVEHPAVEAAASQMVERGWQIARWPVDGEGTIRLDQLEALLAPPTRLVSLIWGQSEVGTLQPVQRVGEACRARGISLHVDATQVVSQGRPAWRRLPVDLLSASAHKCGGPKGVGLLLRRRTLRERHGPIQAGGGQEGGLRGGTQPVVLMAGMARAISLLEPWLDPQAPGVDPGLSRMGAVQQRRDRLLQQLLDLAPLQRLGAPVQRLPHHIALLAADPQGRPLPGRSVVRALAAEGVAISSGSACASGRDGGSPVLAAMGIAPDWCRSGLRLSLGPWLSAADLDRVAALVQGALERVAATSAPP

SEQ ID NO: 34670 - protein, 343 aa, Synechococcus sp. RS9917
MALLLGLALLAGCATLGEGGASRLDLIRQRGSLRCGVSGKIPGFSYLQTDGRYFGLDVDLCKAFAAAFVPETGAVDYRPLTAPERFTALRTGEIDLLSRNTTMNLSRDAAGGNGLSFAPVVFHDGQGLMVSSGSGIKRLEDLQGKSICVGSGTTTEQNLNDAFEARGIAYTPIKYQDLNQVVAGYLQGRCQAMTSDRSQLAAARSGFADQRNHRILEEVLSKEPLAPASVGGDQRLADAMRWVVYALITAEELGITQANVQERYAEAQRRPELTRLRRFFGLNAGLGETLGLRDDFVVQVIQATGNYGEIYARNLGPDSQVPIPRGLNRLGRDGGVMVAPPFQ

SEQ ID NO: 34671 - protein, 107 aa, Synechococcus sp. RS9917
MDDQTKARIESLIQSSPIVVFMKGTKLMPQCGFSNNVVQILNSLGLPFETFDVLSDMEIRQGIKEFSDWPTIPQVYVKGEFIGGSDILIEMYNSGELKEKLEVALAS

SEQ ID NO: 34672 - protein, 603 aa, Synechococcus sp. RS9917
MTQSATHGSELSCSVDLSAATIDETSQASETHTPPDAATDARSGFDGFGFSEALLRTLASKGYQAPSPIQRAAFPELMLGRDLVGQAQTGTGKTAAFALPLLERLQPEGPGPQVLVLAPTRELAMQVAESFKAYAAGHPHLNVLAIYGGSDFRSQIHSLKRGVDVVVGTPGRVMDHMRQGTLNTSHLRSLVLDEADEMLRMGFIDDVEWILDQLPEERQVVLFSATMPAEIRRLSKRYLREPAEITIKTQEKEARRIRQRCITLQNSHKLEALNRVLEAVTGEGVIIFARTKAITLTVSENLEATGHDVAVLNGDVPQNQRERTVERLRKGTVNILVATDVAARGLDVERIGLVINYDMPFDSEAYVHRIGRTGRAGRSGEAILFVTPRERRFVNNLERATGQPIEPMQIPSNAEINQARLDNLRQKLTAVATGDGAERQADEGPLLQELLQRVAQEHSLSMEQLALAALTLAVGDQPLLVQGDESWLQNANRGRTREDRLGSRGGDRGDRGDRRRQERPSRPPEDNMERFRVEVGHRDRVKPGNLVGAIANESGLQGRMIGRIQIFESHTLVDLPKGMPQDVFQSLKHLKVMNRELQIRPFT

SEQ ID NO: 34673 - protein, 381 aa, Synechococcus sp. RS9917
MASQSAASLPLASHAIAPATVLRGPGAWSDALPRIQVLSQRPVLLGRSGATAATRQRLASDLTAAGLQVTLETLEHDCCDPDLERLEARLRAEAVDGLIAAGGGKVLDAGKWLADRLQLPCITVPLSAATCAGWTALANIYTPEGAFLRDQALTRCPDLLVFDHHLVRQAPARTLASGVADALAKWYEASVSSGSSQDGLIQQAVQMARVLRDQLLIDAREACRDPQSDAWIRVAEASALTAGVIGGLGGAQCRTVAAHAVHNGLTQLQACHNSLHGEKVGFGILVQLRLEEKLGGNRLAHQARRQLLPLLRDLGLPVSLADLGLGQVGLHELRQACRFACRPNSDLHHLPFPVSDTDLLEALISAEALPEPSETSRRRGA

SEQ ID NO: 34674 - protein, 470 aa, Synechococcus sp. RS9917
MAALLSHLRSGRFAAPIDALHLPAHGRGAGLPAVMRRLLRRRPGSWDLPELPLIGGPLQNEGAVAASQRAAAAVVGVSACWYGVNGATGLLQAALLALASPGQTVLMPRNAHRSLIQACALGGLTPLLFDLPFLSDRGHVGALEAAWLERVLAELDRQGQTPAAAVLVHPTYHGYASDPLPLVALLHQRGLSVLVDEAHGAHLQPGVDPALPSSSLAAGADLVVHSLHKSAAGLGQTAVLWCQGTRVDPELVQRCLGWLQTTSPSALLLASCETALRAWQEPRGRRLLRRRLDQGRALADRLSAAGVPLLRTPDPLRLIWHTAAAGINGLEADAWLLQRRLIAELPEPGCLTFCLGFARHRGLAGRMLRRWQQLRLALGNATPLPPFTPPPLPLLGTPERHLVEAWRGPQRAVPLDDACGAIAAELICPYPPGIPLVIPGERLDRSRLRWLQEQRQLWPDQIAAMVNIVA

SEQ ID NO: 34675 - protein, 331 aa, Synechococcus sp. RS9917
MTSFLTAARAEQEKIQQDTRRLRLFSGTSNPSLAREIAAYLGVPDGPRVCKRFADGELYVQIQESIRGCDVFLIQPTCAPVNDHLMELLIMVDACRRASARQITAVVPYYGYARADRKTAGRESITAKLTANLLVTSGVDRVLAMDLHSAQIQGYFDIPCDHIYGSPVLVDYLSAQDLGDVVVVSPDVGGVARARAFAKQMQDAPLAIIDKRRTGHNMAESLTVIGDVADRTAILIDDMIDTGGTICAGARLLRQQGAKRVIACATHAVFSPPACERLSADGLFEQVVVTNSIPIPADRTFPQLQVLSVANMLGEAIWRIHEESSVSSMFR

SEQ ID NO: 34676 - protein, 384 aa, Synechococcus sp. RS9917
MRVSTAGSGDSQERMFTVVVLGLQSGRQRRAERRFTVGFSQLQATVRRITASGGTIQAVIPGAADGASPAPSSTPAAAAVTASAPKPAHKAVPVNLYKPKSPFIGTVTENYSLLAEGAIGRVQHITFDLSGGDPQLHYVEGQSIGIVPEGEDANGKPHKLRLYSIASTRHGDNYADHTVSLCVRQLQYEKDGETVNGVCSTYLCDIEPGSKVKITGPVGKEMLLPDDEDANVIMLATGTGIAPMRTYLRRMFEPKERELNNWHFRGKAWLFMGAPKTPNLLYDADFEHYQEQFPDNFRYTKAISREQQNSKGGRMYIQDRVLEHADEIFAMIEDPKTHVYMCGLRGMEPGIDEAMTAAAAAKGLDWSELRPQLKKAERWHVETY

SEQ ID NO: 34677 - protein, 347 aa, Synechococcus sp. RS9917
MTIEQGAGASAGFVDTAYSEAGAELVPPADPQAWGSADVLLCVQQPSASALARLRRGALLVGLLAPYGNDALATALQSGGCSAMALELLPRISRAQAADALSSQANIAGYKAVLLGAGALDRYFPMLMTAAGTVQPARVVVLGAGVAGLQAVATARRLGAVVYVSDIRPAVKEQVESLGARFIDPPDMDDKPAESGGYAKQASDAFLAAQRQQLSDQLAEADVAICTAQVPGRRAPRLISEDMLDRMRPGSVVVDLAVAQGGNCADTEPSRTVDRKGVKLIGANDLPCTVPNHASALYARNLLSLLEPTLQDGQLKLDTDDELIAGCLVAQDGSIRRGDVLTPGGSN

SEQ ID NO: 34678 - protein, 1535 aa, Synechococcus sp. RS9917
MTHLTGSSWPHSDSRAPAAVAGEKDACGVGFLANLEGVASHWLLEQALRGLGCMEHRGGCGGDGDSGDGAGVLCGIPWPYLEAVWPEAAAVETPRGLGMLFMPIDPERRAEAQRFAEQEAAALGLRSSGWREVPVDSLVLGPLARETAPSIVQWLLCGGSDGDALEALLFRLRRRIGERARQAWGAEAARDLYIASLSSRTVVYKGMVRSEVLAAFYADLRDPRFAVSFAVYHRRFSTNTLPRWPLAQPMRLLGHNGEINTLLGNLNWARASEAHLEDVWGDAAADLNPVVNPAFSDSANLDATLELLVRSGRSITDSLITLVPEAFRHQPELEHRPAVRAMYEFNAGLQEPWDGPALLVFADGKRVGATLDRNGLRPARYCITDDGFVVMGSETGVVDLSGKTVISRGRLGPGQMLAVDLERGELLENWAVKEDAAARHPYAQWLEQHRRNLAPQPWSNDQQLADLDLLRLQTATGFTAEDLELVIEDMAGAAKEPTYCMGDDIPLAVLSDKPHLLYDYFKQRFAQVTNPPIDPLREQLVMSLEMYLGERRPALRPQPEAAALVHLDSPVLNEAELEAIAHQGLPCTSLSTQFDPAASLDGLEKALDRLCAAASAAVEAGSQILVLSDRHGLAGAPAHPAATAASLPPLLAVGAVHHHLLRAGQRLRCSLVVDTAQCWSTHHLACLIGYGASAVCPWLTWETTRHWLAHPKTQKRIEQGKLPSLTAAKAQANVRLALENGLRKILSKIGISLLASYHGAQIFEAIGLGADVIDRAFSGTTSRVAGLSLQELARETLLLHAKAFPELNRSKLEFMGFVQYRTGGEYHLNSPEMAKALHKAVHEGPGYDHFSTYRTLLENRPVTALRDLLEFKPATTPLPLDQVESVDSICARFCTGGMSLGALSREAHEVLAVAMNRIGGKSNSGEGGEDPARFKVLNDVDAAGHSTTLPAIQGLRNGDTACSAIKQIASGRFGVTAEYLRSGRQLEIKVAQGAKPGEGGQLPGPKVDAYIAWLRNSKPGVALISPPPHHDIYSIEDLAQLIHDLHQVHPSARVSVKLVAEIGIGTIAAGVAKANADVIQISGHDGGTGASPLSSIKHAGSPWELGLTEVHRSLMENGLRDRVLLRADGGLKTGWDVVMAALLGAEEYGFGSVAMIAEGCIMARVCHTNNCPVGVATQKEALRKRFTGLPEHVVNFFLYVAEEVRQLLSVLGVARLEDLIGRNELLQPRQVALEKTAALDLTTLLAPVPGHGERTWLQHAAEAHGNGPVLEDQLLADAELMAAIESHGSIRRSLEIVNTDRSVCARLAGEIAARHGNRGFRGQLQLHFQGAAGQSFGAFLVQGMDVRLQGEANDYIGKGMNSGRIVLVPTAEVLSPGEQVIIGNTCLYGATGGEVFVHGRAGERFAVRNSGARTVVEGAGDHCCEYMTGGVVVVLGSTGRNVAAGMTGGVAFLLDENGGVADRVNPEIVEICSLETAEQEAVLKPLLEAHQAATGSEKVAAILSDWPRWRPRFKLLVPPSERAAMGLVDRAAVTA

SEQ ID NO: 34679 - protein, 389 aa, Synechococcus sp. RS9917
MTATTSSSQASGVIAPYGGTLVDLMVPASEQAAVKASASTSIECSDRNACDVELLVVGGFSPERGFMHRADYEAVVAGHRTTSGYLFGLPIVMDTDRQDLAIGDKVLLTYQGQDLAVLTIEDKWEPDKVVEAKGCYGTTSLEHPAVRMIATERRRFYLGGLVQGLELPKRVFPCKTPAEVRAGLPEGEDVVAFQCRNPIHRAHYELFTRALHASNVSENAVVLVHPTCGPTQQDDIPGTVRFQTYERLAAEVENPRIRWAYLPYAMHMAGPREALQHMIIRRNYGCTHFIIGRDMAGCKSSLTGEDFYGPYDAQNFAKECAPELMMETVPSLNLVYTEEEGYVTAEHAEARGLHVKKLSGTQFRKLLRSGEEIPEWFAFRSVVDVLRAA

SEQ ID NO: 34680 - protein, 247 aa, Synechococcus sp. RS9917
MVGATRGFSRYSPQPAPASSGGGTTLANTATAHTPTLLEVIRDLEGASTELVERGKTIFFPGDPAERVYLIRRGAVRLSRVYESGEEITVALLRENSLFGVLSLLTGHRSDRFYHAVAFTRVEMVTAPAASVRQAIEADTGVGLLLLQGLSSRILQTETMIETLTHRDMSSRLVSFLLVLCRDFGIPGTQGITIDLRLSHQSIAEAIGSTRVTITRLLGDLRNAGLVEIDRKKITVLDPIALAKRFS

SEQ ID NO: 34681 - protein, 463 aa, Synechococcus sp. RS9917
MLLLRSIRGFKSNRSLMWLACVPVALFGLGLFNLSAHAAEMPELNAAFLANNLWLLVATILVIFMNAGFAMVEAGMCRQKNAVNILAKNLFVFALAVTAYWFIGYSLMYGDPVAAGWLYFSGLFFDPTVTPELIAEGGLVPSVDFLFQAAFAGTAATIVSGLVAERVKFGEFVIFALVLTAVIYPISGSWQWNGGWLSELGFIDFAGSSIVHSVGAWAGLVGAMLLGPRIGKFVDGKPQALPGHNMAIATLGALILWIGWYGFNPGSELAMDQYVAYVAVTTTLAAAGGAIGATVVSTMTSGKPDLTMIINGILAGLVSITAGCGNMTLVGSWVTGAIGGIIVVFAVAAIDAAQIDDPVGAFSVHGVCGIWGTLVIGLWGVDGMDTGAAGIGLFNGGGISQLGVQALGCAAYAIWTLITCWIAWSIIGGIFGGIRVTEKEEIEGLDIGEHGMEAYPDFASASN

SEQ ID NO: 34682 - protein, 248 aa, Synechococcus sp. RS9917
MTASGSAKETILVVDDEASIRRILETRLSMIGYNVITASDGNEALECFRVNEPDLVVLDVMMPKLDGYGVCQELRKESDVPIVMLTALGDVADRITGLELGADDYVVKPFSPKELEARIRCVLRRVDKEQVAGIPNSGLIQVADLRIDTNKRQVFRGDERIRLTGMEFSLLELLVSRSGEPFSRGEILKDVWGYTPERHVDTRVVDVHISRLRSKLEDDPANPELILTARGTGYLFQRIVDSVASEGP

SEQ ID NO: 34683 - protein, 255 aa, Synechococcus sp. RS9917
MLLEISDLHASVEDQPILKGVNLQVRAGEIHAVMGRNGSGKSTLSKVLAGHPAYRVTAGTVRYRGRDLFELEPEERARLGVFLGFQYPVEIAGVSNLEFLRVATNARRQCRELDELDTFEFEDHVREKLQVVQMDPAFLERSVNEGFSGGEKKRNEILQMALLEPVVAILDETDSGLDIDALRIVAAGVNQLAGPDNATLLITHYQRLLDEITPDYVHVMAAGRILRTGGRELALELEQTGYDWVDRELAAQGVA

SEQ ID NO: 34684 - protein, 329 aa, Synechococcus sp. RS9917
MQFIDQARITVRAGRGGDGIVAFRREKYVPAGGPSGGDGGHGGNVILEADANLQTLLDFKYKRLFPAADGRRGGPNRCTGASGMDLVIRVPCGTEVRHLTTGILLGDLTDPGEQLVVAFGGRGGLGNAHYLSNRNRAPEKCTEGRDGEEWPLQLELKLLAEVGIIGLPNAGKSTLISVLSAARPKIADYPFTTLVPNLGVVRRPTGDGTVFADIPGLIAGAAQGAGLGHDFLRHIERTRLLIHLVDGGSEDPVSDLRVVEKELAAYGHGLVERPRLLVLNKLELLDEAGRDEQVMRLEQASGRPVLLISAAMGQGLDRLLDRVWQELGV

SEQ ID NO: 34685 - protein, 379 aa, Synechococcus sp. RS9917
MAHSILTAPMASIGVPTEIKADEQRVALTPDGVRDLVTQGLEVRVQAGAGDGAGIADAAFAAAGAQVVDRDTAWAAHLVVKVKEPQEEEFRFLRDDMVLFTYLHLAAYPKVGQALLDAGTTGVAYETVQLENGSLPLLAPMSEIAGRLAAQVGARLLERPNGGRGVLIGGCTGVRPARVVVLGAGTVGWNAARLAAAMDAEVMLLDRSPERLRSLEADRRGRLMSVVSSRGLLERLVPTADLLIGAVLTPGGRAPTLVDEEMVQQMQPGSVIVDVAIDQGGCVATSRETTHTDPTVTIHSVQHYAVGNMPGAVPFTSTEALVSVTLPYILGIAGRGLEEAVTERPELLSGLNTVQGAVCHPGVAKALGVPPRHPMACLR

SEQ ID NO: 34686 - protein, 311 aa, Synechococcus sp. RS9917
MDLTPGSQTPHRSGFVALIGRPNVGKSTLVNQLVGDKVAITSPVAQTTRNRLRAILTTPEAQLILVDTPGIHKPHHLLGERLVQSARSAIGEVDLVLLLLEGCEAPGRGDAFIIQLLQQQRLPVLVVLNKWDRVPAERRPEADLAYRELLETPDWPVHHCSALSGAGCPELVQAIAARLPEGPQLYPADMVSDQPERLLMAELIREQVLLQTREEIPHSVAVQIDRVDEMPSKGKGKSCTAVLATVLVERKSQKGILIGKGGAMLKTIGQGARLQMQTLIDGPVYLELFVKVVPDWRSKPARLAELGYGVE

SEQ ID NO: 34687 - protein, 581 aa, Synechococcus sp. RS9917
MLSPSEAGFRRLLPLLRPHGRRLLWGGLSMAVFVGSWPVLMHLVGQFIPALGSGDLQVVVPVLGLVLVVFLVQKLAQFLQDSLLAGPALQVSQALRRDLFERLQRVELGALEKLSAGDLTYRLTEDADRVSEVIYKTLHDTIPSALQLVAVLGYMLWLDWKLTLAILLLAPLIAWLISLFGARVMAATERSQKKVSELAGLLGEAIEGLPLVRAFAAEPWLQGRFEEEIDQHRQARYNTYRLVALQHPVVGVIEVLGIAFVLVLAAIRISSGDLDSQGLSSYLTGLIVLIDPIAHLTTNYNEFQQGQASLRRLRAIEKEPAEAADPQPALPLGRPRGDLDLERVEFAYQEGQPVLHDLSLQVAAGQVVALVGPSGAGKSTLFSLLLRFNTAQRGRVLLDGKDLAQVKARELRQQVALVPQRSSVFSGTIAEAIQFGRQASQEQLVEAAQLANAHDFIMRLPEGYNTRLEERGTNVSGGQLQRLAIARAVLGNPAVLLLDEATSALDAEAEAAVQVGLRQAMRGRTVLVIAHRLATVQEADRIVVMEHGRIREQGSHDELMQRGGRYRELCERQFIRDLQNV

SEQ ID NO: 34688 - protein, 383 aa, Synechococcus sp. RS9917
MALKPSLTLAISARAQALKEAGRDICSLSAGEPDFDTPEFIVEATLKALRDGITRYGPAAGDPQLRDAIAGKLSNENRVPTDAAQVLVTNGGKQAIYNLFQVLLNPGDQVLIPAPYWLSYPEMARLAGAEPVVVPSSAATGFQLDLEALEAVLTPRSRLLVLNTPSNPTGRVMQRTELEVLAAWLRRHPDLLVMCDEIYEFLLAEDESHHSLAALAPDLAERIFIVNGFAKGWAMTGWRLGYLAGRVEVIKAAAALQSQSTSNVCSFAQRGALAALEGSRSCVSAMAASYTERRQQMIAGLQAIDGLTLVPPRGAFYAFPQLPDDTIESVEFCRLALEEEGLALVPGEPFGDRRCVRLSCAVARETIADGLERLQRLLDRLRS

SEQ ID NO: 34689 - protein, 378 aa, Novosphingobium aromaticivorans DSM 12444
MNGTSRLAYGARRPIAFGPVSGHVTQMHFLDQAKIFIRSGQGGPGAVSFRREKYVEYGGPDGGDGGKGGDIIFEAVTGLNTLIDFRYAQHFKAQRGHGGAGKNRTGAGGNDLVIKVPVGTQVLDDDRETVLLDLTEAGQREILLRGGDGGRGNASYKTSTNRAPRQHGPGWPGEEMYVWLRLKLLADAGLVGLPNAGKSTFINQITNTKAKVGDYAFTTLRPQLGVVRHRNREFVLADIPGLIEGAADGAGIGDRFLGHIERCRVLIHLIDIHSDVDPVEAMHIVEGELEAYGAGLDEKPRLVALNKIDLVDKELVKAFQDELLEGGADRVFPISGATGKGMDALLDAVLEYLPAATVTERPTGEVEEAEDQKPWSPI

SEQ ID NO: 34690 - protein, 563 aa, Saccharomyces cerevisiae
MSEITLGKYLFERLKQVNVNTVFGLPGDFNLSLLDKIYEVEGMRWAGNANELNARYAADGYARIKGMSCIITTFGVGELSALNGIAGSYAEHVGVLHVVGVPSISSQAKQLLLHHTLGNGDFTVFHRMSANISETTAMITDICTAPAEIDRCIRTTYVTQRPVYLGLPANLVDLNVPAKLLQTPIDMSLKPNDAESEKEVIDTILVLAKDAKNPVILADACCSRHDVKAETKKLIDLTQFPAFVTPMGKGSISEQHPRYGGVYVGTLSKPEVKEAVESADLILSVGALLSDFNTGSFSYSYKTKNIVEFHSDHMKIRNATFPGVQMKFVLQKLLTNIADAAKGYKPVAVPARTPANAAVPASTPLKQEWMWNQLGNFLQEGDVVIAETGTSAFGINQTTFPNNTYGISQVLWGSIGFTTGATLGAAFAAEEIDPKKRVILFIGDGSLQLTVQEISTMIRWGLKPYLFVLNNDGYTIEKLIHGPKAQYNEIQGWDHLSLLPTFGAKDYETHRVATTGEWDKLTQDKSFNDNSKIRMIEVMLPVFDAPQNLVEQAKLTAATNAKQ

SEQ ID NO: 34691 - protein, 1612 aa, Medicago truncatula
MALNTVSSVSLSQVLRLSDTIGNRHLFVDFAPFRRNTKRCNRRLTPAILRRSSVKAVLQLDNNHLNPAPPPSSPSTSDSKPKVANLEDILSERGACGVGFIANLENKGSFEIVKDALNALSCMEHRGGCGADNDSGDGSGLMTAVPWDLFDNWANEQGLASFDKLHTGVGMVFLPKDVELMNKAKKVIVNTFQQEGLEVLGWRPVPVNTSVVGYYAKETMPNIQQVFVKIGKEENTEDIERELYICRKLIEKEVSSESWGNELYFCSLSNRTIVYKGMLRSEVLGLFYSDLQNDLYKSSFAIYHRRYSTNTSPRWPLAQPMRLLGHNGEINTIQGNLNWMQSREPSLKSPVWRGRENEIRPFGNPKASDSANLDSAAELLIRSGRTPEESMMILVPEAYKNHPTLTIKYPEAIDFYDYYKGQMEAWDGPALLLFSDGKTVGACLDRNGLRPARYWRTSDNMVYVASEVGVVPVDESKVISKGRLGPGMMITVDLLGGQVYENMEVKKRVALSNPYGNWIKENLRSLKSENFLSSSVMENDAVLRHQQAFGYSSEDVQMVIESMASQGKEPTFCMGDDIPLAALSQKPHMLFDYFKQRFAQVTNPAIDPLREGLVMSLEVNIGKRRNILEIGPENASQVILSSPVLNEGELESLLKDSHLKPQVLHTFFDITKGIDGSLEKALNKLCDAADEAVRNGSQLLVLSDRSEALEPTHPAIPILLAVGTVHQHLIQNGLRMSASIVADTSQCFSTHQFACLIGYGASAVCPYLALETCRQWRLSNKTVNLMKNGKMPTVSIEQAQKNYCKAVKAGLLKILSKMGISLLSSYCGAQIFEIYGLGKEVVDLAFSGSVSKIGGLTFDELARETLSFWVKAFSEDTAKRLENFGFIVFRPGGEYHANNPEMSKLLHKAVRQKSQNAFSVYQQYLANRPVNVIRDLLEFKSDRAPIPVGKVEPALSIVKRFCTGGMSLGAISRETHEAIAIAMNRIGGKSNSGEGGEDPIRWKPLTDVVDGYSPTLPHLKGLQNGDTATSAIKQVASGRFGVTPTFLANADQLEIKIAQGAKPGEGGQLPGKKVSMYIARLRNSKPGVPLISPPPHHDIYSIEDLAQLIFDLHQVNPKAKVSVKLVAEAGIGTVASGVAKGNADIIQISGHDGGTGASPISSIKHAGGPWELGLTESHQTLVENGLRERVILRVDGGFRSGVDVMMAAIMGADEYGFGSVAMIATGCVMARICHTNNCPVGVASQREELRARFPGVPGDLVNLFLYVAEEVRGTLAQLGYEKLDDIIGRTELLRPRDVSLVKTQHLDLSYILSNVGLPKLSSTEIRNQEPHTNGPVLDDVLLADPKIADAIENEKAVSKTIKIYNVDRSACGRIAGVIAKKYGDTGFAGQLNITFTGSAGQSFGCFLTPGMNIRLVGEANDYVGKGIAGGELVVTPVDKIGFQPEDAAIVGNTCLYGATGGQVFVRGKAGERFAVRNSLAEAVVEGAGDHCCEYMTGGCVVILGNVGRNVAAGMTGGLAYILDEDNTLIPKINREIVKIQRVTAPVGQIQLKKLIEAHVEKTGSNKGEAILKDWDKYLSLFWQLVPPSEEDTPEANAKYDITATEQVTLQSA

SEQ ID NO: 34692 - protein, 274 aa, Medicago truncatula
MGLSSKQVSSRGVDWNQTLLQDQNLELPKTLPMRKQQQQNHQLEAVNCPRCDSTNTKFCYYNNYNKSQPRHFCRACKRHWTKGGTLRNVPVGGVRKNKRVKISTSISTTSKTTISTSFTTTSNANRLNKKNTPSSMHESLIHPPSFLPPQNLISTKDQSEGNNEEFGIGNGMFLSSSMPFHQNQSFIFPFSNSSTLRSNNGYNYGDEEFKIMEESTINNSAMPSTSGSGTITQPWEIPATSSGMDMSNYWSWEDIDSLVSTDLNVPWDDSDIKP

SEQ ID NO: 34693 - protein, 644 aa, Novosphingobium aromaticivorans DSM 12444
MNDDQPQGNPWIKSLLVWGGIFLALLLVVSMFGSRVDQTAATIPYSAFRSQVSDGLVRSVEIAPERITGTLKNGGQFATIPVPGDSDLPKLLQDNGVQYAGKAAEQPNMLMYILVNSLPFLLILGVAFFALRQVQKGGGSGAMGFGKSKAKMLTERSGRVTFDDVAGIDEAREELQEIVEFLRDPSRFSKLGGQIPKGALLVGSPGTGKTLLARAIAGEAGVPFFTISGSDFVEMFVGVGASRVRDMFEQAKKNAPCIVFIDEIDAVGRHRGHGLGNSNDEREQTLNQLLVEMDGFEANEGIIIIAATNRPDVLDPALLRPGRFDRQVVVPIPDIEGREKILSVHMKKVPLAPDVNPRTIARGTPGFSGADLANLVNEAALLAARRNKRLVAMQEFEDAKDKVMMGAERRSMVMTDDEKKMTAYHEAGHAIVSVHEPASDPIHKATIIPRGRALGMVMRLPERDSYSYHRDKMHANLSVSMGGRVAEEIIFGHDKVSSGASSDIQYATSLARSMVTKWGMSDKLGPLQYEDQQEGYLGMGGSQRLFVSDETNKLIDMEIRGLVDGAHERARDILKTNEDKLHLLAQALLEYETLTGDEIKELLETGHIDRPQSPSGPSRPVTAQGSAVPRAGKKFGGSASPQPA

SEQ ID NO: 34694 - protein, 148 aa, Novosphingobium aromaticivorans DSM 12444
MRIASEHAKTIVKATAPAIEKHGVDITTAMYKRLFQNDEVKAMFDQAAQDSGEQPRRLAGAILAYAKNIDKLENLGSAVQRMVQRHVDTGVKAEHYPYVAEALLPAIRDVLGAEVATDEVLAAWGEAYWMLADILIAAEKQAYLEAVA

SEQ ID NO: 34695 - protein, 247 aa, Novosphingobium aromaticivorans DSM 12444
MLTIENLQANVADKPILKGLSLTINAGEIHAIMGPNGAGKSTLGYTLGGRPGYEVTGGSATLDGADMLGMEPHERAAAGLFLGFQYPVEIPGVSFVQFLREAANAQRKARGEAPLSGGEFLKLAKEKAALLRMDMDMLKRPVNVGFSGGEKKRAEMVQMGILDPRIAILDETDSGLDIDALRICGEGINAIMRKPDKAVLLITHYQRLLDYVKPDFVHVLASGRIVKSGGPELALELEEHGYEAVAA

SEQ ID NO: 34696 - protein, 498 aa, Novosphingobium aromaticivorans DSM 12444
MSYFSDLGLAEPILRALETKGYNDPTPIQRQAIPALLEGRDLLGIAQTGTGKTAAFALPSLHRLAANPQPRKPASCRMLVLSPTRELAAQIADNMKGYARNLNLIVDCVFGGVPIGKQARRLVPGVDILVATPGRLLDLIDNRALTLGRTEIFVLDEADQMMDLGFIHALKRVANLLPKTRQSLFFSATMPKAIEDLGKQFIVNPVRVEVAPNSTTAERVEQYVTFINQAEKQALLTLRIRDLLKTKELDRALVFTRTKHGADRVVRHLSSAGIDARAIHGNKSQAQRTAALEAFRQGSCPVLVATDIAARGIDVSGVSHVFNFELPNVPEQYVHRIGRTARAGADGIAISFCAPDEKPYLKDIERLTRVKVDALPLPENFTAEAAKLPAPSRKPAEQEQDARRDARDARGNGGRGGQGRGQAHGGRAQGRDGRPRDASPRQDRREGDRGPVRNPLHTDRTDRPERIEGERDGNKPRRFRPRGAPGVGAHRNKVRRAS

SEQ ID NO: 34697 - protein, 389 aa, Novosphingobium aromaticivorans DSM 12444
MNQLSRALARIAPSRTTAITDRAIQLRAEGRDVISLSVGEPDFATPAHVVQATKDALDAGDTKYTAVVGTAALRSAAALHFSRDLGLEVPPSQVIVSAGGKQAIFHALLATLDPGDEVLIPSPWWVSYPEIVRFAGAEVVDLPTDAAGGFRITAAQLEAAITPATRWLLLNSPGNPTGATYPAQELRALGEVLRRHPRVLVMSDDIYAPLRYGEGRHATLAVECPDLADRILTVSGVSKSHAMTGFRIGVAAGPAWLISAMGRLQSHSSGNPASISQAAAVAAFEGPQDFLLDWRERFRARRDMVCARVNAIPGLSTPVPDGAFYCMVDAAPLMARFGDDEALCLHLLESGVAVVPASAFGGRDGFRISFAADEAKLEEALRRIEKAVA

SEQ ID NO: 34698 - protein, 772 aa, Novosphingobium aromaticivorans DSM 12444
MADAATEARTEGRTVRLQVAGARQEESGHGIARISRHVMSQLGVTEGDVIEIVGKRATAARVIQPYPEDEGLELIRLDGLQRANADVGSGEHVEVRKIDSRPAQRVVFAPAQKDLRLQGPAVALKRNFAGRPLVTGDLVATAGQQQVNRTDMPPQLRQMLNAPAFALTQIRLTVVSTSPKGVVHIDENTEVELRPEYEEPRSSRADVNYDDVGGMGDTIRQLREMVELPLRYPELFTRLGVDPPKGVLLHGPPGTGKTRLARAVANESDASFFTINGPEIMGSAYGESEKRLREVFEEATANSPSIIFIDEIDSIAPKRSEVHGEAEKRLVAQLLTLMDGLHSRSNLVVIAATNRPDAIDEALRRPGRFDREIVVGVPDESGRREILGIHTRGMPLAEDVDLQELARTTHGFVGADLAALAREAAIEAVRRIMPRLDFEQQTIPQDVLDSLRVERDDFLEALKRVQPSAMREVMVQAPTIGWADIGGLDEAQEKLREGVELPLKNPEAFHRLGIRPAKGFLLYGPPGTGKTLLAKAVAKEAEANFIAIKSSDLLSKWYGESEQQIARLFARARQVAPCVVFIDEIDSLVPARGSGQGEPNVTARVVNTILAEMDGLEELQSVVLIGATNRPNLVDPALLRPGRFDELVYVGTPSMSGREHILGIHTRNMPLAPDVDLALVARATDRFTGADLEDVVRRAGLNAIRRGGGNVDQVKASDFDEALEDSRATVTEQMEEEYGRMKGELKKRAMNPGPLGFIVPGMVQPTRESKHG

SEQ ID NO: 34699 - protein, 600 aa, Novosphingobium aromaticivorans DSM 12444
MQNQRNLIMAVVLTGILLLGWDVAMRWFYPQPAQKPKVEAAASAEPANGEKPKRTREGGLQNAGDIALEKKDLAQELAAGHRIAIDAPGLKGSINLKGALVDDVTLARHREGVDRNSAPVRLFSPAGTPAQHFAQIGWVGEGVAAPDANTMWQADGAKLTPQTPVTLRWTNASGQTYSIRYAIDGDYMITATQGVANTGPAPVVVRPFALVNRTDKTASLDTWNVHSGPIGAFDGSVNFDNNYSTVAEAEGGAIPFKGTANWIGFTDIYWLSALIPDANAKAEAAFRSLGQGVYRADLIYPSVSIAPGKALSQTVRLFAGGKENAVLEKYEAAGVTNFSLSIDWGWFRWFEKPIFWLLDSIFKKVGNFGVAIILLTLIVRGVMFPIAQRQFASMAAMRALQPKMKAIQERYKDDKQKQQQEIMELYKREKVNPLAGCLPIFLQIPVFFALYKVLVLTIEMRHQPFALWIKDLSAPDPLHVLNLFGLLPFDPPSFLGIGVLAILLGITMWLQFKLQPAAMDPAQQQVFAFMPWIMMFVMAPFAAGLLIYWITSNLLTIAQQKYLYSRHPQLKAQADKDQVDIDRAVTREKKATSTRKPKAR

SEQ ID NO: 34700 - protein, 371 aa, Novosphingobium aromaticivorans DSM 12444
MNKLEALIIGAGIGGLSAAIALARKGFSVTAIERDPSWSVYGVGIIQQSNVVRAMEQLGVLDSFLDAACGFDAVEIFAPDGTKVARVPSPRLVEGKPANVGIGRRALQKVLGDSAKALGTDLRLGLTAERIDDDGEKVAVTFSDGSTGSYDVVIGADGVYSQTRSMILPDAEKPQFTGQAVWRYNFPRAEGLDALQVYNGPTGVGLVPMSADVMYMYVTTPEPDNPRYPTEGIAAAMRGKLANCSPQIRALGEQITDDEGVVYRPLEGMMVHGPWSKGRVGLLGDAVHATTPHLGQGAGMAIEDALVLAEELERHDDVEAALKAYRDRRYERCRYIVESSLAICLGQLGKAPPVDNHKATAEMFGVVSQPI

SEQ ID NO: 34701 - protein, 340 aa, Novosphingobium aromaticivorans DSM 12444
MKTRFDSDPFEPVATEAVTRSIPPRKIGREVVIAESAGLAALAEALDASFDAAVSLLHSGGGRVFVSGVGKSGHVARKIASTLSSTGRPACFIHPVEAMHGDLGMLCPGDVLIVLSNSGASMELRGLVDHAQRLSARIVAIGARPDSPLMRVADIALVIPDGPEACPVNIAPTTSTTMMLALGDALAVAVMSARGIGVERIRLLHPGGPIGERLRVAEDVMRTDALPLVGVEDPMPEVLLCMARSGLGIAGVVALGGGLVGVIEADRLPAVARDLAGERAGFLMNRHAWVARRETPLDEIARNLGVGGSDAALVIAGENDRRPIGVVSARNLGTSGAWPA

SEQ ID NO: 34702 - protein, 392 aa, Novosphingobium aromaticivorans DSM 12444
MTDIYIVSGARTAIGSFGGGLASLRPAESGAIVIKEAIARAGIAPDKVQNVVIGTVVPTQPKDAYVSRVAAVNAGIPIEAPAMNVNRLCGSGLQAIVSAAQGIALGEQDIAIGGGAESMSNAPHMVLTARNGQKMGDQVLMDAMLGALHDPFEGIHMGVTAENVAERCQITREEQDSLAVESHKRAAAAIAAGYFKEQIVPVEIKTRKGVVVFDTDEHVRADASVEAMAGLKPVFKKDGTVTAGNASGINDGAAAVVLASGKAVEEHGLKPMARILGWGHAGVEPNVMGLGPVKAVPVALQRAGLDLDQIDVIEANEAFAAQACGVAKELGFDPAKTNPNGSGISLGHPIGATGAILTIKTMYELHRTGGRYGLITMCIGGGQGIAMVIERV

SEQ ID NO: 34703 - protein, 289 aa, Novosphingobium aromaticivorans DSM 12444
MKIAFIGLGNMGGGMAANLVKAGHDVHAFDLAEAALERARENGCTTYTSVKEAVQGADAVVSMLPNGAIVKSVYAADVIGQAPTSALLLDCSTIDVATAREVASAADTAGYVMVDAPVSGGIAAANGGTLTFMVGGSDEAFARAEPILAAMGKAVIHAGASGAGQAAKICNNMLLGASMVATCETFAMAEKLGLDLQTFYDISSKASGQCWSMTSYCPVPGVGPQSPADNGYQGGFATALMLKDLKLAMAAAQDAGAQVPMGARAEELYEAFANAGNAGLDFSAIIKSL

SEQ ID NO: 34704 - protein, 391 aa, Novosphingobium aromaticivorans DSM 12444
MRDAVIVSAARTPIGRAYKGAFNATPGATLGALSLEAAVARAGIDPAEVDDVLWGAALQQGAQAGNIARQVALRAGLPITTSGMSMDRQCSSGLMTIATASKQVIIDRMDVVAAGGQESISLVQTKDMRVAPDKSLMAMHKAIYMPMLQTAEIVGQRYGISREACDEYALQSQQRTAAAQAAGKFDDEIVAVDTTMGVQNKETGEVTFQDVHLTKDEGNRPSTTIENLQALKPVIEGGIVTAGNASQLSDGSAAVVVMEAALAAKKGLAPLGRYVGMAVAGTEPDEMGIGPVFAIPKLLQRFGLKMDDIGLWELNEAFAVQVLYCRDKLGIPNDLLNVNGGSISIGHPYGMTGARCTGHALIEGKRRGAKYVVVTMCVGGGMGAAGLFEVL

SEQ ID NO: 34705 - protein, 98 aa, Novosphingobium aromaticivorans DSM 12444
MFAIVRTGGKQYRVAAGDKIAVEKLAGEAGDKITLGEVLLAGEGDSLADAAKVTVSAEIIAQAKSEKVIVFKKRRRHNYRRRNGHRQQMTLLRIVSVA

SEQ ID NO: 34706 - protein, 311 aa, Novosphingobium aromaticivorans DSM 12444
MKIMAGNSNLPLARAISAYLEMPLTDASVRRFADEEVFVEIHENVRGEDVFVVQSTSYPANDNLMELLICIDALRRASAKRITAVVPYFGYARQDRKPGPRTPISAKLVANLITQAGADRVLSVDLHAGQIQGFFDIPTDNLFAAPVMAADIQTRYGAQELMVVSPDVGGVVRARALAKRLNNAPLAIVDKRRDRPGQSEVMNIIGEVKGRMCILIDDIIDSGGTLCNAAQALMDAGAVGVSAYITHGVLSGGAVARVAGSALKELVITDTIMPTEATASCDRIRVLTIAPLIGEAVRRIADESSVSSLFD

SEQ ID NO: 34707 - protein, 204 aa, Novosphingobium aromaticivorans DSM 12444
MSLHDRLTRLYVEGHRTPAQDLYEDWRPLPEHGLRPAAVLIAVTDRAGHADGPGVLLIHRPSHMRAHPGQAAFPGGKLDPGETPVEAALREAYEELGIRPEDVKVIGETDRFRTGTGYDITPVLAMVPPDLSLSPNPAEVADWFEPPLGFVLDPARHARKPAEYNGRKGHYIEIMWNEHRIWGVTAAIISNLSKRMAWKDAADD

SEQ ID NO: 34708 - protein, 390 aa, Novosphingobium aromaticivorans DSM 12444
MATAYIVDAVRTAGGRRGGRLAGVHPVDLAARSLDAIVARTGIDPTAVDDVIMGCVTQAGQQAMQVGRNAVLASKLLPQSTPAVTIDRQCGSSQQAIQFAAQAVMSGVQDMVIAAGVESMSRVPMGSNATFHMKEGLGHYKSPGLEEKYPGVMFSQFMGAEMIVKKHGFTKDDLDRFSLDSHRKAIAATNAQAFANEIVPVEIETPEGPAMHTVDEGIRFDATLEGIAGVKLLSPEGSLTAASSSQICDGSSAVLVVSEAALKAHGLTPLARIHNLTVTAGDPVIMLEEPLFATDRALQRAGMKISDIDLYEVNEAFASVPMAWLKHTGADPEKLNVNGGAIALGHPLGASGSKLMATLVHALRARGGKYGLQTMCEGGGVANVTIIEAL

SEQ ID NO: 34709 - protein, 312 aa, Novosphingobium aromaticivorans DSM 12444
MTDQTSAELSAQVPIEPATVAFLGLGVMGGAMARHLGKAGHRLTIYNRTPSRAEAWQSANPGLASRVASSPAEAAEDADVVITCVGNDDDLADVVLSPNGAFSTLRRGALYIDHTTVSARIARQIAVEGRDKELLCVDAPVTGGQSGAEAGTLAIMCGGSARAVDAARPILAAYAKRVVHVGKSGAGQTAKMANQMCIAGTLAGLSEAIRFAQIAHLDLEKVFEAISGGAAQSWQMDNRFHTMANDEFDFGFAVDWMRKDLGLAIEEARNLGASVPVTALVDQFYVDVQAMGHGREDTSALIRHLPRRAPRA

SEQ ID NO: 34710 - protein, 404 aa, Novosphingobium aromaticivorans DSM 12444
MSDIKKVVLAYSGGLDTSVILKWLQVTYNCEVVTFTADLGQGEELEPARAKAKLMGVPDHHIYIDDLREEFVRDFVFPMMRANARYEGDYLLGTSIARPLISKRLIEIARETGADAVAHGATGKGNDQVRFELSAYALEPGIKVIAPWREWDLTSRTALIAWAEAHQIPVPKDKRGESPFSTDANLLHTSSEGKVLEDPWQETPDYVYSRTVNPEDAPDTPEYITIDFEKGDGVALNGEAMSPATLLAALNDLGRKHGIGRLDLVENRFVGMKSRGMYETPGGEIYARAHRGIESITLDRGAAHLKDELMPKYAELIYNGFWFSPEREMLQAAIDHSQARVNGTVRLKLYKGSASVVGRKSPDSLYSERHVTFEDDAGAYDQKDAAGFIKLNALRLRLLAQQGR

SEQ ID NO: 34711 - protein, 404 aa, Novosphingobium aromaticivorans DSM 12444
MTQLRHAAIVAPIRTAVGKFGGSLSPLTAGQLGATILTALMDRTRIDPARVDDVIFAQGYGNGEAPCISHWSWLLAGLPEEVPGYQLDRRCGSGLQSIVNAAMMVQTGVSDVVVAGGVESMSNVEHYTTDVRKGVRAGSLTLHDRLTRGRVMSQPIERYGVISGMIETAENLAKDFAITREACDAYAVRSHQRAAAAWANGLFDDELVPVSIPQKKGDPVLFAHDEGYRADASMETLGKLRPLEGGVVTAGNASQQNDAAAACLVVAEDKLAELGLEPIAWFHSWAAAGCDPSRMGYGPVPATERLFARNGLTWNDIDLIELNEAFAPQVLACLKGWGWSDDDSRHEMLNVNGSGISLGHPIGATGGRILANLTRELKRRGGRYGLETMCIGGGQGIAAVFEAA

SEQ ID NO: 34712 - protein, 464 aa, Novosphingobium aromaticivorans DSM 12444
MSRLIVISNRVSAGGGAQGGLAVALSAALREHGGIWFGWSGNETSEFTGHINMERVDGVTTATVDLEEQDIEEYYDGYANRTLWPLFHYRIDLAEYERSFADGYKRANERFAETALPLIEPDDLVWVQDYHMFPLGKELRARGVENRIGFFLHIPWPPRRLLATLPEARALTESLLAYDLIGFHTEEWLQSFCDYVSHELGGTIGDDGWLSVGERRVRLIACPVGIDAKEFAALAASEKAKETYERVRVSAVGRTMIVGVDRLDYSKGLEERFLGYERFLVEHPEERKEVTLLQIAPPSRGTVDSYQRIRSTLEGLAGRINGAHAGLDWVPIRYVNQGYTRDMLAGVYRASKVGLVTPLRDGMNLVAKEYVAAQDPGDPGVLILSRFAGAAEQMPEALLVNPHSAEEISDALSRAITMPGEERIRRWRTLMNGVEQHDVTWWSKHFTDALKDCHEHACGSVHRN

SEQ ID NO: 34713 - protein, 438 aa, Novosphingobium aromaticivorans DSM 12444
MNKVRGSKVRGLGFWMTLALVVGNMIGSGIYILPATLAPLGFNQLIGWAVTLAGALCLAAAFARMGARLPLAGGPYAYAQAAFGPIPGFVTAWSYWTMLWAGNGAVAVALVSNLSLIAPWIGATPAVPALLSVGFVWLLTLVNIRGVRAAGDVSVVTTALKLVPLAGLIGLAIWLLITGAPTVVQPEVPLSGGVIATAAGLTFWGFLGLESATVPADKVENARTVVPRATLIGVAITGLVYMGISGAFALYMPMADAAASPAPVADFLARFFGSGMGQVVALFAAISAFGTLNGFILLQGEVPWAMARGGVFPRWFAAEGPRGTPVRSHVVSSILLSIVTLLNYGRGMGDLFAFIASVSLAAGMLSYFVAMLAAVRLLPDERPMVIAALVGAAFIAWAAWGLGAEALTYGAGFVALGLPVYLWIRRDGAASTTANDPG

SEQ ID NO: 34714 - protein, 371 aa, Novosphingobium aromaticivorans DSM 12444
MRVGTVREIKNHEYRVGLTPESVRELVAHGHEVWVEAGAGNGIGASDADYEGAGAIIKADARTVFDGCEMIVKVKEPQAVERAMLRRGQVLYTYLHLAPDPEQTADLVKSGVTAIAYETVTGAGNALPLLKPMSQVAGRMSIQAGATALEKANGGRGVLLGGVPGVLPGKVVVIGGGVVGFNAAQMAVGLGADVTILDRDPDVLERLDNHFEGRARTLYSGKAALAALVAEADLVIGAVLIPGAAAPKLVTRDMLATMKPGAVLVDVAIDQGGCFETSKATTHADPTYVVDGVVHYCVANMPGAVARTSTYALNNVTLPHALRIADKGWKEALRADPNLAAGLNVHEGKVTYEAVATELGYEYTPVADILA

SEQ ID NO: 34715 - protein, 297 aa, Novosphingobium aromaticivorans DSM 12444
MTEKCGLVAVLGAPNAGKSTLVNALVGQKVAIVSAKAQTTRARLMGIALEGEAQIILADTPGLFEPRRRLDRAMVSAAWDGAQEADAILLVVDARKKKRDYLEPILASLRERPERKILVLNKVDSTPKEPLLVMAEALTGEAAFDEVFFVSALTGDGVPELKRRLAELMPESAWHYPEDQVSDASERLMAAEITREQLYRQLHDELPYDSTVRPEKYLHRKDGSIEIHQQIVIARETQRPIVLGKGGAKIKAIGEAARKELSQLLDTKVHLFLHVKVDERWADAKEIYEEIGLEWVK

SEQ ID NO: 34716 - protein, 375 aa, Novosphingobium aromaticivorans DSM 12444
MAGAMKIAVLRERATGETRVSATPETVKKFIALGATVAIEEGAGITASISDEDYRAVGAEVVSSPANGADIVLGVQGPEPELLAGVKPGAWIVAGLDPFVKRARVDAYAAAGLEALAMEFMPRITRAQSMDILSSQSNLAGYKAVLVAANLYGRAFPMMMTAAGTVSAAKAFVMGVGVAGLQAIATARRLGAQVSATDVRSATKEQIQSLGAKPIFVESVAGIEGEGAGGYATEMSEEYQKAQAELVSAHIAKQDIVITTALIPGRAAPRLISDAQIATMKPGSVIFDLAVAQGGNVEGSVPDQVVEKHGVKIVGYSNTPAHLPADASALFSRNLYNFLSAFWDKEQGKPVLDEEIGNAIRLTQGGKVVNERLLG

SEQ ID NO: 34717 - protein, 229 aa, Novosphingobium aromaticivorans DSM 12444
MDAARLAQALTAQSLFADCEQAELSDIIGRGQVRTFKPGQELMAQGEEGKTLFIVLSGLARVSMVAANGREIILDYAEAGHVLGEIAFLDGGERTASVEAIEPVEALVLTRSAFAEIIDRHKGLSLRLLKAMARRLRQNNAVIEADRAYTSGPRLARFLLRLMMGEGSDAGAQLKIALSQGELGNFAGMSREQINRQLSAWAENGIVALKGGRVTILDREALVDVAEAW

SEQ ID NO: 34718 - protein, 525 aa, Novosphingobium aromaticivorans DSM 12444
MFGRVKPLDAILATAEKKSLHRSLGPVQLTLLGVGAIIGTGIFVLTAAAAQKAGPGMMWSFVIAGFVCAVAALCYSELASMVPVSGSAYTYSYAVVGEMLAWMVGWALILEYAVAASAVSVGWSGYFMGLLKSLTGFELPAMLQAGPTWTMNGLLPHADFSTGLINVPAIVVALLVTWLLMLGTKESATFNAILVAIKVAALTMFIVLTLPAIEREHFAPFAPNGWFGPAGTTGMGIVGAASSIFFAYVGFDAVSTAAEETKNPQRNVPIGLIGSLAICTVFYLLVAAGAIGSIGAQPTALGVAPGSAEFTQQCAALLASGQEPLVCSNEALAHVLRAINYTYAGDLIGLAANLALPSVILMMLYGQTRIFFVMARDGLLPEKLATVHPKWKTPHIVTAMTGVFVAIAAALLPVGQLADISNSGTLFAFFMVAIAVMLLRARDPNRVRPFRTPAVWVVGPIAAIGCIFLYWNLPFEAKMVLPVWGAIGLVFYFAYGYRKSHVGQGHVEVHEGDADVPPMPVPPID

SEQ ID NO: 34719 - protein, 635 aa, Novosphingobium aromaticivorans DSM 12444
MAKVIGIDLGTTNSCVAVMDGGTPKVIENSEGARTTPSIVAFTKDGERLIGQPAKRQAVTNPDNTIFAVKRLIGRRFDDPMTQKDTELVPYTITKGKNGDAWVKAGGQDYSPSQISAFTLQKMKETAEAYLGETVTQAVITVPAYFNDAQRQATKDAGQIAGLEVLRIINEPTAAALAYGLDKQDGKTIAVYDLGGGTFDISILEIGDGVFEVKSTNGDTFLGGEDFDTAVVEYLADKFKAKEGMDLKTDKLALQRLKEAAEKAKIELSSAQTTEINLPFITARMEGGATTPLHLVETVTRADLEKLVAGLIQRTLDPCKKALADAGISAKEIDDVVLVGGMTRMPKVREVVKDFFGKEPHTGVNPDEVVAMGAAIQAGVLQGDVKDVLLLDVTPLSLGIETLGGIMTKMIDRNTTIPTKKSQVYSTAEDNQQAVTIRVFQGEREMAQDNKLLGQFDLVGIPPARRGVPQIEVTFDIDANGIVNVSAKDKGTGKEQQIRIQASGGLSDADIDQMVRDAEKFAEEDKKRRAAAEAKNNAESLIHATERQLEENGDKVDAGLKAEIEAAIAEAKTAVESGDIDAMNAKAQALTDKAMKMGQAIYEKEQATAASPGAEAPKADDDVVDAEFSEVDENK

SEQ ID NO: 34720 - protein, 582 aa, Novosphingobium aromaticivorans DSM 12444
MTTERSGAEILVESLVAKGVEFVFGYPGGAVLPIYDALFGDERLRHILVRHEAGAAHAAEGYARATGKPGVVLVTSGPGATNAVTGIADAFMDSIPMVVITGQVPTALIGSDAFQEADTIGITRHCTKHNYLVKDPSQLAATIDEAFRIATEGRPGPVVIDIPKDVQIATAAWSSAAPQQRNRYAPQTEGGAKEIAEAIELIAKAKAPVFYTGGGVINAGPEAARLLRELQSLTGAPVTSTLMGLGAFPADHPAWLGMLGMHGTYEANMTMNRADLVVCIGARFDDRVTGRLDAFSPNSKKIHIDIDRASINKTVQVDLPVIGDCGKVLAQLIEAWLERGYQKQDLTEWNARIDGWRARQSLAFPRRGKEIMPQLAIERLYELTRHKEPIISTEVGQHQMWAAQHFHFMKPNKWLTSGGLGTMGYGLPAAIGAQAGFPDALVIDIAGDASIQMNIQELGTATQYRLPVKVFVLNNEWMGMVRQWQELTYESRYSNSYSDSLPDFVKLAEAYGWKGIRITDESELDAGIQAMIDHDGPVFVDCLVAKEANCFPMIPSGAAHTDMILYGDEVAGTMDDEAKALV

SEQ ID NO: 34721 - protein, 398 aa, Novosphingobium aromaticivorans DSM 12444
MAQFSSSDPVVILSYARTPMGAMQGALAEVAATDLGATAVKAAVERAGVAPDKVERIYMGCVLPAGLGQAPARQAAIKAGLPKSVQATTVNKVCGSGMQTIIMGAEALAAGSADLIVAGGMESMTNAPYLLKKHRSGARIGHDMAYDHMFLDGLEDAYDAGRAMGTFAQDTANAYQLTREQQDAYSIESLRRAQAAVADGSFKDEVVAVTVKTRAGEVTVDTDEAPGKGRPDKIPSLKPAFAKDGTITAATSSSISDGAAAVVLARQSVAAAAGLAPVARIVALAAHAQEPKDFTTAPVGAIQKVLDKAGWSIADVDLFEVNEAFACVAMFAMHDLGIPHEKINVHGGATALGHPIGASGTRIVTTLIAALRKHGKTKGVASLCIGGGEATALAIELV

SEQ ID NO: 34722 - protein, 339 aa, Novosphingobium aromaticivorans DSM 12444
MPSSADYRPTRRVEGKPRVFVTRRLLPETEARMAELFDVVLNSDDRPLGRAELVAAMQDAHVLVPTVTDRIDASMIAEAGPQLGLIANFGAGTEHIDLAAARARKIIVTNTPGVFTDDTADMTIALIISVTRRLNYGGRVLRAGKWEGWAPSTMLGHRLAGKTLAIVGMGRIGQAVAHRARAFGLNVAYHSRHRLPEALETMFGARYVADLDTLVAEADILTLHCPATPETSHLIDARRIALMKPESYLVNTARGQLVEEEALIAALSEGRIGGAGLDVFEHEPQVDARLLAHHNVAILPHMGSATFEGRIASGDKVVANVRFWADGHRPPDQVLEGLV

SEQ ID NO: 34723 - protein, 629 aa, Novosphingobium aromaticivorans DSM 12444
MCGIAGIVHTEGPKPVDPDRVRRMCDAIAHRGPDGEGVWTAPGIGLGHRRLSIIDLAGSPQPMKAAEGDAVIVFNGEIYNFRDLRKELQALGAQFRTDGDTEVILQAWRQWGTACLPRLHGMFAFALYDLRQRTTLLARDRLGVKPLFTARLADGAVIFGSELKALLAHPSLRREIDPLAVEDYLAWGYVPDHRSMLKGVEKLPAGHYQLLRHDAPPAAPVQWWDVSFADRANGSAEDLGAHLLHHMRDAVTSRMVADVPLGAFLSGGVDSSSVVALMAEASATPVKTCSIGFDVAALDETAYADRIAARFATEHRKRLVSPDDFSLVDRLAGMFDEPFADASALPTFRVCELAREHVTVALSGDGADEAFAGYRRQTFQHREEQARALLPSALRKPLFGTLGRLWPKADWAPRPLRAKTTLLSLAASGEEGYARALSVTSPELRETLYTPDFKRLRGDYRAEQPLIELMRKAPARSGLDRAQYADLKFYLPGDILTKVDRTSMAVGLEAREPLLDHRLVEFGASLPERLRVRGATGKWLIKQTMRRYLPEDVLFRPKMGFVTPLAQWLRGPLAHEARALASDGLLARTGWLDAARIDALADAHVSGRADHSRLIWQLLMLRKSLQLLG

SEQ ID NO: 34724 - protein, 563 aa, Novosphingobium aromaticivorans DSM 12444
MAARLPQWERREMADGKKASDLFIECLEEEGCEYIFGVPGEENLDFLDSLSRSKKIRLVLTRHEQGAGFMAATYGRHTGKTGVCIATLGPGATNFVTAAAYATLGGMPMLMITGQKPIKKSKQGRFQILDVVSMMGPITKFTHQMASSDNIPSRVREAYRLAEEEKPGATHIELPEDIADEHTTSVPLKRSLVRRPNADAKSVAQAVHALQNAKAPVLVIGAGANRKMTGKMLLEFVEKTGIPFLTTQLGKGVIDERHPKFLGCAALSSGDFVHRAVEDADIIINVGHDVIEKPPFFMREGGTPVIHVSTKTAEVDPVYFPSIEVIGDIANAIWQMKEAITPNPAWNFDHMLAYRAAEVAHTAPLAADMRFPVFPPHLVQQVRDCMPEDGIICLDNGVYKIWFARGYTAYKPNTVLLDNALATMGAGLPSAMMSAMLYPDRKVMAICGDGGFMMNSQEMETAVRLGLNLTVLILNDSAYGMIRWKQANMGFEDFGLTYNNPDFVKYADSYGAKGYRVESAEHLEKLLAHCRDTPGVHLIDCPVDYSENDQILNKDIKELSKAL

SEQ ID NO: 34725 - protein, 217 aa, Novosphingobium aromaticivorans DSM 12444
MKFFVDTADTAEIADLAATGLLDGVTTNPTLIAKAGKDFIEVTKEICGLVDGPVSAEVVALDHEGMMREAEVLRKIADNVCIKVPLTVDGLKTCKALTGEGTMVNVTLCFSANQALLAAKAGATFISPFVGRHDDNGFDGMDLIRDIRLIYDNYAFETQILVASIRHGVHVLESARIGADVITAPPAVIKGLFKHVLTDKGIEGFLADWAKTGQKIV

SEQ ID NO: 34726 - protein, 109 aa, Novosphingobium aromaticivorans DSM 12444
MSNTTEERISEIVNGNDVVLFMKGTPLFPQCGFSSKAVAILEHLGVEYATVDVLQDMEIRQGIKSFSDWPTIPQLYVKGEFVGGSDIMMEMFQAGELQQVMDDAGVKAA

SEQ ID NO: 34727 - protein, 544 aa, Novosphingobium aromaticivorans DSM 12444
MYQYDSYDQAMVDARVAEFRDQVQRRLAGDITEDQFKPLRLKNGLYLQLHAYMLRVAVPYGTLNSRQMRMLGDIADKYDRGYGHFTTRQNIQYNWIKLEDAPDILADLASVEMHAIQTSGNCIRNTTADQFAGAAADELVDPRPYAELLRQWSTFHPEFDYLPRKFKIAIIGSETDRAAMKLHDIGIQLVKNDAGEIGCRFYVGGGMGRTPMIAPVIGDFVPPLQMISYAEACLRVYNRYGRRDNKYKARIKILVHEIGADEYRRQVEEEFKHILTLGLEPPAAELERIKGFFEQPGFDANASDELDLSDPDFALWVDQNVHAHKAKGYAIVNISLKPVGGIPGDATADQIRLMADLALEHSFDELRVTHAQNIVLPHVKKADLHAIWQKLDAAGLANANLDLIGDIIACPGLDYCSLANARSIPVAQKISERFADLGRQRELGELKLKISGCINACGHHHAGHIGILGVDRKGVENYQLLLGGCEGADTSLGTITGPGFNEDGIVDAVEKATDVYLAQRAEGERFVDTYRRIGMAPFKEAIYG

SEQ ID NO: 34728 - protein, 590 aa, Novosphingobium aromaticivorans DSM 12444
MIVPPPRQELAILTMTFANLPQPLAAALEGHGYTALTPVQSAVTEAEAHGRDLVVSAQTGSGKTVAFGLAMAGELLGDEATLPFATAPLALVVAPTRELALQVSRELTWLYAPTQARIATCVGGMDPSRERRALSHGAHIVVGTPGRLRDHLERGALDLSALRCVVLDEADEMLDMGFREDLEELLDATPEGRRTLLFSATMPKPIEALARRYQRDALRISTVGEARGHGDIAYRAVAVAPAEIEAAVVNLLRFHEAETAMLFCATRDNVRRLHATLVERGFTAVALSGEHSQSERNNALQALRDRRARVCVATDVAARGIDLPSLSLVVHVEIPRDAETLQHRSGRTGRAGKKGTAVLIVPFPRRRRVEMMLRGARINADWVDVPTPEAIRAQDRERLLETILAPVETDEADMEIARTLLEQRTAEELAAALVRAHRAALPQPEELLSGTDEGRKQATHRAGFEDVVWFRMDVGRRQNADPRWILPTLCRRGHASRQEIGAIRIAPNDTWFQVPRAIADRFADAVRRTADPEGGDENGIHIEPAPDGPREMARDNRRGAANDGPRGPRRPMRGRPEGKPHRKGPPRQRG

SEQ ID NO: 34729 - protein, 68 aa, Novosphingobium aromaticivorans DSM 12444
MPVGTVKFFNVDKGYGFIAPDGGAPDNFVHISAVERSGMATLDKDQRVQYELETDKRGKTSAVNLQSA

SEQ ID NO: 34730 - protein, 540 aa, Novosphingobium aromaticivorans DSM 12444
MTVSHSDGLDRNMTKPKVLISDKMDPNAARIFTEMGCDVDVITGETPEQLIARIGEYDGLAIRSSTKVTKAILDAATNLKVIGRAGIGVDNVDIPAASAQGVVVMNTPFGNSITTAEHAIAMMFALARQIPEANAQTQAGLWPKNGFMGVEVTGKTLGLIGAGNIGSIVASRALGLKMKVVAFDPFLTPERAVEMGVEKADLETLLAKADFITLHTPLTDQTRNILSRENIAKCKKGVRIINCARGGLVDEAALKDALDSGHVAGAALDVFETEPAKESPLFGTPNFICTPHLGASTTEAQVNVALQVAEQMADFLVTGGVTNALNMPSLSAEEAPKLRPYMALAEKLGSLVGQLAHDNLTKIAIEVEGAAAQLNQKPITAAVLAGLMKQYSQTVNMVNAPFLAKERGLDVREVRHDREGEYRTLVRVTVSTSQGERSVAGTLFGNGQPRLVEIFGIGIEADLDGDMLYIVNSDAPGFIGRIGTLLGQNTINIGTFHLGRREAGGEAVLLLSLDNPVSEDVLKEAREIQGVRVVKALKFA

SEQ ID NO: 34731 - protein, 675 aa, Novosphingobium aromaticivorans DSM 12444
MDDTQRVANSPIWHEGERALQAHVGVVDRMGEVGARVIRPFMPDQHRTFYAQLPFVILGSVDAEGAAWATVVEGEPGFLSSPDPKSLVLGALPHADDPALGGIHDEAALGLLGIELHNRRRNRVNGTLRFPSAGAPLLEVGQSFGNCPQYIQLRDATLSRAPAAPPPHLAEELPALDAAARAMIGSADTLFVASYADRLDSGRQVDVSHRGGKAGFVRVDAEGKLTIPDFAGNLFFATLGNVLLNGQAGLVFIDFESGDLLQMSGKAEVVLDSPEIASFAGAERLWTFVPQRIVRRKGALALRWSFRDNGWSPNSLATGQWPAALHWQQLRVERIVAESASIRSFHLRPVSPDLGWQHEAGQHLPIRVRLPGEDSPAVRTYTLSSAPSDPLYRISVKREGKVSAWLHEQVREGDIIEARAPAGSFVIEPGAPRLAVLIGAGIGITPMISMLRELVSLGANGAPARPAVLIQSARSLAERAFANELASLADRVRVVRVLGDAKGAQAGADYDLEGRIDLQLLSAVLPFGDHDFYLCGPKGFMQAIYDALRGANVPDHRIHAEAFGPSSLVRRRDTTRETAPAAQPSAVPVPVLFTASLKEARWKPGEGTLLELAEARGLKPEFGCRSGSCASCKVKLVSGAVAYPRTPSAEVASGEVLLCCAVPAEGNDKPLQVEA

SEQ ID NO: 34732 - protein, 360 aa, Novosphingobium aromaticivorans DSM 12444
MIYLDYQATTPLAPEARAAMLPWLAGPEAPGFANPHSPHRYGRAAAAAVEAARAQVAALLPPGGRVIITSGATEAINLAIVGSGCTRLAASAIEHAAVLDTARFVDPGVAVLPVDGEGLVDPDAAIPEGTGLVAVMQVNNEIGTVQPIVELARRAREAGALFLCDAVQGAGKLEAPEGADMIAISAHKLYGPKGIGALWVRDGIELQPLIHGGGQEGGLRSGTLSPALCAGFGAAAALCTSLREKDAHHVEKLWTRARSLFDGWLLNGSATRRWHGNLNLRLPGLDVSRLLSECRTVAFSAGSACASGSGRPSHVLRALGLSDRDGKNAIRLGFGRYTTEEELEQAAAAILAAARSQGVW

SEQ ID NO: 34733 - protein, 348 aa, Novosphingobium aromaticivorans DSM 12444
MPSRPIYLDHAATTPLLPEAMAAMEAGWRVWANPSSPHAAGRAARAALEDARARLKAALGWRGEVIFTSGASEALAIGIGRAKVGQVLVSAVEHDAALRVAGTAPRLPVGADGRVDPNGTERYMSGTDRALYVVQQVNSETGVIQDIAALADRVRSGGHLLLCDAAQGAGKIDLPDADMVVLSAHKFGGPVGVGALLVRDYGLLEPSGGQERGYRGGTEAMPLVLGMVAALEAGNGWLKRALGFRESLTNQIVDMGAEIVAGDAPRSPTIAAYRMPGKSSAAQLIRFDGAGIAVSAGSACSSGSLKASHVLTAMGYAHPGEVIRVSIGRETTEAEIARFVEVWKGIRG

SEQ ID NO: 34734 - protein, 402 aa, Novosphingobium aromaticivorans DSM 12444
MGAELAIGFLPLVDACLPILAREHGFAEAEGISLKLVRDMSWATVLDRLLYGHSDAAHLVAPLAIATTLGRGRPAVPLSVPFVLGLNGNAITMRTALAERVCPAGRLGDPRAVGAALKDVAAERKAAGNPLRFGVVHRYSSHNYMLRYWLAACGIRPDKDVEIATVAPPFCSDALEAGEVDVICVGEPWNSVAVERGAGRIVLVTAQIWRRGVEKVLALREPVLKERRGEVEALLRALVAAARHFVSPENWDSNAAILARPEYLDGSPSLIRRAISDRILLARGGEPVHYPDFMFQHREAANFPWVSQAEWLYTQMVRWEGMEFDPEMARKAARVFRPDVYRSALLGSGEPLPGASSKVEGSLGGLTSVGTQQGVMTLENNQFFDGRAFDPHDLQGYLASQA

SEQ ID NO: 34735 - protein, 267 aa, Novosphingobium aromaticivorans DSM 12444
MGFDRGRRGRGRDKRDGFGDEGGFDPYGGGGFGGGGYDRGGFGGGDRGGFGGGGRGGFGGGDRGGFGGGDRGGFGGGDRGGFGGGGGGRGGFGGPRGGGGGGGMPAQVVGTGKGVVKFFNGQKGFGFIQREDGGEDVFVHISAVERAGLEGLAEGQQLEFNLVDRGGKISAADLQVVGDVIPVAAKPASPQRELTGEKASGTVKFFNAMKGFGFITRDDGQPDAFVHISAVERSGLRELNEGDKLEFDLEVDRRGKYSAVNLVPRQD

SEQ ID NO: 34736 - protein, 603 aa, Novosphingobium aromaticivorans DSM 12444
MAQETPAQETPAANVEEPPRARTLGPLRMIWGEAAKYPGRVAAASAALIVTSAATLAIPSGFRLIIDKGFAAGADVSAIGRWFQYLLLIVLVLAIGTACRFYFVSWLGERVVADIRLKVQANLLRLPPSFFETNSPKEISSRMTSDTAVIEQVVGTTVSVALRNTITAIGGLGYLFYLAPKLTAILMIGIPLVVGPIVFFGRRVRNVSRSSQDRVAVIGVIVSEVLGAMKIVQAFGQEKRELERFGEKVEATFQTALRRISLRAVMTAIVILLVFGGITMLVWQGAVGVAEGRISGGTIFAIVITAGLVAGALGALSEVYGDLLRGAGAAGRLNELLREQPEIAPPARPTALPIPPRGQIAFQNVSFRYPSRPEVLALDDFSLTVEPGETVAIVGPSGAGKSTLFLLAQRFYDPHGGTIRIDGVPLTSADPAEIRQRSALVPQDATLFAASARDNLRYGNWGASDEAIWEAARAANAEQFLRDLPQGLDTFLGEDGARLSGGQRQRIAIARAVLREAPILLLDEATSALDAESERLVQEALDRLMKERTTLVIAHRLATIRAADRIVVMDAGRIVEQGTHSSLTAADGLYARLARLQFEGLAA

SEQ ID NO: 34737 - protein, 754 aa, Novosphingobium aromaticivorans DSM 12444
MSEESNVRFTEREALFYHNTIRPGKIEIIASKPMATQRDLSLAYSPGVAVPVRAIAEDPSTAYDYTAKGNLVAVISNGTAILGLGNLGALASKPVMEGKAVLFKRFADVDSMDIELATEDADAFIEAVALLEPTFGGINLEDIKAPECFIIEQALKERLKIPVMHDDQHGTAIISAAGLLNACHLTGRRLEDVKVVVNGAGAAAIACTALIKAMGVRHDNVIMCDRSGVIYRGRESGMDQWKSAHAVDTTARSLEDALVGADIFLGLSAAGALKPEWVLKMAPQPIIFAMANPDPEITPPDAKAVRPDCIVATGRSDYPNQVNNVLGFPFIFRGALDVRATAINEEMKIAAAEAIAQLAREPVPEEVAAAYGMNHTFGLDYIIPAPFDPRLMEVVSSAVAKAAMDSGVAQKPIEDFDAYRTSLKARLNPTTSVLTNVFATAKDNPKRVVFAEAENEVVLRAAIQFKDFGYGTPVLVGRTQPVLDLLTELGVSDPSSYEIHNSAVSPLVPEMVEYLYERLKRRGYLERDVRRMVNQDRNVFASLLVALGHGDALITGMTRTFAQSMKEVRRVLDPKPGHLPFGIHLMVAKNYTVFLADTTVNERPSAEDLAHIARETAAVARRMGHEPRVAFLSYSTFGNPYGRWLDSIRGAVAILDAENPGFEYEGEMAPDAALNPKVMANYPFSRLSGPANVLIMPGLQSANISAKLLRELAGNAVIGPMLLGMEKPVQIAPMTSIAPDILTLAVLAAAGIVG

SEQ ID NO: 34738 - protein, 418 aa, Novosphingobium aromaticivorans DSM 12444
MARIVMKFGGTSMAGTERIRRVARIVQRQQAAGHEVAVVVSAMAGETDRLVNFCREANPLYDPAEYDVVVASGEQVTSGLLAMHLQALGCKARSWLGWQLPIHTDDAHSKARIEGIDSEALLASMGAGEIAVIPGFQGLTADNRVTTLGRGGSDTSAVAVAAAVKADRCDIYTDVDGVYTTDPRIVAKARKLKNVTYEEMLELASVGSKVLQTRSVSLAMKEGVRVQVLSSFIDDDAPAADTIPGTMIVSDEELEGLDMERQLITGIAADKNEAKVTLTRIADRPGAVAAIFGPLAAANINVDMIIQNIAKDKGETDVTFTVPISDLARTQALLEERKDTIGYYRMLANSKVAKISVVGVGMRSHAGVASTMFRALADRGINIQAITTSEIKVSVLIDEDETELAVRVLHTAYGLDGE

SEQ ID NO: 34739 - protein, 390 aa, Gossypium hirsutum
MCGGAIISDFIPPSRSRRLTADFLWPDLKKSGLKKGSGKRYSKPVIDLGDDFETDFQEFKDEESDIDDYDVDDVLADVKPFAFNATKKPASAVSHGSNSEKSMQFNGQAEKCAKRKRKNQYRGIRQRPWGKWAAEIRDPRKGVRVWLGTFNTAEEAARAYDAEARRIRGKKAKVNFPNETPRTSPKHAVKTNSQKPLSKSNSSPVQPNLNQNYNYLNQPEQEYFDTMGFVEEKPSVNQFAYVDPVPTSIDAGFNQSDNAPLYFNSDQGSNSINCSDYGWGEQGAKTPEISSILEASVEGDEFLEDANPSKKLKPSSDNVMPAEDNSAKTLSDELLALDNQMKYFQMPPFIEGNWDATIDAFLNGDATQDGGNPMDLWNFDDFPTMAEGVF

SEQ ID NO: 34740 - protein, 224 aa, Staphylococcus aureus subsp. aureus NCTC 8325
MKVAKNTLSEIDAIMFMVNANEEIGRGDEYIIEMLKNVKTPVFLVLNKIDLVHPDELMPKIEEYQSYMDFTEIVPISALEGLNVDHFIDVLKTYLPEGPKYYPDDQISDHPEQFVVGEIIREKILHLTSEEIPHAIGVNVDRMVKESEDRVHIEATIYVERGSQKGIVIGKGGKKLKEVGKRARRDIEMLLGSKVYLELWVKVQRDWRNKVNFIRQIGYVEDQD

SEQ ID NO: 34741 - protein, 403 aa, Medicago truncatula
MDEIDVPSHFLCPISLQLMKDPVTLSTGITYDRENIEKWLFSFQNNTCPVTKQTLLETDLNNLIPNHTLRRLIQSWCTLNASFGVERIPTPKSPIDRTQILKLLNEAKKFPEKQLNCLVKLRSIVFESERNKKCLESAGAIEFLALTMKNNLNSSSLSEAAIEILFHLNPSEEHVKNLINNESIQFIESLFHVLKLGSYQSRGYATMLLKSAFEVSDPIQLISVKKAIFEEIMRVLVDKISQQASKAALKLLLELLPWGRNRIKAVEGGVVLVLIELLFDVSERRVCELMLIGLDQICGCAEGRAELLNHGAGLAIVSKKILRVSHVASDRGVRIMSSICRYSANSRVLHEMLHVGAVSKLCLVLQVDSNFKTKERAKEILKLHSTVWKNSTCIPVPLLSSYP

SEQ ID NO: 34742 - protein, 171 aa, Medicago truncatula
MQTTEEQKTQQKEPVVGSRYSANTIQQVVGSPWSTGLFDCHENQTNAIMTAFLPCVTFGQIAEVLDGGELSCHLGSFIYLLMMPALCTQWIMGSKYRTKLRKKYDLVEAPHTDVISHIFCPCCSLCQEFRELKIRGLDPALGWNGILALQHSKHQSDPTLNNPPSTQFMSK

SEQ ID NO: 34743 - protein, 320 aa, Medicago truncatula
MRFMSICSWVAKTTRFLWIHPLNSLESEEQSSNTSVGDVQFEFFDVGEVIKSGQNASDLKQCHSLEMDLDDDEENDRSSITKKNQIFWESQHLDLQTNIDNTSSLETKIRSATKEAIEEIESCGTVCGCTRKKIAITSCRDCLMREVFTRLHKTGFNIAICKTKWRTSSDIPSGEHTFLDVIDNTNPEKGEVRVMIEMNFQAEFEMAKGSDEYNNLVKKVPEVFVGEVGRMSKLIKILCMAAKKCMKDKKLHMGPWRRHKYMEAKWLGPCERYPSTKSPLSIGSFSERIITKQKSKVSMLTIELFDKLPTLHCPAVDEVV

SEQ ID NO: 34744 - protein, 361 aa, Medicago truncatula
MKKDPTNLFILFGILLLSITKTQSQATNDNPTNPNFNQEFNPSFAIIIVILVAALFLMGFFSIYIRRCSDSPSSNNLLLPITNGRRAVARGLDPSVIETFPILEYSEVKIHKIGKDVLECAVCLMEFEDTETLRLIPKCDHVFHPECIDEWLSSHTTCPVCRANLVPQPGDSVHGVPESQQQDVEAQNDAVQLPTESDSVLLAPEVISLNKTLNRNRTRGSQSNRPRRFPRSHSTGHSLIQPGENTDRFTLKLPNKVRKQIMSRQLQRARSLITLPRESSSRHGYRTGGEGSNRGKSLRRLDLSFKSDRWIFNRAPSFLARALSFRSPKPKVNNSDDDEGTSSAAAPIMPSSAVDSARPQI

SEQ ID NO: 34745 - protein, 589 aa, Medicago truncatula
MVNKELEVCTLDGSIDSHGHPAVRERTGTWFAGILILVNQGLATLAFFGVGVNLVLFLTRVMGQDNADAANNVSKWTGTVYIFSLLGAFLSDSYWGRYITCAIFQVIFVVGLVALSLTSYIFLLKPNGCGSKELPCGTHSSYETTLFYVSIYLVALGNGGYQPTIATFGADQFDESDPSEQHSKIAFFSYFYLALNIGSLFSNTILDYFEDDGLWTLGFCVSAGSAALALVLFLCGTSKYRYFKPVGNPLPRFCQVFVAAIRKWKVQMFDGEDKLHEVEDCLSNGGRKMYHTQGFRFLDKAAFITPKDLKQMEENKCSPWFLSTVTQVEEVKCILRLLPIWLCTILFSVVFSQMASLFVEQGAAMETKISTFHIPPASMSSFDILSVVSFIFIYRRILDPLVARFTKKSKGITELQRMGIGLVLAIIAMVSAGLVEIFRLKYAIKEEKNCSHCEGTSSLSIFWQVPQYVLIGASEVFMYVGQLEFFNSQAPDGLKSFGSALCMTSISLGNYVSSLLVAIVMKISTRNEGMLGWIPGNLNMGHLDRFYFLLAALTAADLLVYIAMARWYKYVKFHGNNIEQGNNIEENVV

SEQ ID NO: 34746 - protein, 431 aa, Medicago truncatula
MEEEREVSFLAMNKENSGIYHDGKELRRFRAYLRWVYVDQSNLCKAGISWSVFFTLAYVVPILSHFLLDCSTTCDADHRRPYHVPVQISLSVFATLSFISLSKWDRKYGFSKFLFLDKVSDESLKIQRGYAIQMKRTMKLILLWGLPCFICQCVYKIWWYISGASQIPYYGEVYVSGIILCTLELCSWFYRTSIFFLVCVLFRLIGYLQIQRLDEFAPVFQRETEVGTILLEHLRIRRNLRVISHRFRAFILSSLLLVTASQLIFLLMVIKPHADVDILKGGELGLVSITLVSGLYILLRSATKITHKAQSLTGLASKWHICATINSFDNIDGETPTALIASAQAMAADISWGSSEDESGDEEDELNNTKMMPIQTRTISFHKRQALVTYMENNRAGITVYGFMLDRTWLHSIFGIQLALCLWLLNKTVGI

SEQ ID NO: 34747 - protein, 753 aa, Medicago truncatula
MASITSIGASTACKLPSLELYKKHKLTSIPTSSVKFHFSDGNKSRHINRLANFNSSDRFLPSAVATPNSSSSSLLSDEAFKGLGSSFDGESEDEDFPSRTTSINADELDISKLDLPSQLVDSLRDRGITQLFPIQRAVLVPALEGRDIIARAKTGTGKTLAFGIPIINGLDDGQDSGPYSRRRLPRALVLAPTRELAKQVEKEIKESAPYLKTVCIYGGVSYVTQQSALSRGVDVVVGTPGRLIDLINGNTLKLSEVEYLVLDEADQMLAVGFEEDVEVILEKLPAKRQSMLFSATMPSWVKKLARKYLNNPLTIDLVGDEEEKLAEGIKLYAISATSTSKRTILSDLITVYAKGGKTIVFTQTKRDADEVSLALTNSITSEALHGDISQHQRERTLNGFRQGKFTVLVATDVASRGLDIPNVDLIIHYELPNDPETFVHRSGRTGRAGKLGTAILMFTGSQRRTVRSLERDVGCKFEFVNAPSVEDVLESSAEQVVVTLNGVHPESIAFFTPTAQKLIEEKGTTALAAALAQMSGFSQPPSSRSLITHEQGWVTLQLTRDSENSQRYFSARSVTGFLSDVYSKAADEVGKVHLIADERVQGAVFDLPEDIAKELLDKDIPAGNTISKVTKLPPLQDDGPPSDFYGKFSDRERNNRRGGSRDGRGFRSSRGWDGGRGSDDDFGDSSRRGGRSYKSGNSWSKPERSSRDDWLIGGRQSSRSSSSPNRSFAGTCFTCGESGHRASDCPNKRGDFF

SEQ ID NO: 34748 - protein, 689 aa, Medicago truncatula
MSKEKVDHKEMNNSCAPDQSSVPRNDLFELVWQNDQILVHGQSSNSNRAKMTPTLPSHTLKGHDKYSGQHANETNTRIGKFEDLDNGLNEIITRSVSSSQDEDLMTMMPWLNCAMDDEHSLHYSSCFVHEPGARTNDFAATNKFSLLDRKSNCIQVFSDSHKQGILSKGSSLAVEDFDTSELKTSTNQLNMSSLLQQCQPSFESIRFRESGLSENNTKGNANQHAPCEEISHVPSSSTVMNFTHFAKPAAIVKANLQNIGFSSSRSERVGAKNKDAAAIGRNPCESSKVDLSVECPKSSAIHCHQSVEPSRVGLKPLEPKSLEKNTTVSTSACKEDVSKVDQTSNQVLSESSRKGQEVFKKCTELTVASSSVCSDNGVHRSSDDANQNLKRKNLDSEDSEWHSEDFEDESIGVKRTDHGRGVTGSKKNRSTEVHNLSERRRRDRINERMRALQELIPNCNKVDLFFLQADKASMLDEAIEYLKSLQLQLQIMSMGGGGLYMPMTLPAGMQHMHAAHMFPFSPMSVAMQMGLGVPQFQGTHLPVAHTSGLAALHGMVRPNPQMFGLQAGQGLHMPMPSASMFSYPGEPVMNSSAVELNASGTAGLMETVESASASKLKDQMPKLKDPMPNVNSQVMLNNKGCSSTNQMSIQCEATTGGLEQSNVVLDSAHALLENDKRDNIEIEIDKSHE

SEQ ID NO: 34749 - protein, 1122 aa, Medicago truncatula
MSFGSKEKLKGVSLSSSAESKMNTNKETEKTLAQYGVDAELLAEFEQSRVYGKSFEYSKTILDPPRLVSEEKMITYLSRIQRGGFIQPFGCLVVIEESTFRIIGYSENCFQLLGDIGSEHFMGLIGVDATTLFTPPSGSSLVKAVASREISRLNPIWVRARTTEKPFYAILHRIDVGVLIDLEPARSSGPALSLSGSFQSQKMAVSAISRLQSCRREDISLLCDTVVEEVQKLTGYERVMIYKFHEDDHGEVVSETRRSDLESYLGLHYPSIDIPQAARFLFKQNRVRLIYDCHAKPVKVIQSRELKKPLCLVNSTLRSPHDCHKQYMANMGSIASLVMAVVINEKDTTRLWGLLVCHHTSPHHVSFPVRHACEFVMHTFGMQLYMEIQLASQMEEKRILKTQTMLCDMLLRDAPFGIVTQSPSIMDLVKCDGAALYYDENCWLLGITPTKLQVKDIAEWLLSNYSDSTGLTTESLVDAGYPGATLLGDAVCGMASARINQRHILFWFRSHTAKEIQWGGAKHHPTDKDDGGKMNPRTSFKAFLEVLKSKSLPWEISEINAIHSLQLIMQDLFQDTDNTCPKTLKDFEKSDALIGGSHEISSIALEMVRLIETAAVPIFGVDSDGLINGWNVKIAELTGLPTSEAMGKSLENEVVHVDSRETLTNILRRALQGQDNKNVELKINRFVLHQEKEVVYLMISSCISRDYTNAIVGVGFVGQDITFEKVIVKKFIKLEGDYKAIMHSLNPLIPPIFASDENACCSEWNVAMERVTGWKKDEVIGKMLLGEIFGSFCRLKGQDALTDFMILLYHGISGQDSEKSPFGFYDRNGKFIETYITTNKRTDASEDIIGCFCFLHVVTEDLNQPFQGHRSKCRQRISKSKELAYILQEMKNPLNGIRFTHKLLENTGISENQKQLLDTSEACERQIMAIIEDIDLGSINEGTWKLNMKEFLLGNILDAVVSQVMMLIKGKDLQMFHEISDKIQTLSLYGDQIRLQMVLSDILHNIVSHTPSPNGWIEMKITPGLKIIQDGNEFIHLKFRMTHSGQGLPSSILHDMFYGENQWTTQEGLGLFMSRKILSRMNGDVHYVREQNKCYFLIDLELRTRKERQRNLKTETSMIRSL

SEQ ID NO: 34750 - protein, 616 aa, Medicago truncatula
MAILFSTIALPSTNVTSKLSILNNTSHSHALRHFSGNTTKRFHKASSFIAFAVKNNPTIRKTTPRRDSRNPLLSEGRDEDEALGPICPGCGIFMQDNDPNLPGFYQQKEVKIETFSEEDYELDDEEDDGEEEDNGSIDDESDWDSEELEAMLLGEENDDKVDLDGFTHAGVGYGNVTEEVLERAKKKKVSKAEKKRMAREAEKVKEEVTVCARCHSLRNYGQVKNYMAENLIPDFDFDRLITTRLMNPAGSGSSTVVVMVVDCVDFDGSFPRTAVKSLFKALEGMQENTKKGKKLPKLVLVATKVDLLPSQVSPTRLDRWVRHRASAGGAPKLSAVYLVSSRKDLGVRNVLSFVKDLAGPRGNVWVIGAQNAGKSTLINAFAKKEGAKVTKLTEAPVPGTTLGILRIAGILSAKAKMFDTPGLLHPYLLSMRLNREEQKMAGQAIHVGGLARLDLIEASVQTMYVTVWASPNVSLHMGKIENANEIWNNHVGVRLQPPIGNDRAAELGTWKEREVKVSGSSWDVNCMDVSIAGLGWFSLGIQGEATMKLWTNDGIEITLREPLVLDRAPSLEKPGFWLPKAISEVIGNQTKLEAQRRKKLEDEDTEYMGASIEISA

SEQ ID NO: 34751 - protein, 658 aa, Chrysanthemum x morifolium
MATSHVYCSPTITLHSKTNLPVEFFSSIHYKHHHLKSKENGSFKKLTNYGKIKALVTETPPPKTEQSGGEKEKKIRVLVAGGGIGGLVFALAAKRKGFEVVVFEKDLSAIRGEGQYRGPIQIQSNALAALEAIDLDVADEVMKAGCITGQRINGLVDGISGNWYIKFDTFTPAVERGLPVTRVISRMTLQKILADAVGDEIILNGSNVVDFEDHGDKVSVVLENGERFEGDLLVGADGIWSKVRKNLFGPKDVTYSGYTCYTGIADFIPPDINSVGYRVFLGHKQYFVSSDVGGGKMQWYAFHNEPAGGSDKPNGKKERLLEIFGGWCDNVVDLLLATDEEAILRRDIFDRIPKFTWGKGRITLLGDSVHAMQPNLGQGGCMAIEDSYQLALELDKAWIQSTKSGAPIDIQSSLRRYENARRLRVAVIHGLARMAAIMASTYKAYLGVGLGPLSFLTNFRIPHPGRVGGRFFIDIGMPLMLSWVLGGNGSKLEGRPQSCRLTDKANDELQNWFRDDDALERALTGEWFLLPIGSSNADSAPVSLSRDEKMPCIVGSVPHTSIPGNSIVISSPEISKLHARISCKDGAFYVTDLRSEHGTWITDNEDRRYRVPPNFPARFHPSDVLEFGPNKKVAFRVKVIRSQPKITEEGGDRVLQAV

SEQ ID NO: 34752 - protein, 531 aa, Synechococcus sp. WH 5701
MNLEEGKDYFYCACGRSSDQPFCDGSHEGSGFTPLAFVAERGGKALLCRCKQTATPPYCDGTHTRVPADRVGTTFSVDADGEGDGTEEGDGNDADPEEPDHHGMPEPRATAEEPNLELIHQLAEHGLDRMGAEGPVAAMGVPRSLLPLWDDIQILTAQLARRPLAGDAAVGTELVIGPRARRPLRLEIPLLVSDMSFGALSEEAKQALATGAERAGTGICSGEGGMLPEEQAANHRYLYELAPAMFGYREEVLSQVQAFHFKAGQAAKTGTGSHLPGAKVTARIAEIRGIPEGQPSCSPAVFSDLHSPADFRAFGDRVRELSGGIPVGMKLSAQHIEHDLDFALEAGVDYLILDGRGGGTGGAPLLFRDHIAVPTIPALARARAHLDRSGVGGQVTLIVTGGLRTPADCIKALALGADGVALANAAIQAIGCVGSRICHTNRCPAGVATQDPQLRRRLEVEHAALRLERFLRATVALMQVMARACGHDHLGRLRREDLASWHRDLAELAGIAWSGRSRCQLARSSRRSRPR

SEQ ID NO: 34753 - protein, 308 aa, Synechococcus sp. WH 5701
MAVSAALDRLESDLFDRDGAIFMGSRRDPEGCRVALFGVPYDGTTSFRPGTRFGPAAIREVSSGLETYDPQLDLDLDDLAFADLGAVAIPFGAPEPVVAAVGEATSAVLELGLRPLMLGGEHSISSGAVAAVAARHPDLVLVQLDAHADLRQSWLGARHSHACAMRRCLEVLPSGDLLQVAIRSGTREEFEELRRSGRLVGQGPGLSLQPERLQAELAAALAPLRGRPIYLTVDLDWFDPAVLPGTGTPEPGGYHWGHFAGLLEELRHHQLVAADVVELAPGLDPTGVSAVLAAKVTRSLLLLLGQAQ

SEQ ID NO: 34754 - protein, 562 aa, Synechococcus sp. WH 5701
MTAVLLPVGIAYAVASGVPAICGLYATIFGLFAYALFGPSRMLVLGPDSSLVALILGIVLPLSGGDSQRAMALAGMLALVSGSLCVLAGTARLGFITELLSKPIRYGYMNGIALTVLVSQLPALCGFTVKGDGLLIEARSFVAAVLAGSTNRASLALGVGTLLMIGLLRRSRRFPGVLLAVVAATVIVSVLNLESRFGVTVLGPLPRGLPALSIPSISTGDLVPVLLGGCAIALVSFADTSVLSRTYAARLGDTIDANQEMVGLGAANLVAGLFQGLPISASTSRTPVAEAAGAKTQLTGVVGAVTVAALLLAAPNLLRNLPTAALAGVVIASAITLIEVADLWRIYRMQRWEFWLSMVCLAGVAVFGAIPGIGLAIVIAVIEFLWDGWRPHSAVLGRVDGVKGYHDIGRYPESRLVPGLVLFRWDAPLFFANAEFFRDRVMTALESSPTQVNWLVVEAEPVTSIDVTSADTLDELDHTLAKAGIMLGFAEMKDPVKDKLKRFGLFSQFGEERFFATVGEAVSCYLKAHCVDWVDWEDQAKASADASCDQGTSDGGFRPVGG

SEQ ID NO: 34755 - protein, 557 aa, Synechococcus sp. WH 5701
MAQFPASLLPSGYRRGLGQADLAAGLTAAAVVLPKAMAYATIAGLPVQVGLYTALVPMAVYALLGSSRPLSVSTTTTLAILVGSELNRLSPLGDPSALVAASTTLALLVGTMLCGAALLRLGFIANFISESVLVGFKSGIGLVIVVDQLPKLLGLHGEKEGFFRDLAALLVGIPQASLATVLLSAALFGLLFGLKRRLPSVPAPLVVVAVAIAGCALLGLDRFGVELVGAVPRGLPSLSLPRLDLLGGLWPGAAGIAMMSFTESIAAARAFRASDEPSPQPDRELLALGLANIGGGFFGAMAAGGGTTQTAVNRQAGARSQMAELVTAGAALATLLLLAPLIALMPLAALAVVVIVYSFELIAPGEFLAIRRVRHIEFRWALVAFLGVVFLGTLKGILVAVILSLLALVQQEVNPPVYAIGRKRGTDVFRPLSARHPRDETWPGLLLLRAEGRLFFANAHGVLQRMRAEINQHQPRVVVLDGSAVIDIEYSALKVITEAERRLDRQGISLWLAGLNPTVLEVIRRSELGERLGKERMHRNIERAVEHYLAAGLDQQA

SEQ ID NO: 34756 - protein, 508 aa, Synechococcus sp. WH 5701
MKLNKVEKAKAEACGLDLAPRLAELGAAGWESLAEATLTIHLKWLGIFFRPVTPGRFMVRLRLPNGVLSADQLEVLADVVDRCGEHGSADITTRQNIQLRGLLLEDMAPLMSALESVGLTSRQSGHDNPRNVTGNPLAGLDPEEFLDTRPLVDAIQEALLGPEGPRNLPRKFNVAVGGAPDSFLLHNDLAFLPAHHGGELGFTVMVGGFFSAQRNELAIPLGLWLRGELLPAFSLAVLRHYEREGSRENRNKTRLMYLIDALGLEDYRSQVLDTFAEFVGVEEAAATPSHDGSHLVSQAPRDICGVHAQKQEGLHWVGLHVPMGRLEAASMLELARLAREYGSGELRLSESQNALIANVPEGRLDALLVEPLLERYQVSPGPLQAEAVSCTGNRYCSFALIPTKSTAQAVVDELERRLELPHGVRTHWTGCPNACGQPYMGQIGLMGAKTRVDGQMVEAAKIFLGGAMDANPKLAALHDKGVPLSQLPDVLETLLVEHYGARPRTDAS

SEQ ID NO: 34757 - protein, 436 aa, Synechococcus sp. WH 5701
MSNLSRRRFLITAAGTAAGAVWLSACGGKKSETSSAPAAAGSADTEVKGATLGFIALTDASPLIIAKEKGFFAKHGMPDVKVLKQTSWAATRDNLELGADRGGIDGAHILTPMPYLLTAGTITKTSKPLPMYILARLNVNGQGLSLSNEFLKEKVTLQSPKIKEIADRKKADGKLLKAAMTFPGGTHDLWMRYWLSANGVDPVSEADLVVVPPAQMVANLQTGTMDTFCVGEPWNQRTVNKKIGYTGAITGELWKDHPEKAFSMRADWVDKNPKSAKAMLMAVQEAQMWCQDPANLDELCEITSKDKYFKCNVEDIKPRLAGTFDFGDGRSVTDSPLRMHFWKETDSYSFPYKSHDLWFLTEDIRWGYLPQTTDTKGLIDKVNRSDLWKEAAIAIGQEKAIPASDSRGKETFFDGVVFDPENPKAYLDSLKFKALA

SEQ ID NO: 34758 - protein, 431 aa, Synechococcus sp. WH 5701
MGGTIGAGILRTPGLVAEQLGSAPLIVAAWVAGALYALLGAFAVAELSTSMPRAGGWTVYARRALGDQAGFSVGWIDWVGHCAGLAWVAVTIGDYTIGLLPALPVGSKVVALLVLLAFALIQQLGLEAGSLSQKILSLGKAIAFLGLITACFLHPPVRELAGLSEPLLEAAGPADPLAAGGISLGIGAVFAMQAVITTYDGWHSPIYFAEEFAEPSKDLPRSLVGGVLSVAGLYLLVNLALLRLLPVSRIAGSVLPLADAAEVIFGSWSSQLIVVLALISSFGLVNAVVMGAPRILYGLSRDGLFLPQFAAVSAGGTPVLALVLTASTAGLLVAFGDFTILLGIASFLYVLLYLSGITSLLLLRWREPGLERPFRDPGYPISALIVWLGSLAFLIAAIRNDTANSAAALGLILLSLPLHQMTRRLAPSPEA

SEQ ID NO: 34759 - protein, 300 aa, Synechococcus sp. WH 5701
MTRSFPAVAFLGLGALGAPMAERLLAAGFPLTVHNRTRAAEEPLASSGATRAATAAEAAASAELIALCLSDDTAVEEVLFAPAGVAESVTSGSLVIDFSTIAAATSQRLAARLGELGVGYLDAPVTGGTEGARAGTLSLLVGGASDQLERARPLMEVVGGRISHFGPVGSGQQVKAVNQILVAGSYAALAEGLALARALGLPLQQVCAALEGGAAGSWALQHRAGQMIENTYPLGFRLTLHRKDLAIALETAAMAGVTLPISTSVAGIEDALIAAGHGDEDVSALARWFQPDLGPDALRG

SEQ ID NO: 34760 - protein, 492 aa, Synechococcus sp. WH 5701
MKRGSSNFVLVYHRSPYEETFDSEGNRQWVDQKSPNGVIPTLRNLFLEERSGTWISWRQDANCSANADERLNLTSPSPFTLRRLPLTPEQISSFYHVTSKESFWPILHNFPGLFSVDNSDWATFEEVNRSFARAACEEAAPGATIWIHDYNLWLTPAMIREQRQDVRIAFFHHTPFPSSDVFSILPWRDEILDSLLSCDLVGFHIPSYANNFARCAINLRGAEGADPVPVAKKFRRYGSALSEPTVVPWIDHNCRRVHIQASPVGTSPELIRDLVVTPAVKAMANTIAEQHEGRKLILSASRVDYTKGNEEMLLAYERLLEQQPRWHGGVELFLGCVAAASGMRIYEDIQRSVEEIVGRINGRFGRIDWTPVRLSTHRTSYEELMGWFSQADVCWITPLRDGLNLVAKEYVAARQGLGGVLVLSEFTGASVELEDAVLTNPYSHRSMDRAISDALDMPQEEQVQRMASMTQAVDEFTVQHWAEQQLGTLRSL

SEQ ID NO: 34761 - protein, 376 aa, Synechococcus sp. WH 5701
MTIPYLDHQATTPCDPDVVAAMAPYWSELFANPSSRSHRLGLEAAAAVDLARSSLARPLGVAPEQVVFTSGATEANNLAIKGLVEARRQRGRHLITLATEHRAVLEPLRYLAGHGYSLTVLPVQRDGLVDLNRFSEALRDDTLLVSVMAANNEIGVLQPLAAIGTLCRERGIALHSDGAQIFGNRPFSPGELGLDLFSLSGHKIYGPKGIGALVLAEGMILAPQQHGGGQEGGLRGGTLPVPLIVGLQRAAELASHDWKERQQRLGGLRDRLLAGLLELGGVRVNGSLEHRLAHNLNVHLEGVDGTQLHRALRRQLAVSGGSACSSGSPSHVLAALGLTPAEAAASIRFGLGRSTTTSEIDQAVEAVAGALQKLRR

SEQ ID NO: 34762 - protein, 343 aa, Synechococcus sp. WH 5701
MDKPGLSETKSEQPLGAELSLPVPLPLPQQAPEGFRSGFVALIGRPNVGKSTLLNHLVGEKVAITSPVAQTTRNRLRAILTTPSAQLVLLDTPGIHKPHHLLGERLVKSARSAIGEVDVVLLLVDGSEPAGRGDGFIVELLRFSRAPVLVALNKSDLVDPERAAELEASYRELLVLSDQRADPADPGQRRSDWPLLACSASTGAGCPELVEALAARLPLGPHLYPPDAVSDQPEQLLLAELIREQVLSLTREEVPHSVAVQVERIVEDGKRIAVLATVLVERSSQKGILIGKRGQMLKEIGSGARAQMQKVFDGPVYLELFVKVVPNWRRNPARLAELGYRGD

SEQ ID NO: 34763 - protein, 528 aa, Synechococcus sp. WH 5701
MTKVLVSDPIDQTGIDILSQVAQVDVRTGLPPEQLQQIIGDYDALMIRSGTQVTAAIIEAATRLKIIGRAGVGVDNVDVEAATQRGVLVVNSPEGNTIAAAEHALAMMLALSRHVPQAHVSTMAGGWERKKYVGNELYKKKLGVVGLGKIGSHVARVAKAMGMEVLAYDPYISAERAQVLQVRLMAIGPLFAEADFISLHLPRTPDTENLVNAELLATMKPTARLVNCARGGIVDEKALAEAVSSGTIAGAALDVYGNEPLEVDSPLRKVGDRLILTPHLGASTEEAQENVSVDVAEQIRDVLLGLPARSAVNIPGLTPEVMERLKPHLQLAETLGLLLSQLAGGSIQDLEVRLQGEFAHHPSQPLVVAALKGLLSSALGDRINYVNAGIEARSRGIHVLEVKDDASRDFAGGSLQLTCRGGNGSHSVTGAVFADGDLRITTIDEFPVNVMPTRHMLITRHRDMPGIIGNIGSLLGEHNVNIASMQVGRRIVRGDAVMVLSLDDPIPPSLLISIHGINGIQEAHPVTL

SEQ ID NO: 34764 - protein, 222 aa, Synechococcus sp. WH 5701
MSLRFFLDSADPLVWEELMPSGLFHGITTNPTLLRQAGQVCRISELRSLSQRALNLGCQELHLQAWGREPEALLDCALGLAELAPGRITIKVPLTRVGTVAGVKLIAQGIPLTFTACYEAPQVLVAAALGARYIAPYLGRIQDQGRDGHQELITMQQCVDRSGSSLRLLVASLRATSDLSRLAAAGMTTFTLSPQLTVALFNCEASEAAAARFDADATLVER

SEQ ID NO: 34765 - protein, 399 aa, Synechococcus sp. WH 5701
MAKAGDRAASPPTWKELLIGMASMGPAAPIASIGVPREIKRDEQRVALSPDGVRELVSQGLEVRVEAGAGQGAGMEDASYAEAGARLVDREEAWGAHLVVKVKEPQPEEFPFLRGDQVLFTYLHLAAYPEVGRALLEAGTTGVAYETVQLDNGNLPLLAPMSEIAGRLAAQVGAHLLEKPHGGRGVLMGGCAGVRPARVIVLGAGTVGWHAARVAAAMDAEVFLLDHTPQRLRMLEPQRIGRMVSLVSSNSLIERLVPSADLVVGAVLTPGSRAPTLVDEEVVKRMKPGSVIVDVAIDQGGCIATSRETTHTDPVVTIHGVQHYAVGNMPGAVPFTSTEALVSVTLPYIMGIAGRGLVEAVTERPELLSGLNTVDGAVCHPGVAKALGMPTRHPMACLR

SEQ ID NO: 34766 - protein, 330 aa, Synechococcus sp. WH 5701
MQFIDQARIAVQGGRGGDGIVAFRREKYVPAGGPSGGDGGHGGTVWLEADPNLQTLLDFKYKRLFEAPEGRRGGPNRRSGASGDDLVIRVPCGTEVRLQESEELLGDLTEPGDRLRVAAGGRGGLGNAHYLSNRNRAPEKCTEGRDGEERQLQLELKLLAEVGIIGLPNAGKSTLISVLSAAKPKIADYPFTTLVPNLGVVRRPSGDGTVFADIPGLIAGAAQGAGLGHDFLRHIERTRLLVHLVDASSADVTSDLAVVEQELLAYGHGLDQRPRILALNKSELLLPDQLEAARASLAALWGGEVLLISAATKSGLDGLLAEVWKELGIQ

SEQ ID NO: 34767 - protein, 262 aa, Synechococcus sp. WH 5701
MIRPDADTLLEIVDLQARVEDKPILKGVNLTIKAGEIHAVMGRNGSGKSTLSKVLAGHPAYTVTGGSVLYRGANLLDLEPEQRARSGLFLGFQYPVEIPGVSNLEFLRVSTNARRMEKGEEELDTFAFEDLVRERLEVVQMDPAFLERSVNEGFSGGEKKRNEILQMALLDPLVAILDETDSGLDIDALRIVAGGVNHLASPENATLLITHYQRLLDVITPDYVHVMAGGRILRTGGKELALELEDRGYDWVDQELAVLEVA

SEQ ID NO: 34768 - protein, 639 aa, Synechococcus sp. WH 5701
MGKVVGIDLGTTNSCVAVMEGGKPTVIANAEGFRTTPSVVAYTKNQDQLVGQIAKRQAVMNPENTFYSVKRFIGRRVDEVNEESKEVSYGVEKAGANVKVKCPVLNKQFAPEEVSAQVLRKLADDAGKYLGETVTQAVITVPAYFNDSQRQATKDAGKIAGLEVLRIINEPTAAALAYGLDRKSNERILVFDLGGGTFDVSVLEVGDGVFEVLSTSGDTHLGGDDFDKVIVDHLAASFKANEGIDLRQDKQALQRLTEAAEKAKIELSSATQSEINLPFITATPEGPKHLDLTLTRAKFEELASKLIDRCRVPVEQALKDAKLSSSELDEVVMVGGSTRIPAVLELVKRVTGKEPNQTVNPDEVVAVGAAIQGGVLAGEVKDILLLDVTPLSLGVETLGGVMTKMITRNTTIPTKKAEVYSTAVDGQTNVEIHVLQGERELASDNKSLGTFRLDGIPPSPRGVPQIEVTFDIDANGILSVTAKDKGSGKEQSISITGASTLSETEVEKMVKDAETNSAADKEKRERIDLKNQAETLLYQSEKQVTDLGDKVSAEVKTKMEEKRQQLQEALDKEDYEAMKTRLEELQKELYEVGASVYQQAGAEAGASAGEPGGNGAAGATSSSGPSADDVIDAEFTESK

SEQ ID NO: 34769 - protein, 407 aa, Synechococcus sp. WH 5701
MAQEQGARAKRVVLAYSGGVDTSVCIPYLKQEWGVEEVITFAADLGQGDELEPIRQKALDSGASQSIVGDLIDPFIREFAFPAIRANALYEGRYPLSTALARPLIARRLVEVAREQGADAVAHGCTGKGNDQVRFDVAIGALAPDLKVLTPAREWAMSREETIAYGERCGIPAPVSKKNPYSIDLNLLGRSIEAGPLEDPMVEPPEEVFAMTRSIRDTPDEPQVVEISFEQGNPVAIDGVSLDPVGVIRRANELAGLHGFGRLDIIENRVVGIKSREIYETPGLLLLIRAHQELESLTLAADVVRYKRQIESSWADLVYQGLWFGPLKQALDGFLDCTQATVNGVVRLRLHKGNAVVIGRASSSDSLYVPAMATYGSDDRFDHRAAKGFIYVWGMPTRLWAASRRQA

SEQ ID NO: 34770 - protein, 601 aa, Synechococcus sp. WH 5701
MALLVQKFGGTSVGSVERIQAVAQRIAASRERGHDLVIVVSAMGHTTDELTALARALCPEPPQREMDMLLATGEQVSIALLAMALHSIGVPAVSMTGPQVGIVTESAHGRARILEVRTERLRKRLEEGQVVVVAGFQGTSSGSAGTPEITTLGRGGSDTSAVALAAALGADACEIYTDVPGVLTTDPRQVSDAQLMEEVSCNEMLELASLGAAVLHPRAVEIARNYGVPLVVRSSWSDAPGTRLTSGRPRPIGSEGLELGRPVDGADLENQQAVLALTRVPDHPGVAALLFEALSAAGLNVDLIVQATHVGASNDIAFTLSESQLEGAREVCRSLLQELAVEESALSTQAGLAKLSISGAGIMGRPGIAARLFDTLARYGINLRMIATSEVKVSCLVEGSQGARALRAAAEVFELQEHQLRQNPLPCDVSDPAVRGVALDRNQAQVVVRQVPDRPGTAAAVCRALADAGISLDTIVQSERTHGSGPQLSRDMSFTLRRDDLNRARGALQPVLAPWPEARFEEGLAIARVSAVGSGMPCTPGTAARMFRALAEAGVNIEMIATSEIRTSCVVAEADGVKALQAVHACFQLGDSTSYTLEATA

SEQ ID NO: 34771 - protein, 401 aa, Synechococcus sp. WH 5701
MTASSGPEGAFDRRTQAPPSGRQGAEALEKEARLPLTGWQQEVDQGLRYGLEAAESIVDRRISTFSRGELPHYAGINTFMKAPYIEDVNRVGEFDVAILGVPHDSGTTYRPGTRFGPQGIRRISALYTPYNYEMGVDLRESIRLCDVGDIFTIPANNEKSFDQISKGVAHVFASGAFPIILGGDHSIGFPTVRGVCRHLGDKKVGIIHFDRHVDTQEIDLDERMHTCPWFHATNMANAPAQNLVQLGIGGWQVPREGVKVCRERGTNVLTVTDICDMGLEAAAQFAIERATDGTDCVYISFDIDCIDAGFVPGTGWPEPGGLLPREALKLLELIVRNVPVCGLEVVEVSPPYDISDMTSLMATRVICDVMAHLVVSGQLPRKQKPAWLHEACNMAVDQRWR

SEQ ID NO: 34772 - protein, 248 aa, Synechococcus sp. WH 5701
MTVSSSAKETILVVDDEASIRRILDTRLSMIGYQVVTASDGVEALEAFRQSSPDLVVLDVMMPKLDGYGVCQELRKESDVPIVMLTALGDVADRITGLELGADDYVVKPFSPKELEARIRCVLRRVEKDPVVGIPNSGVIQVGELRIDTNKRQVYRGEERIRLTGMEFSLLELLVSRSGEPFSRGEILKEVWGYTPERHVDTRVVDVHISRLRSKLEDDPANPELILTARGTGYLFQRIVEAVASEGT

SEQ ID NO: 34773 - protein, 1532 aa, Synechococcus sp. WH 5701
MPFHRRSVWPHCDSPAPREVAGEKDACGVGFLAQLSGEPSHWLLEQALRGLGCMEHRGGCGGDGDSGDGAGVLCGIPWSYLEEVWPESALAAEGRRGLGMVFLPVAEPKRQEYKRLCEQAASLVGLRSLGWRDVPVEPSVLGPLALQTAPRIEQWLVEGPEPGDALESLLFRCRRRAVDLVRAAPGGDPNDLYFASFSGRTLVYKGMVRSEVLAAFYADLRDPRFAVSFAVYHRRFSTNTLPRWPLAQPMRTLGHNGEINTLLGNINWAQAAESHLDAVWGEAASDLKPVVNAAFSDSANLDAMLELMVRSGRPITDSLLTLVPEAFRQQPELEARPDVRAFYEYSACLQEPWDGPALLVFSDGRTVGATLDRNGLRPARYCITSDGLVVMGSETGVVEIEESRIVEKGRLGPGQMLAVDLEQGRLLQNWQVKEEVASRYPYAAWLQEHRRSLEPQPWRTEHQLGDLDLLRHQTAFGFTAEDLDLVIEEMAAQGKEPTYCMGDDIPLAVLSDKPHLLYDYFKQRFAQVTNPPIDPLREELVMSLEMHLGRRGSALRPDPSAASVLHLATPVLNESDLEALPSQGLATTTLTTLYGLDQGPAGLEAAVQRLCQAAEQAVQNGSQILVLSDRAAEGLSATTTFIPALLAVGAVHQHLLRLGVRLHCSLVIDTAQCWSTHHLACLIGFGASAVCPWLTWETTRHWLDHPKTRSLMERGKLPAIDAAKAQANVRKALEAGLRKILSKIGISLLASYHGAQIFEAIGIGADLIDLAFRGTTSRVAGLSLRDLANETLAFHAKAFPELNRTKLEFMGFVQYRSGGEFHLNSPEMAKALHAAVAAGPGYDHFATYRTLLENRPVTGLRDLLELRPAPTPLPIEQVESVESICSRFCTGGMSLGALSREAHEVLAVAMNRIGGKSNSGEGGEDPARYHPLTDVDADGRSATLPTLRGLVPGDSACSAIKQVASGRFGVTPEYLRSGQQLEIKVAQGAKPGEGGQLPGPKVDAYIGWLRNSKPGVALISPPPHHDIYSIEDLAQLIHDLHQVHPAAKVSVKLVAEIGIGTIAAGVVKANADVIQISGHDGGTGASPLSSIKHAGSPWELGLSEVHRSLLANGLRNRVLLRADGGLKTGWDVLMAALLGAEEYGFGSVAMIAEGCIMARVCHTNNCPVGVATQKEALRKRFTGLPEHVVNFFLYVAEEVRQLLSVLGVARLEDLIGRVELLHPRQVALAKTSALDLTCLLAPLPGSDDRSWLRHDSQAHGNGVILEDQLLVDPEVLAAIEQHGQVVRRLPIVNTDRSVGARLAGEVAARHGNKGFKGLLDLCFEGAAGQSFGAFNLQGMNLRLEGDANDYVGKGINGGRITVVPYAATRDPGNQVILGNTCLYGATGGELFALGRAGERFAVRNSGARTVVEGCGDHCCEYMTGGVVVVLGSTGRNVAAGMTGGVAFLLDEEDALAGLLNPEIVSVHPLETPEQEQLIKPLLEAHLELTGSRKAAEILANWPQWRSRFKVLVPPSEVATVGLLEREKLAMAS

SEQ ID NO: 34774 - protein, 390 aa, Synechococcus sp. WH 5701
MTTAAPSGRPSTGLIPPHGGTLVNLIVPAEQREAVKVGVDRVLECSHRNACDVELLMVGGFSPLLGFMHQEDYEAVVQGNRTTSGLLFGLPIIFDTADATIKVGERLLLTYQGQELAVLTVESVWEPDKVKEAKGCYGTTSLEHPAVRMIATERGRYYLGGALQGLELPQRVFPCRTPAQVRAELPHGEDVVAFQCRNPIHRAHYELFTRALHATNVSEGGVVLVHPTCGPTQEDDIAGEVRFQTYERLAAEVANPRIRWAYLPYAMHMAGPREALQHMIIRKNYGCTHFIIGRDMAGCKSSLSGEDFYGPYDAQDFARENAPELGMETVPSLNLVYTEEEGYVTAEHAQARGLHVKKLSGTQFRQMLRSGEEIPEWFAFRSVVEVLRSA

SEQ ID NO: 34775 - protein, 238 aa, Synechococcus sp. WH 5701
MRGFSRTGGPSTPAPIGLAAAANGASTLLDVMRGLSGCVIETVERGKTIFFPGDPAERVYLLRRGAVRLSRVYESGEEITVALLRENSLFGVLSLLTGQRSDRFYHAVAFTRVELVAAPAGSVRRAIEQDSSVGLLLLQGLSSRILQTETMIETLTHRDMSSRLVSFLLVLCRDFGVPGSEGITIDLRLSHQAIAEAIGSTRVTITRLLGDLRQAGLVQIDRKKITVFDPVALAKRFS

SEQ ID NO: 34776 - protein, 485 aa, Synechococcus sp. WH 5701
MTVAPHAPGRRRPRRLQEASLLEAPELLLRSIRGFSNSRTLTWLACVPLALFGLGVFNLSAHAAELPELTPAFLINNVWLLIAAILVIFMNAGFAMVEAGLCRQKNATNILTKNLIVFALAASAYWLIGFSLMYGEPVIPGWLFYGKGGPLGLFFDPTVTAEMVKDASLVPSVDFLFQVAFAGTSATIVSGLVAERIKFSEFVLFSLVLVAFIYPIAGSWQWNGGWLNQLGFIDFAGSTVVHSVGAWAGLVGAMLLGPRIGKFADGKTQAIPGHNLAIATLGCLILWIGWYGFNPGSQLAMDAAVPYIAVTTTLGAAGGGIAGTLVSQLTSGKPDLTMSINGILAGLVGVTAGCDGFSMPAAWVVGFIAGTLVVFSVGFIDSLGIDDPVGAWSVHGTCGIWGTLAVGLFNTDKGLLTGHGFGQFGLQILGVISYGLFALICSWIAWSVIGGISGGIRVSEQEEIKGLDISEHGMEAYPDFASTAN

SEQ ID NO: 34777 - protein, 332 aa, Synechococcus sp. WH 5701
MSALTRCLQEEAAAIAAAAGRLDAEQVDAALVLLDRCADQRAKLVITGVGKSGIVARKIAATFSSIGLMALYLNPLDALHGDLGVVAPEDVVLLLSNSGETQELLEILPHLRRRGTGRIALVGRVASSLARGCEVVLDGSVDREVCPLNLAPTASTAVAMAIGDALAAVWMERRGISPADFALNHPAGALGKQLTLTVGDLMVPTAKLHPLEEGASLSEVIAGLTGDGVGACWVRRADNDSLLAGLITDGDLRRALEQHAPAAWGELRATDLMTIDPITVAADLLAVEALERMERNRRKPIGVLPVLGEGGPMLGLLRLHDLVQAGLTPSAR

SEQ ID NO: 34778 - protein, 388 aa, Synechococcus sp. WH 5701
MKLSARAEALHPSLTLAIAARAKQLRAQGQDICSLSAGEPDFDTPAFIRQAASEALEAGATRYGPAAGEPALREAIAVKLSEENGVPTKAEQVLVTNGGKQALFNLFQVLLGPGDEVLLPAPYWLSYPEMVQLAGASVRLLPSDAEHGFRLDPQQLEAAITPASRLLVLNSPSNPTGMVLSRQELEAIAAVLRRHPHVAVVCDEIYEFLLAPGHVHHSFAAVAPDLSDRVFIVNGFAKGWAMTGWRLGFLAGPSAVVSAAIALQSQSTSNVCSFAQFGALAAVSGPRDCVVEMARQFSERRALLHQGLASLPGLTLQPPEGAFYAFPDVSAYGLDSMTFCNRLLNEVGLALVPGVAFGDDRCVRLSCAASPATLRDGLARLGHFISSL

SEQ ID NO: 34779 - protein, 645 aa, Synechococcus sp. WH 5701
MTQFNASESFACSIDLSAHPAQAPIQPIASDPITTTPSIQPSTLSSCVDLSALEGQSSAEATAVESTLIGPLDQPGEAAEEAPAGAFAGFGLGAEILAAVADCGYSDPSPIQKAAIPELMLGRDLVGQAQTGTGKTAAFALPLLARLDPQQRTPQVLVLTPTRELALQVAEAFNGYAAKLPQVRVLPIYGGADFRDQIVRLKRGVQIVVGTPGRVMDHMRQGTLDLSGLRCLVLDEADEMLRMGFIDDVEWVLEQLPQQRQVVLFSATMPSEIRRLSRKYLQNPAEVTIQQKGAENSTIRQRHLVVHGAQKLEALTRVLEAESSEGVIIFARTKAITLTVSEALEQQGYDVAVLNGDVPQNQRERTVERLRSGQVNVLVATDVAARGLDVDRITLVINYDIPFDSEAYVHRIGRTGRAGRQGDAILFLTPRERRFLGGLERAVGKAITPMEVPTNADINQSRLDRLRERVTALVGTPRSDEQELALLSEILQRVGSEISATPEQLALAALQLAVGDRPLLVQGAETWRQPTPSRERQRSGDDDRRGDRRSPSRTGGSRLDASTPPDADMERFRIEVGWQDRVKPGNIVGAIANEAGLNGRSIGRIQIFDTHSTVDLPSGMPEDVFNALRRLRVMNKELQITRHNS

SEQ ID NO: 34780 - protein, 107 aa, Synechococcus sp. WH 5701
MDSAVKQRIDSLLSSSPIVVFMKGSKLMPQCGFSNNVVQILNSLGLPFETFDVLSDQEIRQGIKEYSEWPTIPQVYVNGEFIGGSDILIEMYNSGELRETLTVALAS

SEQ ID NO: 34781 - protein, 383 aa, Synechococcus sp. WH 5701
MVPAESREGERRVAATPETVRRLVAKNSEVFIESGAGLEAGFSDEAFIEAGASIVAKGCPDTWSAAELVICVQPPVQDSDGGSGGLERLASGSLLVGLLDPYLNRALIERLSSRGLSTLALELLPRISRAQSMDVLSSQANIAGYKAVLLAAAELDRFFPMLMTAAGTVQPAKVLVLGAGVAGLQAVATARRLGAVVKVSDVRPAAKEQVESLGARFIDPPSREAPGETGGYAREAGAAFLEAQRQQLTNHLAEADAVITTAQVPGRPAPLLITEEMLKALRPGSVVVDLAVSTGGNCAGSQPDRTVEIGGVRIIGSSNLPASVPHHASALYARNLAAFLEPLFSDDGLQLNPEDPLLDPCLISHQGACRRPELWPSLKEVAA

SEQ ID NO: 34782 - protein, 590 aa, Synechococcus sp. WH 5701
MDALHRHGVTDVFGYPGGAILPIYDALHKAESRGWLKHVLVRHEQGGTHAADAYARATGRVGVCFGTSGPGATNLVTGIATAQMDSVPMVVITGQVPRAAIGTDAFQETDIFGITLPIVKHSWVVRDPADIGRIVAEAFLIASTGRPGPVLIDVPKDVGLEEFDYTPVEPGTAIPAGYQVPGGPAPEAIAQAIELIRQARRPLLYVGGGAISSGAHTSLIALAERFQLPVTTTLMGKGAFDERHPLAVGMLGMHGTAYANFAVTECDLLIAAGARFDDRVTGRLDSFAPRAQVIHIDIDAAEVGKNRLPEVPIVSDVRLALEALLEASVGESDNGRTGPWLERISRWKRHYPLVIPTPEGAIAPQEVVLALRDLAPDAFVTTDVGQHQMWAAQYLNNPPRHWISSSGLGTMGFGLPAAMGVQVAFPDDQVICVAGDASILMNIQELGTLSQYDLPVKVVILNNGWQGMVRQWQESFYGERYSASEMTRGMPDFPRLAEAFGVRGVGISERASLREQLAEALAHPGPALIDVRVRRNENCYPMVPPGASNAQMVGLPSHPELAIDTTRQCGSCGFSTESAHLFCPSCGAKL

SEQ ID NO: 34783 - protein, 397 aa, Synechococcus sp. WH 5701
MTSAGPAGSAAQPLYLDASAGAPPAEAVLQAMAAATRTAWANPSSLHGYGLAAADSLERSRQAIAALLGAEAQQLTFCSGGTEAAHLALLGAAAALPPGRLLISSVEHPAVEAAAERLIGSGWTLERLPVDHLGRLRLDRLEALLEPPTRLVSLIWGQSEVGTLQPLQAVAERCRRAGVILHSDAVQVVGHRPIDFASMQVDLLSFTAHKLQGPRGIGALLARPGLELRPMIEGGGQEGGLRSGTEPVVLVAGFAEALRLAQRRLELNAGQDPLEPWRDGLLQSLISLGGVELTGCPSQRLPHHLSLLVRDAGGRPLPGRRLVQALWRQGLAVSSGSACQRGRAGGSPVLQAMGYSPDLAASGLRLSLGPWLSQEQLDSVPARFERARQAVVAEQLG

SEQ ID NO: 34784 - protein, 641 aa, Synechococcus sp. WH 5701
MNQRWRLFALWLLPLGVALFLGWQVLGNGGASRFTPEGRTDTVAPRNAAVARMSYGRFLDYIEAGRVTAVDIFDGGRSAVIEAVDPDLDNRVQRLRVDLPGLAPELINNLKAQGISFDIHPPRTTPPALGILGNLLFPLLLIGSLIFLARRSSSMPGGPGQAMQFGKTKARFAMEAETGVMFDDVAGVEEAKEDLEEVVTFLKQPERFTSVGAKIPKGVLLVGPPGTGKTLLAKAIAGEAGVPFFSLSGSEFVEMFVGVGASRVRDLFKRAKENSPCLIFIDEIDAVGRQRGAGIGGGNDEREQTLNQLLTEMDGFEGNSGIIIIAATNRPDVLDSALMRPGRFDRQVSVDAPDIKGRLSILKVHSRNKKLAEDVSLEAVARRTPGFTGADLANLLNEAAILTARRRKEATTLAEIDDAVDRVIAGMEGKPLTDGRSKRLIAYHEVGHALVGTLVKDHDPVQKVTLVPRGQAQGLTWFAPDEEQMLVSRAQLKARIMGALGGRVAEDVVFGHAEVTTGAGGDIQQVASMARQMVTRFGMSDLGPVSLEAGNQEVFLGRDLITRSDVSDSISRRIDEQIRSIVDLCYRDTQALVASHRDCMDRLVEMLIEKETLDGDEFRAVVAEFTTIPEKDRFSPLLPAA

SEQ ID NO: 34785 - protein, 372 aa, Synechococcus sp. WH 5701
MGHPVPAARGQAAVLVLNAGSSSLKAALFSRDGDCLWREQRSWCPDPHSGDGQGSGSMEQVLDHWLPPALAGQDSDLLLAAHRVVHGGERFTAPTRLDPDVLGVLEELVSLAPLHNGPALRLMRWLIRWRPHLPQWACFDTAFHSTLPPEASTYALPQAWREQGLRRFGFHGLSHQHVSETVSHRCTGREPAAAGPLRLISCHLGAGCSLCAIRAGRSLATTMGFTPLEGLVMATRSGSVDPGLLLHLLRQGLSPARLEQSLQSESGLLGLSGLSGDMRELRRAAEAGHDGATLALAVFRQSLLCGIGAMAACLGGVDVIALTGGIGEHDDALLADLEDALAWLRPFELLRIPADEEGVIARSCLARMQAAP

SEQ ID NO: 34786 - protein, 378 aa, Synechococcus sp. WH 5701
MIGYISDNLLLPILDFFYGLVPSYGLAIIALTVVIRLALFPLSAGSIRSARRMRIAQPVMQKRQAEIKSRYASNPQKQQEELGKLMKEFGSPLAGCLPLLVQMPILFALFATLRGSPFADVPYTLNLKVLPADQIAAVEIKPFNSASHSIFITETSHVPVVASLEAGTKLGIGDSAQVNLHTKDGQPFSSVLEGVENGAKFAPAWSVSKGEGVVRVSESGLIEAIAPGDATVEATVPGLAARSGFLFIKALGQVGFYTDGAVNWDIAILVGAFGASLFISQILSGAGMPPNPQQSTANKITPVMITGMFLFFPLPAGVLLYMVVANIFQALQTFLLSREALPENLQDILDQQLSQQTVAVAASSGGAERLPFEPKGKK

SEQ ID NO: 34787 - protein, 579 aa, Synechococcus sp. WH 5701
MLAPPSAGFRGLLPLLKPHSRRLVAGGLCMLVFVACWPLLAALAGQLIPAIGAGDFPRVLRAISLALAVFLVQKLAQFGQDTLLASPALQVSQALRSQLFARLQRLEFSALEKLSAGDLTYRLTEDADRVGEVIYKTIQDTTPSLLQLVVVFGYMVFLDWKLSLATLLLAPLVAVMVSGFGARVMGAAERSQKQVSELAGLLAEAIGGLPLVRAFAAEAWLQNRFEQEIDLHRRARYRTLRLLALQHPVVGFIEAAGILSVLLIGAARIQAGGLDSQGFSSYVAALLMLIDPISHLTTNYNEFQQGQASLNRLREIEREPMEIPDSPGAQPLGPVRGALRLEHVWFGYDPEQPVLRDLDLCAEPGQLVALVGPSGAGKSTLFSLLLRFNTAQSGRVLLDGQDLAGLRAADLRRAVALVPQQSRVFSGSVAEAIRFGRPASDEHVRQAARLANAADFIEALPEGYHSRIEERGSNFSGGQLQRIAIARAVLGDPAVLLLDEATSALDAEAEEAVQQGLKQAMAGRTVLVIAHRLSTVQGADQILVLEGGGIIERGSHDQLMARPGRYRELCDRQLIRVAA

SEQ ID NO: 34788 - protein, 385 aa, Synechococcus sp. WH 5701
MRISTAALRQSDARMFTLVVQGLKAAGTRTAERCFSIPLSQMQTTLRMINQQGGRLLSVTPADQASAAPTPAPAPTAANAAPAPVTTPVKHEAPPVNLYKPKDPYVGTVLGNYSLLSEGAIGRVNHITFDLSEGNLHYVEGQSIGIIPDGVDANGKPHKLRLYSIASTRHGDNLEDKTVSLCVRQLQYEKDGETINGVCSTFLCDIEPGAKVKITGPVGKEMLLPPDEDANVIMLATGTGIAPMRAYLRRMFDPGERAKNPGYQFRGKAWLIMGVPTTPNLLYEEDLQGYLAEFPDNFRYTKAISREQQNPSGGRMYIQDRVAEHGDEIFTMIEDSKTHVYMCGLRGMEPGIDEAMSKAAESKGLNWSELRPQLKKADRWHVETY

SEQ ID NO: 34789 - protein, 336 aa, Synechococcus sp. WH 5701
MLTPAVTSFLTAERVEQDSKPHDTRRLRLFSGTSNPALAHEIASYLGVPDGPRVIKRFADGELYIQIQESIRGCDVFLIQPTCAPVNDHLMELLIMVDACRRASARQITAVIPYYGYARADRKTAGRESITAKLVANLLAQSGVDRVLAMDLHSSQIQGYFDIPCDHIYGSPVLVDYLSARDLGEMVVVSPDVGGVARARAFAKRMHDAPLAIIDKRRSDHNVAESLTVIGDVAGKTAVLIDDMIDTGGTICQGARLLRREGARRVLACATHAVFSPPAIERLSEPGLLEEVLVTNSIPISDERSFPQLKVLSVAKMLGEAIWRIHEESSVSSMFR

SEQ ID NO: 34790 - protein, 458 aa, Synechococcus sp. WH 5701
MLLLSALRQAPARLDLHLPAHGRGRGLAPGLRRLLRRRPGRWDLPELPEIGGPLEPGGAVAADQAECARLCGADRCWFGVNGASGMLQVALLALARPGERVLLPRNLHRSLLHACVLGGLRPVLFDLPFDPATGLWLPPTPAWLQQRLEQSPPLAALVLVHPTYQGLAGDLPGLIAEAHRRGLPVLVDEAHGAHFGQPGLPMGAMAAGADLVVQSLHKSAGGLAQSAALLLRRGRVSEEAIERSLLWLQTSSPSALLLASAAAAFAHRHSPAGARGLRLALTRANRLQQALEAASLPLAANQDPLRLVFHAAALGINGLAADAWLLQRGVIAELPEPGCLTFCLGERPPRRALRLLPAQLKQLRQALGGAPLPCFSSPPIPALMEPELTPGEAWRLPQQTLPLEQALERLAAEPICPYPPGIPLLIPGERIDGARLEWLREQRRLWPGQIADTVTVVA

SEQ ID NO: 34791 - protein, 395 aa, Synechococcus sp. WH 5701
MPASDASMVTALSQHAIAPARLVRGPSAWSASLDALPSLCRRPLLLGRSQATAHLRDQACSDLLRLGLEPLSATLQFDCCEDDLRRLAAEAQTGRCDGVIAMGGGKVLDAGKLLAHRLGLACITVPTSAATCAGWTALANLYSVEGAFRSDVALDRCPDLLIFDHNLVLQAPTRTLASGIADAIAKWYEASVSSGSSGDGLVQQAVQQARVLRDQLLLEGEAAMAEPGGEAWVRVAEASALTAGLIGGLGGARCRTVAAHAVHNGLTQLPACHHLLHGEKVGFGVLTQLRLEELLGGHRLASQARRQLIPFFRALDLPLTLEGLGLAEASLNDLNAVCAFAVLPGSDLHHLPFPVNANDLLTAMVSTTAESHPAESAPSAPAPCAEGSLCPESSP

SEQ ID NO: 34792 - protein, 398 aa, Synechococcus sp. WH 5701
MEVGSFATFNIAIVVLAIGRWLNQRFTVLRTFNIPEPVSSGLLVCLLLALVHAVSGLEINFNLETRDFLLLYFFATIGLNADVKTLLAGGRPLLVLVVLTVAFMILQNLTGVGVASLLGFSPLNGLLGGSVSLLGGHGTAIAWAPRFAREHGIDNAMEIGVACATLGLVLASLIGGPVARFLIRRHQLRSGPADGPTERADTPTDPRPVDFFSLLRTLFWLNMSLALGEGLHEALKAMGSNLPLFVCALFSAILLTNTVPRLIPRLIWPAQTRSLALISEISLGIFLTMSLMSLQLWTITELAGAILIILSAQFLVAVLFTVMVVFPAMGGSYDAAVICSGFGGFSLGATPTAMANMAAVTHRYGPSPQAFIIVPLVAGFFVDISNAVVIQRFLNWLG

SEQ ID NO: 34793 - protein, 299 aa, Synechococcus sp. WH 5701
MLLKRLLPLLQLLACLALAAPASAGSLLQSVAASGVLVGGTSRDAFPFAYQNEEGQLVGYSIDMMNLIREEIERQTGRPIKLKLVPLDTDQRLSSLESGAVNLVCDASSFTWSRDEKVDFSVSYGITGTQLLVPRGSGLSSPESLAGKRVGVLPRTTSVLAVASRQPAASLVLLKDRQEGYEALQQGRIDAFADDGMLLYAWLQRQGGQAPFKVSADTYSREGIACMVPQNNSSFQRVVDLALIRYMQGFLRQQPRERGIFDRWFGPQGKTPLTQDVTGLFTETMQLMVDFKEEVPSKP

SEQ ID NO: 34794 - protein, 239 aa, Synechococcus sp. WH 5701
MVVGLMAPYANAALATTLQQGGLSAMSLELLPRISRAQSADALSSQANIAGYKSVLLASSALDRYFPMLMTAAGTVQPAKVVILGAGVAGLQAVATARRLGAVVYVSDIRPAVKEQVESLGARFIEPPETDDKPAESGGYAKQASDAFLAAQRQQLSDQLAEADVAICTAQVPGRRAPRLISEDMLDRMRPGAVVVDLAVSQGGNCADTVPGQTVDRKGVKLIGGNDLPCTVPNHASAL

SEQ ID NO: 34795 - protein, 248 aa, Synechococcus sp. WH 5701
MTATAPSKETILVVDDEASIRRILETRLSMIGYNVVTACDGTEALELFPNCMPDLVVLDVMMPKLDGYGVCQELRKESDVPIVMLTALGDVADRITGLELGADDYVVKPFSPKELEARIRCVLRRVEKEAIAGIPNSGVIQVSDLRIDTNKRQVFRNDERIRLTGMEFSLLELLVSRSRKPFNRGEILKEVWGYTPERHVDTRGGEVHISRVPSQLEKDSPHPELILTARGTGYLFQRIIDSVASEGP

SEQ ID NO: 34796 - protein, 169 aa, Synechococcus sp. WH 5701
RLRSLEADRRGRLTSVVSSRGLIERLVPTADLVIGAVLTPGGRAPTLVDEDLVQAMRPGSVIVDVAIDQGGCIATSRETTHTNPTVSIHGVQHYAVGNMPGAVPFTSTEALVSVTLPYILGIAGRGLEEAFTERPELLSGLNTVQGSICHPGVAKALGVTPRHPMACLR

SEQ ID NO: 34797 - protein, 363 aa, Blastopirellula marina DSM 3645
MDGAALRLTAETPQEEVLRFGRTIIQQEAAALSAIAERLDARFGQALDLVMQCPGDIIVTGMGKAGLIGQKIAATFASTGTPSHFLHPAEAIHGDLGRVDEKDVVLAFSQSGETDEIVRLIPCLKSLGAQIVAVTANENNTLARAAKIVLPLGPIVEAGANRLAPSTSTAAMLALGDALALTCSWRRGFRPEDFARYHPGGSLGRKLALVEDVMRPLTECRISRYDQLVRDVFVSACRPGRRTGAIMLVDEQGKLAGIFTDSDLARIFETGRTELLDQPISIVMTQSPKTVTSGVRVLEALSAIAKSKISELPVINDTGEPIGMLDITDLVDLAASSPSGETAIAEPETPWTVPFPNQNGSDA

SEQ ID NO: 34798 - protein, 328 aa, Blastopirellula marina DSM 3645
MHSASKMREIKIFSGRANPRLAGDICKFLNIPLGRITLGEFPDGENACKIEEDVRGRDVFLIQPTCPPVNNNIMELLIMIDSCRRASAERITAVIPYFGYARQDRKDEGRVPITAKLVSDVITAAGADRVLTMDLHAAQIQGFFNVPVDHLYAAPVLNHFFQALNIPEDELVIVSPDAGSIKRAVSHHRRLGGRLAICDKRRHSASDTTQENIIGGPVEGRTAIIFDDMISTAGSICGAAKTTFEAGAKEIYIAATHGVLCGDAIARLQAAPIKEIILTDTIPHQSGHLLPNTKILTVAPLLGEAIKRIHNDESISAIFREDFGAFQG

SEQ ID NO: 34799 - protein, 446 aa, Blastopirellula marina DSM 3645
MSNDAVAALRAALEVSPHNIPLRLHLAQTLAELGRTAEVEAELKEALTYEPQNAEIKLALARLFVRTAKSSQALVILEEIAQRGEASAEARVVLARLLLAEGEVRSAVAHYKEAIETDPDVEDAELSAQLGVGAAWQDSDVSEGRLREMADAAPEPVDVDAPERPKIKFADVGGMSAVKEDIRMKAIYPLEQAEMFAAYGKKVGGGILMYGPPGCGKTYLARATAGEINASFLSIGINDVLDMWIGQSERNLHAIFEQARGNAPCVLFFDEVDALGARRSDMVSGAARQIINQFLAELDGVDSNNEGVVILAATNAPWHLDPAFRRPGRFDRLIFVPPPDAPARADVLQVQLRDKPQKGIDAAKIAKSTDGFSGADLKAVVDLAVEAKLTEAMRTGVPLPLTTDDLQAAAKRVNPSTKEWFATAKNYAIFSNQGGVYDDILKYMKL

SEQ ID NO: 34800 - protein, 473 aa, Blastopirellula marina DSM 3645
MSLPQIVIVGRPNVGKSSLFNWLAGRRLAIVDNVAGVTRDRMTYLMQWRERYFEIVDTGGIGVNDVDDLTDEIEQQIAIAIDSADLILFVVDTREGILPLDQEVARRLRHVNKPIVLVANKTDEQHMDHDADQFYQLGRGKLVPVSTLQNRNKDDLLNVIADRLPDAEEGEQTGEPEMKIAVVGRRNVGKSTFVNTLARAERMIVSEVAGTTRDSVDIRFELDGKSFTAIDTPGLRRRVSVKTDVDFYSTHRAERSIRRADVVLMFFDASQQISKVDKQLIAYIAENYKPVVFVVNKWDLYHDKMPTDRWATYLHDTFRNIPYAPVAFITGQTGKNVKALLNHAQMLFKQSLERITTGELNRIVRFAIEKTPPPLYKLRRPKIYFATQIGAQPPTIVLKCNSPKAFSDGYRRYLLSMIRDHVSFSEVPIKLYLHRRQEADFKGDAQSGDTEEPQDSDSGNAAVSDLLNESKDE

SEQ ID NO: 34801 - protein, 305 aa, Blastopirellula marina DSM 3645
MPPLSITPGKTKIGWIGTGVMGASMCGHLIDAGFSATVYNRTPAKAQGLLDKGAAWGETPQAVAQQSDVVFTIVGFPTDVRAVILGDDGVLAGSKAGNVIVDMTTSQPSLAIEIAKTAADKGVTSVDAPVSGGDIGAKEARLSIMIGGDEAVVAALQPCWEAMGKTIVRQGGPGAGQHTKMVNQTLIASGMVAVCEGLLYGYKAGLDLETVLQSVSSGAAGSWSLTNLAPRIIDNNFDPGFFVEHFIKDMGIALAEARRMGIALPGLALAEQLYQGVKSQGHGRDGTQSLFLALSQLSGVDWRNR

SEQ ID NO: 34802 - protein, 590 aa, Blastopirellula marina DSM 3645
MKKVNATTATDTGLMLGADIMIESLVRHGVDVIFAYPGGCSMPLHQALTRYKDKIRTILPRHEQGGGFAAQGVARTTGKVGVCMATSGPGATNLVTAIADAKLDSIPMVAITAQVPRAVIGSDAFQETPIVEVCRGITKHHYLVTDIADLTRIMKEAFHIASTGRPGPVLIDIPKDVQLEQIVPDWDCAMNLPGYNYEARTAKPEQIKQIAAAIKRAKRPMIYSGGGIITSGASEELRELVEKTGIPITTTVMGLGSFPGDDPLSLDMLGMHGTVYANYAVQNCDLLISLGVRFDDRVTGKLAEFAKHAKIIHIDIDPSEINKNKLAHFPVVSDLKPALRMLCDIVEKPEDISEWVAQCAKWKKDEPLKYDTSFEGILQQHAIAELNDICKERDTIISVGVGQHQMWAAQFYKFKKPRTWLSSSGLGTMGFGLPAAMGAQVAFPDALCIDIEGDGSFTMNIQELATCFCEKLPVKVMLLNNQHLGMVVQWEDRFMSGNRAHTYLGPVHHPEATGDGNERYAAERYPDFVMIAKGFGCGGATVSRKSELRAAIEEMINYDGPYVLDVQVPYQEQVLPMIPSGMTVNDIIKE

SEQ ID NO: 34803 - protein, 321 aa, Blastopirellula marina DSM 3645
MPKFKALLTDFAWQDLEIEHKTLDKAGVELIVATHTDENALATLAAEHQVDAILTNWANVTAKVIAASPNLKIVARLGIGLDNIDVAYCTQQKIPVTNIPDYCVIEVAEHTLALLLACARKIAMYHHETQSGTYDLQAGPLMRRVSGQTLGIVGLGQIGVLLAERALALGLKVIATSRSGKTMPGVETVDLERILSESDYISLLIPATAETRHMFGAEEFQKMKSTAYLINTARGALVDEEALAAALEANQLAGAALDVQDPEPCDLTKPPMNDPRVIVTPHAAFVSVESLENLRGRATKQVVDLLEGRTPENVRNPEVFG

SEQ ID NO: 34804 - protein, 335 aa, Blastopirellula marina DSM 3645
MTNASPHDQLMQMICGYQVSQIVLTVGELGLPDLLKQGPTSVEDLAQACSANPDRLYRLLRAAASLGVFTETEPRVFAATPLSEILQSDHPTSLQPLTLMMGSEHYAAWGRLRRAVQSNENEFEQEFGLPFFDYLSQHPESAAIFDAAMTSIHGRETAAILEAYDFSQFGLIADVGGGNGSKLIALLTKHPQVRGMLVDLPHVVERAAPNFVAAGVNERMTLIGGDFFVEVPSGADAYMMRHIIHDWDDEKSTLILKNCRAAMQPGQKLLLVEYVIPSGDEPFFGKLLDLTMMLIPGGKERTEAEYRDLVAGCGFQLQRVIRTDQPISILESTAI

SEQ ID NO: 34805 - protein, 393 aa, Blastopirellula marina DSM 3645
MDTSVILGWLQDEGYEVHAVYVDLGQPCEDRQAILEKAKTCGAKTSRIVDGQEEMCRDFAFPIAQWQAKYESIYLLGTSIARPLISKICLQVAREVGADAYVHGATGKGNDQCRFQLAAEALDPSVKIIAPWRMEKFRALFPGRNAMIKYCEEKNIPVKASMAKPYSSDENCLHISYEAGNLEDLMVNGVEAVDFGMTVSPQEAPDQVENVKITFEKGVPVTVNGEKCSPLEVVLKLNEIGGRNGVGRIDMVENRFVGMKSRGVYESPGMTILYDALLVLEQLTVDRDLIHLRDQLAPVVAEMVYYGFWYAPKMDALLAFGKEAMKHVTGEVSLNLYKGNVMVDGRSSKNSLYDEGIATMEGGGSYDQTDAEGFLRIQGLPSRVQGRVTPRAY

SEQ ID NO: 34806 - protein, 466 aa, Blastopirellula marina DSM 3645
MSIVESPVATGNVLVVDDNARARQSIVDVLEMLGHRGAACSSAHEALKRMETIDYDAVVTDLQMPGMDGLELVRQIRRRDAHIPIVMVTAHGSVSTAVEAMRFGAADYLEKPLNADRLEAVVNRVLESAASGDRATVATPGETNQVAMIGESRAMQQVRQQIAQVAPTDETVLIIGESGVGKELIARTIHESSRRAGRALISLNCPVLSAHLMESELFGHTRGAFTSADSARVGRFELAEQGTILLDEISEIDLSLQAKLLRVLQERCYERVGSSETLETDVRVLATSNRDLPGEVTAGRFRRDLYYRLAVVPIELPPLRQRRDDIPLLVDYFLQQTAARLEKPVFDMRAEALDLLMRHDWPGNVRELENIVTRACVLAIDGQISADDFSSWLSCEAREETGDSQDAPVGVKLDEMERRLISATLEHYDGHREKTAAALGISPRTLSNKLRSYGLAPRAKTFARAI

SEQ ID NO: 34807 - protein, 286 aa, Blastopirellula marina DSM 3645
MNTDLPSEEPKKSPNQILREELHEGMEALSRSSTRLFLSSISAGLDLGFSFFLIAVVRTLAADQVSPPVVELWTALVYPLGFILVVMGRSELFTEQTTLAILPLLSGQATWKMVMRLWGIVYIANLLGAAIFAGIVVLVGPNLHVIDPQVFEEIAEKIVSYDWWVILLSATLAGWLMGLLSWLVVAGRDTISQIVIVFLITATIGLGHLHHSIVGTVEVLAGIFQGDRTTFADFAHFLLWTTLGNAFGGGFFVAVLKFGHARKSRHDGSIDEDGNVALHETDKNDQ

SEQ ID NO: 34808 - protein, 368 aa, Blastopirellula marina DSM 3645
MVNLAATMKDVIHLSIGQPDFQCPQHIVEAHIDALRAGHLGYTMDAGLPELLTELAKYYTARTEREITEDNILITTGATEAMYLAISVTSAPGRQFLIPDPTFPLYAPLVRMHGGEVKAIPTRAENGHQLDPQEVIDAIGPRTFAIILNSPSNPTGTVYPPETIEAIVQEAAYQGIRVISDEVYDHLILDDLEYASVLRHTSDLDHVMIASSFSKTYAMPGLRIGWIISSQGAIKMLRRYHMFTTTVANTPAQWAGVAALQGTTACVDEMVREYRRRRDRVVQLVSETPNLTGYWPQGGFYIFPSLPRTCNGSTLALRMLEEIGVCVVPGEAFGESCINSLRISYSTSMETIEEAFQRMIPWMAKQEM

SEQ ID NO: 34809 - protein, 1259 aa, Blastopirellula marina DSM 3645
MSAADPSLDIAWMLICAALVMLMQGGFCLLESGMARAKNSFNVALKNLIDFCVSSVIFWAFGFALMFGASYHGLFGTTNFLLEDSASPWLMAFLFFQLVFCGTATTIISGAVAERIRFQGYLLISLFVSAIIYPLFGHWAWGGAIEGTPTGWLAQLGFIDFAGSTVVHSVGGWVALAAVVVIGPRIGRFDGGEDRPISGHNLTLATFGALVLWFGWFGFNGGSTLSMNSDVPKILVNTNLAGAMGALTCLVLSKWVHKRPDVGQVMNGAIAGLVGVTASCHILAPWAAALVGAGSGLICSGVTYLLPKMKIDDVIGAVPAHACAGCFGTVALALLADPVHFGEGVTRWQQLGVQLLGVGTCFVWAFGGGYAFISLANLVMPFRVPRDHELRGLNISEHGASTELIDLLTDMQRQRNLGDFSDDVHVEPHTEVGQIAAEYNRVLAKVNCEMKQRSEAERRFREIFENAVEGIYQTTPEGFFVTANPALARMLGYPDLASLRDDIKNVATDVYVNRDRRDEFVDEIHQNGVVFNFESEIRRGDGTFAWISENASARRNQNGDVLYYEGTVEDITEHRKALQLTDEIKAAEAANEAKSTFLASMSHEIRTPLNGVIGFLDLLHTTKLDDQQGRFVELAKSSASSLLHLINDILDLSKIEAGGIELEQTEFVLTDLIESVPEMFAPQCRMTGLELNSSVATDVPQAAIGDCERIRQVLVNLFANAVKFTETGGVYLRVERERSVASSHDAIARIRFSVEDTGIGVPRSKMQRLFKAFSQVDASTTRSYGGTGLGLAICKQLVELMGGEIGVESEVGKGSTFWFTLPLQAIERSTCNLIPNIQGLRVLAVDDNHMNLQVIKEQLQSWGVEVSTAGNGRRALALLEDAAKRNVPYQLAILDHLMPELDGLRLAHLINDHQMLHETRLLMLTSYEHTIPHAELKKLEMVCLPKPVRQTRLLDALVALTGERSPKQKVEKVENQQPVRERAPLEGAILVVDDNEINRIVAKEILQSEGFQVSLAENGRQAVEKIQSGQFDLVLMDCEMPEMDGFAATRMIRNLAENGHPELANLPIVALTAQAVLGDKERCLAAGMNGYVMKPVNRSELIDTIVDCLSRKDSSVAEMDLLSLEEETDHLEEFVIDPTEIESSIDVDDLLARCGDNDDLARLILNKFRDRSTKDAAALAEEVAAGRADAVAQLAHSLKGMAANISAKQVAAAADLLEQAAKASQTEELADLFSSVVARLETCESAIDRLLAGTEIGER

SEQ ID NO: 34810 - protein, 121 aa, Blastopirellula marina DSM 3645
MIRTFLKSKIHRATCTEACLDYEGSVTIDSLLMDAADLLDHEQVDIYNITTGSRLTTYAILGEPGSGVICINGAAAHLVNPQDLVIIASYAQYNEQELADYAPIVVQVDQRNQIMTPVEKT

SEQ ID NO: 34811 - protein, 383 aa, Blastopirellula marina DSM 3645
MTSADPIYLDNNATTRLAPEVAQLLGAAFSHGYVNSSSQHALGRRSRAALERSKEQILAGLGAKTAGFASDEFLLTSGGTESNNLAIFGLVKPQPGRVILSSIEHPSVSAAADLLRLRGYDVQTIAALRTGVVDVEHFRELITPQTQLVSVMLANNETGVLQPVAEIAAICREKGVKVHTDAVQAVGKIPVSFRELQVDAMTITAHKLHGPRGVGGLIVRHSVQLSPQLHGGGQQLAQRPGTEPIEMGLAMAEALRISIAAAPSYQALVGLRTELEAALRQIDPSCVIHGADSARLPHTVSVSFPGIDRQALVMALDMSGVCISTGSACASGSSERSPVLIAMQLENEQIESAVRISLGRDTTRDEVLEALRRISKCVNDLRR

SEQ ID NO: 34812 - protein, 754 aa, Blastopirellula marina DSM 3645
MNRWSILPAALFVFGFGPSSLRADEVVEIVAATEPSSLDYVWVLLAASLVFLMQAGFMCLECGMARAKNSINVAVKNIADFLISVAAFWLFGFGIMFGASYYGLFGASDFCFSVGDNPWLAVFFVFQAVFCGTAATIDSGAVAERTRFVTYLTMSLICSALIYPVYGHWAWGSFFHGGAGGWLEQLGFIDFAGSTVVHSVGGWVALAGVICIGPRIGRFAKDGAPRKIPPHNLLMVFLGTFLLFFGWFGFNCGSTLAATTDIAGIAANTMLAACFGGLATSVLSWLGPTKRPEPDMIANGVLGGLVGITAGCASVDTMGAAAIGVGAGFVVFYGTWFLEHVLKLDDVVGAVPVHGFCGAFGTLAVALFIQSDKLPEGMTHLSLLQVQAIGVGAGFLWAFGVAFLILQALRLCMPLRVSEEDERIGLNVAEHGSVSSLLDLAEAMQRATRAKTYDHTLLVEVEHGTEVGDLARCYNELIETIRHEHSSAIQAMQNLEQQRNRIKNGLLSYQSNVEQNVAAIQSQNIEIERVLKLSSERSQQVTSSVRSVFTQIDGLVKSLREVAQQSDDSRQATDLGVSHSTESQQTIEKLDRSAAEIETVLALIDDIAEQTNLLALNATIEAARAGEMGKGFAVVAGEVKSLASQSSASARQISERIAAMQTDSQGAVKKISETLEVIQQVSEISSRVGNSIRLSMDEHEQASGNIHAIGGDVVQMIEEMMTGLTEVRQGTTDIAARVRQSYEELEGVLAGSEA

SEQ ID NO: 34813 - protein, 370 aa, Blastopirellula marina DSM 3645
MIVGIPREVKRDEYRVAILPVGVEELTRAGHRVLVQVGAGDGSGIPDEDYVASGGVMVEDAATIFGEADMIMKVKEPQPEEFPLIRAGQTIFTYFHFAASLELTEAMLHSGAICVAYETLRDSAGRLPLLTPMSEVAGRMSVQEGAKYLERPQMGRGILLGGVPGVKPAHITILGGGIVGANAAKIAAGFQADVNILDINMDRLRYLDDVMAANVNVLYSDRHVIREQLRLADLVIGAVLIPGAKAPNLVTREDLKIMKPGSVIIDVAVDQGGCVETTKPTTHSDPTYIIEDVVHYCVANMPGAVGRTSTFALCNVTLRWALEIANLGAEKAASLSAPLASAMSICRGEVTHEPVAKTFGMTYSPKFDLN

SEQ ID NO: 34814 - protein, 574 aa, Blastopirellula marina DSM 3645
MPSFSLDFWDYVVFAGFFLALGMIGFWAGRGEQASSQDYFLAGRKLPWYVVGGSFIASNISSEHFIGMIGSAVVFGVCVSLMEWANVVTFSLLIWFFIPFLLATKVFTIPEFLEKRFSLSIRQMFAFVTVLSNVVAFLATVLYGGGLALQSLFGWSLWFSIITLGIVAGVWAIYGGLSSVAWTDLFTVVIMILGGVLVSVLGLQALSGDEGSLWDGFTLMLERNQEKEGQWAEAVNRHLAHLTNDDSYNRLSLYQGVTHPITPTISLIPLLLSVGVWYNVLNQFMIQRVLGAKDEYHARMGIVLAGWVKVFFPLISVLPGMVLFALHPEIMLRPWDEVKPAADQGYVNLIQTLIPAGLRGLLLAALFGAIQSTINSVLNSTSTILTLDIYKRLLAPEASDKQLVRVGVISSVVVLAIAIILGGFVGEIGGSLFEYAQSLYAFFAPPFAAVFLLGILWRRINSAGALAAICVGFASGILMKLYLHFDPSAPAWLSPYWNQAAINWLLCVAVCIGVSLTTSPPRADQITDQLTFNWSRLNLFNNLGDHWYTSVVTWWGLFVVVMAALFITFSGVVF

SEQ ID NO: 34815 - protein, 199 aa, Blastopirellula marina DSM 3645
MSYACGALFLDRDGTINIEREYLADPAQLELLPGAAEAIAAANRAHVPVIVVTNQSGVARGMFPESRIAEIHRRLDQLLAEQGASIDAYYYCPHHPKSASAVYRIHCECRKPRAGMLYAAAAQHGLDLHESVLIGDKPSDLGIGRFAGCQTILVRTGYGQETERQLPAAVPSLIGRFDSLLPAVDFWLQGRSDKARTAA

SEQ ID NO: 34816 - protein, 335 aa, Blastopirellula marina DSM 3645
MFVDRVVIEVEGGSGGDGCMSFRREKYVPNGGPDGGDGGSGSNIIMVAEDGVDSLMAMSHIKHWRGQRGNNGGPANRTGKSAEDVIIKVPLGTVVIEADAGFVMKDLNVAGEQMIAARGGSGGRGNLSFKNSTNRAPRQSTPGGKGERRKLILELKSIADIGLIGKPNAGKSTLLSRLSRARPEIADYPFTTKFPNLGQVQIDYDRTFVLADIPGLIEGASEGVGLGHEFLRHVERAGILIHLVEPAPVDGTDPIENYQSIRHELMQYDADLAARPEILCVTKAELPEGKEVRDKLAEITGGEVLLISAVTGENLNVLLNRAGDELDRARQKAKS

SEQ ID NO: 34817 - protein, 489 aa, Blastopirellula marina DSM 3645
MVVAAPLRAQDGAATEEAAEGAPAAEMAAEEEVEEAEAPPTIESLSADLAAFQGDVDTLWTCLAAFLVFFMQAGFALVECGFTRAKNACNIIMKNLMDFSVGSLVFWLVGFGLMFGATNGFCGTTLFIFDGASDAALETNSNVGFNWAFLIFQTVFAATAATIVSGAMAERTKFVSYLCYSFLITLIVYPIFGSWCWGGLYAGGGWLEGMGFLDFAGSTVVHSVGGWAALAGAIVIGPRIGKYTADGKIKPIPGHNIPLAALGVFILWLGWFGFNPGSTTAVGGGSFAYIAVTTNLSAAAGAISALAVSWIMFKKPDTSFALNGALAGLVGITAGCDIMSPMFAAVTGLVAGVLVVFSCVFFDKIKVDDPVGAVSVHGVCGAWGTLAIGLWAGDVGILTGGGSAQLITQAIGVAAGFGWAFGTSLVIFLLLKFTIGLRVPAEEEIKGLDITEHGMYAYPPHLVSESLGGTPGGSPAMSTSTSGAVTHGA

SEQ ID NO: 34818 - protein, 589 aa, Blastopirellula marina DSM 3645
MAFSARYAAKFSIGRVCEKNVQFSQTEQGTSQRKASMADSNRSTAGLSIGEYLIRRLQDYGLQDIFGIPGDYILSFYSMLEQSPINMVGCTREDNAGFAADAYARVHGLGAVCVTYCVGGLSICNSIAGAYAEKSPVVVLTGSPGLRERINNPLLHHMVREYSTQKDVFEKLCVATAELADPVTAFREIDRVLDAAARFKRPVYLELPRDMVNVVPHISHTFQEPTTTSDPHALVEAAAEAARLMASAERPMIIAGVELHRFELQDELVQLAEATGIPVAATILGKSVIRETHPLYVGLYEGAMGREEVTEFVEESDLILLLGTFMTDINLGIFTANLDPSKCIYATSEQLRVRHHHYHGVTLPDFMQALAAQKPHPPKRLIPPGLAMQQAPVGVTTDEPLTIRRMVPMINELLDDDVIVIADIGDSLFSATELVTRGRSEFLSPAYYTSMGFAVPATLGVQTAKPKARVISIIGDGAFQMTGMELSTIVRHGYDPVIIVLDNHGYGTERWLHAGKWEYNEIHPWKYSKLPDILGGGTGYEVRTEKEFYNALQSAWNDRDGMSVIHAHLSDQDASETLNRLASRMGRNI

SEQ ID NO: 34819 - protein, 320 aa, Blastopirellula marina DSM 3645
MTASHFLATSWPYYELLTAAGFEVRFADLSKSLWEPDHLVAALDGAAGVICSTEPYTAEVLSRTQVRVVSRVGVGYDSVNVPAATEQNIAVCRTPGTLHQSVVEHTIGMILAIYRNVISQNKQVRAGDWDRTAGPRAYGKTLGIIGYGVIGKEVAKAAVLLGMQVIAYDPIAPAGGPSEVERVALDEIWRRSDVVSLHAPCTPETERIINAQSLALMKDDALLINTSRGGLVNEPELAAAMKGGKLRGAALDVFEQEPIDKENPLLDVDNIYFTAHMAGLDEQSLLDMSTMAAQNILDLYEARWPAANVVNANELNGWKW

SEQ ID NO: 34820 - protein, 1131 aa, Blastopirellula marina DSM 3645
MRIFLLTTLLLCVASAATAAEPAVDYTRDIGPLLTKYCAGCHNPDDANAELILTTFDGLQTGGESGAILAPDQPEKSLLLAVLATDGEPKMPPEEEPQPTAAELALLRRWILAGATGPQADEAAPQMNIPQIAVRGDLQAGTSCIALSPRGDQMAIARYGKVELAAFPAHKTIHRLDFPGKVNQIAYSADGTLVAGAGGQVGVSGEVRIWDAATGRLKQSIRGHHDAIYSVAFSPDAQVLATGSYDKDVIVWDLQSGLPLNTLTGHNDAIYDLAFRNDSKVLATCSADRTVKLWDITTGERLETFGEATDETNAVCFSPAGNRVAAAGADNRIRVWQVSKSAAEGTNRLLFTKFAHDAPILDLALSPDGKLLVSAAEDRTVRFWRFADMELLGETPHQADWPVSLAVTQTEALVALARGDWRVEPITGIRGKLNDAAATIGLPYQPPPAIRSAEHVAWEKLPSADEVEPNNGVNQAGSLAWPQVIRGVLQDDGAGADVDLYRFAAEAGEQIIFETRAARDKSPADTCLEILDAAGEPVPHVLLRGVRDAEVTFRGINSSTIDCRTTNWEEMELNQFLYIQGEVVRLYRMPQGPDSGFNFYPGQGKRRPYFDTTAHAHALFEPCYIVEPYAPGSDLPDNGLPTFTLNYQNDDDSEGRGAGDSLLAFVAPHTGDYLVSVRDVRGFEGDDYKYQLIARRPLADYSAKLNGANPTINAGSGKEFTIQIERFDNFNGPVEVEITGLPPGFQATSPLVIEAGHIEATGVLSALPWAPAPTAENESISQVIARAMIDGQQVTKEVGSLGKIQLAERPKLAVFLSPQSSPDGPFGEPPPERTWKALRTDQFTTSDDHSELALLNDGSLLAIGANPGNDHYRLEIPLAAGETLHAIRLDVLGHASLPSGSPGRGADNGNFVLTGLKLSYQPAGKPSQPIAIASAAVDYAQAGFAAAGLIDDNPKTGWAIAEPKDGKFPVKRNGKDPAHYAVLEFAQPLATAQAGKLICELRHEGNAGHQLGHFRLAATVEPPIIPDYHFPAVQELTIVAGETITCQLRVDRNGFDDRIQFDVSNLPHGVIVDNIGLSGVLIPAGQLERTLHLTAAAWTPASQRTFQASTKVEGKQTSLPIRLRVVRPAAN

SEQ ID NO: 34821 - protein, 403 aa, Blastopirellula marina DSM 3645
MDLVNSRILTINGGSSSIKFALFQAVTSLDPLLTGSIERIGLPETRLQVNDSNAQRDVSQSVDASNHAAAVRVLLDWIEQRIGGESLAAVGHRVVHGMQHVTAEQVTPELLVELRRISPCDPQHLPGEIEMIQAFGDRYPTLPQVVCFDTAFHQSMPRVAKLLPIPRRYDAIGVQRYGFHGLSYSYLIQELKRLGDPVATTGRGILAHLGNGASLCAIRDGKSVDTSMGFTPTAGLPMGVRSGDLDPGLVGYLARAENMSAEQFNEMVNSQSGLLGVSESSSDVRDLLEIESTDVRAAEAVALFCYQAKKSIGAYAAVLGGLDTLVFAGGIGENATSIRTRICEGLEFLGLEIDDRRNLASADVISSAASRVTIRVIRTNEEWIIASTVCQVLGIGQNRKCKT

SEQ ID NO: 34822 - protein, 252 aa, Blastopirellula marina DSM 3645
MTEKIWHLKNCRIFEQLSAAEIERLDACSRVRRFAKRSPIYLPAERADTVLLLASGRVKICHLTPEGKQSILAFIEPGELFGELSILDGEARDEYAEAVDAAMIVSIPKEAMHELMESRPGLSIGVTKLIGLRRRRIERRVKNLLFLSNRDRLAHLLLELAESYGKRTEDGVELGIRLSHQDLANIVGSTRETVTVVLGELQNDGLVKVGRRRIILRSMQRLAQSVQAPEPKIPEPVETTRQEASLRLGFST

SEQ ID NO: 34823 - protein, 455 aa, Blastopirellula marina DSM 3645
MHGKILIVDDQQSMCELIQTDLKLRSYESSWFTSAEAAFHALKEDDFDAVLTDIRMPGASGIQLCEQIVANRPDVPVIVMTAFGSLETAVAAIRAGAFDFVTKPIEMDLLAISLERAVKHRRLQQQVKLLGDAVDHSRHFGEIIGESPPMQKLFDQISRIGQSSASVLITGESGTGKELVARLLHRQSRRADGPFVAINCAALPEALLESELFGHAKGAFTDARAERKGLFQQAEKGTLLLDEIGEMPISMQVKLLRALEENKLRPVGGDQEIEFDVRILAATNRDLEAAVEDQKFRDDLFYRINVIQLELPPLRSRGTDILLLARHFVTTHAKRAEKSVANISEQASERLLAYSWPGNVRELRNVIERAVALTRYEMLAVEDLPDKIRDYRGSQVFIGGEDPAELAPMDEVERRYILHVLSAVGDNKTTAARILGLDRKTLYRKLKQYGVEENI

SEQ ID NO: 34824 - protein, 362 aa, Blastopirellula marina DSM 3645
MQEAMLPFLAEYFSTPDFEYPPSRIVEETLEDARGQIANLIGATNEEIVFTSSGTESINLAIQGTFFRNPADIGGHLVISALEHAAVTETARFLKQLGVELTYVRCDKNGVVDPEEVENAIRPETRLVCVTLANHEIGVIQPLRQIADLCRSRGVLLHADAVQACGKIRVQVQELGVDLLSLSAHKFYGPKGAAALYIRNGTPLAPLLHGEGQERGLRSGQENVAALIGMGAAADLVRRCLDDSAGVQAKLRDMLQDRLSAGISDRLEIPGAKAERLPNTISVQFPGVNAARLLRQADSICAYTTASMHTGPAGNSPTLTAIGLGDDAAAGTIRFSVGWYTSEEEIEEAADLLVSAWSNLVR

SEQ ID NO: 34825 - protein, 389 aa, Blastopirellula marina DSM 3645
MTAMTQAVVIDGVRTAIGRAHAEKGVFRDVRSDDLAVACVEALLARTGVPPQEIEDVIFGNTQQTLEQGLNVGRLIGLMSGVPHTAGGATMNRLCGSSLQALNQAAHSILAGAEDVQIAGGLEHMQHVPMDHGLDINPKLFQQTSKAALMMGITAEFLAQTQEITRSDQDEFALASHKKATAAYAEGEFKNEIVPIYGRNEEGQRTLITMDQCVRTDASIEALAALQPAFMPGSGTVTAGNSSPLNDGAAALLLMSDGKAKELGLKPLVRVVATAVAGVDPSVMGTGPIPATKKALQRAGLKIEDIDLIELNEAFASQSLACIRALKLDVSKVNVRGGAIAIGHPLGCSGARIATTLIHAMVDRQVKYGLATMCIGAGQGIATIFERID

SEQ ID NO: 34826 - protein, 414 aa, Blastopirellula marina DSM 3645
MIIAVVRENFPGEQRVALIPASLAPLQKAGAEIIVETGAGVAAGFLDADYEAAGAKIVSSRADAFAQSDIVFQVRCLGANPEAGRDDLELVKPGQILVGGCDPLGNPAAIAEMAGKQTTQFALELIPRITRAQSMDILSSQATISGYRAVLIAAIELPKIFPMLMTAAGTLKPAKVFVIGAGVAGLQAIATAKRLGAVVLGYDVRKEAQEQIESLGGKAVDFHLESSGAQDKGGYAKDLGEDFYKKQREFMADTVRECDVVITTAAIPGKKSPLLVTTDAVNGMRPGSVLVDLAAERGGNIEPSQPDTRIEHNGVLILGPTNLAAEVPQHASQMFSSNITKFLLNMVKEKELAIDPADEIIASTMVARDGEVVHNRIREMLGLAAIEPPQPPAENDKIPLDDDQPAPPSEGNAT

SEQ ID NO: 34827 - protein, 460 aa, Blastopirellula marina DSM 3645
MKILFADDEKSLQKLMSLELPRLGHEVTVCPDGLTAVAALERNTYDCILVDLDMPGLNGIQVIAKAKEFSPETEAIVLTGKSSTDSAISALRYGAFDYLTKPCRLVELQALLERVAEKRELTRKYRAVKSRLEKLEGKSNLIGDSPSMQQVGRLISKVAPTNSTVLIRGETGTGKELVARALHDQSHRIEMPFVAVNCGALPENLIESELFGHRKGSFTGAEDTRIGLFEVANGGTLFLDEIGELPKSLQAKLLRVLETGEIRRVGDNDSMQVDVRIVCATHRDVELMVAEGDFREDLMFRINTFEIHLPPLRQRTEDIPELAEHLCRRFWPNVPLTQTIFSSDAIRSLKSHDWPGNVRELANVVEHATILCEEPPIEPDHLPRRFGLMSTESAANANLGGKPVLKAIGPLSLRELEMQAIYEALERHEGNKPQAAEELGVSLKTLYNKLNQASSMDKSA

SEQ ID NO: 34828 - protein, 638 aa, Blastopirellula marina DSM 3645
MCGITGAAWTDPQLAVSAEALRRMTDCISHRGPDDAGYLHRELENRNPYPAVPGVALGHRRLSIIDLAGGKQPLANEDETVWTIFNGEIFNFAALRGRLEGAGHTFRTHSDTETIVHLYEDEGPDCFRHFNGMFAIAIWDLRERRLVLGRDRLGQKPLYYYHHAGRIVFGSELKTLLALPDVPREIDPTAIDEYLTYQYVPHPNTILKGIKKLAPGELAVFSDAGLHVERYWKPDFTHEDRRPAALQDAELRELFDDAVRLRMQADVPLGAFLSGGVDSSLVVSSMQRQSDRPVKTFSIGFPQKEYDETSFARQVAEHLGTEHHEFQVTPSALEILPKLIWHYDEPMADSSAIPTWYVSQQTRAEVTVALSGDGGDELFAGYRRYRAVGLGAMIDRLGPLKRVLGAKLWQQLPSSGRQKSRMRQAKRFAEAIAMAPERRYLDWVSIFNETRRGQLYTDAFVAQLSDSDPFDFLKSAWRRCGKRDAITCASLADLTTYLPCDLNCKVDIASMAHGLECRQPFLDYRLVEFAAALPIGRKYQRGRGKQILRKVFGDRLPAQIWDRPKMGFGVPLDYWFRHELKELLIDSLLSEKALSRGLFREETVRQLLDEHMAGQFDHSARLWALLVLELWQREWIDA

SEQ ID NO: 34829 - protein, 553 aa, Blastopirellula marina DSM 3645
MKFSTFVVVGLTPLVLAGAASIACAQEPETASSVVGPSFGWVNWTVLIAYLAAMVGIGGYFSRGESSGEDFFLAGGRIPWWAAGLSIYGTQLSAITFMAVPALALAPGGNWTKIVGGWTTLLMAPLIIYFYLPLFRRLQVQTAYQYLERRFHLSVRLIASLIFIAFQVGRMGIVLLLPAVAIAAATGSNVLVAVVLMGTLATIYTVLGGMEAVIWTDVVQVIVLIGGALLCLAVSIFEIGGPAQLYDLASSADKMTIFTWSATPSEPSTWVLLVGFFFINLIAYTTDQTVVQRYLTTPDEKSAASSIWLNGLMTIPTGFLFLLLGTSLWAFYELHPEIASPGKADQVVPWFVMQQLPAGVAGLVIAAIFAAAMSSLDSSMNSIASAIVNDFWLRLAGPAKPEAEIRVARVLTLVIGVLGTSMALGMAVLNITSLFDYFNLMLGMLGGGLSGIFLLAVFTTRANWIGALVGLAAGAAATALVQFDSTLHVYLAGAAGTLTCALVGYVVSWILPLPQSDLQGLTIHTMVPSGSDQTADRDSANHSPSPSIDSSIG

SEQ ID NO: 34830 - protein, 412 aa, Blastopirellula marina DSM 3645
MQEYQFILIPVGVAMFTVLVLALVAIILAAKSVLVAAGDVKLVINEQKEVHVPAGGKLLNALADQGIFVSSACGGGGTCAQCKVKIHSGGGDILPTEKSHINNQQAREGYRLSCQVAVKQDMSIEVPHEAFETKKWDCEVISNDNVATFIKEFKLKLPEGEEVDFKAGGYIQIEIPEHEVAYKDFVVDKEYHEDWDKFNIWRYVSKVDEPVIRAYSMANYPGEKGIIMLNVRIASPPPRAPEGTPPGKASSYIFSKKPGDKVTISGPYGEFFIKDTENEMVYIGGGAGMAPLRSHIFELFKERKTNRKVSFWYGGRSVRELFYVDEFRDIEKDFPNFKFNIALSDALPEDNWTGLKGFIHQVLLENYLKNHPAPEDIEYYICGPPMMNQAVFKMLDDLGVPPENIAYDDFGG

SEQ ID NO: 34831 - protein, 516 aa, Blastopirellula marina DSM 3645
MVFEPGVTQLVIICFYLALLLALGLFSNRLFSGSSKDYMLASHSIGPFLLLMSIFGTTMTAFALVGSTGESYKEGVGVYGLLASSSGIIHSLCFFVLGVKLWSLGRKYGYTTQIEFFRDRLESDKLGLLLFPVLVGLVIPYLLIGVMASGTVVTAVTRGAFPVWFESTQGGVPGWLGSLVICGVVLTYVFFGGMRGTAWANTFQTIVFMVLGLVAFFVIASQIGGKEGLWANLVAASESIPRDKLVRAGNPSMSYLRFATYMFVPLSVGMFPHLFQHWLTARKASNFKLAVVAHPLFIMIVWAPCVLIGAWAAGNLVPIPPAVDANANAILPFLVKRFSGDVLGGFLTAGVLAAIMSSLDSQFLCVGTIFTNDIVVHYGGKNRFTDKQIVMIARTFIILIVAITYGLSLLDYRRVFTLGVWCFSGFSALFPLVLAALYWKGLTKAGAYASVITAISLWCYFFYQSDFAGNPHYSVLDMMPVAPMLAGSTLALILVSLVTPRPSEETLQKFFPAKDS

SEQ ID NO: 34832 - protein, 368 aa, Blastopirellula marina DSM 3645
MTHPWIADRTAAFDSSGIRKVFDLAAKMTDPINLSIGQPDFDVPDAVKDTAIAAIRDGKNGYALTQGMPVLRDKLQASIDAELGHRDRTNFVCSGTSGGLVLSMLALVNPGDEVIIFDPYFVMYESLVKLVGGVPVIINTYPDFRIDLPKVEAAITPRTKLILLNSPANPTGVVATEAEVAGLAKLAGEKNIALISDEIYRMFTYGDFVSPAKYNDQTIVIDGFSKSYGMTGWRVGYVHGPSAVIETMVKLQQYTFVCAPQPAQWASAAALDVDMSQHVATYARKRDLMLEGIGDLYEVSQPDGAFYIFPKAPWGTGTEFVAKAIENNLLIIPGNIFSKQDTHFRISYAAPDETLKRGVDTLRKLAQG

SEQ ID NO: 34833 - protein, 486 aa, Blastopirellula marina DSM 3645
MFWLVCAGFAICGCGQQRSGPSLQDLDIDALAAEATAAMKVLGKEQPGAVSAAKSDRPSSLRLEKTKLKFGFIKLTDCAPLVIAKEQGFFADEGLQVEIEAQPNWKTLLERVISGELDGAHMLSGQPIASTIGINGEAHVITAFTMDQNGNAITVSNSIWEEMQKADPALQSSQPKHPISADALRSVVADRKASGDLLKMGMVFPVSTHNYELRYWLAAAGIHPGMYTSADTTGVTDAEVLLSVTPPPMMPQVMEVGTIQGYCVGEPWNQQAVVKGIGVPVVTNYDIWKNNPEKVFGVTKAWNDENRNTHVAVVKALIQAGKWLDEVDAAGKFVNRESAVQLLSKANYVGADVDVIRNSMTGYFYFQKSDKRELPDFNVFFKSHATYPWYSDGVWFLTQMRRWGQITEPKSAEWYGETAKKIYRPDIYREAAERLISEGKLDRSEVPGSDTDGYKPPTAEFIDGITFDGHDPITYLNAHKIGNKDE

SEQ ID NO: 34834 - protein, 788 aa, Blastopirellula marina DSM 3645
MERRVIAFSLIAVAMLMTFQMLGRRNQDAQPENPDAEQAEVAEKGDQPQPGDAGGDQPNPEIKPADDAENEDEEVKEEPQPRKFVTLGSVSSADADMLVTFDTRGGSVARIELPADKYKSLEDRHLGGYLGWLMPYDAVAGCEIRIVGPGTPAALATPQDAKSGVGLQVGDIIKSLAGEEVVDVQSYVDALKLTKPEDAIELVVERKGADAVQLLTYTATLTDLPLEVIKPEVSEVVDKVTGMPRTVEHPSAYLTSLARINGSMIPAEGKMINDLPLITKNWRLVENEDPTIVQFETLVTPEDLPQGVRFAKLRLVKTFQLPKKPTEANAESNYQPYGLKYSLQVFNDGTEPVDAAFRQFGATGLPTEGWWYSNKIARGWGGAGLRDVVWESSKGDYDMFTVAKIIAKAQDLESDRQISMFKVDDQIKPKFAGVDAVYFSSAMVFNESDKGPALSRGAAIVAAVVDEEQKQRTDCTYRLDGATETIEPGDKPFELSCTIFSGPKKEELLAHYGLQNLEYYGWFHYVSTALLFVLHFMHDYLYIPYGLGIIFLTLMVRGCLFPLSRKQARNMLIQQQLAPEMKKISEMYKEDPIKQRQAQQELFTKYNFNPLGGCGVMFLQLPIFLGLYRALAVDIQLRQAPFIPGIEWCSNLSAPDQAWYWVGVLPDFMTIHPSASFPASFLFLGPYLNILPLFTIALFLVQQKMFMPPAVDEQQKMQQQMMTYMMVFIGFMFFRVPSGLCIYFITQSVWGILERKLIPKPQLADLPSASDTITVTAKKPKKRPPGKK

SEQ ID NO: 34835 - protein, 280 aa, Blastopirellula marina DSM 3645
MGLIETSMTDVLKIENLHVAVEGKPILTGVNLTIRRGETHALMGPNGSGKSTLGYAIMGHPNYEVTDGAIWLNDENVLEMAANERARAGLFMAFQRPMSIPGVKLADFLRHATTNVRNPERKEGEELIPMREFRQEMKSKMQQLQMDLDFARRYVNDGFSGGEMKRAEILQLAMLQPKFAILDETDSGLDADAVRLASQSIAEIGGAEMGLLIITHHDKLLEHNPPDFAHVMLGGRIVETGGVDLAKELHSSGYDRIRKAYPDAAAIEQVMNEEETQVAS

SEQ ID NO: 34836 - protein, 953 aa, Blastopirellula marina DSM 3645
MRTLGTDDRPQRISLANSRLQFLSTPARSPLLDFSGILFFRRFLAAIQVKTTALKLCADFSKEAWTMAIRFDKFTLKAQEAVQNAQTICMDASNPQLTPLHLLVALLREADGVVKPLLDKIGANRRQITELVDSELGRLPKVTGVAGQPGLSTELDQVLQAAQREADVMKDDFVSTEHLMLALTRVKSAAQEILKVNAVSDKEVLAALQSVRGNSRVTDQNPESTFQALEKYGIDLVERANQGKLDPVIGRDQEIRRTIQVLSRRTKNNPVLIGEPGVGKTAIAEGLALRIVQGDVPQSLKNKRIVALDMGALVAGAKFRGEFEERLKAVLKEVQDSDGHVVLFIDELHTVVGAGKAEGGADAANLLKPALARGELRCIGATTLDEFRQYIEKDAALERRFQPVFVGEPSVEDTIAILRGLKPRYEAHHGIKIKDSALVAAAKLSDRYITDRFLPDKAIDLVDEASSRLAIEMESVPGEIDAVQRQLTQLELADRQLAEETEESAVERRAEIQTEMTDLRRQLASLREQWETEKLGLGDVTKVRHELAQLELQFSQLHASIQEKQASGAPVSESDYQQLFELQKKRDALTARMDAEVDHSDAAKEGKKPERRLLREQVTEEEIAEVVSQWTGIPVTRMIESERAKLLVLEERLHQRVVGQDEAVEAVANAVRRSRSGMQATNRPIGSFIFLGPTGVGKTELCKALAEILFDDEHAMVRIDMSEYMERHAVSRLIGAPPGYVGYEEGGKLTEAVRRRPYSVILLDEIEKAHRDVFNILLQVLDDGRLTDNHGHTVDFTNTIVVMTSNIGSQAIQQIAAEGGTDEEVRDAAQASLRTHFLPEFLNRIDETIVFKPLSKEQLRHIVEIQVGFLAKQLQENGIELVITPAAKDELSEEGYDPTFGARPLKRVIQNQLQNALATTILKGDIGEGDGITIDYADGAFQFQKYRPDSLSE

SEQ ID NO: 34837 - protein, 646 aa, Blastopirellula marina DSM 3645
MAQGETIIGIDLGTTNSVVAIMEGSEVKIIPNAEGNRLTSSVVAFTDKGDVLVGEPARRQAVTNPKKTVYSIKRFMGRRHNEVDSEEKMIPYEVVGGADEYVKVKIGDAEYTPQEISAKVLQKLKAAAESYLGHKVNKAVITVPAYFNDAQRQATKDAGQIAGLEVARIINEPTAAALAYGLGKQKSEKIAVFDLGGGTFDISILEVSPPEGEEEGERTVFEVISTNGDTHLGGDDFDEELIHYVADEFKKEHGVDLRNDTMALQRLQEACEKAKKELSSQAQTDINLPFITADASGPKHLQMSISRSKFEELTDSLIQRCRVPVEKALADANLKPSDIDEVVLVGGSTRIPKVAEMVKKIFGKDPHKGVNPDEVVAAGAAIQGSVLSGDRKDVLLLDVTPLSLGIETLNGVFTKLVERNTTIPTEKKQTFSTAEDSQSAVTIRVFQGERPMAEDNRLLGQFNLDGIPPAPRGMPQIEVKFDLDQNGILNVSAKDVGTGKEQHVKIEQSSGLSEAEIQRMQKDAEEHASEDKRKRELADLRNQAESMCFQLEKLIKENGEKLSDSDKQPLEQSIEKTREAAKGEDVDAIKSAISELEAASHAVSKVLYEGAAAAGGAAGAEAPGAEAAGSSGDDDAIDAEFEVKKD

SEQ ID NO: 34838 - protein, 395 aa, Blastopirellula marina DSM 3645
MKILVANLGSTSFKYRLLDMQSETQLARGGIDRIGGSESSCSVEIGAWSENRTAHVPDHAVAVQQCLAQLTDPEHGCLQSADEVAAIGFKAVHGGRVSGVQKVTPEVLEAMTEMSPVAPAHNPPYIKAMRLLGEKLPEIPLVAAFETGFHLTIPDRNRYYAIPKAWSDEYLIQRWGFHGASHRFIGVRSAELLGRSDLRVISCHLGGSSSLCAIRAGQSMAATMGMSPQTGLPQNNRVGDFDAYILPMLMEKTGKSLEEVLAYLGSHGGLLGISGGISGDMRDLEEAAAGGNADAQLALDVYISEIRRYLGGMLVELGGADAIVFTGGIGENGKEVRAAVCANLNELGIELDATKNGAVQGESAIHADGSRTQIWVIPTNEELIVARQTKQLLES

SEQ ID NO: 34839 - protein, 592 aa, Blastopirellula marina DSM 3645
MSLIVQKFGGTSVADCDKIVAAARKAIRAQKEGHQVVMVVSAMGKNTDVLVDLAAQINERPPAREMDMLLSTGEQVSVALMAMAIHSLGAKAVSLTGAQIGIRTDSTHTKARIISIETERVKELLAAGNIVIAAGFQGIDENLNITTLGRGGSDTTAVALAAVLDADACEIYTDVDGVYTTDPRLLAEARRVLQISYDEMLELASLGAGVMHSRSVEFAKKFGVPIHVRSSFTDITGTMIVDQPESLTRPVSGAAMTKNEARITIEGVPDVPGISHELFHSIATKAISVDMVVQNIGADGRANISFTVPREELDQTLEAVRNAANILQYASVAHDEQVSKISVVGLGMAEQSGVADKMFRVLADANINIQMITTSEIKISVLVSREDAQRALAAVHSGFQLDVTPSDAPESVAAVPRECERDAAEVVSRLRTMEDLTIDSIVLDDSQSVIALRRIPDHPGIAARVFEAIAAEGILVDMIVQNVGRGDAANLSLTVPKEDCEQALVVAKKIGAELGAEEILCKADAAKLSVSGIGLRSHTGVGIRMFRALSDSGINVELINTSEVMVNVIVEGKQGQAGLAALNKAFADVLVS

SEQ ID NO: 34840 - protein, 539 aa, Blastopirellula marina DSM 3645
MPKILVLDELSPEGLALLDAAEGFEYEIRLKLAGEELRKSLAEFDGAICRSGVKITAESLEGNTRLRCIARAGVGTDNIDKDAATRLGIVVMNTPTGNTVSTAEHAFCLMMALSRNVASANQSLVEGRWDRKKYMGSQLADKTVGIVGLGRIGQEFAKRALAFEMRVIGFDPFISPERAAELGIELYASVKEMLPLVDYLTVHTPLTAETKGLINQDALEIIKPGARLINCARGGIYDEAALVAGLKSGKLGGVALDVYAAEPCTDSPLFGMENVVCTPHLGASTEEAQTQVAIEAVQLVTNHLNTGEIRHAVNVAPIDPKTLDSMRGYLDVAYRIGLFAGQLHGGKLKACKLNYRGEVAGKDTKLLTASFCAGLLEQAMDEGGANIINAQMLLAERGVTISTESSTEMGSFSSSITATLEEEGRTSQVGGTLFGNDMPRLILVDGQRLEAYLDGTLFLFAHNDVPGIIGRVGTIFGNHNVNIAQMAVGRSSTGGAVGVLNLDGAPPQSAVDEVLKSADITTARIIELPQAGELPTWLR

SEQ ID NO: 34841 - protein, 342 aa, Triticum aestivum
MDRYEVVRDIGSGNFGVAKLVRDVRTKEHFAVKFIERGHKIDEHVQREIMNHRSLKHPNIIRFKVVVLTQTHLAIVMEYASGGELFQRICNAGRFSEDEGRFFFQQLISGVSYCHSMQVCHRDLKLENTLLDGSVAPRLKICDFGYSKSSVLHSQPKSTVGTPAYIAPEVLSRREYDGKVADVWSCGVTLYVMLVGAYPFEDPDEPRNFRKTITRILSVQYSVPDYVRVSMDCIHLLSRIFVGNPQQRITIPEIKNHPWFLKRLPVEMTDEYQRSMHLADMNTPSQSLEEAMAIIQEAQKPGDNALGIAGQVACLGSMDLDDIDFDIDDIDVESSGDFVCPL

SEQ ID NO: 34842 - protein, 342 aa, Triticum aestivum
MDRYEVVRDIGSGNFGVAKLVRDVRTKEHFAVKFIERGHKIDEHVQREIMNHRSLKHPNIIRFKEVVLTPTHLAIVMEYASGGELFQRICNAGRFSEDEGRFFFQQLISGVSYCHSMQVCHRDLKLENTLLDGSVAPRLKICDFGYSKSSVLHSQPKSTVGTPAYIAPEVLSRREYDGKVADVWSCGVTLYVMLVGAYPFEDPDEPRNFRKTITRILSVQYSVPDYVRVSMDCVHLLSRIFVGNPQQRITIPEIKNHPWFLKRLPVEMTDEYQRSMQLADMNTPSQSLEEAMAIIQEAQKPGDNALGVAGQVACLGSMDLDDIDFDIDDIDVESSGDFVCPL

SEQ ID NO: 34843 - protein, 126 aa, Mesorhizobium septentrionale
SKKAADQMWMARYLMQRLTEKYGIDIEYHCKPLGDTDWNGSGMHANFSTAYMREVGGKAYFEALMAAFDKNLMDHIAVYGPDNDKRLTGKHETAPWNKFSYGIADRGASIRVPHSFVNNGYKGYLK

SEQ ID NO: 34844 - protein, 263 aa, Mesorhizobium temperatum
QAEGHSSDCVLKPVAIYPDPARTNGVLVMCEVMMPDGVTPHASNKRATILDDEGAWFGFEQEYFFYKDGRPLGFPESGYPAPQGPYYTGVGYSNVSSVARQIVEEHLDLCLAAGINHEGINAEVAKGQWEFQIFGKGSKKAADQMWMARYLMQRLTEKYGIDIEYHCKPLGDTDWNGSGMHANFSTAYMREVGGKDYFEALMAAFDKNLMDHIAVYGPDNDKRLTGKHETAPWNRFSYGIADRGASIRVPHSFISNGYKGYLE

SEQ ID NO: 34845 - protein, 251 aa, Betula pendula
MGRGRVELKRIENKINRQVTFAKRRNGLLKKAHELSVLCDAEVALIIFSNRGKLCEFCSSPSMLKTLERYQKCNFGAPEPNVSAREALELSSQQEYLKLKARYEALQRTQRNLMGEDLGPLSSKELELLERQLNMSLKQIRSIRTQCMLDQLTDLQRKEHMLNEANRTLKQRLVDGYHIDTVLQLDQSANDVGYGRQPAQTQDDCFFHPLCEPTLQIGYQHDHPMTVVTAGSGSVVTAGPSVNNYMSGWMP

SEQ ID NO: 34846 - protein, 564 aa, Lachancea kluyveri
MSEITLGLYLFERLNQVDVKTIFGLPGDFNLSLLDKIYEVPGMRWAGNANELNAAYAADGYARVKGMSCVITTFGVGELSALNGIAGSYAEHVGVLHVVGVPSVSSQAKQLLLHHTFPNGDFTVFHRMSANISETTAWVTDIATAPAEIDRCIRTTYVTQRPVYLGLPATLVDLMVPASLLDTPIDMSLKPNDPEAEAEVVNSVLELIKEAKNPIILADACASRHDVKPETKQLIDITQFPAFVTPLGKGSIDEQHPRFGGVYVGTFANDDVKEAVESADLILSVGALLSDFNTGSFSYSYKTKNIVEFHSDYIKIRNATFPGVQMKFALQKLLSEIGAVVKDYKPVAVPPKPTPNPACDPSTPLKQEWVWNQVGRFLQEGDVVITETGTSAFGINQTHFPNNTYGISQVLWGSIGFTTGACLGARCAAEELDKNKRVILFIGDGSLQLTVQEISTMIRWGLRPYLFVLNNDGYTIERLIHGENAQYNEIQPWKNLDLLPTFGAKDYETHRVATTGEWDKLAQDEAFNKNSRIRMVEVMLPVMDAPSNLVKQAQLTASINAKQD

SEQ ID NO: 34847 - protein, 486 aa, Arabidopsis thaliana
MMIYVEEGVDTTDHIAVVLLFIVVIVADSPTTTTSQESVLFYRTLCPCFSLQFYCRIRCHFHNDSLLSALSIRRSLLELKNQAMAHTSESVNPRDVCIVGVARTPMGGFLGSLSSLPATKLGSLAIAAALKRANVDPALVQEVVFGNVLSANLGQAPARQAALGAGIPNSVICTTVNKVCASGMKAVMIAAQSIQLGINDVVVAGGMESMSNTPKYLAEARKGSRFGHDSLVDGMLKDGLWDVYNDCGMGSCAELCAEKFQITREQQDDYAVQSFERGIAAQEAGAFTWEIVPVEVSGGRGRPSTIVDKDEGLGKFDAAKLRKLRPSFKENGGTVTAGNASSISDGAAALVLVSGEKALQLGLLVLAKIKGYGDAAQEPEFFTTAPALAIPKAIAHAGLESSQVDYYEINEAFAVVALANQKLLGIAPEKVNVNGGAVSLGHPLGCSGARILITLLGILKKRNGKYGVGGVCNGGGGASALVLELL

SEQ ID NO: 34848 - protein, 201 aa, Arabidopsis thaliana
MGRQLYTTTVLYLVTLLFICRTISAVRFPPEQPTTDDLDFIRTSCNTTLYPDVCYTSLAGYASAVQDNPARLAKLAIGVSLSRAKYTAAYLSKLSRRAASAAVHDCVSNVGDAVDQMRGSLRQLREMNHRRPGDPAFRFQMSNVQTWMSAALTDEETCTDGVTEEMEDGETKTAICDRVADVKRFTSNALALVNTYANNGA

SEQ ID NO: 34849 - protein, 191 aa, Arabidopsis thaliana
MSDEEHHFESSDAGASKTYPQQAGTIRKNGYIVIKNRPCKVSFSNISPLSSSDLIRSVHYLDSSDSFFCHLHDVVEVSTSKTGKHGHAKCHFVAIDIFTSKKLEDIVPSSHNCDVPHVNRTDYQLIDISEDGYVSLLTDNGSTKDDLKLPNDDTLLQQIKSGFDDGKDLVVSVMSAMGEEQINALKDIGPK

SEQ ID NO: 34850 - protein, 387 aa, Arabidopsis thaliana
MPLVSLSFASSSSKAMALCSICPRIPLRFRPKPISPFLSKPQICLAYRVYSSLQSTTPSTRDELGTVSIGFLGMGIMGSPMAQNLIKAGCDVTVWNRTKSKCDPLVGLGAKYKSSPEEVTATCDLTFAMLADPESAVRMSHFCLRLFFFYFHSILKQKLYFAFCQIDVACGKNGAIFGISSGKGYVDVSTVDVASSILISKQIKDTGALFLEAPVSGSKKPAEDGQLIFLTAGDKPLYEKAAPFLDIMGKSKFYLGEVGNGAAMKLVVNMIMGSMMASFAEGILLSQKVGLDPNVLVEVVSQGAINAPMYSLKGPSMIKSVYPTAFPLKHQQKDMRLALGLAESVSQSTPIAAAANELYKVAKSYGLSDEDFSAVIEALKAAKSREA

SEQ ID NO: 34851 - protein, 355 aa, Arabidopsis thaliana
MDKKVSFTSSVAHSTPPYLSTSISWGLPTKSNGVTESLSLKVVDARPERLINTKNISFQDQDSSSTLSSAQSSNDVTSSGDDNPSRQISFLAHSDVCKGFEETQRKRFAIKSGSSTAGIADIHSSPSKVPVYLLRVTISSTCDCLLTSCVILWFQANFSFHYADPHFGGLMPAAYLPQATIWNPQMTRVPLPFDLIENEPVFVNAKQFHAIMRRRQQRAKLEAQNKLIKARKPYLHESRHVHALKRPRGSGGRFLNTKKLQESTDPKQDMPIQQQHATGNMSRFVLYQLQNSNDCDCSTTSRSDITSASDSVNLFGHSEFLISDCPSQTNPTMYVHGQSNDMHGGRNTHHFSVHI

SEQ ID NO: 34852 - protein, 979 aa, Arabidopsis thaliana
MTDSAYRVDTISRLAQWRIHNLSSSTYRKSDPFKMGLWNWHLSVEKSKMLLNVKLYPEVSNLTRENPPVASFALRVVSSTGERKALSHPEVIDKRIKTNEDFIWTIEVPLTGKIIIDVEFLDLKVLSQDSGELYSIWANGSTENQSQVTAVTSLGRMLTESIYTDITINASDGSIGAHRAVLAARSPVFRSMFLHDLKEKELSEINVLDMPLDACQAFLSYIYGNIQNEDFLIHRLALLQAAEKYDIADLKEACHLSLLDDIDTKNVLERLQNAYLYQLPELKASCMRYLIKVLGVLTQNPNSKTSEIRHNAGKLRGNYIETNSNQEISLDMAGGQIEKLVKYKSTVKDPGTPGFLRIREGMLLFVPNDPKSDSKLKVLTQNIKSIAKSHIFEFENYPDMHACRDFITKALAKCELEPNKSVVSTSSEQLSIKELELRFKLLRENRYRLHKQFVESKVLTEDEFWATRKKLLGKDSIRKSKQQLGLKSMMVSGIKPSTDGRVCVTALSVSESLQGRHHKFFICYGVEVAASDILGQKSIVRCSGCIIFLLRSQLFGRHSSIMFRMTEKDFWTKYFRAEYLYSTKNTAVAAAEAAEDEELAVFLKPDEILARETRHKIRRVDPTLDMEADQGDDYTHLMDHGIQRDGTMDVVEPQNDQFKRSLLQDLNRHAAVVLEGRSIDVESEDTRIVAEALTRVKQGMMFHSAKQCHAFYSSDLAIHLYFTPLLVSKADGETTKDANQERLERMSRVAGMEDLQAPQNFPLAPLSIKVWLSANIRFSQLMMDAALIRLPFLLWNQDPRDYFESQQGNVLNVPRGAKGLKRNVHEAYGLLKESILEIRATGLSDPLIKPEVSFEVFSSLTRTIATAKNINGKNPRESFLDRLPKSTKDEVLHVGKLKDAMSNTYSKLEAMKESVQSDLRHQVSLLVRPMQQVSFFQYLRKSFILLLHHVSALDAAFHHYEVDLQRRTAKSGERPNGYV

SEQ ID NO: 34853 - protein, 707 aa, Arabidopsis thaliana
MVLQKRPDYGFNGYEVPHTPRAARSPRKSAFKKKSENHQISSFDLLAAVAGKLLLEGGNSSSSSNNTSGNNEDQCAVKKEPLNGGDIMVEEETTNSDHDNNNAERSFFVSEILQKSHEMQSFNRSPSPLKEFHFGSSSGITSDSSEKFETQELAYDESKINNGDCYRSESNDKKSMLGGLNFEAKLSRNVVGKDEKHIGSGFRKPIPQNPSTCSDDVDLHGKENDDGENFSACYRTKSFRSTLRIGDRRIRKVWASKYCKVPPKLKDTTVTNSGEHYGPFVSKSYVLFKMLWFIYVSLSENVLDLDLKSDYYSKKHCLKSLRSERNYPIKKRRYFDGYTASQSEETNKNEGQSGSPRKGILSEATSAFLSSIACQKQPAAFQSPRDSNNVKLGIKSFRVPELFIEIPETATVGSLKRTVLEAVTSILGGGLRIGVLVHGKKVRDDSKMLLQTGLSLDTLSDTLGFCLEPNPPQSTKPLSPEDSDFARPCNVPHTLTRSVSIQRSMYAASFFSVEKNSVSDVFQNFFDIIRCLPSPGKHAKPSNSVESDLDSKPSAPNRGKTIYSRALIPVSPLHAQALTVVPPRKTKRSEVAQRRIRRPFSVAEVEALVQAVERLGTGRLLCISICRWRDVKLRAFDNAKHRTYVDLKDKWKTLVHTARISPQQRRGEPVPQELLDRVLTAHAYWSQQQGKHQLLEGPQQLETSLGL

SEQ ID NO: 34854 - protein, 347 aa, Arabidopsis thaliana
MTSPLSDLLNLDLSDTKKIIAEYIWIGGSGMDIRSKARTLPGPVSNPTKLPKWNYDGSSTDQAAGDDSEAIFKDPFRKGNNILVMCDAYRPAGDPIPTNNRHKAVKIFDHPNVKAEEPWFGIEQEYTLLKKDVKWPLGWPLGGFPGPQGPYYCAVGADKAFGRDIVDAHYKACLYSGLSIGGANGEVMPGQWEFQISPTVGIGAGDQLWVARYILERITEICGVIVSFDPKPIQGDWNGAAAHTNFSTKSMRKDGGLDLIKEAIKKLEVKHKQHIAAYGEGNERRLTGKHETADINTFSWGVADRGASVRVGRDTEKEGKGYFEDRRPSSNMDPYLVTSMIAETTIL

SEQ ID NO: 34855 - protein, 469 aa, Arabidopsis thaliana
VIKCEYAVRGEIVNIAQKLQEDLKTNKDAYPFDEIIYCNIGNPQSLGQQPITFFREVLALCSYTALLDESATHGLFSSDSIERAWKILDQIPGRATGAYSHSQGIKGLRDAIADGIEARDGFPADPNDIFMTDGASPGVHMMMQLLITSEKDGILCPIPQYPLYSASIALHGGTLVPYYLDEASGWGLEISELKKQLEDARSKGITVRALAVINPGNPTGQVLSEENQRDVVKFCKQEGLVLLADEVYQENVYVPDKKFHSFKKVARSMGYGEKDLALVSFQSVSKGYYGECGKRGGYMEVTGFTSDVREQIYKMASVNLCSNISGQILASLIMSPPKPGDDSYESYIAEKDGILSSLARRAKTLEEALNKLEGVTCNRAEGAMYLFPCLHLPQKAIAAAEAEKTAPDNFYCKRLLKATGIVVVPGSGFRQVPGTWHFRCTILPQEDKIPAIVDRLTAFHQSFMDEFRD

SEQ ID NO: 34856 - protein, 353 aa, Eschscholzia californica
MDEEIILGQADICKYMYGFVDSMTLRCVVELGIPDIIHSHGRPITLTEILNGIPNLSSSFDINYLQGIMTILVRRRVFAVHKFDPKDGTNLTEIRYGLTPSSKCLLKDSKFNLAPFVLLETHPWITDPWNYLGKCVQEGGSGFVKAHGSDVFKFGSDHPEFFKLFYDGMECSTKVLVQVVLDKYQQVFKDVKSIVDVGGGTGMMISEIVKNHPHIKGINFDLPHVVAEAPDYPGVEHVGGDMFVEIPQADAITMKGILHDWNDDACVKILENCKKAIPKNGKVIIIDCVLNPDGDDLFDDIKVVSDLGMRVHCSDGKERTEAEWEKLLKKGGFPRYKITHVVTVQSMIEAYPE

SEQ ID NO: 34857 - protein, 938 aa, Arabidopsis thaliana
MKEKMQRMVLSLAMVGFMVFGVASAMNNEGKALMAIKGSFSNLVNMLLDWDDVHNSDLCSWRGVFCDNVSYSVVSLNLSSLNLGGEISPAIGDLRNLQSIDLQGNKLAGQIPDEIGNCASLVYLDLSENLLYGDIPFSISKLKQLETLNLKNNQLTGPVPATLTQIPNLKRLDLAGNHLTGEISRLLYWNEVLQYLGLRGNMLTGTLSSDMCQLTGLWYFDVRGNNLTGTIPESIGNCTSFQILDISYNQITGEIPYNIGFLQVATLSLQGNRLTGRIPEVIGLMQALAVLDLSDNELVGPIPPILGNLSFTGKLYLHGNMLTGPIPSELGNMSRLSYLQLNDNKLVGTIPPELGKLEQLFELNVHGNLLSGSIPLAFRNLGSLTYLNLSSNNFKGKIPVELGHIINLDKLDLSGNNFSGSIPLTLGDLEHLLILNLSRNHLSGQLPAEFGNLRSIQMIDVSFNLLSGVIPTELGQLQNLNSLILNNNKLHGKIPDQLTNCFTLVNLNVSFNNLSGIVPPMKNFSRFAPASFVGNPYLCGNWVGSICGPLPKSRVFSRGALICIVLGVITLLCMIFLAVYKSMQQKKILQGSSKQAEGLTKLVILHMDMAIHTFDDIMRVTENLNEKFIIGYGASSTVYKCALKSSRPIAIKRLYNQYPHNLREFETELETIGSIRHRNIVSLHGYALSPTGNLLFYDYMENGSLWDLLHGSLKKVKLDWETRLKIAVGAAQGLAYLHHDCTPRIIHRDIKSSNILLDENFEAHLSDFGIAKSIPASKTHASTYVLGTIGYIDPEYARTSRINEKSDIYSFGIVLLELLTGKKAVDNEANLHQLADDNTVMEAVDPEVTVTCMDLGHIRKTFQLALLCTKRNPLERPTMLEVSRVLLSLVPSLQVAKKLPSLDHSTKKLQQENEVRNPDAEASQWFVQFREVISKSSI

SEQ ID NO: 34858 - protein, 342 aa, Pisum sativum
MSSLSDLINFNLSDSTEKIIAEYIWVGGSGIDIRSKARTLPGPVSDPAKLPKWNYDGSSTNQAPGKDSEVILVICDVYTPAGEPLPTNKRYNAAKIFSHPDVAAEVPWYGYGIEQEYTLLQKDINWPLGWPIGGYPGKQGPYYCGIGADKAYGRDIVDAHYKACLFAGINISGINGEVMPGQWEFQVGPSVGISAGDEIWAARYILERITEIAGVVVSFDPKPIPGDWNGAGAHANFSTKSMRENGGYEVIKKAIEKLGLRHKEHIAAYGEGNERRLTGKHETADINVFSWGVANRGSSIRVGRDTEKDGKGYFEDRRPASNMDPYVVTSMIAETTILWKKP

SEQ ID NO: 34859 - protein, 393 aa, Bacillus subtilis
MRKTVIVSAARTPFGKFGGVLKEVKAAELGGIVMKEALQQAGVSGDDVEGNVMGMVVQAGSGQIPSRLAARLAGMPWSVPSETLNKVCASGLRAVTLCDQMIRAQDADILVAGGMESMSNIPYAVPAGRWGARMGDGELRDLMVYDGLTCAFDEVHMAVHGNTAAKEYAISRREQDEWALRSHARAAKAADEGKFQDEIVPVNWIGRKGKPNVVDKDEAIRRDTSLDQLAKLAPIYASDGSITAGNAPGVNDGAGAFVLMSEEKAAELGKRPLATILGFSTTGMPAHELAAAPGFAINKLLKKNGLTVQDIDLFEVNEAFASVVLTCEKIVGFDLEKVNVNGGAIALGHPIGASGARILMTLVYELKRRGGGLGVAAICSGAAQGDAVLVQVH

SEQ ID NO: 34860 - protein, 575 aa, Staphylococcus aureus
MKRENPLFFLFKKLSWPVGLIVAAITISSLGSLSGLLVPLFTGRIVDKFSVSHINWNLIALFGGIFVINALLSGLGLYLLSKIGEKIIYRIRSVLWEHIIQLKMPFFDKNESGQLMSRLTDDTKVINEFISQKLPNLLPSIVTLVGSLIMLFILDWKMTLLTFITIPIFVLIMIPLGRIMQKISTSTQSEIANFSGLLGRVLTEMRLVKISNTERLELDNAHKNLNEIYKLGLKQAKIAAVVQPISGIVMLLTIAIILGFGALEIATGAITAGTLIAMIFYVIQLSMPLINLSTLVTDYKKAVGASSRIYEIMQEPIEPTEALEDSENVLIDDGVLSFEHVDFKYDVKKILDDVSFQIPQGQVSAFVGPSGSGKSTIFNLIERMYEIESGDIKYGLESVYDIPLSKWRRKIGYVMQSNSMMSGTIRDNILYGINRHVSDEELINYAKLANCHDFIMQFDEGYDTLVGERGLKLSGGQRQRIDIARSFVKNPDILLLDEATANLDSESELKIQEALETLMEGRTTIVIRDRLSTLKKPVKLCGLDKGQVTGKGTHSELMASHAKYKNFVVSQKLTD

SEQ ID NO: 34861 - protein, 321 aa, Oryza barthii
YVISVGLGTPSKTQIVEIDTGSSTSWVFCECDGCHTNPRTFLQSRSTTCAKVSCGTSMCLLGGSDPHCQDSENYPDCPFRVSYQDGSASYGILYQDTLTFSDVQKIPGFSFGCNMDSFGANEFGNVDGLLGMGAGAMSVLKQSSPTFDCFSYCLPLQKSERGFFSKTTGYFSLGKVATRTDVRYTKMVARKKNTELFFVDLTAISVDGERLGLSPSIFSRKGVVFDSGSELSYIPDRALSVLSQRIRELLLRRGAAEEESERNCYDMRSVDEGDMPAISLHFDDGARFDLGSHGVFVERSVQEQDVWCLAFAPTESVSIIG

SEQ ID NO: 34862 - protein, 321 aa, Oryza barthii
YVISVGLGTPSKTQIVEIDTGSSTSWVFCECDGCHTNPRTFLQSRSTTCAKVSCGTSMCLLGGSDPHCQDSENYPDCPFRVSYQDGSASYGILYQDTLTFSDVQKIPGFSFGCNMDSFGANEFGNVDGLLGMGAGAMSVLKQSSPTFDCFSYCLPLQKSERGFFSKTTGYFSLGKVATRTDVRYTKMVARKKNTELFFVDLTAISVDGERLGLSPSIFSRKGVVFDSGSELSYIPDRALSVLSQRIRELLLRRGAAEEESERNCYDMRSVDEGDMPAISLHFDDGARFDLGRGGVFVERSVQEQDVWCLAFAPTESVSIIG

SEQ ID NO: 34863 - protein, 321 aa, Oryza meridionalis
YVISVGLGTPAKTQIVEIDTGSSTSWVFCECDGCHTNPRTFLQSRSTTCAKVSCGTSMCLLGGSDPHCQDSENYPDCPFRVSYQDGSASYGILYQDTLTFSDVQKIPGFTFGCNLDSFGANEFGNVDGLLGMGAGPMSVLKQSSPTFDGFSYCLPLQMSERGFFSKTTGYFSLGKVATRTDVRYTKMVARKKNTELFFVDLTAISVDGERLGLSPSVFSRKGVVFDSGSELSYIPDRALSVLRQRIRELLLKRGAAEEESERNCYDMRSVDEGDMPAISLHFDDGARFDLGSHGVFVERSVQEQDVWCLAFAPTKSVSIIG

SEQ ID NO: 34864 - protein, 321 aa, Oryza longistaminata
YVISVGLGTPSKTQILEIDTGSSTSWVFCECDGCHTNPRTFLQSRSTTCAKVSCGTSMCLLGGSDPHCQDSENYPDCPFRVSYQDGSASYGILYQDTLTFSDVQKIPSFSFGCNMDSFGANEFGNVDGLLGMGAGPMSVLKQSSPTFDGFSYCLPLQMSERGFFSKTTGYFSLGKVATRTDVRYTKMVARKKNTELFFVDLTAISVDGERLGLSPSIFSRKGVVFDSGSELSYIPDRALSVLSQRIRELLLRRGAAEEESERNCYDMRSVDEGDMPAISLHFDDGARFDLGSHGVFVERSVQEQDVWCLAFAPTESVSIIG

SEQ ID NO: 34865 - protein, 323 aa, Oryza longistaminata
YVISVGLGTPSKTQILEIDTGSSTSWVFCECDGCHTNPRTFLQSRSTTCAKVSCGTSMCLLGGSDPHCQDSENYPDCPFRVSYQDGSASYGILYQDTLTFSDVQKIPGFSFGCNMDSFGANEFGNVDGLLGMGAGPMSVLKQSSPTFDGFSYCLPLQMSERGFFSKTTGYFSLGGKIAATRTDVRYTKMVARRKNTELFFVDLTAISVDGERLGLSPSIFSRKGVVFDSGSELSYIPDRALSVLSQRIRELLLRRGAAEEESERNCYDMRSVDEGDMPAISLHFDDGARFDLGSHGVFVERSVQEQDVWCLAFAPTESVSIIG

SEQ ID NO: 34866 - protein, 323 aa, Oryza glumipatula
YVISVGLGTPSKTQIVEIDTGSSTSWVFCECDGCHTNPRTFLQSRSTTCAKVSCGTSMCLLGGSDPHCQDSENYPDCPFRVSYQDGSASYGILYQDTLTFSDVQKIPGFTFGCNMDSFGANEFGNVDGLLGMGAGQMSVLKQSSPTFDGFSYCLPLQMSERGFFSKTTGYFSLGGKIAATRTDVRYTKMVARRKNTELFFVDLTAISVDGERLGLSPSIFSRKGVVFDSGSELSYIPDRALSVLSQRIRELLLRRGAAEEESERNCYDMRSVDEGDMPAISLHFDDGARFDLGRHGVFVERSVQEQDVWCLAFAPTESVSIIG

SEQ ID NO: 34867 - protein, 323 aa, Oryza glumipatula
YVISVGLGTPAKTQIVEIDTGSSTSWVFCECDGCHTNPRTFLQSRSTTCAKVSCGTSMCLLGGSDPHCQDSENYPDCPFRVSYQDGSASYGILYQDTLTFSDVQKIPGFTFGCNMDSFGANEFGNVDGLLGMGAGQMSVLKQSSPTFDGFSYCLPLQMSERGFFSKTTGYFSLGGKIAATRTDVRYTKMVARRKNTELFFVDLTAISVDGERLGLSPSIFSRKGVVFDSGSELSYIPDRALSVLSQRIRELLLRRGAAEEESERNCYDMRSVDEGDMPAISLHFDDGARFDLGSHGVFVERSVQEQDVWCLAFAPTESVSIIG

SEQ ID NO: 34868 - protein, 321 aa, Oryza rufipogon
YVISVGLGTPAKTQIVEIDTGSSASWVFCECDGCHTNPRTFLQSRSTTCAKVSCGTSMCLLGGSDPHCQDSENYPDCPFRVSYQDGSASYGILYQDTLTFSDVQKIPSFTFGCNLDSFGANEFGNVDGLLGMGAGPMSVLKQSSPTFDGFSYCLPLQKSERGFFSKTTGYFSLGKVATRTDVRYTKMVARRKNTELFFVDLAAISVDGERLGLSPSIFSRKGVVFDSGSELSYIPDRALSVLSQRIRELLLRRGAAEEESERNCYDMRSVDEGDMPAISLHFDDGARFDLGSHGVFVERSVQEQDVWCLAFAPTESVSIIG

SEQ ID NO: 34869 - protein, 321 aa, Oryza rufipogon
YVTSVGLGTPAKTQIVEIDTGSSTSWVFCECDGCHTNPRTFLQSRSTTCAKVSCGTSMCLLGGSDPHCQDSENYPDCPFRVSYQDGSASYGILYQDTLTFSDVQKIPSFTFGCNLDSFGANEFGNVDGLLGMGAGPMSVLKQSSPTFDGFSYCLPLQKSERGFFSKTTGYFSLGKVATRTDVRYTKMVARRKNTELFFVDLAAISVDGERLGLSPSIFSRKGVVFDSGSELSYIPDRALSVLSQRIRELLLRRGAAEEESERNCYDMRSVDEGDMPAISLHFDDGARFDLGIHGVFVERSVQEQDVWCLAFAPTESVSIIG

SEQ ID NO: 34870 - protein, 321 aa, Oryza rufipogon
YVISVGLGTPAKTQIVEIDTGSSTSWVFCECDGCHTNPRTFLQSRSTTCAKVSCGTSMCLLGGSDPHCQDSENYPDCPFRVSYQDGSASYGILYQDTLTFSDVQKIPGFSFGCNMDSFGANEFGNVDGLLGMGAGPMSVLKQSSPTFDCFSYCLPLQKSERGFFSKTTGYFSLGKVATRTDVRYTKMVARKKNTELFFVDLIAISVDGERLGLSPSVFSRKGVVFDSGSELSYIPDRALSVLSQRIRELLLKRGAAEEESERNCYDMRSVDEGDMPAISLHFDDAARFDLGSHGVFVERSVQEQDVWCLAFAPTESVSIIG

SEQ ID NO: 34871 - protein, 321 aa, Oryza rufipogon
YVISVGLGTPAKTQIVEIDTGSSTSWVFCECDGCHTNPRTFLQSRSTTCAKVSCGTSMCLLGGSDPHCQDSENYPDCPFRVSYQDGSASYGILYQDTLTFSDVQKIPSFTFGCNLDSFGANEFGNVDGLLGMGAGPMSVLKQSSPTFDGFSYCLPLQKSERGFFSKTTGYFSLGKVATRTDVRYTKMVARRKNTELFFVDLAAISVDGERLGLSPSIFSRKGVVFDSGSELSYIPDRALSVLSQRIRELLLRRGAAEEESERNCYDMRSVDEGDMPAISLHFDDGARFDLGSHGVFVERSVQEQDVWCLAFAPTESVSIIG

SEQ ID NO: 34872 - protein, 321 aa, Oryza rufipogon
YVISVGLGTPAKTQIVEIDTGSSTSWVFCECDGCHTNPRTFLQSRSTTCAKVSCGTSMCLLGGSDPHCQDSENYPDCPFRVSYQDGSASYGILYQDTLTFSDVQKIPSFTFGCNLDSFGANEFGNVDGLLGMGAGPMSVLKQSSPRFDGFSYCLPLQKSERGFFSKTTGYFSLGKVATRTDVRYTKMVARRKNTELFFVDLAAISVDGERLGLSPSIFSRKGVVFDSGSELSYIPDRALSVLSQRIRELLLRRGAAEEESERNCYDMRSVDEGDMPAISLHFDDGARFDLGSHGVFVERSVQEQDVWCLAFAPTESVSIIG

SEQ ID NO: 34873 - protein, 590 aa, Arabidopsis thaliana
  misc_feature (255)..(255): Xaa can be any naturally occurring amino acid
  unsure (1)..(590): unsure at all Xaa locations
TFISRFAPDQPRKGADILVEALERQGVETVFAYPGGASMEIHQALTRSSSIRNVLPRHEQGGVFAAEGYARSSGKPGICIATSGPGATNLVSGLADALLDSVPLVAITGQVPRRMIGTDAFQETPIVEVTRSITKHNYLVMDVEDIPRIIEEAFFLATSGRPGPVLVDVPKDIQQQLAIPNWEQAMRLPGYMSRMPKPPEDSHLEQIVRLISESKKPVLYVGGGCLNSSDELGRFVELTGIPVASTLMGLGSYPXDDELSLHMLGMHGTVYANYAVEHSDLLLAFGVRFDDRVTGKLEAFASRAKIVHIDIDSAEIGKNKTPHVSVCGDVKLALQGMNKVLENRAEELKLDFGVWRNELNVQKQKFPLSFKTFGEAIPPQYAIKVLDELTDGKAIISTGVGQHQMWAAQFYNYKKPRQWLSSGGLGAMGFGLPAAIGASVANPDAIVVDIDGDGSFIMNVQELATIRVENLPVKVLLLNNQHLGMVMQWEDRFYKANRAHTFLGDPAQEDEIFPNMLLFAAACGIPAARVTKKADLREAIQTMLDTPGPYLLDVICPHQEHVLPMIPSGGTFNDVITEGDGRLEHHHHHH

SEQ ID NO: 34874 - protein, 333 aa, Methanosarcina thermophila
  misc_feature (159)..(159): Xaa can be any naturally occurring amino acid
  unsure (1)..(333): unsure at all Xaa locations
MVTFLEKISERAKKLNKTIALPETEDIRTLQAAAKILERGIADIVLVGNEADIKALAGDLDLSKAKIVDPKTYEKKDEYINAFYELRKHKGITLENAAEIMSDYVYFAVMMAKLGEVDGVVSGAAHSSSDTLRPAVQIVKTAKGAALASAFFIISVPDXEYGSDGTFLFADSGMVEMPSVEDVANIAVISAKTFELLVQDVPKVAMLSYSTKGSAKSKLTEATIASTKLAQELAPDIAIDGELQVDAAIVPKVAASKAPGSPVAGKANVFIFPDLNCGNIAYKIAQRLAKAEAYGPITQGLAKPINDLSRGCSDEDIVGAVAITCVQAAAQDK

SEQ ID NO: 34875 - protein, 608 aa, Spinacia oleracea
MHHHHHHSSGLVPRGSGMKETAAAKFERQHMDSPDLGTDDDDKAMGCQKAVSPAAETAAVSPSVDAARLEPRVEERDGFWVLKEEFRSGINPAEKVKIEKDPMKLFIEDGISDLATLSMEEVDKSKHNKDDIDVRLKWLGLFHRRKHHYGRFMMRLKLPNGVTTSEQTRYLASVIKKYGKDGCADVTTRQNWQIRGVVLPDVPEIIKGLESVGLTSLQSGMDNVRNPVGNPLAGIDPHEIVDTRPFTNLISQFVTANSRGNLSITNLPRKWNPCVIGSHDLYEHPHINDLAYMPATKNGKFGFNLLVGGFFSIKRCEEAIPLDAWVSAEDVVPVCKAMLEAFRDLGFRGNRQKCRMMWLIDELGMEAFRGEVEKRMPEQVLERASSEELVQKDWERREYLGVHPQKQQGLSFVGLHIPVGRLQADEMEELARIADVYGSGELRLTVEQNIIIPNVENSKIDSLLNEPLLKERYSPEPPILMKGLVACTGSQFCGQAIIETKARALKVTEEVQRLVSVTRPVRMHWTGCPNSCGQVQVADIGFMGCMTRDENGKPCEGADVFVGGRIGSDSHLGDIYKKAVPCKDLVPVVAEILINQFGAVPREREEAE

SEQ ID NO: 34876 - protein, 394 aa, Staphylococcus aureus subsp. aureus NCTC 8325
MQEAYIVAYGRSAAAKAKQGALFHERPDDVAAKVLQGVLKRIDGKFNKNMIEDVIVGTAFPEGLQGQNIARTIALRAGLSDTVPGQTVNRYCSSGLQTIAIAANQIMAGQGDILVAGGVELMSAVPMGGNEPTNNPTLQYDDIGASYPMGLTAENVASQFDVSREDQDAYAVRSHQRAYDAQRDGRFKDEIIPIQVNSVEYTNAGPKVHTNIFDQDEFIRPDTTMEALAKLRTVFKADGTMTAGTSAPLSDGAGFVVLMSGDKVKELGVTPIARFVGFKAVGVDPKIMGIGPAYAIPEVLSLSNLSVEDIDLIELNEAFASQTIASIKEVGLDISRTNVNGGAIALGHPLGATGAMLTARLLNEMGRRPDSRYGMVTMCIGVGMGAAAIFEYVR

SEQ ID NO: 34877 - protein, 294 aa, Staphylococcus aureus subsp. aureus NCTC 8325
MWQKSLVPMPKDQFVTALRDADACFITLSEQIDAEILAQSPNLKVIANMAVGYDNIDVESATANNVVVTNTPNVLTETTAELGFTLMLAIARRIVEAEKYVEADAWQSWGPYLLSGKDVFNSTIGIYGMGDIGKAFARRLQGFNTNILYHNRSRHKDAEADFNATYVSFETLLAESDFIICTAPLTKETHHKFNAEAFEQMKNDAIFINIGRGQIVDETALIDALDNKEILACGLDVLANEPIDHTHPLMGRDNVLITPHIGSASVTTRDNMIQLCINNIEAVMTNQVPHTPVN

SEQ ID NO: 34878 - protein, 869 aa, Staphylococcus aureus subsp. aureus NCTC 8325
MDINKMTYAVQSALQQAVELSQQHKLQNIEIEAILSAALNESESLYKSILERVNIEVDQLNKAYEDKLNTYASVEGDNIQYGQYISQQANQLITKAESYMKEYEDEYISMEHILRSAMDIDQTTKHYINNKVEVIKEIIKKVRGGNHVTSQNPEVNYEALAKYGRDLVEEVRQGKMDPVIGRDEEIRNTIRILSRKTKNNPVLIGEPGVGKTAIVEGLAQRIVKKDVPESLLDKTVFELDLSALVAGAKYRGEFEERLKAVLKEVKESDGRIILFIDEIHMLVGAGKTDGAMDAGNMLKPMLARGELHCIGATTLNEYREYIEKDSALERRFQKVAVSEPDVEDTISILRGLKERYEVYHGVRIQDRALVAAAELSDRYITDRFLPDKAIDLVDQACATIRTEMGSNPTELDQVNRRVMQLEIEESALKNESDNASKQRLQELQEELANEKEKQAALQSRVESEKEKIANLQEKRAQLDESRQALEDAQTNNNLEKAAELQYGTIPQLEKELRELEDNFQDEQGEDTDRMIREVVTDEEIGDIVSQWTGIPVSKLVETEREKLLHLSDILHKRVVGQDKAVDLVSDAVVRARAGIKDPNRPIGSFLFLGPTGVGKTELAKSLAASLFDSEKHMIRIDMSEYMEKHAVSRLIGAPPGYIGHDEGGQLTEAVRRNPYSVILLDEVEKAHTDVFNVLLQILDEGRLTDSKGRSVDFKNTIIIMTSNIGSQVLLENVKETGEITESTEKAVMTSLNAYFKPEILNRMDDIVLFKPLSIDDMSMIVDKILTQLNIRLLEQRISIEVSDDAKAWLGQEAYEPQYGARPLKRFVQRQIETPLARMMIKEGFPEGTTIKVNLNSDNNLTFNVEKIHE

SEQ ID NO: 34879 - protein, 384 aa, Staphylococcus aureus subsp. aureus NCTC 8325
MKLSLNSNSKYLRAPSIRQFSNRMNNLDDCVNLTIGQPDFPMPDVVKKAYIDAINNDKTSYSHNKGLLETREAISQYFKNRYHFSYDPEEIIVTNGASEAIDTTLRSIIEPGDEIIIPGPIYAGYIPLIEVLGGKPIYIDTTATQFKITPDALESHISPKTKAVLLNYPTNPTGVVLKRNEVLNIVNVLKKYPLFIISDEIYAENTFSGKHVSFAEFEDIRDQLILIGGLSKSHSATGIRIGFLLGPQYLIDKLTFMHAYNCIFANVPAQIACITALNEGLEAPKYMNEAYVERRNYLVSELTKLGFEITAQPEGAFYIFPSIKHITDDDFEFCVDLLESTHLAIVPGSSFTEFGKGFVRISYAYEMDVLKEGMKRLAKYLNTK

SEQ ID NO: 34880 - protein, 401 aa, Staphylococcus aureus subsp. aureus NCTC 8325
MVTRSVLKFGGSSVSDFTKIKRIAEMLKERVNQDEQLIVVVSAMGNTTDQLMTNVSTLTKAPKQQELALLLTTGEQQTVSYLSMVLNDIGMNAKAMTGYQAGIKTIGHHLKSKIAQINPQTFEQAFQENDILVVAGFQGINEHQELTTLGRGGSDTTAVALAVSNQIPCEIYTDVDGVYATDPRLLPKAKRLDIVSYEEMMEMSALGAGVLETRSVELAKNYNIPLYLGKTLSNVKGTWIMSNEEILEKKAVTGVALDKHMMHVTISYPLPDNQLLTQLFTELEEGAVNVDMISQIVNLDGLQLSFTIKDSDFHQISMILETLKNQYEALAYKINEHYVKISLIGSGMRDMSGVASKAFLTLIENNIPFYQTTTSEISISYVIDDFNGQQAVEKLYDAFNI

SEQ ID NO: 34881 - protein, 372 aa, Staphylococcus aureus subsp. aureus NCTC 8325
MLVAVVKELKQGEGRVACTPENVRKLTDAGHKVIVEKNAGIGSGFSNDMYEKEGAKIVTHEQAWEADLVIKVKEPHESEYQYFKKNQIIWGFLHLASSKEIVEKMQEVGVTAISGETIIKNGKAELLAPMSAIAGQRSAIMGAYYSEAQHGGQGTLVTGVHENVDIPGSTYVIFGGGVAATNAANVALGLNAKVIIIELNDDRIKYLEDMYAEKDVTVVKSTPENLAEQIKKADVFISTILISGAKPPKLVTREMVKSMKKGSVLIDIAIDQGGTIETIRPTTISDPVYEEEGVIHYGVPNQPGAVPRTSTMALAQGNIDYILEICDKGLEQAIKDNEALSTGVNIYQGQVTNQGLASSHDLDYKEILNVIE

SEQ ID NO: 34882 - protein, 382 aa, Staphylococcus aureus subsp. aureus NCTC 8325
MFILIYLDNAATTKAFEEVLDTYLKVNQSMYYNPNSPHKAGLQANQLLQQAKTQINAMINSKTNYDVVFTSGATESNNLALKGIAYRKFDTAKEIITSVLEHPSVLEVVRYLEAHEGFKVKYVDVKKDGSINLEHFKELMSDKVGLVTCMYVNNVTGQIQPIPQMAKVIKNYPKAHFHVDAVQAFGKISMDLNNIDSISLSGHKFNGLKGQGVLLVNHIQNVEPTVHGGGQEYGVRSGTVNLPNDIAMVKAMKIANENFEALNAFVTELNNDVRQFLNKYHGVYINSSTSGSPFVLNISFPGVKGEVLVNAFSKYDIMISTTSACSSKRNKLNEVLAAMGLSDKSIEGSIRLSFGATTTKEDIARFKEIFIIIYEEIKELLK

SEQ ID NO: 34883 - protein, 482 aa, Staphylococcus aureus subsp. aureus NCTC 8325
MGSFFNKIARKEDPAIYQNKDGHLKRTLRVRDFLALGVGTIVSTSIFTLPGIVAAEHAGPAVALSFLLAAIVAGLVAFTYAEMAAAMPFAGSAYSWVNVLFGEFFGWVAGWALLAEYFIAVAFVASGFSANLRGLVKPIGIELPAALSNPFGTNGGFIDIIAAIVILLTALLLSRGMSEAARMENILVILKVLAIILFVIVGLTAINVSNYVPFIPEHKVTATGDFGGWQGIYAGVSMIFLAYIGFDSIAANSAEALDPQKTMPRGILGSLSVAIVLFIAVALVLVGMFHYSQYANNAEPVGWALRQSGHGVVAAIVQAISVIGMFTALIGMMLAGSRLLYSFGRDGLLPSWVSHLNDKHLPNRALVILTIIGVLIGSMFPFAFLAQLISAGTLVAFMFVSLAMYRLRKREGKDLPIPAFKLPLYPVLPAITFVLVLLVFWGLGFEAKLYTLIWFIVGIILYLSYGLRHSKKNDVAEYHPPK

SEQ ID NO: 34884 - protein, 412 aa, Anaplasma phagocytophilum HZ
MKNNEDKGAKLPVFFDYQATTKLDDRVLEAMIPYFQQFSNPHSRSHCYGWRAESAVEIAREQVAQSIGADPKEVIFTSGATESNNLAIKGVARFYKNRGNHIVTVSTEHKCVLDSCRHLETEGFEVTYLGVKKDGLIDLEVLKKAIREDTILVSVMMVNNEIGVIQPIREIGEICKSEGRDVFFHTDAAQAFGKLLIDVNEMGIDLLSISGHKIYGPMGIGALYVRKRNPRVRLVPLLSGGGQERGMRSGTVPTPLAVGLGEAARIALEEMDSESERIKKLRDVLYERIMNGLPHVVLNGSYSSRIAGNLNLSFSYVEGESLIMSVSDLAVSSGSACTSASLESSYVLRALNVEQDLEHSSIRFGIGRFTTLEDVERAADLIISSVRRLRDISPLWEMVQEGTNLSTIKWDV

SEQ ID NO: 34885 - protein, 352 aa, Anaplasma phagocytophilum HZ
MSFIDEAKVFVKGGNGGNGCVSFRREKYIEFGGPDGGNGGDGGSVILEASSAVNTLLFFRYHQHLRAENGKSGSGKKKSGASGRDLVIKVPIGTQVFDSPGGSLIADLSTVGQRYVVASGGKGGVGNAQYKSSTNRAPVYYTLGAVEEEFPIFMQLKVLSDIGIIGMPNAGKSSLLSRCTMSKTKVADYPFTTLEPHLGVARINEYDLILADIPGLIENANEGAGLGHKFLKHIERCSLLLHLIDGSTEDIVGAYKLVSRELAMYSKELSEKREVIVLNKCDMITEEEIVQKKHLLEDYSNKTVVTLSLDDPLNPLLVMLYEMLQKDDIEEESKKFDPFLHVGYNKKKTPKI

SEQ ID NO: 34886 - protein, 99 aa, Anaplasma phagocytophilum HZ
MFAVVETGGKQYKVKEQDVIKVELLKAGIGEKVLLKSLATFNNDGSGSFSASSGSVSAEVVAHCRSDKIIVFKKRRRKNYRRKNGHRQNMTVLRVVEVR

SEQ ID NO: 34887 - protein, 322 aa, Anaplasma phagocytophilum HZ
MVIIPGSTSLALAKSVSGMLDVPMVIPCVSRFADGEINLEVPTGVATGSGHIVLMQSLSAPASDNLIELTLLTDAVRRTLAPQRITAVIPYLCYSRQDRVMQRVDSQETFTSALSAKVIARILSTSGLDHIVTLDLHSQQAAGFFDVPFTNISAYDVFVDYLSSSNLLERLVIVSPDYGALGRVRAFVRMLSSRYNMNSIQVAVIDKYREGPGISEVMHVVGNVQDRHCFILDDIVDSGGTLCNAAAALKTRGAISVHSFITHGVLSGRAIDAIGTAELDSLVITDTIHNPDRVNLPEKIKVLSVDRLLSDYLLSHAVWRKS

SEQ ID NO: 34888 - protein, 486 aa, Anaplasma phagocytophilum HZ
MIADSQSLSEGYLERVISHLKSRGLVKPTRGPGGGYSLGMSPDRITLDMLLDSVGDKVKMVRCDADGNTGCISSYAGKCNSHDLWESMEKYMMHYFANTTILDVSNNTLKELGGGGDYIYADDNASSEVCQQVRHKLGNALLFGNFYNPSAVYGLGQKARSLVEDVRRVVIEALDARGYEVVFTSSGTEANNLVFNSVNGRHIISAIEHPSVMNAAVDPVLISVTGDGVVSLEALEEALKSGDSKGSLVSVMLANNEIGVIQPLKDVVNIAHKYGAVVHMDAVQACGKIPVSVLDIGADFVTISSHKVGGIVGAGAVLYNGKKVNVVPMLRGGMQEKGLRAGTENIPAIYSLAIALENLKDRLQKMSNVASMRDLLEKKIKEMVPECIIWGSGADRLPNTTCISMPGVSSETQLIGFDSNGIAVGVGAACSSGKIGRSKVLEALGASEEDAKNAIRISLGPEVSSDQVNKIIECWYKIYSNFHSLS

SEQ ID NO: 34889 - protein, 109 aa, Anaplasma phagocytophilum HZ
MDNNLVNRIKHDIENNDVVLYMKGTATAPQCGFSSVVASVLVHLGIAFKDVDVLRDPELREGIKEFSNWPTIPQLYVKGEFIGGCDIVREMYQSGELQELLKKKGVITG

SEQ ID NO: 34890 - protein, 751 aa, Anaplasma phagocytophilum HZ
MSDFSEKDMEALEFHSRGRPGKVALLPTKPLLTQGDLSLAYSPGVAVPCIKIASDPDLVYEYTARGNYVAVISNGTAVLGLGNIGTLAAKPVMEGKAVLFKRFADIDAVDIEVNTEDVDEFINAVKYLGHSWGGINLEDIRAPECFVIERRLSELMDIPVFHDDQHGTAIIVLAGIINALDITGKVLKNVKIVVNGAGAAGIACVEMLKFVGIPNDNIILCDQNGVIYKGRQLGVNEWKLKHAVETDARDLKDAIKGADIFIGLSVRDVLSREMLLSMNKDPVIFALANPYPEVNPEFAREVRGDAIIATGRSDYSNQINNVMGFPYIFRGALDVRAKRVNNEMKLAVAQAIAMLAREVVSDEVLEAYGGRGMRYGRDYIIPTPFDPRLISVVSPAVARAAIETGVAQKGIDDWDKYARALGSRISPTSNVLNLIYGSVKQTPKRVIFSEGEEIKVIKAALQWRSQGYGVPILVGRADKIKEGLERIGVDSLDGIEIANAAVSTRNDVYIDYLYSKLQRKGYLHRRCVRDVKTDRNVFAACMLACGDGDILVTGVTRGYRESLSDVSKVIGARSEIMGLSVIVMEDRTLFIADTAINEFPTSKQMADIAVTAAAAAKKMGHEPRVAFVSCSNFGSHAQEGTERIRESIEILDRLGVGFEYDGEMSIDVALRKESLALYPFNRIKGGPANVLIMPSLYSASISSKLLQEVGGVAVVGPILMGMEKPVQIVQMTASVSEILNLAVLSTLYNAL

SEQ ID NO: 34891 - protein, 645 aa, Anaplasma phagocytophilum HZ
MAAERIIGIDLGTTNSCVAVMEAGTAKVIENSEGSRTTPSVVAFTDNERLVGELAKRQANINAQNTIYASKRIIGRRYDDMRDLKCPYEVFPAKNGDAWIRAKGEGYSPVQIGAFVLEKIKETAERYFGAPVKKAVITVPAYFNDAQRQATKDAGTIAGLDVVRIINEPTAAALAYGLDKGDKQRTIVVYDLGGGTFDVSVLEIADGVFEVKATNGDTKLGGEDFDNAIMEHMMESFQKETGINLRNDPMAVQRVKEAAEKAKIELSTRLETDITLPFISSDSTGAKHLSLKLSRAKFEGLVDELIERTIEPCKKALSDAGIKDNSKVDEVVLVGGMTRVPKVIQRVKDFFGKEPCQGVNPDEVVAVGAAIQGGILTGDVRDVLLLDVAPLSLGIETLGGVFTPLIERNTTIPTKKSQVFSTAEDGQTAVTIKVYQGERKMAIDNKLLGQFSLEGIPHAPRGVPQIEVTFDIDANGIVHVSAKDKASGKEQTIKIQSSGGLSDEEIKKMVKDAQDRAEDDEKRKKHVELKNSSEGLIHSVEKSLKDYGDKVAGADKSNIESAIKDLRECLNDSNCSTDTLQQKYDALMNLSMKLGEAAYAANKNDGAGSADQSGSSSGGSDGNPEERVVDSEYQEINKDEDKKNT

SEQ ID NO: 34892 - protein, 568 aa, Anaplasma phagocytophilum HZ
MSEVRNLILAVVASVAIMLGWKYIYGEFFAVKTVPEGVQESESLIPEVDDIVDYASYSDALKQVPRVELKNSKLAASVSLRGALIDDASLVKYRVSLDKNSENVLLMSPEGTVSDSMVEFGWVDPKHVLKVPGRDTVWALEDGSDEQNFTIRWDNGEGLIFRLKFSVDQDYMLTVAQEVINNTDVNVHLAHYGRINRAHSKSSKSFWISHEGAIGSFGHGLKEWTYKNLEEAGSIRLSGVTREDGGRSWIGFADKYWFTALIPSASEQGKLAFRTQRVYREGASRFQVDYSKSHGTIGAHDKVEAVTHLFMGAKELELLDQYKDTLNIPMFDKAVDFGMLYFITKPVFLLLQYFHKLLGNFGLAIVMLTVAIKLVAFPLSMRSYVSMFKLKRLQPEVLRIKELYKTDDLRISKEIASLFKKHKVSPLSGFLPVLIQIPIFFALYKVLFVTIEMRHAPLFGWIRDLSSQDTANFLNLFGLIPLEPPFCIGVLPVVLGLTMVLQQKVMQKDQATPDRYGVMKFLPYIFVFVFSSFPSGLVLYWICSNVITILQQIVIRYFVCRKELGANG

SEQ ID NO: 34893 - protein, 305 aa, Anaplasma phagocytophilum HZ
MFSNFGERVEIENTGLMKCSLVAVVGMTNAGKSTLINKLVGFKASIVTNKVHTTRVKMNSVLNEGNVQLVFTDTPGIFSPKTKLEKFIVKNAWMSMKGADMVILVLDAKRRICVHVEKIIKRLQRDNVASIAVINKMDLLDEGELATFAERVQLLHKFDRVFTVSSLYGTGVRDLIDYLQESACDGPWLYPEEYRTDATLEFFAAEITREKLYLALRQELPYSLSVVTEQIEEKGDSIIIKQVIYVMKESQKTIVVGADAALIKSVSTAARYELSAMLNKKVHLYLFVKVRKFWQDHLEECVGYS

SEQ ID NO: 34894 - protein, 859 aa, Anaplasma phagocytophilum HZ
MDLNKFTEKARSFVMQAQVFAISSGHQFLLPEHLLKVMLDEKGSLTENLISMSSCNAGINEIRDALVQHLSKLPVVSGSSSGQLNLSRELAQVLEEASNIAKRNGDAYISAERLLQALVVVNSNVSRVLINAGVTATKLNTLIEKMREGDKADSETAEQKFDALRKFTQDLTELATEGKMDPVIGRSDETRRLIQVLSRRTKNNPALIGEPGVGKSAIVEGLVQSIVSGNVPIGLQGAKVLSLDLAALVAGTKYRGEFEERLKAVLSKIILSSGKIILFIDELHMLVGAGSTGDSMDASNILKPVLARGELRCIGATTLDEYREHIEKDPALARRFQPVFVAEPSINDTISILRGIKEKYELHHGIRITDSAIVAAANLSSRYIPDRFLPDKAIDLIDEAASRARIEIDSKPEIIDSIDRQVMQLKIESEALKNENTEASKQRLEEISRELQSLSSEAADLNSQWHAEKAKISKMHELTESLDSARIELEQSQRLGNLSRAGELMYGIIPSLEAELKKHEEIAGTLLRKEIKANDIAAIVERWTGIPVDSVMNSEKEKLLHMEEELKKTVIGQDSAVAAVSNAVRRSRAGVQDAQRPMGSFLFLGPTGVGKTELTKALSKFLFDSSSALLRFDMSEFMEKHSVAKLIGAPPGYVGYEQGGLLTEAVRRRPYQVILFDEIEKAHADIFNLLLQVLDEGRLTDSRGNLVNFKNTILVLTSNIGQDILINSTEDSNDPVVRKTVLEMLRLSFRPEFLNRLDEIMIFNRLTQEHIEHIVDVQISNLQKIISDKGITISLHQGAKSWLVKHGYDVACGARLLKRLIQQHIQNQLACLLLGDKITEGSKLVVFEENNSLVIKEAT

SEQ ID NO: 34895 - protein, 394 aa, Anaplasma phagocytophilum HZ
MLSERMNCIKPSPTLELSRLTLELRAQGLDIISLGAGEPDFDTPDHVKDAAIAAINAGKTKYTPVEGIPELKDSIIRSVRRDYGIDYVANQVLVGAGAKQCIYNLFMATINEGDEVIIPAPYWVSYPDMVKIAGGAPVIVNCGDYLKLTPELLRGAITPKTKWLIINSPSNPTGAVYSREELAAIAEVLKQHKHVLVITDDIYAKLVYDAEFCGILQVEPSLYDRVYIVNGVSKAYSMTGWRIGYILGNAEAIKAVSTIQSQSTTNANSIAQYAAIAALDGDQSFLDTRIKAFARRRDRVMDAVLSSGVLQADVPQGAFYVFISCGNAIGKHAPKVGVINDGSDMAKHLLNHRVAVVPGVAFGAPNFFRISYALSDDRLSEACERILEACSYLS

SEQ ID NO: 34896 - protein, 218 aa, Anaplasma phagocytophilum HZ
MKIFLDTIDVDSIAVLYKTGAVDGITTNPALLSKSERPYRELLEEICSLVQGDISVEVVSVDADDMVAEGLKLAKIAKNVVVKLPLTFDGIRACNILARERDIKVNVTLCFSATQALMAAKAGATYVSPFMGRIDDLGGDGAALIRDIRCVYSNYGFKTQVLAASVRSPMHVLEAAKAGAEVATVPVSVFKQLFLHPLTDKGLADFLKSWEVSGRSIL

SEQ ID NO: 34897 - protein, 854 aa, Neorickettsia sennetsu str. Miyayama
MRFDKFTDNSASIIQSAQLDAVSMGHQTLTSLHILRALLKNTNGIVTQLLEQCGANLDVILNSVELTLRKLPSVSGQGAGHIHLTPDAAQTIQTSIEIAGRSQDSFVTVERLLQGVAATESEASKILKEQGVDAAKLQQIIDANRGSRRADSANAENNFNALRRYTKDLTEIARSGKLDPVIGRDEEIRRVMQVLSRRTKNNPVLIGDPGVGKTAVVEGLAMRMVAKDVPQNLASASLLSLDLGALIAGSKYRGEFEERLKSVINELADSGGSVILFIDELHTLVGAGATEGAMDASNLLKPALARGEIHCVGATTLEEYKKHIEKDAALARRFQPIFVGQPTEEDTISILRGIKEKYEVHHGIRIADSAVVSAAVLSNRYITDRFLPDKAIDLMDEAASKIRIESDSKPEVIDELDRKIIQLKIEAEALKKEKDANSIGRLEKIKQDLEGLEKKQADLESSWQAEKSKLKEIQKLKEELNEARYSLEIAQRNGDLATAGKILYGTIPALENRLVNEEKQVGGTLLKREVTEDDIANIVAKWTGIPVEKMMGSEQQRLLKIEDELKKHVIGQDEAVEAVSSAVKRSRAGVQDANRPLGSFMFLGSTGVGKTELSKALAKFLFDNETALLRIDMSEYMEKHAVARLIGAPPGYVGYEEGGILTEAVRRRPYQVILFDEVEKAHHDVFNILLQVLDEGRLTDTQGHVVDFKNTILILTSNLGSDVLSEVTQITEVEKTKIMEIVRQFFRPEFLNRLDEILFFNRLSKENIEKILEIQLHKLQERIKTKNLHLSFTHEAKRWICEQGYHPVYGARPLKRVIQQYVYNPLAQAILSGSLPENGKIIFDKIGNKLEIQY

SEQ ID NO: 34898 - protein, 402 aa, Neorickettsia sennetsu str. Miyayama
MPVFLDNQSTTKPDPEVIEAMVSLFDRPCNPHSRTHSYGWHAEAAVENAREKIAHLIGASSKDIVFTSGATESNNLAIKGVANFYRSNEKNHIITLSTEHKCVLDSCRNLETSGIEVTYLPVEKNGIVNLDVLKKAIKPSTMMVSIMAANNEIGVLQPLKEIGQICREAEIIFHTDAAQAFGKIQLDVEEMQISLMSISGHKIYGPMGIGALYIRRKNPRIRVTPLFSGGGQERGIRSGTLPTPLIVGFGKAAEIAARVMEEENKRVKFLANKLYEIIKAGIPDIVLNGDLSRRLPGNLNISFPYVEGESIIMAIPEISVSSGSACTSASLEPSYVLKALGVAEDLAHSSIRFSVGRYNTEEEIIMAGELLVKQVIRLREMSPLWEMAQEGIDLNSIKWDTS

SEQ ID NO: 34899 - protein, 750 aa, Neorickettsia sennetsu str. Miyayama
MEGERDDLGVQALRYHSKGRAGKLGVHATKPLLTQEDLSLAYSPGVAHPCLEIEKNPLDVYKYTSKGNLVAVISNGTAVLGLGNLGAMASKPVMEGKAVLFKKFADIDSIDIEVDAQSIEEFILTVKNIASTFGGINLEDIKSPECFEIEERLAAMLDIPVFHDDQHGTAIIVCAGLINAADITMRKVEELKVVVNGCGAAGIACIELMKEIGVSDIVVCDQSGVIKKDRDFHEGDRKALYAVDVTANTLEEALVDADVFIGLSAADVLKPEWLSGMKKDPIIFALANPDPEIKPELAKKARPDAIIATGRSDYDNQINNVMCFPYLFRGALDVGASKFNTEMKLAAVHAIAAIAKRPISMEVMDAYGDSHMQYSREYILPKPFDQRLIAEIAPAVARAAVETGVAKKPIYNFDAYKDDLVRRLASGATTLFGMVSSVLRGNGKRIIFAEGEELKSIRAALQWRDIGYGTPILVGRNSVIEAKMDEMNLRNREGFEVANAAVSQRSGEYIEYMYSTLQRKGFPYERCVRDVETDNDVFAACMLALNDGDAVITGLTWSNTEDRLKSIMPIVGAAGVVFEMSIIVAGIGTFFICNTGINDTLDAGDIAEVAIKAAEVAKSMGCVPRVAVIANSNFGSVNSPSALMAREAIEILDDFGAPFEYEGEMDLGMALNEKSKKLYPFSRLTDRANVLIVQNVEVVDAVCKFSSEIMETTVIGPLLFGLKRSVQIVRPSYGATDILNLALIAAKTSL

SEQ ID NO: 34900 - protein, 397 aa, Neorickettsia sennetsu str. Miyayama
MLSKKIESIKPSATAAATRRVCELRARGKDVISLCIGEPDFSTPFLGQEMAIQAIKDCDDNYSPVAGTMVLREEIAAKFVRDNALHYSPHEIVVGNGAKQVLYNVLGAILNPEDEVVLIAPYWVSYCEIVRIFSGKPVVVPSTKKFRIDITAIREALNTKTKAILINSPNNPSGVCYEESELRDLASALRAHPQVHIISDDIYEHITYAESSFLNIANVAPELGERIILVNGVSKCYAMTGWRVGYAAIPNKAVISLVCRLQEHSTFGVCTIAQAAALGALRSGADVLSERLAVFARKRNKAVEVLSMLPELCCYKPDGGFYLFLSCSAFFGKKSPSGFEVKTDSDVADYLLEEHAVAVVPGEEFGVPGYFRISYALSMDLLEQACMRIVKAFKALR

SEQ ID NO: 34901 - protein, 201 aa, Neorickettsia sennetsu str. Miyayama
MKLGNSCSFNEIRASVLDQNTELLSDLLDKLQTDALFRMVDSNGDMILHIACNAGNVKAVLAALESGADLNARNESAGDTPLHIAMRRGNVVIIMHLLNNGASVTEKNFSGNTPIHEAVISKVEKKILKRVVESFVSTEASSEHSSLLNKAGKTPMDIATEMNDSEIISTLMPLETALTRKKRFSNSDKSQIRPNDFHCGN

SEQ ID NO: 34902 - protein, 530 aa, Neorickettsia sennetsu str. Miyayama
MSRGEYLTMLTAKTRYAIAASIDIALHSKGRKYVKTSEIASRQKISEKFLELILPPLKKQGILESLLGPGGGYRLAKEPDTIFLMQILKAVADTPKITRCGGDGQQSCTGEAKKCCTHNLWVVLEKRFNNFFESVTLQDIISDDVLRQEKNMHNGSILESHQEDIIYMDNNATATPFRYAVEKACILLKLPYNASSIHRRGQAAREVIEEARRLIKKNLILEENYELVFTASGTEANNMLFHNASDYHHIVCSTDHSSTLKVANNPIKVDVDENGIIKLESLKRALLENHGQKLVSLCLANSETGVIQPLDLIMEIAKKHGALVHTDATQAISRIYCRLNETQPDFITFSAHKMGGIIGAGCLVYRKYLSKELKPLILGGGQERNLRSGTENLAAIAAFGNASTFINTSIKNMKNIRSLRDYMEDEISKRMKSAVIVGQKAQRLPNTSCIIIPEIDGTTQLMHFDMHGICVSNGSACSSGQPEASHVLLAMGFDNNMAKSAIRISLGISNTKEEVKKLVSTWEILYNIRA

SEQ ID NO: 34903 - protein, 566 aa, Neorickettsia sennetsu str. Miyayama
MQQTYNVFIATLLSFLVIIGWNLVFYNPTQRESFHEVQKKESVKVYESLESTLSTERIKISSSKLEGSIQLTGLALDDLILKDYKSDDLKDQYRLLYPNKTKGAYFINPGWTIPGDPGLRTPSSKTKWQADSELLTPGSPVTFSWDNGFGLLFKVVVSIDDNYMFTFKQIVENKSQNDLSVGSHFTITKSLPETNKSMLIMHEGPVGVVKDQLMELKYSKIAKKNKSIAFDEDTQNQRGWFGFSDKYWFVSQIFENSSDGKVYISHIDDKSDDIFRITNFNAQKIVRGGGLIVKETMLFAGPKKLSLLEEYAQNMRIYLFDRAVDFGVLYFITKPISKLLQVFHHLVGNFGVAIILLTFFIRVLMLPLSIKSGISMFKIKELQPEILKIKSMYQNDKDALNRASVELFRKHRVTPMSGCLPTLLQVPVFFALYKVIFITVEMRQAPFFLWISDLSLPDPTNLFTLFGLIDWNCPDFLSIGILPIILGLTMVIQQKLSPSHYDDGTQAFMIKAMPYVFMILFASFPSGLVLYWVFNNVLSLLQQFVIGKYLFTKKFKAMTKTQESLP

SEQ ID NO: 34904 - protein, 305 aa, Neorickettsia sennetsu str. Miyayama
MKVLMGSKAGKLGQEIASLLNLAVVRAQANRFPDGESDVLVHHEDVIPGTKVLVIQSLCSDADIMEFLFIVDALNRLGVRDIALVSPYFGYARADRIVAPGSAISAKVVARLIGERISLLFVLDVHFPQFEGFFEIPVYNILPWTLLKESVHVGHNMALVAPDVGAVKKLKPLSEELGTNLVIMNKRRPRACLSEVTEVVGEIHGRDCIIVDDIVCGGGTLCNSAAKLKELGAKSVAAFVTHGVFSGSARQKIMDSQIDRIVVTNSIPGPGCEAKGKIEIISAADLLARKIHSVYLDVNTKSPNC

SEQ ID NO: 34905 - protein, 341 aa, Neorickettsia sennetsu str. Miyayama
MKFIDEVKVFLKAGNGGDGCSSFRREKFVEFGGPDGGCGGDGGNVIFITDENLNTLLDYRHRVHLKAENGKPGRKSNKRGESGSDLVCKVPIGTQILTQDRVLLSDLEQPKQSFISAFGGKGGRGNATFKNSLNRAATEFTCGEPGEEKTVILNLKILADIGLIGLPNAGKSTFLSRCSNAKPKIADYPFSTLEPIVGIAKINNHEIVIADIPGIIEGAHKNLGLGVKFLKHIERCKALIYLIDGTEKDIYSVYTLLSNELSLYSKKLEIKEHFILITKSDLLGKDEVQEKCQYIREKTGKLTLHTGIDQELASSLKAAQKLVELHQPGNKSRGKYNPLEV

SEQ ID NO: 34906 - protein, 636 aa, Neorickettsia sennetsu str. Miyayama
MAGEIAIGIDLGTTNSCVAIKDKVIENAEGARTTPSVVAFTSDGQTLVGAPAQRQAVTNAKNTIVASKRLIGRRFKDNVIKGIQRDYPYKIIEAKNGDAWIEAGGKSYSPSQIGANVLIKLKEAAETYTGKKVTKAVITVPAYFDDAQRQATKDAGRIAGLEVLRIINEPTAAALAYGLDKTATTKNIAVFDLGGGTFDVSILELGDGVFEVKATNGDTHLGGEDFDRMILNFLVEEFKKENGMDLKNDPLALQRLKEAAEKAKKELSSTQETDINLPYITADAAGPKHLNVKFTRAKLESLVSDLIDRTIEPCKKALKDSGLKREEINEVVLVGGMTRMPAVVKKVTEFFGKEPHKGVNPDEVVAIGAAIQANILAGGSDAQDIVLLDVTPLSLGIETLGGVFTKLIDRNTTIPTKRSQTFSTAEDNQSAVTIRVFQGERQMASDNKLLGQFSLEGIPPAPRGMPQIEVTFDIDANGIVHVSAKDKGTGKEQTVKIQASGGLTEEEIKKMVDEAASKADEDKKRRELVEAKNSAESLIHSTEKSLSEYGSKISSSDKQSIDDAISDLKSVLAKDDASLIKEKTDALSKVSMKLGEAMYKESQSASNDPSPKNDSTEEGERVVDPEYEEVKDEDSK

SEQ ID NO: 34907 - protein, 106 aa, Neorickettsia sennetsu str. Miyayama
MKDIFAKIEGIIRRHDVVLFMKGTSGLPMCGFSGAVVNILKALDVTFYGVNVLEDPELREGIKKFADWPTIPQLYVKGEFIGGCDIVREMYENRELQTLFEDSLAG

SEQ ID NO: 34908 - protein, 214 aa, Neorickettsia sennetsu str. Miyayama
MFFIDSANLEEIRSAVELGLVSGVTTNPTLISKSGRGHEDVISEICSIVSGPVSAEVVSLTSSEMVDEGLHLSGIAKNVVVKLPCTEDGIRAASKLKAHGCIVNITLCFSAAQAVLAASVGADFVSPFIGRLDDIGHQGVLLIDEIAQLYEDRYETKILAASIRSVEHVLTSLKLGAHVVTVPVKILKQMFEHPLTDRGLEIFMRDYKEAKCDK

SEQ ID NO: 34909 - protein, 308 aa, Neorickettsia sennetsu str. Miyayama
MSSPEYNSSDCLQTGENFSTRSAFVSLIGNSNVGKSTLLNALIGSKISAVTHKVQTTRTRIRGIYTKDDVQLVFVDTPGIFIPRCQLERVIVKNAWRAFAGTDIFCFIIDPRRPISDSTKDILRKANGKLVLVINKIDLVEKPRLLEVAQELNSLGHFEKTFMISALKGNGVADLMNYLLKSAQPGPWYFDKEDETDMPLGFNLSEILREKLFIRLHQELPYSLTVETENIEILDRSVKIRQVLHVMSESHKMIVIGSCGKTIGTIRKSAEREMANLFSGRKVYLSIFVRVSPNWGEKSDILNTINYI

SEQ ID NO: 34910 - protein, 312 aa, Mycobacterium leprae
MSLLPFDFVSLDIVYYPVSWIMWVWYKLFAAVLGPSNFFAWALSVMFLVFTLRALLYKPFVRQIRTTRQIEELQPRIRALQRKYGKDRQRMALEMQKLQREHGFNPILGCLPMLAQIPVFLGLYHALRSFNRTTGGFGQPHMSVTENRMTGNYVFTPVDVGHFLDANLWGAPIGAYMTQRSGLDAFIDFSRPAVILVGIPMMVLAGVATYFNSRASIARQSAEAAENPQTALMNKIALYVFPFGVVVGGPFLPLAIILYWFSNNIWTFGQQHYVFSMIEKEDEAKNRKLSNVGRLTRLRQALSQSTSLRRHR

SEQ ID NO: 34911 - protein, 343 aa, Methylosinus sporium
MYQIVIETEDGETCSFECGPSEDVISAGLRQSVILLASCRAGGCATCKADCTDGEYELIDVKVQALPPDEEEDGKVLLCRTFPRSDLHLIVPYTYDRISFEAIQTNWLAEIVECDRVSSNVVRLLLQPLTADGAAPISLNFAPGQFVDIEIPGTHTRRSYSMASVAEDGRLEFFIRLLPDGAFSNYLRTQASVGQRVALRGPAGSFFLHKSERPRFFVAGGTGLSPVLSMIRQLKKEADPQPATLFFGVTNYEELFYVEELRALQKAMPSLDVQVAVVNATEANGVAKGTVIDLMRAELEKLRGAPDIYLCGPPGMIEAAFDAAATAGVPKEQVYLEKFLASG

SEQ ID NO: 34912 - protein, 417 aa, Ehrlichia chaffeensis str. Arkansas
MKRILVKKFGGTSLQDIECINRVAEIIKQDVNNNYKVVVVVSAMGKFTDNIISQIKQISDVKSQSERSEYDLIISSGEQISCGLLSLALQKIGINAQSWLGWQLPIVTTEDHTKARIIDINTCSLQDSLANNDVAIVAGFQGMHKNNRVTTLGRGGSDTSAVAIAAALKVDLCYIYTDVDGIYTADPNVVPKARKLDYITYDEMIEMSSLGAKVLQVRSVEIAMKYNIKLCILSTFNPGKGTILRKKGESDMESQLITGVTCNNKTASITLKEVKAISGVTTVFNAIAEKNINVDMIIQSVNDNNANDITFTISEEDLPTTTKFLTEIQTELMYQDLIINSEVAKVSIIGVGMISHSGVAYKMFDTLTSNNIKILAVTTSEIKISVLISRKDSQLATIALHSTFGLDNTESDLHIIS

SEQ ID NO: 34913 - protein, 393 aa, Ehrlichia chaffeensis str. Arkansas
MKKIVLAYSGGLDTSVILKWLQENYNCEVVVFTADLGQNDDMSAIRQKAAASNVKEIFIEDLKEEFVKDFVFPMFRANTVYEGYYLLGTSIARPLIAKRQIEIAHLTGADAVAHGATGKGNDQIRFEFGYYSCDPNIKVIAPWRQWELTSRNSLIEYAKKHGIDVPLDKASEPPYSIDANLLHTSYEGKSLEDPYIEPDYTMLSKSVIPELASDTPEYIEISFKNGDPHAINNVPLSPANLLQQLNIIGGRHGIGIIDIVENRYIGIKSRGVYETPGGTILLHAHRAIESITLDREAAHLKDEIMPRYAKLIYNGYWWTTERKMLQALIDKSQDKVNGVVRLKLYKGSVMVVGRTSENSLYSHNLASFDSSGNYNHTDAEGFIKINSLRLRNS

SEQ ID NO: 34914 - protein, 635 aa, Ehrlichia chaffeensis str. Arkansas
MAVIGIDLGTTNSCVAVMEGGDAKAIENSEGARTTPSIVAFTDSERLVGDPAKRQATTNAKNTIYASKRLIGRRYQDVKDIKSSYDVVSAKNGDAWIKVLGKEYSPSQIGAFVLEKMKETAERHLGHKVEKAVITVPAYFNDAQRQATKDAGRIAGLDVIRIINEPTAAALAYGLNKSDKQKVIAVYDLGGGTFDVSILEIADGVFEVKATNGDTMLGGEDFDHAIMNYLMDDFKKTTGIDLHNDSMAVQRIKEASEKAKIELSNRMETDINLPFISSDSTGPKHLSLKLTRAKFENLVDDLIQRTIEPCKKALKDAGISADKIDEVVLVGGMTRVPKVIQKVKEFFGREPHKGVNPDEVVAIGAAIQGSILAGDVRDVLLLDVTPLSLGIETLGGVFTPLIERNTTIPTKKSQVFSTAEDGQTAVTIKVYQGERKMAADNKLLGQFSLEGIPSAPRGMPQIEVTFDIDANGIVHVSAKDKASGKEQAIKIQSSGGLSDDEIQRMIKEAEQKAGEDEKRKKFIELKNNGENLVHSTEKSLNEYGDKIPNSDRLEIENAIRDVKDGLSSSDMESVDVLQQKVDHLMKVSMKLGEALYGNAANNPSSAENSTASNNEEEDSKVVDSDYQEIDKKDSK

SEQ ID NO: 34915 - protein, 580 aa, Ehrlichia chaffeensis str. Arkansas
MKVLFQFVRPHLLYFIFAYLVVAVSSISILAFFYELRNLVDLCIATSDVAAINNALLFLFSIVLIVGLSSFLRLWLTGYVSEKVILDIRIKLYNKIIHFSPRFFENNSISSLITRLMADTATLQVILSTSMSTILRNTTTLLGSVVMLVHTNVKLTMYTVIITPIILIILAFFGKKVKVLLRKVRVNLDNVTSFVEETCRGIYVIQSFSREDITKQKFSNLLANTLSMTNRYIVLRALLVTLVITLTMLSIGFVLSFGIREVLNGNMTVGSLFSFIFYAIIAASSMNNMGDNFNDIQKAVKISEDISKMLLMQTDIIEVKDPYKIQEVQDKISINNVTFYYPSKPDNPALKNVSFTIEKGQVVALVGPSGSGKSTIVNILLRFYDVNIGNITIDGMDIKKLSLMNLRSLFSIIPQSHIMFSGTIWDNITYGVTNAEYEDVRNAAKIACILDFVESLPDKFDSLVGERGLCLSEGQKQRIAIARAVLKDSGVLVLDEATSSLDSKNEQLIHDALDNLRNNRTILVIAHRLSTILKADKIIVFNNGCIDDIGTHKSLMQKPNGLYAKLAKLQLSNDSFSEDI

SEQ ID NO: 34916 - protein, 492 aa, Ehrlichia chaffeensis str. Arkansas
MSHIANSQSLSEGYLEQIIVKLKKQGLINSTKGPGGGYSLNKSPNSITLNLILESIGENIKITRCKNHLIGCLSNNARCITHNLWDNIGNHIKKYLNSISLEDILNNNFKSGTTVNNNANEYIYADYNSTSTILPTVKSQLDNLSSLNIYNPSSTHKLGQNTKSIIEKTREIAINQLNAKNHDVIFTSSGTEANNLVINSTADYKYLISSIEHLSIMNCAINAELIPVDSNGTVCLDTLSDILYKCKDEKVLVSIMTANNETGVIQPIKEIVEISHKFGAIVHTDAIQACGKIHVDIEDLGVDLLTISSHKLGSIAGTGILFFNSKKIKIKPMILGGHQEKGLRAGTENVVSIYLLSISLSNLKDSIKKMSSVERLRDKLENQILNLVPEAQIFGKNTRRLPNTTCISMPNVNSEIQTISFDIDNIAVGSGSACSSGALEHSHVLAAMGIDDNVAKNSIRISLSPDVTDDQVNKIVNCWYKIYKNNQLLKLN

SEQ ID NO: 34917 - protein, 296 aa, Ehrlichia chaffeensis str. Arkansas
MDHISKKCSMNAIVGTTNAGKSTLINMLVGQKVAAVTPKVQTTRVRMHAVLNNENVQLIFIDTPGIFSPKTKLEKFIVKHAWMSLKGIENVILLLDVKNYLNKHIEKIISRIKQSNINAILVVNKIDTVPTSSVDKAIEHMYSLHSFSKTFTISALHDIGLSRLVDYLCEISPNGPWLYPEDQISDAPLKFFMAEITREKLFLSLHHELPYSLSVVTEALEEKEDGSLVVKQVIYVTKDSHRTIILGKKGEMIKKISMESRSDLAKILDLKIHLFLFVKVREFWQNHLDECVGYVE

SEQ ID NO: 34918 - protein, 579 aa, Ehrlichia chaffeensis str. Arkansas
MVEVRNLILAVILSVLIMMGWRFIYDKFFTTQHAIEDNTSSDAMIPEIDDNFIHKTRSEVIESNTNIRIKLSNEKMNGSISLKGAQFDDLIFKNYHVTPDKNSEGIVLLSPEETENVYFIEFGWIDPQHKITVPTHSSIWNSDQSTLSPNNPITLTWDNKQGVVFKIKITLDNDYMFKIEQMVTNNTDSIINLIPYGRINRSKHTAEKSYWISHEGAVGSFGNTLKEWTYKAITKEKNIKIQQQDINDNQNQWIGIGDKYWFTALIPNVSQKSNLNFHVKHAKHNSKDRFQVDFSHDNYIAHPNNTVTSINYLFAGAKELKLLDTYKDNLNISLFDKAVDFGVLYFITKPVFLLLEYFNNVIGNFGLAILLLTIVIKLIMFPLSHKSYVSMLKLRHLQPDIVRIKELYKNDNDKMSKEISAIFKKNNVNPMSGFVPVLIQIPVFFALYKVLFVTIEMRHAPFYLWIKDLSSFDTANILTIFGLLKFNPPICIGILPVILGITMIIQQKLNNHSSLNQDKTQANFMKFLPYIFIFIFSSFPAGLIIYWICSNSITIVQQLIIKHYVTKKFNFYKTVQQED

SEQ ID NO: 34919 - protein, 758 aa, Ehrlichia chaffeensis str. Arkansas
MVDLENNGFDEKRKEALEFHCKDLKPGKVSLLPTKPLLTQRDLSLAYSPGVAVPCLEIARNPDLVYEYTARGNYVAVISNGTAVLGLGNIGPLASKPVMEGKAVLFKRFADIDAVDIEVNTSDVDEFVNTVKYLGLSWGGINLEDIKAPECFIIEKRLSEIMDIPVFHDDQHGTAIIVAAGLINALDITGKSFKDVKIVINGAGAAGIACLEMIKLIGVPAENITLCDQNGVIYKGRQLGMNEWKEKHAIETENRSLKDALIMADVFLGLSVKDVLSKDMLLSMNRDPVIFALANPDPEINPNVAHEIRPDAIIATGRSDYNNQINNVMGFPYIFRGALDVRAKSVNNEMKIAAANAIAMLAREYVSDEVSDAYGGRKMNYGKDYIIPTPFDPRLITVVSPAVAKAAIDSGVARKNIENWDEYTKQLASRLSLTSNILSMMYSAVKCDPKRVIFSEGEEEKVIEAAVQWRNQEYGLPILVGRIDKVQEAFDRLGIKDTKGIEIANAAISQRNNEYTDYLYKKLQREGYLYRSCVRDVKTDRNVFAACMLACGDGDVLITGMTRGYYASINDVQKVIGSQGVVFGLSIIVMKERTIFVADTAIHESPTPEQIAEIAIQASVQAKKMGYEPRVSFISSSNFGSHSQEDAKKMRQAIKILDSYNVSFEYDGEMSVDTALNPELLTLYPFCKLTGEANVLVMPTLHSASISSKLLQRAAGVSVIGPILIGMEKPVQIVQMSSSVSEILNLTVLASLVNNTNF

SEQ ID NO: 34920 - protein, 287 aa, Saccharomycopsis fibuligera
GEINFDENAWFAYNEANKLFAEEIAKHTKENDMIWVHDYHLMLLPELLKQRIAEKKIFNVKLGFFLHTPFPSSEIYRILPVRKEIMAGVLSCDLIGFHTYDYARHFLSSVSKVLHLNTLPNGIEYNDRFISVGAFPIGIDVDKFVNGLKTDTVQQRIKQLRAKLGDDIKVIVGVDRLDYIKGVPQKLHAFEVFLNEHPEMVGKVILIQLAIPSRGDVEEYQNLRATVNELVGRINGKFGTIDFVPIHFMHRSVPFNELISLYNISDVCLVSSTRDGMNLVSYEYIAC

SEQ ID NO: 34921 - protein, 258 aa, Eucalyptus globulus subsp. globulus
VELHFHDCFVNGCDASILLDDTPSFVGEKTAAPNNNSVRGFEVIDRIKASLEKECPGVVSCADIVALAARDSVVHLGGPSWTVSLGRKDSITASRSLANTSIPPPTSNLSALITSFAAQGLSVKNMVALSGSHTIGLARCTSFRGRIYNDSNIDTSFAHKLQNICPKIGNDSVLQRLDIQTPTFFDNLYYHNLLQKKGLLHSDQELFNGSSVDSLVKKYACDTGKFFRDFAKAMIKMSKIKPPKGSSGQIRKNCRKVN

SEQ ID NO: 34922 - protein, 171 aa, Mastigocladus laminosus
FPPVVESFERNKTIFFPGDPAERVYFLLKGAVKLSRVYEAGEEITVALLRENSVFGVLSLLTGNKSDRFYHAVAFTPVELLSAPIEQVEQALKENPELSMLMLRGLSSRILQTEMMIETLAHRDMGSRLISFLLILCRDFGLPCADGITIDLKLSHQAIAEAIGSTRVTVT

SEQ ID NO: 34923 - protein, 253 aa, Rumex acetosa
MEFSNELSRDMEDGSPQRKMGRGKIEIKRIENVTNRQVTFCKRRNGLLKKAYELSVLCDAEVALIVFSSRGRLYEYANHSVKATIERYKKTCSDSTGVTSVEEANAQQEAAKLRNQIRTLQNQTRNTSRNLMGEGLTSMNMKDLKNLETRLEKGISRVRAKKNELLFGEIEFMQKKEIELHNNNQFLRAKIAESERSQQSMNLMPGSSSGEQHYELMPQSQAGPFDSRNFFQVSDLQPDERYSCQNQTPLQLV

SEQ ID NO: 34924 - protein, 663 aa, Metarhizium anisopliae
MSGKVTAVGIDLGTTYSCVGVFDQEKCEIIANDQGNRTTPSYVAFNDTERLIGDAAKNQVTKNPENTVFDAKRLIGRKFSDADVQADMKHFPFKVIDKSGKPAVEVQYMGETKTFTPEEISSMILMKMRETAEAFIGETVNNAVITVPAYFNDSQRQATKDAGLIAGLNVLRIINEPTAAAIAYGFDKIRPEDKDKDDIPERNILIFDLGGGTFDVSLLAVAGGVFEVKSTAGDTHLGGEDFDNRLVNHFVNEFKRKHKKDLTTNSRALRRLRSACERAKRALSSASQTSIEIDSLMENIDFYTSITRARFEELCQDLFRSTMQPLDRVISDAKIDKNQVDEIVLVGGSTRIPRIQKLITEYFNGKQPSKSINPDEAVAYGAAVQAAILSGYNSQTTSSILLLDVAPLSLGIETAGGMMTKLIPRNTTIPTKKSEVFSTFSDNQPGVLIQVFEGERQRTKDNNLLGKFELTGIPPAPRGVPQIEVTFDLDANGIMNVSAVEKGTGKSNKIVITNDKGRLSKEEIERMLADAEKYKEADEAEGRRVGARNALDHYASNLRTTLQEPGVDEKLDAGDKEKLAAAADISSWLDQNEQASAEEYEAKQKEIEAIANPIMMKFYGAGGQAGGMPGGMPGGPGGPGGFPGAGGPGGAGGDDGPTVEEVD

SEQ ID NO: 34925 - protein, 366 aa, Guillardia theta
AAGAYAFTGPAPVALRHGRAGALSQRLSMAATIPKVPFSGVSPTGPSGPTLPAPGEDLEFLEAKPYWDQSGVQVNIAKQKNPLIGKIISVQRIVGPNSPGETCNIIIDHQGKLPYWEGQSYGVVPPGIDPKKNKPYGVRLYSIASTRYGDDKTGKTTTLCVRRATYWCPELKAEDPAKKGVCSNYLCDSKPGDEISLTGPSGKVMLMPEDDPNMTYIMVATGTGIAPFRSFLRRLFGEGNPAGKNFKGLAWLFLGVANKDSLLYDEEFQVYLRQNPDKMRLDYALSREGPLNKKGGKMYIQDKVEEYADEVFDALDKGAHIYFCGLKGMMPGIQDMLRGVCESKGLNFEEYLEGLKKKGQWHVEVY

SEQ ID NO: 34926 - protein, 642 aa, Rhodomonas salina
ARGIDLGTTYSCVGVWQHDRVEVIANDQGNRTTPSYVAFTETERLIGDSAKNQVAMNPHNTVFDAKRLIGRRFQDPAVQEDIKHFPFKVLCKDGDKPAVEVKFKGETKVFAPEEISSMVLLKMKEIAESFLGKEVKNAVITVPAYFNDSQRQATKDAGAITGLNVLRIINEPTAAAIAYGLDKKTSGSKSERNVLIFDLGGGTFDVSLLTIEEGIFEVKATAGDTHLGGEDFDSRLVNFFVSEFKRKYKKDVTSSARSLRRLRTACERAKRTLSSGTQTTVEIDSLIDGIDYYASITRAKFEELCMDLFRGTLEPVEKVLRDSKISKSEIHDVVLVGGSTRIPKVQQLLIDYFNGKELCKNINPDEAVAYGAAVQAAILAGDTSEKMQDLLLLDVAPLSLGLETAGGVMTVLIKRNTTIPTKKTQVFSTYADNQPGVLIQVFEGERSRTKDNNILGKFELTGIPPAPRGVPQIEVTFDIDANGILNVSASDKSTGKSNKITITNDKGRLSKEEIERMVEEAEKYKNEDEKTRQKMEAKNSLENYAYNIRNTVRDDKLKDKIEEEDKKTIEEKVKEVLEFIETNEDLEKEEYEEKEKNLKNLANPIISKLYQQGSVPDMGNFNGQQTEGAEGANMGPKIEEVD

SEQ ID NO: 34927 - protein, 174 aa, Populus tremula
MSRDRDPLSVGRVIGDVLDPFTKSIPLRVTYNSREVNNGCELKPSQVANQPRVDIGGEDLRTFYTLVMVDPDAPSPSDPSLREYLHWLVTDIPATTGASFGHETVCYESPRPTMGIHRFVFVLFRQLGRQTVYAPGWRQNFNTRDFAEVYNLGSPVAAVYFNCQRESGSGGRRR

SEQ ID NO: 34928 - protein, 764 aa, Robiginitalea biformata HTCC2501
MSKEKKRREALIYHAKPTPGKIKIVPTKPYATQRDLALAYSPGVAEPCLEIHKDVEQVYKYTAKGNIVAVISNGTAVLGLGDIGPEASKPVMEGKSLLFKIFADIDGIDIELDTKDVDKFVETVKIMAPTFGGINLEDIKAPEAFEIERRLKEELNIPVMHDDQHGTAIISAAALLNALDLAEKKIEDVRIVISGAGAAAISCSRLYRSLGASRENMVMLDSKGVIRSDRPELSAEKKEFATDRKIDTLEEAVRDSDVFIGLSIADILTPAMLKTMNKNAIVFAMANPNPEIDYNLAMKTRKDIIMATGRSDHPNQVNNVLGFPFIFRGALDVRATKINEEMKMAAVKALADLAKQPVPEQVNIAYGETRLTFGREYIIPKPFDPRLIAEVPPAVARAAMESGVARAPIADWGRYREELLQRSGDDKKVIRWLMSRAKSMPKKIVFAEADQLDVLKAAQIAHDEGIAHPILLGNRKVIEELKEELEFDAEIPIIDQYEEDSLEKREAYARSYWELRQRKGSTLYNSRSKMRERNYFGAMMVREGDADGMISGYSRSYSSVVKPIFEVIGRASEVSRAATVHVMITSRGPIFLADTSLNIDPTAEELAEITRMTANLARAFNFEPNIALLSYANFGSSEHPRAVKVREAIRILHEQEPDLVVDGEIQTDFALNRKLRQSQFPFSKLAGKNVNTLVFPNLESANITYKLIKELQATDTIGPIMLGLRRAVHILQMGASVEEIVNMTAVAVIDAQEREKRRRAKRKK

SEQ ID NO: 34929 - protein, 252 aa, Robiginitalea biformata HTCC2501
MLINISFRDSLFFATFIFMEEEIGRSRCENCIVRKFNSLKAMSKEELKAVSDSKVSRKIKKGEIIFDEGEKLAGVYCVRDGVSKLSKLSENGKDQIVKLASKGQVLGQRSVVAEESANLSATAVNDMEICFIPREAITDTLHKNPEFSYEVLQTMAHDLREADDVIVNMSQKSVKQRIAQALLYLRENFGEDGEGYLLLVLSREDIASVVGTATESCIRMLSELRKEGLIKTSGKRLSITDARKLKSLADGF

SEQ ID NO: 34930 - protein, 501 aa, Robiginitalea biformata HTCC2501
MRRGFIIMSVLLVLVLAAMLILYPLWWGVALIIIPLLILGLIDYCQKSNNIRRTYPLFGRITNLLEKQRHVFQEIVLLNRAEGKPFNWIQKEIIYKRAADANKSQPFGTQIPYDKVGREWFTHSTYPVKEVNDDFRVTVGSSLCTQPYSSSILNLSGMSYGSISKNATLALNGGAKIAGFAQNTGEGGFTPYHQEYGADIIFQIGTGYFGCRTKEGNFDTEKFRDIALHEVVKMIEIKISQGAKPGFGAILPAKKNTEEIAKFRVVEKGKQILSPPHHSAFGSDEEMIFFIDKLRKLSNGKPIGIKLCIGQKDEFDSMAQSLAKNQNYPDFIAIDGAEGGTGAAHMESLHWAGLPIVEAIHFAHSTLVKHKIRDEIKLMAAGKIISAFDIYRMLALGADACYSARGMMFALGCVQSLKCNLDKCPTGITTMEPSRVKSLVVEDKKAKVANYHKNTMEAFKELLGSMGLENRKGIQKKYIVRRINETETKTYDEIFVNPSKE

SEQ ID NO: 34931 - protein, 313 aa, Robiginitalea biformata HTCC2501
MSYTVPEPKLFACTQSQALGKEIAKAYGADLGKVIFSRYSDGEFQPSFEESIRGARIFIIGSTHPGPEHLMEMLLMLDAAKRASARHITAVMPYFGWARQDRKDKPRVPIAAKLVAKMLETAGATRIITMDLHADQIQGFFEKPVDHLFASTLFLPYLRKLKLDNLTIASPDMGGSKRAYAYSKALESDVVICYKQRAKANVISHMELIGDVADKNVVLVDDMVDTAGTLTKAADLMMERGAKSVRAITTHGLLSGSAYERIENSRLEELIITDSIPPRQESPKVKVLSCAELFADVMHRVHHNTSIASKFLM

SEQ ID NO: 34932 - protein, 290 aa, Robiginitalea biformata HTCC2501
MKQSKNYAGIPDEFSQMEKAAVVLIPVPYDGTSTWGKGADKGPDAFLEASENMELYDIETGTEVYRQGIYLAPPVTGDHPEGVVNAVHDQVKDYIMRNKFVTLFGGEHSLSIGSIRAFNECFDDLTVLQIDAHADLRKTYEGTAYNHACAVHEASQTTNLVQVGIRSMDAIEKTYMDPEKVFFAHEMAADEFWMDKVIELLTDNVFITFDLDALDPSILPSTGTPEPGGLFWYETLEFLFRVFEEKNVVGFDIVELCPNPADRSSDFLAAKLYYKMLSYKFREDAIEGDA

SEQ ID NO: 34933 - protein, 64 aa, Robiginitalea biformata HTCC2501
MTGTVKFFNESKGYGFITNDDTGRDIFVHATALDGLVLNQGDKVEYQETEGRKGMVAADVHVIG

SEQ ID NO: 34934 - protein, 250 aa, Robiginitalea biformata HTCC2501
MLKIKNLHAGVENKKILKGINLEVNPGEVHAIMGPNGSGKSTLASVIAGKEEFNVSRGKILFEGEDIDEMSPEERAHNGIFLSFQYPVEIPGVSVTNFMKTAINESRKAKGEPDMPANQMLKLIREKAELLEIDRKFLSRSLNEGFSGGEKKRNEIFQMAMMQPKLGILDETDSGLDIDALRIVANGVNRLRSEDNAFVVITHYQRLLDYIVPDFVHVIHDGKIVKSGDKELALELEEKGYDWIKQEAVL

SEQ ID NO: 34935 - protein, 355 aa, Robiginitalea biformata HTCC2501
MRDLSKIKYLDSASTTRVDDRVKKAMDPYFSDIFGNASSNHEFGKQARNAVERARGQVARIINAEPSEIIFTSGATESINLAIKGYTEANAHRGNHIITVKTEHKAVLSTCEYLESKGLDVTYLKVDENGLIDLDDLRKAIKESTLLIVIMYVNNEIGIIQPIEEIGKIAQKHNVIFFCDATQAVGKVPVDVLADRIDMLCFSAHKLRGPKGVGILYRKEGLQLTPLIHGGGQENGLRGGTYNTPLIVGMGKACEIANSERIQRVQSIELRRKFIEDFYENNKLGQVNFKEVKRAPHILSISLRNKDAAEFLISNSQKFVASTGSACSSALMEDSHVLNSIPNFNVKSTFRISIA

SEQ ID NO: 34936 - protein, 382 aa, Robiginitalea biformata HTCC2501
MKLPFESKLPGLEPSIFGVMNRISLDAGALNLAQGFPDFGADPELIRLHSEALEEGYNQYAPMSGIYSLREAIAEKTETLYGASYHPETEVTVTAGATQALYTAIAATIRPGDEVIVFKPAYDHYEPSVKAHGGVPVLLQLQGPDFRIDWVAFDAALTASTRMVIINTPHNPSGTVLSREDMEMLETRLRGTNILVLSDEVYEHLVFDGQEHQSVARFPGLRERAFVCASFGKTFHITGWKTGYCLAPELLMQEFRKIHEFAIFCVSHPAQRALKTYLENPDHYLELNDFMQRKRDLFLEAVASSRFTFTPAAGTYFQLLGYQDISEAPDTEFAETLARDKGLAGIPISVFNRNRQDNRQLRFCFAKKDETLKRAGEILSQV

SEQ ID NO: 34937 - protein, 349 aa, Robiginitalea biformata HTCC2501
MSDFHTLKVSRVRRLTPNAVAVSLEIPASQKERFKFTAGQYITVRSEATGSDVRRAYSISSRPGDAELTIGIKKVTDGTFSVFANESLREGDSLEVMPPEGRFTYEPGTPGRHLIAFAAGSGITPIMSILRTALEADAEARVVLVYGNQSRESTMFLEDLQALANEYPDRFIPYFTFSRGQYDDSLFGRIERSTVNYIVKNKHSDLEFDRYYICGPEPMIRTVEETLLDNGVPADRVLHELFETADQPDELREQLEGTTRLTVVLDEETHELNMDQKNVVLDAVLNEKIDAPYSCQGGICSTCIARIRSGTARMAQNQILTDSEIEEGLILTCQAHPTSPELTVDYDDV

SEQ ID NO: 34938 - protein, 590 aa, Robiginitalea biformata HTCC2501
MYEWLADKGFISIDEQHFFYLYGLKFPYMTADSRSLNFIEHIIEDDLASGFPKDQLRFRFPPEPNGYLHIGHASSICLNFGLGLRYDAPVNLRFDDTNPAKEEAEYVDAIKRDVSWLGFEWAEERYASDYFQQLYDWAEDLIRQGKAYVDSQSSEEIAAQKGTPTEPGTNSPHRNRSVSENLELFRGMKDGKFEAGAHVLRAKIDMASPNMLMRDPVMYRILHRAHHRTNTDWCIYPLYDWTHGESDYIEQVSHSLCTLEFKPHRPLYDWFLDAVTEAGKLRPKQREFARRNLSHTVVSKRKLLQLVEGGHVSGWDDPRMPTISGLRRRGCTPEAIRNFADTIGIAKRDNVVDVALLDFHMREHLNQIAPRVMAVLDPVKVVLTNYPEGETEWLETENNPEDPGAGTREIPFSRELYIEREDFREQANRKFFRLKLGGEVRLKSGYIIKAEQAVKDASGTITEIHCTYDPKSRSGSGTEESRRKVKGTLHWVSAEHAHRAEVRLYDRLFTDATPDQHKDRDFMEFLNPDSLEVVEARIEPGLAGAQPGERFQFQRLGYFCVDPDSSEDRLVFNRTVTLRDTWAKIEQKEG

SEQ ID NO: 34939 - protein, 566 aa, Robiginitalea biformata HTCC2501
MPGYKKAWLPGDLAAGLTVGILLIPQGMAYAMIAGLPPVFGLYAALVPQLVYALTGTSRQLAVGPVAMDSLLVASGLGALALTGIEEYIAMAVFLALFMGVLQLAFGLLRMGFLVNFLSRPVISGFTSAAAIIIGLSQLKHLLGVEIPGSNRIQQLVSHAAAALPDTHLPTLGLGLAGIALIVGMKKWVPRMPGSLAGVVAGTLAVFLLGWDQAGVKIVGAVPAGLPEFGLPELDMERVSQLFPIALTLALIAYMEAISVGKAVEEKHGKNRIDANQELRALGLSNILGSFFQSYPTTGGFSRTAVNDQNGAQTPLASVFSALVVGATLLFLTPLFHYLPNAILAAVIMVAVFGLIDLKYPRELWKNRKDEFILLLATFALTLGLGIVEGILLGVLFSLLLLVYRISKPHIAILGRIRGTDYFKNINRFSDDIEEFPEFLILRFDGQLFFGNKDYFRKELVKHTRQKGPDLKFVILNAEAISYIDSSAVYMLRALIRDLRRDGIRLLLAGAIGPTRDILFSSGLAEEIGRENQFVRTFEAFEHCRTATGKTEMERKVSTQSARPPV

SEQ ID NO: 34940 - protein, 116 aa, Robiginitalea biformata HTCC2501
MQIEVVKSKIHRVRVTGADLNYIGSITIDEDLMDAANIIQGEKVQIVNNNNGERLETYAIPGPRGSGELTLNGAAARKVAVGDILILITYAWMDVESAKAFNPALVFPNEETNLLN

SEQ ID NO: 34941 - protein, 189 aa, Robiginitalea biformata HTCC2501
MYAIVEIAGQQFKVAKDQKVYVHRLREEEGQKVSFDQVLLIGDGDSVTIGAPAIDGAAVEAKVVKHLKGDKVIVFKKKRRKGYRKKNGHRQYLTELMIEEIVAKGAKKAAPKKEKPAKSEAAPAKKSEPAKDAKAESAKKEAPAKTAPKASEDLSSKTVAELREMAKAQEITGYSSMKKAELIEALGGK

SEQ ID NO: 34942 - protein, 367 aa, Robiginitalea biformata HTCC2501
MIIGIPKEIKNNESRVGMTPAGVMELVHNGHTVHVQSGAGAGSGFSDDDYKKVGAHILDTIGQVYTLSEMIVKVKEPIREEYDMVQKGQVVFTYFHFASSQRLTQAMIDSRAVCIAYETVEDSDGTLPLLTPMSEVAGRMAIQQGAKYLEKPKKGRGVLLGGVPGVPPGRVLVLGAGTVGIQAAKMAAGLGAHVTMLDINMKRLRYVNDVMPSHVVTEYSNEYNIRKHIRTHDLIVGGVLLKGARAPKLITRDMLRCMRPGTVIVDVAVDQGGCVETTRPTTHENPEYIVDDVVHYCVANMPGAVPYTSTLALTNVTLPYVLNLANKGWEAACAADASLKKGLNIVDGQVVYSEISEAFDLSARVLV

SEQ ID NO: 34943 - protein, 394 aa, Robiginitalea biformata HTCC2501
MKKLVLAYSGGLDTSYCAHMLSHKEGYEVHAVTVNTGGFDKEQLAGIEERALELGASTYTAIDAVQSFYDRVVKYLIFGNVLRNNTYPLSVSAERIVQALEIVEYARGVGATHIAHGSTGAGNDQVRFDLIFQVIAPEIEIITPIRDQQLSREAEIAYLQENGITYSWEKAKYSINQGLWGTSVGGVETLGSREALPEAAYPSQLSETQPRNISLTFEKGELTAVDGKPGTPVENIRLLESIASAYAIGRDIHVGDTIIGIKGRVGFEAASALITIKAHHLLEKHTLSKWQQFQKEQLANFYGMLLHEGQYLDEVMRNLEVFLADTQRHVSGEVFVTLHPYRFELRGIESDNDLMNASFGSYGEMNKGWTAAEAKGFIKILSNPGKIARKIQEK

SEQ ID NO: 34944 - protein, 295 aa, Robiginitalea biformata HTCC2501
MKEHKAGFVNIIGNPNVGKSTLMNALVGERLSIITSKAQTTRHRILGIVNGDDFQIVFSDTPGIIKPAYGLQESMMDFVRLALVDADVLLYMVEVGEKGLKDEAFAEKIRSSQIPVLLLINKIDTSDQGQLEEQVAFWTEQFPNAEIIPISALERFGVPEVLDRILALLPEAPPYFPKDQLTDRPERFFVNEIIREKILLHYKKEIPYAVEIETERFEETDEIIRIGAVIMVERATQKGILIGHKGSALKRVGTEARKDLETFFDKKVFLELFVKVNKNWRNDARQLRRFGYDSK

SEQ ID NO: 34945 - protein, 1500 aa, Robiginitalea biformata HTCC2501
MEKQGLYLPEFEHDNCGAGFICSLKGKKSNDIIHKALEILEKLEHRGAVSADGKTGDGAGILIDIPHEFFTEVCSFELPEPGTYAVGNVFLPQKENQRDYCTTLFGENLEAQGLRLLGWRDVPVNRRVPGRIAAETEPFVKQVFVGKAAEDQDDFAFERKLFVARKKTEHAIIASKLSERGFFYLPSLSTRIIIFKGLLMPMDIKLYYKDLMDPRVVTRLALVHQRFSTNTFPTWDLAQPFRYMCHNGEINTLRGNVSRMHSRESLFQSDLFGEEIKEILPVILPGKSDSATMDMVVELLLMTGRSLPEVMMMLVPEAWEKNPDMSEAKRAFYEFNSCLMEPWDGPASIPFTDGNYIGAVLDRNGLRPSRYSVTRDGYVVMSSETGVLELEPENIAFHGRLEPGKMFLVNMEEGRIVNDEEIKEAIAGKHPYAKWLKKNLVHLRDIPYNDCPLFLDEETLEKRKAAFGYTLEDINTIILPMAKAAKEPIGSMGSDTPIAVLSERPQLIYNYFKQLFAQVTNPPLDGIREELICDISLTLGTDHNLFDISPLQCRKLKIQNPVISKEDLDKIKNYDSSPDYKVVSIPILYEISKGLNGLENALEAVLTKASRAIDQGANIIILSDRNVSKDMAPIPALLACSYVNSGLQRLGRRSKLSIIVESAEPREVHHFALLFGFGASAINPYLVNEIIAEQIEEHDIQDVSREEAIRNYNKAIGKGILKVMNKIGISTLNSYRGSQLFECIGLNTQMVEKYFPNTPTRIQGIGLYEMEKEIALRHHKAFDRKELAANLDLEIGGEYRWRRDGEKHMFNPLSIAKLQKAVRLNEPSTYKEYAELVNEQTKSLMTIRGLFEFSNYDPIPIEEVEPWTEIVKRFKTGAMSYGSISKEAHENLAIAMNRIGGKSNSGEGGEDAERFYRSQTGDWRNSAIKQVASGRFGVTSNYLTNAREIQIKMAQGAKPGEGGQLPGPKVNPAIAKTRNSTPYVGLISPPPHHDIYSIEDLSQLIYDLKSANREARINVKLVSEVGVGTVAAGVSKAKADVILISGHDGGTGASPLTSLKHAGLPWELGISEAQQTLVMNDLRNRVVLECDGQLKTGRDVAVACLLGAEEFGFATAPLVASGCIMMRVCHLNTCPVGIATQNPELRKKFEGKPEHVVNYMYFVAEELREIMAKLGFRTVDEMVGQVQKLDRRKAIDHYKARGIDLSPILHQVPVPIGTKFYNTVKQDHNIEKSIEFEIIEKAHLALFRKEKTSLDFPIHNTDRAVGAIISNEISKIYGAEGLPENTLRLNFTGSAGQSFGAFATRGLTMIVNGNTNDYLGKGLSGARLIIKVPGGSTIRPEENIITGNVCLYGATSGEAYINGKAGERFCVRNSGARAVVEGIGDHGCEYMTGGVAVILGEVGRNFGAGMSGGIAYVLDRNKTFERNCNKEALNLLKVEEDQDIAELRGMIEDHYNATFSPLAQEVLEKWETYLPQFIKVFPEEYRQALIRLENEKLETI

SEQ ID NO: 34946 - protein, 698 aa, Robiginitalea biformata HTCC2501
MNKGIYVATIEANSGKSILSLGLMRLLLGKMARVGYFRPIIDDYPDGKQDNHIATILSHFNIPLNYEEAYACTRSQVVQKTSRNREDEVLDTIIQKYKDLESRFDFILVEGTDFTGEGAIIEWDFNVLLAKNLGIPTVILSTGVGKTLEEFVNSLALACDSFRDKGVEVLMVAANKIQPENRQLVLDQMHSDLPEGVLTAAIPLNPVLGNPSMREIADALGGEVLFGARHLDKQVAHFGVGAMQLRNYLTHLVEATLVITPGDRADIILGALQANLSTNYPSISGIILTGGLVPEETIIRLIEGLSEVVPIVSVQGGTFSVTNRIGSIQPRIYAGNTLKIEQSLKDFSAYVPEDALAERLVTFRAEGITPRMFQYNLLKKAQSDVKHIVLPEGADQRVLRAAVELARYQAVRLTLLGRPEEIREKARQLQLELPGEIQLLDPRNAPQFEEYANTLYELRKHKNMELTMAQDLMSDVSYFGTMMVHKGHADGMVSGAAHTTQHTIRPALQFIRTRPGVHLVSSVFFMCLPDRVTVFGDCAINPNPDAAELAEIAISSADTTASFGIEPRVAMLSYSSGSSGQGADVDRVREATRLVRERRPDLKVEGPIQYDAAVDLKVGRSKLPDSEVAGRATVFIFPDLNTGNNTYKAVQRETGALAIGPVLQGLNKPVNDLSRGCTEDDIFNTVVITAIQAQQIRK

SEQ ID NO: 34947 - protein, 404 aa, Robiginitalea biformata HTCC2501
MKNQADMNRVILVLNSGSSSLKFQVLRMPGETRICQGMVERIGAGDARLKFDSGKAKYERQLAVTDHKEALRHIVSALLDPDTGVLRDSKDVAAVGHRVVHGGTRFTGTTRVDAAVKEAIADLSRLAPLHNPANLEGIRQAESFFPEAIQVAVFDTAFHQTIPMKARRYAIPESLYREHGVQVYGFHGTSHKYIAEQLRPHLPEDGKLVCLHLGSGCSATAIRGGISLDHSLGFTPSNGLVMGSRSGDIDHGVIFYMVESLGYPLEEVKRILSRESGLKGLTGKSDLRDIEAAAATGDPDCQLALEMAAYRIRKYIGAYAAAMNGLDGVAFTAGIGEHSSRMRELVCRDMEFLGIRLDADCNAAPGPGLQSIHAEDSRVKLWVVPTDEELEIARQTYQVLTGSA

SEQ ID NO: 34948 - protein, 333 aa, Robiginitalea biformata HTCC2501
MTEGNFVDYVKIHLRSGKGGQGSAHLRREKYVAKGGPDGGDGGRGGHVIVRGNKDLWTLLGFKFKRHFQAGHGEHGGRQRSTGADGEDVVLEVPLGTVVKDTDSGEQLFEITEDGQEEIVAEGGKGGRGNWHFKSSTNQTPRYAQPGLPGEEKNLLLELKVLADVGLVGFPNAGKSTLLAALTSAKPKIADYEFTTLKPNLGIVKYRDFKSFVIADIPGIIEGASEGKGLGHYFLRHIERNALLLFLVPADSQDIASDYQVLLGELRKYNPELLDKRRLLAVSKSDLLDAELTRELDAELQNSLPGVPYLFISSVSGQGLTQLKDQLWKLLNE

SEQ ID NO: 34949 - protein, 812 aa, Robiginitalea biformata HTCC2501
MKVLKFGGTSVANAQAISETCKIVTDAGRPLAVVVSALGGVTDLLLLTAAQAAAQQTDYQESLASLEKRHLDTIRELIPPARQAAVIGRVKTDLNTLETLLEGAFLIGETTPKLLDKIVSYGELLSSFLIAAYYESQGLPAVFRDSRELIETDATFGNAHVRMDATRTKVREALHNPEEISILPGFVGATASGDTTTLGRGGSDYSAAILAAALGAEELQIWTDVSGMFTANPRLVRQARPIPLISYEEAMELSHFGAKVLYPPTIQPVLDAGIPIRIKNTFDPHTDGTLIHARGNTEGRTVRGISHVPGIALVSLEGPGMIGIPGISKRFFETLSDAGISIIFITQASSEHSICVGIAALHLERAIQAVNDTFAYEMDRQLIKPVQAEDDLAIIALVGDQMKQHQGLSGKMFSALGRNNVNIRAIAQGASERNISAVIRSGDVKKALNTLHEAFFEEQVKQLNLFVMGVGNVGSRLLAQIGLQQRVLKKELRLNLRVVGISNSRKMVFDASGLPVAEWQDVLEKGEPANLDAFFSRVRELNLRNAIFIDNTASETVSGWYASYLKNSISVVTCNKIACSSEYEVYARLKSLARTYNAPFLFETNVGAGLPVIDTLKNLILSGDRVRRIRAVLSGSLNFVFNNYNGKDSFADVVRLAGKEGYTEPDPRIDLSGVDVMRKILILARESGLRLEMDAIENRSFLPEGALEAESVDAFYEVLEQQEPHFRRLWEQADGANCRLKYVAQLDGEKASVGLEEIPEGHDFFNLSGSDNIVLFYTDRYSEQPLIVKGAGAGAEVTASGIFADIIRIGNF

SEQ ID NO: 34950 - protein, 391 aa, Robiginitalea biformata HTCC2501
MKEVVVVAAVRTPIGSFMGALSSVPAPKLGAAAIRGALDSIGLDPAAVEEVLMGHVVQAGAGQAPARQAALYAGIPETVPCTTVNKVCASGMKAVMQAAQSIALGDRSVVVAGGMENMSLIPHYVHMRNGKKFGPATLEDGMQRDGLVDVYDQQAMGVCADACAEKYKFSREEQDAYAIQSYKRSAAAWEGGKFKDEVVPVEVPQRRGEPVVVREDEEFRNVKMDKIPQLRPAFTKDGTVTAANASTINDGAAALVLMSAEKAQSLGLEPLVRIKSYADAAQEPKWFTTAPAKALPLALDKAGVALGDIDYFEFNEAFSVVGLANIKILGLDDQNVNIHGGAVSLGHPLGCSGARITVTLIHVLRQQNARLGAAAICNGGGGASAIVLERP

SEQ ID NO: 34951 - protein, 63 aa, Robiginitalea biformata HTCC2501
MQKGTVKFFNESKGYGFITGVEGKDVFVHASGLEEEIRENDEVYFEVEQGQKGPSAVNVRIAD

SEQ ID NO: 34952 - protein, 577 aa, Robiginitalea biformata HTCC2501
MEPVKEMQKKQDEKKAMRISGAEAIIHCLLEEGADLIYGYPGGAIMPVYDELYKFQDRLHHVLTRHEQGAIHAAQGFARVSGKVGVAMATSGPGATNLVTGLADAQIDSTPLVCITGQVPRHLLGSDAFQETDIIGISTPVTKWNYQVTRAEEIPEIIAKAFYIARSGRPGPVLVDITKNAQFDSLDFSYTPCKGVRSYNPVPKADPEALQRAADLINKAKRPYIVFGQGVILGSAEAELQEFVEKTGIPAAWTILGLSAMDSDHPLNVGMVGMHGNYGPNVLTNECDVLVAIGMRFDDRVTGSLDTYAKQAKVIHLEIDPAEVGKNVKADVAVLGDARESLRQLLPLVEKRKHDQWLSEFHARDKEEFEAVIKNDLHPTKEGLTMGEVIARINEESGHKAVIVTDVGQHQMVACRYAKFRQSKSSITSGGLGTMGFALPAAIGAKMGAMDREVVAVIGDGGYQMTIQELGTIFQTKAPVKIVVLNNDFLGMVRQWQELFFDRRYASTVMTNPDFVKIAEGYHIRSRRVENRAELAEAVAEMMASEEAYFLEVRVEKEDNVFPMIPSGASVSDIRLK

SEQ ID NO: 34953 - protein, 398 aa, Robiginitalea biformata HTCC2501
MDQPTSPFSKQQLLPQEEKLEVLQQKGELYIGIPKESQYQEKRICLTPDAVGAIVAHGHKVLIEAGAGEGASFSDLDYTNAGARITRDTKKVFGCPIILKVEPPTLSEVEFINPQSTIISALQIKTRNKQYFETLAKKRITAVAFEYIRDDDGKYPAVRSLSEIAGISSVLIAAEIMAADQGNGMMFGNISGVPPVEVVILGAGTVGEYAARSALGLGANVKIFDNSITKLRHIQTNLNRPLYTSTLQPKNLLKALKRCDVAIGAVRGKDRSPILVSQTMVENMKKGSVIIDVSIDMGGCFETSELTTHNKPTYTKFGVIHYAVPNIPARYPKTSSVSISNIFTPYLLKIGEEGGLENSLRFDKGLRNGLYMYHGILTNRMVGEWFGMKFSDINFLIF

SEQ ID NO: 34954 - protein, 320 aa, Robiginitalea biformata HTCC2501
MMRILANDGLAEPAIAKLESAGFEVLTTKVAQEQLIPYLNKENIRALLVRSATQVNEELIDACPGLLLIGRAGVGLDNIAVAHARKKGLHVIHTPNASANSVAELVFAHLLGGTRFLHESNRHMPLEGDQQFRALKKAYAAGREVRGKTLGIIGFGGIGEAVARIGLGLGMEVCFHDTHRDRAVMTLEFAGGQQYDLEIQGFGLDELLSRSDFVTLHVPAQDRPVIGSRELGLMPRGAGLINTSRGGVIDEEALLAALDSGHLSFAGLDVFAEEPRPGVRLLMNPDLSLSPHIGGSTLEAQERIGLELAGQVVELLKKAD

SEQ ID NO: 34955 - protein, 617 aa, Robiginitalea biformata HTCC2501
MEGNEPVVIPNAEGKRTTPSVIAFVEGGEIKVGDPAKRQAVTNPNKTIYSIKRFMGNKYSESQKEAERVPYKVVKGDNNTPRVDVDGRLYTPQELSAMILQKMKKTAEDYLGQSVSRAVITVPAYFNDSQRQATKEAGEIAGLKVERIINEPTAASLAYGLDKKDQDQKIVVFDFGGGTHDVSILELGDGVFEVLATDGDTHLGGDDVDQKIIDWLADEFKQEEEMDLREDAMALQRLREAAEKAKIELSSSSQTEINLPYITATSSGPKHLVRTLSRSKFEQLIEDLVKRTIAPCESALKTAGLSKSDIDEIILVGGSTRIPAVQEAVEKFFGKKPSKGVNPDEVVAIGAAIQGGVLTGDVKDVLLLDVTPLSLGIETMGGVNTKLIEANTTIPTKKSQVFSTAADNQPSVEIHVLQGERPMAKDNKTIGRFHLDGIPPAPRGTPQIEVTFDIDANGIIKVSATDKATGKSQDIRIEASSGLTEEEIERMKSEAEANAEADKKAKEKVDKLNEADQMIFQTEKQLGEFGDKLSADKKQEIESALEELKKAYESKDTDVIQPALDKINEAWKNASEEMYKAQAEAQQPGADGAGQTTDSGDAAEGDNVEDVDFEEVK

SEQ ID NO: 34956 - protein, 219 aa, Robiginitalea biformata HTCC2501
MKFFIDTANLDQIREAQALGVLDGVTTNPSLMAKEGITGKDNIFKHYIDICKIVDGGDVSAEVIATTFDEIVKEGEELADLHEQIVVKVPMIRDGVKALKYFADKGIRTNCTLVFSAGQALLAAKAGANYVSPFIGRLDDISTDGLHLIAEIREIYDNYGFDTEILAASIRHTMHVIECAKLGSDVMTGPLSAIEGLLKHPLTDIGLEKFLADYRKGNS

SEQ ID NO: 34957 - protein, 866 aa, Robiginitalea biformata HTCC2501
MNINNFTIKSQEAIQQAQQLAQEMGHQQVENEHLYKAIATVDENVLPFLLKKLRVNDVLVGQIVDKELESFPKVSGADLMFSAEAGRTLNEANSIARKDKDEYVSVEHLIQAILRSKSKVARILKDQGVNERDLGSAIAELRKGGRVTSQSAEDTYNSLDKYARNLNQLADAGKLDPVIGRDEEIRRILQILSRRTKNNPMLVGEPGTGKTAIAEGLAHRIVQGDVPENLKDKVIYSLDMGALIAGAKYKGEFEERLKSVIKEVTTSDGNIVLFIDEIHTLVGAGGGQGAMDAANILKPALARGELRAIGATTLDEYQKYFEKDKALERRFQKVTVEEPDTEAAISILRGLKEKYETHHKVRVRDEAVIAAVELSERYITNRFLPDKAIDLMDEAASKLRMEINSKPEELDALDRKIMQLEIEIEAIKRENDPDKLKALNAELANFKEERNEIFAKWESEREVVDGIQKTKQSIEEYKLEAERAERNGDYGRVAELRYGKIKDAQAQLEKLQEELASQQEAGTLIKEEVTREDIAEVVAKWTGIPVNKMLQSEREKLLQLEEVLHKRVVGQDEAIEAVSDAIRRSRAGLQDAKRPIGSFLFLGTTGVGKTELAKTLAAYLFDDENAMTRIDMSEYQERHAVSRLVGAPPGYVGYDEGGQLTEAVRRRPYSVVLLDEIEKAHPDTFNVLLQVLDEGRLTDNKGRVADFRNTIIIMTSNMGSHIIQETFEDNPDIYSATEAARVEVLGLLKKSIRPEFLNRIDDIIMFTPLSREDIRQVVRLQLDHVRSMLAAQHIEIDATEEAVEYLADKGFDPQYGARPIKRVIQKEVLNKLSKELLRGSIRTDGVVLIDSFENELVFRNQDELVE

SEQ ID NO: 34958 - protein, 556 aa, Robiginitalea biformata HTCC2501
MCGIVCAFDLKQPAEDLRPQMLEMSRVLRHRGPDWNGIHMSDTAILAHERLAIVDPASGKQPLYSPDGNLVLAANGEIYNHQSLRKRFEGTYDFRTESDCEVILALYQEQGPAFLDELNGIFGFALYDSQADRYFIARDHMGIIPLYIGWDRHGTFYVASELKALEGTCTRIELFPPGHYMLSDQEGFQRWYSRDWMEYDAVEDNPTDIAALRKALEDAVHRQLMSDVPYGVLLSGGLDSSVTSAIAKKYAQKRVESGDQADAWWPQLHSFSVGLEGSPDLAAARKVADHIGTVHHEIKFTIQEGLDAVRDVIYHLETYDITTVRASTPMYLMARVIKSMGIKMVLSGEGADELFGGYLYFHKAPGPRDFHEETVRKLDKLHMYDCLRANKSLAAWGIEGRVPFLDKEFMDVAMRLNPRDKMITPERMEKWVVRKAFEDYLPESVAWRQKEQFSDGVGYSWIDTLKEVVAEAVSDEQLANAHFRFPIQTPTSKEEYYYRSIFESHFPSDAAAESVPQEPSVACSTRIALEWDEAFRNMNDPSGRAVARVHADAYEK

SEQ ID NO: 34959 - protein, 337 aa, Robiginitalea biformata HTCC2501
MSKAKLEYIWLDGYTPTANLRSKTKIESDFSGKLEDCPIWAFDGSSTKQAEGGSSDCLLKPVAIYPDPARKNGYLVMCEVLNPDGSPHETNSRATIDSDANDDFWFGFEQEYFIMDSHTDLPLGFPHGGYPGPQGLYYCSVGGKNTHGRELVERHADYCLEAGLNFEGINQEVACGQWEFQIFAKGAKTAGDQIWVARYLLDRLTEEYGWYIEYHPKPVRGDWNGSGMHANFSNTLLRTCGSKEIYEKVCEAFRPVTKEHIAVYGDENDLRLTGQHETQSIDEFSYGVSDRGASIRIPIMTVEKGWKGWLEDRRPASNGDPYKIAARIIKTVESADV

SEQ ID NO: 34960 - protein, 402 aa, Robiginitalea biformata HTCC2501
MMVCTALVFFMHTGFAFLEIGLTRQKNTINILFKNIFIITVGLLMYYIGGFNLMYPGEFNGFLGFAGFGLETDAAGLTPEYADGGYTYWTDFLFQGMFAATAATIVSGAVAERIKIGPFMVFTIIYVGLVYPIVGSWQWGGGFLSTLGGDDAGFYDFAGSTLVHSVGGWGALIAIWLLGSRIGKFDEDGKPKAIPGHNNPLATAGVLVLWLGWFGFNGGSVLSGDPALTSLVLTTTSLAAAAGGVSAFLVSTLAYKNYDLTMFLNGILGGLVGITAGADLMSPNEAVVIGLIAGAIIVGGVALIDRIRLDDPVGAVTVHLICGIWGTLAVGIFGDKAGMDQFLYQLTGVGAAGVFCIVTAAIIILALKKTVGIRVSREEELEGLDIHEHGMDAYSDFRLNQH

SEQ ID NO: 34961 - protein, 321 aa, Robiginitalea biformata HTCC2501
MKDSKAILEIARQTIALEGDAIHHLATLLTEDFSRAVSCILEADGRVVITGIGKSAIIASKIVATLNSTGTPAIYMHAADAIHGDLGTIQQNDVVICISKSGNTPEIKLLVPLIKQGGNPLIGMTGSPDSFLGRRADYCLNTYVEKEACPNNLAPTTSTTAQLVLGDALAICLLELRGFSSRDFARYHPGGTLGKKLYLRVGDIAAQNQVPQVSGDTPVKDAIVEISEKMLGVTAVMDGDRVAGIITDGDIRRMLNKHDNIAGLRARDIMTTGPKTVDSEVLAVKALQMMEENDISQLLATRDGRYIGVVHIHNLIKEGIL

SEQ ID NO: 34962 - protein, 388 aa, Robiginitalea biformata HTCC2501
MEKVYLDNAATTCIREEVIASMCEALEGCYGNPSSTHSFGRSAKTGIEKARKTIAARLGARPGEIIFTSGGTEADNMILRCAVRDLGVRTLITTRIEHHAVLHTAQALAGESGIRLEYVPLDADGNPRLEALEKLLQADDSRKLVSLMHVNNEIGNLTDLQAVSAICRQHGALFHSDTVQSIGHFPWDVQQTPVDFATAAAHKFHGPKGVGFAYIRKDTGLGPLILGGSQERGYRAGTEAYHNILGLETALEAAYANLEQEREHIVGLKKYFIDKLRDSIPGVAFNGLSADPERSTYTLVNVRLPLSEEQGQLLLFHLDLKGIACSKGSACQSGSTGASHVLAEILPEEEMAKPSLRFSFSHYNGREELDYTVGVLKEFVESQVGKAV

SEQ ID NO: 34963 - protein, 260 aa, Robiginitalea biformata HTCC2501
MKKRIFIQGIQFDEKSSYQQGPKLAPPKIREALYSGSSNLYTEALTSIEDSRVEDKGDFEIDGYFDIEAITATHLGQNARVLTLGGDHSITYPIIRAYYGQYPKLDILHIDAHSDLYDNYEGDKHSHACPFARIMENGLAAKLVQVGIRTLNPHQAAQAEKFGVEVHQMKDLDLSALPEFSNPLYISLDMDAFDPAFAPGVSHHEPGGLTSRQVLDLIRRIDAEVVGADIVEYNPNRDFQNMTAFLAAKMMKEILGKLMQ

SEQ ID NO: 34964 - protein, 616 aa, Robiginitalea biformata HTCC2501
MEEKKLDINSIIGFVLIFGILIYWFYTNQPTPEEVEAQKQATEQVQDSIRRAEAAAAPQQAATPAATVPEGNDSLARAAYASRIGAFSYTPAVEGTTLLENDVLSLEISNKGGEIVEARMKQFVNHDSLPVYLVREGNAQFSLEITTSDNRVLNTRDLFFEPTLSREGENSVLSMKAMAGPRQFLEYRYTIRPGEYLLDFDIRSQGLSLSASKGVPLRWSLRAIRHDPSVMYENRYTRLTYRHEGDDISKLSASGEDDETESEVRWMSFRQHFFSSILAVDEPLDTVTLTSNDLVEEESSETAFTKEFSIASELPVTGGELSRSMQWYFGPTDIDVLEQYEDLALADSIPFGWGIFGWINRYIFTPFYGFLASFLPFGIAIVVMTIIVRILMSPVTYKSYLSQAKMRVLKPEITEINEKYKDNAMKKQQATMKLYNKAGVSPLSGCIPALLQLPIFYALFMFFPTSFALRQKSFLWAEDLSSYDTIAQLPFSIPFYGDHVSLFPILASVAIFFYMMMTTGQQMQTQPGMPNMKFIMYLSPLMMLFFFNNYASGLSLYYFVSNLITIGIMLVIKNVILDEEKIHAQIQEQKKKPRKENRFQRKMREMMEEAEKQKKK

SEQ ID NO: 34965 - protein, 213 aa, Robiginitalea biformata HTCC2501
MNFEDFSSSLSKIENLPLPGSRAHLAMAPELRIRELAGLDSQRKSPRRAGVLVLFYPGHDSGTRLLLIRRPSYPGVHSNQIALPGGKEEADDPDLQHTALREAREEVGVPPRQVRVVRALSPVYIPPSNFEVSPFVGLSAGRPDFRRQESEVAELIEVPVNQLLSREFLEVRRMTTSYATDIEVPAFLLNGHVVWGATAMMLNELKSLLKEVL

SEQ ID NO: 34966 - protein, 607 aa, Robiginitalea biformata HTCC2501
MKYFRKILRFALPYRRYGILNIFFNILYALFSALSFVALIPMLEVLFQQTEPVKEPPVYEGIGQLESYVKDSLYYELGSVAGDDKMQALVWVIGLVLVLFLLKNVFNYLAMFYITFLRNGVLKDLRNAIYEKIVTLPVSFYSEKRKGDVIARITSDVLEIQHSFLSILELIVREPLTILFTILAMFFISVKLTVFVFVFIPLAGFIISRIGKSLKRHSDRVQREQGNFLSIVEETLGGLRVIKAFNAEKRFADQFAASTGRFFRFSNSLLNRQNLASPVGEFLGILVIGILLWFGGKMVLVEGSLNAASFIAYMGLAYNILTPAKAISKASYGVKKGNAAAERVLEVLETPSTLSDPSDGKQIDGFNTSLKLERVSFRYEDEPVLTDFSLEVAKGQTVALVGQSGSGKSTIANLVTRFYDVNEGRITLDGTDIREVTKASVRHLMGLVTQDSILFNDTVRNNILLGREEATDKEVEAAARIANAHEFITQLPRGYDTNIGDGGNKLSGGQKQRLSIARAVLKNPPIMILDEATSALDTESERLVQDALEKMMQGRTSLVIAHRLSTIQHADRIVVLQKGRIVEQGTHQELLEQGGVYKRLVEMQQLA

SEQ ID NO: 34967 - protein, 383 aa, Robiginitalea biformata HTCC2501
MGKAPRGTLRFKRPDELAAETIAYLLERVPGLEKQRIDDVIVGNAMPEAEQGLNMARLISLMGLKIEDVPGVTVNRYCASGLETIAIATAKIQSGMANCILAGGAESMSYIPMGGYKPVPDYGLAKAGHEDYYWGMGLTAEAVAKQYKVSREDQDAFAYESHQKALKAQKEKRFESQIVPIEIDHTYVNEAGKKTTRQYAVDTDEGPRADTSKEALARLRPVFAEGGSVTAGNSSQMSDGAAFTLVMSEEMVKELGLEPIARLVNYAAVGVEPRIMGIGPVKAIPKALGLAGIKQDQLELIELNEAFASQSLAVIRELGLDPDRVNVNGGAIALGHPLGCTGAKLSVQLFDEMRLRNLQGKYGMVTMCVGTGQGAAGVFEFLS

SEQ ID NO: 34968 - protein, 736 aa, Robiginitalea biformata HTCC2501
MSKTIIISNRLPVQLQIKEGSIEATPSVGGLATGMKSVHSDGESLWIGWSGLTLEEIPDSLDADIDQALARHGCSRVDLSKNEVDGFYYGFSNRTIWPLFHYFMEYSEFELSNWTVYEAVNRKFADAIAAAAADDDVIWVHDYQLMLVPQMVREQRPGLSIGFFLHIPFPSYEIFRTMPWRREVLRGLLGSDLIGFHTYDYERHFLSSVRRLLGLEVSFNEIHLEDRVVKVDSFPMGIDYKKFNEAAARHRDMKPGEISDLQNRLDTHKASTPDAKFFLSIDRLDYTKGIARRIKAFEYFLEKYPEYKEKVRLIILAVPSRSKVPQYQRLKREIDELVGRINGELSTVSWTPIWYFYRSLPFDNLIDLYTSCDIAWLTPIRDGMNLVAKEYIATRTDQTGVLILSEMAGSANEMNEALLINPNNFEQIAESLHQALNMPEEEQKRRNAAMQKRLERYNVEKWANDFMNSLLTQRQQDYSMVARRLSVDLTNTLLEKYREARSRILFLDYDGTLAGFTNDPQDARPDEALMELLDRLNAQGRTDVFLISGRDKDTFTRWFQDKEYAMIVEHGVWISEGGKPFSMLENVKNDWMGKIRPVLESFVDRTPGSFIEDKNYSLAWHYRNTDPDFGQKRTMELNTVLTSLIANDDLTVMNGNKVVEIKSSNVNKGRAAMRMVARKEYDFIFAIGDDWTDEFMFQELPKEAVTVKVGRMKTQARYFLDGPGAVRQLLGRFADI

SEQ ID NO: 34969 - protein, 422 aa, Robiginitalea biformata HTCC2501
MTFEQLELAEPILRALKKENYSRPTDIQAQAIPHVLNRRDVMGSAQTGTGKTAAFAIPILQHLERDRRYGGKRGVVNALIVTPTRELAIQIGESLTAYGHYTGIRNTVIFGGVKQGKQVEALRRGVDILVATPGRLLDLMDQGIISLSKVEYFVLDEADRMLDMGFIHDIRKIIARLPAERQSLFFSATMPDDIVSLSRKILSDPVKVAVSPVSSTAETIRQYLYYTNKSDKNDLLLHILKDPDMDQVLLFARTKHGADRIVKNLGKKKISAAAIHGNKSQNQRQKALGQFKDGKVRVLVATDIAARGIDIDQLRYVVNFDIPNVAETYVHRIGRSGRAGEEGVSISLCEPEENAYIRDIEKLIDLKIERVEDHPFPQTERPMTAAEKQEFEKEKQRRKQEYFASRKRGGGGQGRQNRGRRR

SEQ ID NO: 34970 - protein, 696 aa, Robiginitalea biformata HTCC2501
MAKDNKTPQKKPRFSSWWIYGLIIVFLIGFQFFGSDSLSPTSKTTTSELQEFLRNGDIDKILIITNTRQARVYLTEEAMTKDVHRDVSDQPFSLSSGSVPQYVLDYGDLQNFENDIKKIKQENNLDTVVDYDTESNVFMELLLTILPFVLIIGIWIYLMRRMSGGAGGGAGGQIFNIGKSKAKLFDEKTDTRTSFKDVAGLEGAKEEVEEIVEFLKNPDKYTSLGGKIPKGALLVGPPGTGKTLLAKAVAGEAKVPFFSLSGSDFVEMFVGVGASRVRDLFKQAKDKSPAIIFIDEIDAIGRARGKNNFTGSNDERENTLNQLLTEMDGFGTNTNVIVLAATNRADVLDKALMRAGRFDRQIYVDLPDIRERKEIFEVHLRPIKTAETLDLDFLARQTPGFSGADIANVCNEAALIAARKERKAVTKQDFLDAVDRIVGGLEKKNKIITPEEKKTIAYHEAGHATVSWMLEHAAPLVKVTIVPRGQSLGAAWYLPEERLLVRTEQMLDEMCATLGGRAAEKVIFDKISTGALSDLEKVTKQARAMVTIYGLNEAIGNLTYYDSSGQNEYGFTKPYSEETARKIDQEISRIVEAQYARAIDVLKKNKDKLIELAERLLDKEVIFKEDLEKIFGKRPFEKFDKLGQEKTLDAPDAGDKGAAEADGSENDAEPKASKPAGGKDPESPEEQEEKTVEKEN

SEQ ID NO: 34971 - protein, 435 aa, Robiginitalea biformata HTCC2501
MILATSTLGTITITIIAFLILVLLLVSLLLFTKEKLSPSGPVTIKINGEKEIEVASGSSLLSTLGNKKIFLPSACGGGGTCIQCECHVLSGGGEALPTETPHFSKRELNEGARLACQVKVKQDMEITIPEEVFGIKKWEATVVRNYNVASFIKEFVVEIPEDMNYKAGGYIQIEIPPCEVPYKDIDITAHPEEHETPDKFQTEWDKFGLWPLVMKNPETVERAYSMASYPAEGREIMLNVRIATPPWDRSKNGWMDVNPGIASSYIFARKPGDKVTISGPYGEFFINESESEMLYVGGGAGMAPMRSHLYHLFKTLKTNRKVTYWYGGRSKRELFYIDHFKRLEEEFPNFKFYMALSEPLEEDNWKVKENIDAPGDGFVGFIHNCVIEHYLDHHEAPEDIELYFCGPPLMNKAVQKMGEDFGIPDEHIRFDDFGG

SEQ ID NO: 34972 - protein, 395 aa, Robiginitalea biformata HTCC2501
MKQFLSDRINNMATSATLAMAAKARELRQEGKDIIGLSLGEPDFNIPEFIREAAKEAIDQNYSSYSPVDGYGDLKQAISRKFARDNGLQYGIDQIVVSTGAKQSLANVAMVMLNEGDEVILPAPYWVSYSDIVKLAGGVPVEVPTSIDTDFKMTPDQLREAITPRTKMIWYSSPCNPSGSVYSKPELEGLAAVLREHPGIFVVSDEIYEHINFREGHVSMAGLEGMYDRTITVNGVSKAYAMTGWRIGFIGAPAWVAKACTKFQGQITSGANAIAQRATIAALDAPIEKIRYMIDKFHERRDLILELLGEIPGFNLNVPEGAFYVFPDISSYFGKTLGGKTIANASDFALYLLEAAGVATVTGEAFGNPNCIRISYAASEEEIREAVRRMQEALA

SEQ ID NO: 34973 - protein, 229 aa, Robiginitalea biformata HTCC2501
MGNRILLIEDEYAIASFVTQGLQESGYAVAVCYDGEKGLEMLQDGDFDLVILDIVLPGMDGREVARTIRGQGLDLPILMLTALGSTENVVRGLDSGADDYLVKPFKFKELEARVRALSRRRSSGPRGNRTLSAGNLVLDRDAKTVRRGEADIHLTATEYRLLEYLLLNKNRVLSRIDILESVWDITFNLGTNVVDVYVNYLRNKIDKPFDSKLIHTVIGMGYTLKDNEP

SEQ ID NO: 34974 - protein, 697 aa, Robiginitalea biformata HTCC2501
MKSFRTELENPVVEKDIVELERKIRQFREGELNEEKFRSLRLARGVYGQRQPGVQMVRIKLPYGKVTARQLHRIADVSDTYSTGILHITTRQDIQIHYVDLDRTPELWAELERDAVTLREACGNTVRNVTASETAGIDPGEPFDVSPYAQALFEYFLRNPVGQEMGRKFKVSFSASDADTGLSYMHDLGFIARVEAGRRGFKVLVGGGLGAQPRHADVLYEFLPQEQIIPLMERVLRVFDRYGERKSRAKARMKFLIRDIGLDRFRELLAEETPGIPVREYPIDAEAYPQPRPASTPPDIPVPADMEAYQAWKRTNTIRQKQDGYVAVGLRVFLGNFTTRQARQLADLVARYAASEIRLSLRQNILIPFVREAWLPYFHNELEKIGLAQPGYNTAADITACPGTDTCNLGIASSTGIATELERVIAAEYPDFIHNPDVVIKISGCMNACGQHNMAHIGFQGMSVRTRDKRVAPALQVLLGGGNRGGGEGIFADKVIKIPSKRGPQALRIILDDYLENGGGQPYDRYYQEQGQHYFYDKLKPLSDVSDLTPEDFIDWGTDKKYEKAIGIGECAGVVIDLISTLLLEAEEKLEDAQKALEAGKWAASIYYAYSAQIHAAKALLTSEDVAVNSHAAILKDFDTHFIDQPRGFGNDSFRQAVLRMNRHAPDAGFAREYLEQARNFLSEASAFRQKELSHAS

SEQ ID NO: 34975 - protein, 1150 aa, Robiginitalea biformata HTCC2501
MGAQRTPRTERPSNKTMEASPLQHIQLNAFTTEKGVTQQIELSYQLFGRKLHTAPVVLVNHALTGNSNVAGPDGWWTSLVGPGKCIDTETYTVLCFNVPGNGYDGFLIENYKDFIAGDIARIFLLGLEYLGIHKLFALIGGSLGGGIAWEMAALRPDLATHLIPVASDWKSTDWLIANCQIQEQFLVNSSQPVHDARMHAMLCYRTPESFKQRFRRSTNEESRLFNVESWLLHHGKKLQERFQLAAYKLTNQLLKTIDITRGGEEAFQRLQQSATHIHIIGVDSDLFFTAAENKETYKQLAQVNSNVTYGEIHSVHGHDAFLIEFDQMEQLLQDVFGGTGQRPLKVLKFGGKSLANGEGIDRVLDIISARVAEKERVAVVLSAREKATDQLEELLELAADGKDYSEAFSRFENYQRHTFSNVGLGDSFEAIARLLEGVRLLGDYSPKIKDQVLAQGELLSARLITKLLIGRGLNAVLVDARELIRTDSGFGNAQVLDEVSRENVNRFFSGLQADTVAVVTGFIASNALGETTTLGRNGSNYTASLLANYLNAAELQNYTHVNGIYTANPDLVPGARRIEQLSYSEANELANFGATILHAKTIIPLLEKNIPLRILNTFDGDGEGTLISARSSRDGIRSLSVIEHEALIHLEGRGLLGKVGVDARIFKALGQSGINVGIISQGSSERGIGLVVRADAAQRAKAALEAEFEEDFRNQDITRIHMTSDVSVISIVGQDLSTFHKPYNALIRNQVIPLLFNNTVTGKNVSLVVRKADTLKALNVMHGQIFGISKKINLAVFGVGTVGSTLMHQLLASADKIEARKGIRLNVFAVANSTRLLLDEAGVGADWSSRLSSAPEGYQLTELFDYARSHHLENLVAVDNTASEDFVARYFDFVENGFDLVSSNKVANTLGYDFYSLLREELESHQKQYLYETNVGAGLPLIDTIQLLHLSGENITRIRGVFSGSLSYIFNTFSRGGTSFSACVQAALDKGFTEPDPREDLSGNDVGRKLLILARELDLQNEFGDVSIENLIPKELRGGTREEFLESLSQLDDHFGAIRDRQEAGHVLRYVGDLSGDLQQDKGNLEVKLVSVPADSPLGQVKDADSLIEIYTESYGKRPLVIQGAGAGAAVTARGVFGDILRIAEKGFAD

SEQ ID NO: 34976 - protein, 248 aa, Synechococcus sp. WH 7805
MTASAPTKETILVVDDEASIRRILETRLSMIGYNVVTACDGTEALTCFQECEPDLVVLDVMMPKLDGYGVCQELRKESDVPIVMLTALGDVADRITGLELGADDYVIKPFSPKELEARIRCVLRRVEKENAAGIPNSGMIKVSDLKIDTNKRQVFRADERIRLTGMEFSLLELLVSRSGEPFSRGEILKEVWGYTPERHVDTRVVDVHISRLRSKLEDDPANPELILTARGTGYLFQRIVDSVASEGP

SEQ ID NO: 34977 - protein, 262 aa, Synechococcus sp. WH 7805
MIRPDAELLLDISDLHASVEDQPILKGVNLQVRAGEVHAVMGRNGSGKSTLSKILAGHPSYRVTGGSVRYRGDDLFALEPEERARLGVFLGFQYPVEIPGVSNLEFLRVATNARRDTQGQEELDTFEFEDHVREKLKVVQMDPAFLERSVNQGFSGGEKKRNEILQMALLEPVISILDETDSGLDIDALRIVAGGVNQLSSPDTASILITHYQRLLDEITPDYVHVMAAGRILRTGGRELAVELEQIGYDWVDEQLATEGVS

SEQ ID NO: 34978 - protein, 329 aa, Synechococcus sp. WH 7805
MQFIDQARITVRGGRGGDGIVAFRREKYVPAGGPSGGDGGHGADVVLEADANLQTLLDFKYKRLFAAIDGRRGGPNRCTGASGQPLVIKVPCGTEVRHLKTGILLGDLTNPGERLTVAFGGRGGLGNAHYLSNRNRAPEKCTEGRDGEEWPLQLELKLLAEVGIIGLPNAGKSTLISVLSAARPKIADYPFTTLVPNLGVVRRPSGDGTVFADIPGLIAGAAQGAGLGHDFLRHIERTRLLIHLVDGGADDPLGDLRVVEKELEAYGHGLVSRPRLLVVNKLELLDEQGRDDLLERLDALSGRRPLLISAVMGKGLDALLDQVWQQLGV

SEQ ID NO: 34979 - protein, 379 aa, Synechococcus sp. WH 7805
MAHSVLTAPMASIGVPTEIKADEQRVALTPDGVRELVTQGLEVRIQHGAGAGAGIGDDAFASAGARMVDRDDAWAAHLVVKVKEPQPEEFGLLRDDMVLFTYLHLAAYPQVGQALLEAGTTGVAYETVQLENGSLPLLAPMSEIAGRLAAQVGARLLERPNGGRGVLIGGCTGVQPARVVVLGAGTVGWNAARLAAAMDAEVMLLDRSPERLRSLEADRRGRLMSVVSSRGLLERLVPTADLLIGAVLTPGGRAPTLVDEEMVKQMRPGSAIVDVAIDQGGCIATSRETTHTDPTVCIHGIQHYAVGNMPGAVPFTSTEALVSVTLPYILGIAGRGLEEAVTERPELLSGLNTVKGAVCHPGVAKALGVPPRHPMACLR

SEQ ID NO: 34980 - protein, 528 aa, Synechococcus sp. WH 7805
MTKVLVSDPIDQAGIDILGQVAQVDQRTGLSAEELKAVIGEYDALMIRSGTQVTADVIAAADRLRIIGRAGVGVDNVDVPAATQRGVLVVNSPEGNTIAAAEHALALLLSLSRHVPQAHGSMRSGAWDRKKYVGNELYKKVLGVVGLGKIGSHVARVAKAMGMEVIAFDPFISADRAQQMQVRLTTLEDLFRQADYITLHIPRTPDTENLVNAELLRSMKSTSRIVNCARGGIVDEAALAEAIENGVIAGAGLDVYASEPLAEDSPLRTVERGLVLTPHLGASTEEAQENVATDVAEQIRDVLLGLPARSAVNIPGLSAEIMERLKPHLQLAETLGLLVSQLSGGQVQELEVRLQGEFALHPSQPLVVAALKGLLTSALGDRINYVNASLEAKGRGIHVLEVKDDASRDFAGGSLQLSTRGGQGGHSVTGAVFADGELRVTNIDEFPVNVPPSRHMLFTRHRDMPGIIGHLGSLLGEHNVNIASMQVGRRIVRGDAVMVLSIDDPIPPALLATIHGINGIQEAHPVTL

SEQ ID NO: 34981 - protein, 124 aa, Synechococcus sp. WH 7805
MAETSTSRSDAPDTGVYAIAEASGQQFWLQPNRYYDLDRLQAEVDATITLDNVLLVKDAKGTTLGKPFVKDASVELKVMAHRRGPKVIVYKMRPKKKTRRKNGHRQELTRVMVQSISVGGKAIS

SEQ ID NO: 34982 - protein, 597 aa, Synechococcus sp. WH 7805
MTGANALMDALRRHGVDTIFGYPGGAILPIYDALHVAESEGWLRHVLVRHEQGGTHAADAYARATGRVGVCFGTSGPGATNLVTGIATAQMDSVPMVVITGQVPRTAIGTDAFQETDIFGITLPIVKHSWVVRDPADLASVVAQAFHIAASGRPGPVLIDIPKDVGQEEFDYEPVEPGTVIPAGFSATPPPDLTAIADALALIKTANRPLLYVGGGAVAASAHDSLMVLAERYQLPVTTTLMGKGAFDENHPLALGMLGMHGTAYANFAVTDCDLLIAVGARFDDRVTGKLDTFAPRARVIHFEIDPAEIGKNRRADVAVLGDVGASLAALVELSLQQGHEPRTAAWLERIKDWKQRYPLTIPPAEGSIYPQEVLLAVRDLASDAIVTTDVGQHQMWAAQYLRNGPRGWISSAGLGTMGFGMPAALGAQVACPDRRVVCIAGDASILMNIQELGTLAQYDLPVKVVIVNNHWQGMVRQWQESFYDERYSASDMLRGMPDFEMLARSFGVEGLKIVERAELKSGLAAALASPHPTIVDVHVRRGENCYPMVPPGCSNAQMVGLPSHPELAMDTQRNCPACGAVTSSDHRFCPSCGSAL

SEQ ID NO: 34983 - protein, 1532 aa, Synechococcus sp. WH 7805
MSHPTGSLWPYSDSAAPEAVAGEKDACGVGFLAQLSGETSHWVLQQALRGLGCMEHRGGCGGDGDSGDGAGVLCQIPWTYLKAVWPEATSARGLGMMFMPQDPERRELARRFCNEEAEALGLISAGWRAVPVDPSVLGPMARDTAPVIEQWSLAGGPDGDAFEALLLRLRRRIGARSRKAWGFEGSRDLYVASLSSRTVVYKGMVRSEVLAQYYADLRDPRFEVSFAVYHRRFSTNTLPRWPLAQPMRLLGHNGEINTLLGNLNWAKASEASLADVWGEAADDLNPVVNPAFSDSANLDATLELMVRSGRSITDSLITLVPEAFRNQPDLEDRPEVTAMYEFNAGIQEPWDGPALLVFADGKRVGATLDRNGLRPARWCTTADGFVIMGSETGVVDLRGKTVVQKGRLGPGQMVAVDLENGQLLDNWTVKEDAAGRFPYGDWLQQHRRSVAAQPWTQERQIGELDLLRLQTAMGFTAEDFDLVIEDMAGLGKEPTYCMGDDIPLAVLSDKPHLLYDYFKQRFAQVTNPPIDPLREKLVMSLEMHLGERRPALKPQAEAAAVIHLDTPVLNEAELAAIGEQGLPVATLSTQVTVEACAGGLSSALQGLCQAAEEAVRGGAQVLVLSDRVDGSGAAAQLTATSVAMPALLAVGAVHHHLLRQKLRLRCSLVIDTAQCWSTHHMACLIGYGASAVCPWLTWETTRHWLAHPKTQKRIEQGKLPALDANKVQENVRLSLENGLRKILSKIGISLLASYHGAQIFEAIGLGADVIDTAFTGTTSRVAGMTLAELANETLSLHAKAFPELNRSKLEFMGFVQYRTGGEYHLNSPDMAKALHAAVKTGPGYDHFSTYKTLLENRPVTALRDLLEFKLAPAPLPLDQVESAESLCKRFCTGGMSLGALSREAHEVLAVAMNRIGGKSNSGEGGEDPARFQILHDVDADGRSQAFPSIGGLRNGDTACSAIKQIASGRFGVTAEYLRSGKQLEIKVAQGAKPGEGGQLPGPKVDQYIAWLRNSKPGVALISPPPHHDIYSIEDLAQLIHDLHQVHPKAPVSVKLVAEIGIGTIAAGVAKANADVIQISGHDGGTGASPLSSIKHAGSPWELGLTEVHRSLLENGLRDRVLLRADGGLKTGWDVVIAALLGAEEYGFGSVAMIAEGCIMARVCHTNNCPVGVATQKEALRKRFTGVPEHVVNFFWYVAEEVRQLLSILGVAKIEDLIGRSDLLQPRAVDLAKTRGVDLSSLLAPIQGSEDRSWLRHSAEAHGNGPILEDELLADAELMEAVERHESLSRTITIINTDRSVGARLAGEIAQRHGNRGFDGQLNLTFQGAAGQSFGAFLVKGMNVRLEGEANDYVGKGMNSGRISLVPSDGCSNPGDQVILGNTCLYGATGGELFALGRAGERFGVRNSGARTVVEGAGDHCCEYMTGGVVVVLGGTGRNVGAGMTGGVTFLLDEGDRVLPRVNPEIVEVCSLTTAQQESTLKELLEAHVAATGSAKASALLADWAAAKTRFKVLIPPSERAVMGLVDQQAVAA

SEQ ID NO: 34984 - protein, 389 aa, Synechococcus sp. WH 7805
MTASTTSTQSSGVIAPYGGTLVDLMVPESDRASVKASATTSVECSDRNACDVELLIVGGFSPERGFMHQADYAAVVEGHRTTSGHLFGLPIVMDTDRDDVTVGDKVLLTYKGQDLAVLTVEDKWEPDKVVEAKGCYGTTSLEHPAVRMIATERRRFYLGGVIQGLELPKRVFPCKTPAEVRAGLPAGEDVVAFQCRNPIHRAHYELFTRALDASNVSEKAVVLVHPTCGPTQQDDIPGAVRFQTYERLAAEVDNPRIRWAYLPYAMHMAGPREALQHMIIRRNYGCTHFIIGRDMAGCKSSLTGDDFYGAYDAQNFAKECAPELTMETVPSLNLVYTEEEGYVTAEHAEARGLHVRKLSGTQFRKMLRSGEEIPEWFAFRSVVEVLRAS

SEQ ID NO: 34985 - protein, 244 aa, Synechococcus sp. WH 7805
MPEVIRGFSRTASHQGRTSEVSLANAPAPTSKTLLEVIRDLEGANTELIERSKTIFFPGDPAERVYLIRRGAVRLSRVYESGEEITVALLRENSLFGVLSLLTGHRSDRFYHSVAFTRVEMVTAPATSVRKAIEADTSVGLLLLQGLSSRILQTETMIETLTHRDMSSRLVSFLLVLCRDFGIPGNQGITIDLRLSHQAIAEAIGSTRVTITRLLGDLRNSGLVEIDRKKITVLDPIALAKRFS

SEQ ID NO: 34986 - protein, 489 aa, Synechococcus sp. WH 7805
MTTALNTPSGRRKALQEASLLEGPMLLLQSIRGFRTNRALLWLACVPVALFGLGIFNLSAHAEELPELNAAFLANNLWLLVATILVIFMNAGFAMVEAGMCRQKNAVNILAKNLFVFALAVTAYWFIGYSLMYGGSVVDGWLYFKGLFFDPAVSAETISEAGLVPTVDFLFQAAFAGTAATIVSGLVAERVKFGEFVVFALVLTAVIYPIAGSWEWNGGWLNSVGNKEFIDFAGSSIVHSVGAWAGLVGAMLLGPRIGKYVDGRTQAIPGHNMAIATLGALILWIGWYGFNPGSQLAMDQWVPYVAVTTTLAAAGGAIGATIISTMTSGKPDLTMIINGILAGLVSITAGCGNLTLVGSWVAGLIGGVIVVFSVSALDSAGIDDPVGAFSVHGVCGVWGTLVVGLWGFDIQGDGSPLGLLVGGGVEQLGIQALGCAAYAIWALVTCWIAWSIIGALFGGIRVTEEEETIGLDIGEHGMEAYPDFASAGN

SEQ ID NO: 34987 - protein, 526 aa, Synechococcus sp. WH 7805
MSVSDPTNLDDGSSTPRPWWRRPPLWIGAGPLLAFLVLAAVNLKLAQEFTSSGRAIVSDSLGSLWQWMVLVLFVIAVVMAISPVGRLRLGGVDAKPSLKFFDWCAVLICTLLAGGGVFWSAAEPLFHFRTPAPYFSNVEGSTAAAVDPSLAVSFLHWGFLAWALVATTVTITLSIQEQRGESLRPRTLLVGLLPHRWVEGPLGDIADGLSVVAAIAGTVGPLGFLSLQLSNAAGMLPGLSDSAGLQSLVVILLTAVFATSTVSGIQRGIKWLSEVNVWLTLGLAAALLLLGPGLWLIQHFASSFTLYVRNLVPMALAANRGPDNWVNGWTVFYWGWFLGYAPLMGLFTAGVSRGRTLRELVLAVAILCPIVTNLWFTLLGGTGMQLELSNPGAITGPLAASGEAGALLAILGQLPLPWLLIPVGLILVVLFMATSADSMSYAAAMVVSAQRKPPALLRLFWALMIGSLTLVLLRIGTSLGDSTSINALQAFIVISAVPVTPLVLITLWTAPRLAWREWKQRQQVQI

SEQ ID NO: 34988 - protein, 347 aa, Synechococcus sp. WH 7805
MNHSIPVVAENADQLDHSIVSALTRCLQEEAAAIAAAASQLSADEVEGALALLERCADRKAKLVITGVGKSGIVARKIAATFSSIGLMALYLNPLDALHGDLGVVAPDDVCLLLSNSGETAELLEVLPHLKRRGTARIALVGRADSSLARGSDVVLDASVDREVCPLNLAPTASTAVAMAIGDALAAVWMERRGISSADFALNHPAGALGKQLTMTVADLMIPVAQLPSITPTTPLPDVIGRLTQGAIGSGWVEDPAQPGRLLGLITDGDLRRALRDHGPERWPALTAGELMTADPITVSADILAVEAIQRMEHNRRKPISVLPVVDEHDGLHGLLRLHDLVQAGLA

SEQ ID NO: 34989 - protein, 352 aa, Synechococcus sp. WH 7805
MQDLALVINLGSSSLKAALVDSTGATPWHSGRSLQPEDNLDGVLNSWLAPELEPYRESITLVGHRVVHGGEHFTAPTRIDAQVETTLQELVPLAPLHNPPALKGLAWARGWAPDLPQWACFDTAFHSTLPAAASTYALPLELRQKGFRRFGFHGINHQHVAETMAAQWQQQGRDPEQLRLISAHLGAGASLAAIKGGVCIDTTMGYTPLEGLVMASRCGSIDPGLLLELMREGMGEAELSNLLQKQAGLKGLSGLSGDMRDIREQAAAGHQGALLALDVFRQRLLQLIGAMATSLQGVDVLALTGGIGEHDQSLRGELDEALAWLPNLELVIVPADEEGMIARLCRRSTAVG

SEQ ID NO: 34990 - protein, 484 aa, Synechococcus sp. WH 7805
MSITLISALIALAVYLLALLWLGAQSLGGQTNSADSYFLADRRLRAGVLFFTLIATNFSAFFFLGFAGAGYRIGIAYYPMMAFGTSFAALSFGSLGCRLRKLSAQHGLITPSELIGHLLPGEGVRLLVLVVMVLFTLPYLALQPLGAGYLLESLTGGVVPFEVGAVLLTVVIVLYVVGGGMRAVARTDVLQGVLMFSLMLMAFVAISNGVGGVQAANRTLLQKLPDLFSAAGRNDFLRSRVMVSYLLLWPLCVPMFPQMQMRFFAAGDDRSLKQSMVLYPVVAGVLFICPVMIGMWGHLAFPDLVGRASDQIMPLMLGRYSPEWLTGLVMVGALAAFMSTLDSQLLALSSMLTRDLYKRYWRSQASLQEQVRVGQLVVIALAVAGLAIALRPPEAILSLATHAFSGLAVLFPMLVGAVYGLRWSTFAAIASVISGELILLGLATGLIPESIQGGFLPLIPALVVACMILGVDYIITRSVSSAEI

SEQ ID NO: 34991 - protein, 392 aa, Synechococcus sp. WH 7805
MVRADSGPIYLDACATTPLRPGVQQRMLDVQNQAWGNPSSLHSFGIAAAEALERKRVEIGALLGADANDVLITSGATESIHLGIRGLASSFAPGRIVISAVEHPAVTAAAHALTPLGWQVATAPVDSEGILQLDRFEELLHPPTRLVSVIWGQSEVGTLQPLQTIGALCRRYGIPFHTDATQVISQALPDWNTLPVDLLSASAHKCGGPRGVGLLLIRRAWKQQLTALLTGGGQENNLRSGTESVVLVAGMAEALAQIQRCDVDGLPDSGDGIRRIRDELELQLCRTVGVATLGQPQQRLPHHLALMLRDRSGKPLSGRRMVRVLDQEGLAVSSGSACSSGRDTDSSVLSAMRMPKEMRRSGLRLSLGFWNSSNQIGSIVERFERAMQVCSE

SEQ ID NO: 34992 - protein, 222 aa, Synechococcus sp. WH 7805
MRDDVATLTKQINEDTKKGRKLILSASRVDYTKGNEELLLAFERLLERREDLRGKVVLMLACVAAASGMKIYEDTQRLIEETAGRINGRFSLIDWVPIRFSTNRIPYEEMVAWFSMSDICWITPLRDGLNLVAKEYVAARKGRDGVLVLSEFTGASVVLDGAVLTNPYSHKQMDQAIESALEMSEDEQIIRISKMVSAVEDFTVSDWANEQMQSLEVEYKNS

SEQ ID NO: 34993 - protein, 107 aa, Synechococcus sp. WH 7805
MDAQTKTRIETLINSSPVFVFMKGTKLMPQCGFSNNVVQILNALGIGFETFDVLTDMEIRQGIKDFSDWPTIPQVYVKGEFMGGSDILIEMYNNGELKDKLEIALAS

SEQ ID NO: 34994 - protein, 338 aa, Synechococcus sp. WH 7805
MLFGLYACATLGEGGASRLDLIRQRGELRCGVSGKIPGFSFLERDGRYAGLDVDMCQAFAAAFVGDSSKVEYRPLTAPERFTALRTGEIDLLSRNTTFNLSRDASGGNGVTFAPVVFHDGQGLLVRRNSGIKGLDDLRDKTICVGSGTTTEQNLNDVFQARGIAYKPVKYQDLNQLVAGYLQGRCSAMTSDRSQLASARSGFAQPNNHQILPEVLSKEPLAPLSSGGDQRLADAMRWVVYALITAEEMGITKANVDVKLQEATSDPSKTALRRFLGVDGELGSKLGLRNDFVVSVLKTTGNYGEIYDRHLGPQSAVPIPRGLNQLHRDGGVLIAPPFQ

SEQ ID NO: 34995 - protein, 580 aa, Synechococcus sp. WH 7805
MLTPSEAGFRRLLPLLRPHSVQLLWGALSMILFVSSWPLLMNLVGRLIPALGSGDLSIVLPVIGLVLVVFLLQKLAQFAQDSLLAGPALQVSQSLRRDLFQQLQQVELGALEKLSAGDLTYRLTEDADRVSEVIYKTLHDTIPSALQLLAVLGYMLWLDWKLTLAIFLLAPLIIWLISLFGGRVMAATERSQKKVSELAGLLGEAIEGLPLVRAFAAEPWLQGRFEQEIDQHRRARYNTYRLVALQHPVVGIIEVLGIAVVLVLAAYRLSNGDLDSKGLTSYVTGLVVLIDPIAHLTTNYNEFQQGQASLRRLRAIEREPSEPSDPDPALPLDRLRGDLVFENVQFGYRSDQPVLHDLNLKIEAGSVVALVGPSGAGKSTLFSLVLRFNTAQSGQVLLDGKNLAQVRARDLRQQVALVPQRSSVFSGSIAEAIRFGRAASQEQVMEAARLANAHDFIINLPEGYATHLEERGTNVSGGQLQRIAIARAVLGDPAVMLLDEATSALDAEAEAAVQVGLRQAMRGRTVLVIAHRLATVQEADRIVVLEKGSIIEQGTHDALMKQYGRYRELCQKQMIREEIC

SEQ ID NO: 34996 - protein, 392 aa, Synechococcus sp. WH 7805
MSRPLSLSSRAEALQPSLTLAISARAKALQQEGRDICSLSAGEPDFDTPEFIVEASVEALRNGMTRYGPAAGDPTLRELIASKISKENGIPTSAAEVLVTNGGKQAIYNLFQVLLNPGDEVLIPAPYWLSYPEMARLAGARPVAVPSSADDGFRLDLNALEAAITPASRVLIINSPGNPTGRVLSRDELLAIAELVRRHPRLVVMSDEIYEYLLDDGVTHDSFASLAPDLQDRCFMVNGFAKGWAMTGWRLGYLSGPESVIKAASALQSQSTSNVCSFAQQGAIAALTAPRDCVQTMAESYNRRRSFLVAGLQAMSGITLVPPQGAFYAFPQLPEGCGDSMSFCRRALEDEGLAIVPGVAFGDDRCVRVSCAVSRETITDGLARLARLLAVN

SEQ ID NO: 34997 - protein, 607 aa, Synechococcus sp. WH 7805
MTQTPPQAAVPCAVDLTVSEQSSETLPNEELFTTVIAPCNDAEPAESIAEESTKEESGFAGFGFSEALLRTLEEKGYKEPSPIQKAAFPELMLGRDLVGQAQTGTGKTAAFALPLLERLEGRSSKPRVLVLAPTRELAMQVADSFKAYAAGHPHLNVLAIYGGSDFRSQIHTLKRGVDVVVGTPGRVMDHMRQGTLDTTGLRSLVLDEADEMLRMGFIDDVEWILDQLPEERQVVLFSATMPNEIRRLSKRYLQEPAEITIKTKDREAKRIRQRSITMQNSHKIEALNRVLEAVTGEGVIIFARTKAITLTVAESLEAAGHDVAVLNGDVPQNQRERTVDRLRKGTVNILVATDVAARGLDVDRIGLVINYDMPFDSEAYVHRIGRTGRAGRTGEAILFVTPRERRFVGNLERAVNQSIEPMDIPSNAEINQSRLDRLRNRLSEAAVCEADDETPLLQELIQRVAQEHELSADQLALAALRLVVGDQPLLVSGDESWLQAPVRTERRDDRRGDRGRDRRRPERDARPPEDNMTRYRVEVGHRDRVKPGNLVGAIANESGLQGRMIGRIQIFESHSLVDLPKGMPDDVFDSLQRLKVLNRELQITKAS

SEQ ID NO: 34998 - protein, 373 aa, Synechococcus sp. WH 7805
MSSTDSNCLISQHCIAPDLVIRGSGAWQSALTKIRALSSRPLFLGRSAATQPLRNGLITSLVSAGLDVTPACLNHDCCEEDLSRLEAAFTVHRGDAVIAAGGGKVLDAGKLLADRLDLPCITVPLSASTCAGWTALSNLYTPEGAFLGDQALKRCPDLLVFDHDLLRQAPPRTLASGIADALAKWYEASVSSGASHDGLIQQAVQMARVLRDQLLIDSVDAMQSPGGDAWVRVIEACGLTAGLIGGLGGARCRTVAAHAVHNGLTQLQACHGSLHGEKVGFGVLVQLRLEERLGGNRLAEQAHRQLLPLLIQLGLPVSLDDLGLSNASLSDLQQVCEFACREGSDLHHLPFSVTPGALLEALVGAAEPAVRRP

SEQ ID NO: 34999 - protein, 465 aa, Synechococcus sp. WH 7805
MSLLRILLDSNPRFALHLPVHGRGEALPPRLRCLLRRQPGRWDLPELPEIGGPLELDGAVVESQALCAARMGVDCCWFGVNGATGLLQAALLAMAAPGEAVLLPRNVHRSLIAACELGGLLPVFLPVPFDGERGHPRAMTADGLIRSLDALPDLGCRVAAAVLVHPTYHGYAAEIAPLVDCLQARGLPVLVDEAHGTHLAFAPGMGLPSSSLTTGADFVVHSLHKSAPGLAQTAVLWQRTTRISSTALRRSLQRLQSSSPSALLLASCEATLDWMLSTRWRSLLHQRLVKARKLTDDLRRHGVALHESDDPLRLILNTASVGVSGLEADTWFMNHGVIAELPEPLCLTLCLGFARHRGLTARLRHLWQLLIKEQGGPSLAAVAAPPLDSVRGAELSPSAVLHRPSLELPLDRCADRIAAEMICPYPPGIPLLVPGERIDHARVQWLQLQHRRWPEQVPGMVKVLA

SEQ ID NO: 35000 - protein, 331 aa, Synechococcus sp. WH 7805
MTGFLTAARAEQEKIQHDTRRLRLFSGTSNPALAREIAAYLGVPDGPRVCKRFADGELYVQIQESIRGCDVFLIQPTCAPVNDHLMELLIMVDACRRASARQITAVVPYYGYARADRKTAGRESITAKLTANLLVKSGVDRVLAMDLHSAQIQGYFDIPCDHIYGSPVLVDYLSAQELGEVVVVSPDVGGVARARAFAKQMNDAPLAIIDKRRTGHNMAESLTVIGDVHQRTAILIDDMIDTGGTICAGAKLLRQQGASRVIACATHAVFSPPASERLSTDGLFEQVVVTNSVPIPSDRMFPQLQILSVANMLGEAIWRIHEESSVSSMFR

SEQ ID NO: 35001 - protein, 386 aa, Synechococcus sp. WH 7805
MRVSSAASNTYNERVFTLVVVGLQASKQRRSEQTFKVSYDQLQSTVQRINSCGGRILSVTAGSSRTTAHTSVSTASATSTVTETPSKPAHKAVPVNLYKPKSPFIGTVTENYSLLKEGAIGRVQHITFDLSGGDPHLAYVEGQSIGIIPEGEDAKGKPHKLRLYSIASTRHGDNLADNTVSLCVRQLEYKNDAGEEIKGVCSTYLCDIEPGTKVKITGPVGKEMLLPDDEEANVIMLATGTGIAPMRTYLRRMFEPSEREKNGWTFRGKAWLFMGAPKTPNLLYDEDFEHYEREYPDNFRYTKAISREQQNSKGGRMYIQDRVLEYADEIFAMIENPKTHVYMCGLRGMEPGIDEAMSAAAAAKGLDWSELRPQLKKAERWHVETY

SEQ ID NO: 35002 - protein, 372 aa, Synechococcus sp. WH 7805
METAAGETRVAASPETVKKFIALGCRVVLERGAGRTSGFLDEAYSEAGAHLVTPGDSQAWEEADVLLCVQSPSPAHLGRLRRGALVVGLLAPYANVELDAALKRCGLSAMALELLPRISRAQSADALSSQANIAGYKSVLLASAALDRYFPMLMTAAGTVQPARVVVLGAGVAGLQAVATARRLGAVVYVSDIRPAVKEQVESLGARFIDPPEMEDKPAESGGYAKQASDAFLAAQRQQLSDQLAEADVAICTAQVPGRRAPRLISEDMLDRMRPGAVVVDLAVAQGGNCADTVPSQTVDRNGVKLIGANDLPCSVPNHASFLYSKNLLALLQPMLQDSQLTLDLEDELIAGCLISQDGNIRRSDVLTPGAN

SEQ ID NO: 35003 - protein, 312 aa, Synechococcus sp. WH 7805
MQVTPLADGHRSGFVALIGRPNVGKSTLVNQLVGDKVAITSPVAQTTRNRLRAILTTAEAQLILVDTPGIHKPHHLLGERLVQSARSAIGEVDQVLLLLEGCEPPGRGDAFIVNLLRQQRLPVQVVLNKWDQVPTARRPEADAAYRDLLAESGWPIHHCCALTGEGCPELVRAVSALMPEGPQLYPADMVSDQPERLLMAELIREQVLLLTREEVPHSVAVSIDRVEEMPSKGKGSGRTAVLATVLVERKSQKGILIGKGGAMLKTIGQGARLQMQTLIDGPVYLELFVKVVPDWRSKPQRLAELGYAEEGR

SEQ ID NO: 35004 - protein, 401 aa, Synechococcus sp. WH 7805
MGRAKKVVLAYSGGVDTSVCIPYLKQEWGVEEVITFAADLGQGDELEPIRRKALDAGASQSLVGDLIRPFIEEFAFPAIRANALYEGRYPLSTALARPLIARRLVEVAREVGADAVAHGCTGKGNDQVRFDVAIAALAPDLKVLTPAREWGMSREETIAYGERCGLPAPVSKKSPYSIDLNLLGRSIEAGPLEDPMQAPPEEVFAMTVSIDAAPSAAEEIEIAFEAGDPVSINGQRLDPVALIREANRLAGSHGIGRLDMIENRVVGIKSREIYETPGLLLLIQAHQELESLTLAADVLRTKRQLEMQWADLVYQGLWFGPLKDALDGFMDRTQTHVNGVVRLRLYKGNAIVTGRGSSDSSLYAPEMASYGSEDQFDHRAAEGFIYIWGLPIRLWSAARRR

SEQ ID NO: 35005 - protein, 638 aa, Synechococcus sp. WH 7805
MGKVVGIDLGTTNSCVSVMEGGKPTVIANAEGFRTTPSVVAYTKNQDQLVGQIAKRQAVMNPDNTFYSVKRFIGRRVDEVNEESKEVSYSVEKAGSNVKVKCPVLEKQFAPEEVSAQVLRKLAEDAGKYLGETVTQAVITVPAYFNDSQRQATKDAGKIAGLEVLRIINEPTAAALAYGLDKKSNERILVFDLGGGTFDVSVLEVGDGVFEVLSTSGDTHLGGDDFDKVIVDHLADSFKANEGIDLRQDKQALQRLTEAAEKAKIELSSATQSEINLPFITATPEGPKHLDLTLTRGKFEELASNLIDRCRIPVEQALKDAKLSSSELDEIVMVGGSTRIPAVLELVKRTTGKDPNQTVNPDEVVAVGAAIQGGVLAGEVKDILLLDVTPLSLGVETLGGVMTKMITRNTTVPTKKSETYSTAVDGQTNVEIHVLQGEREMASDNKSLGTFRLDGIPAAPRGVPQIEVTFDIDANGILSVTAKDKGSGKEQSISITGASTLSDSEVDKMVKDAEANASADKEKREKIDLKNQAETLVYQAEKQMGELGDKVDADAKAKVEEKRTKLKEATEKEDYDAMKTLLEELQQELYTVGASVYQQAGAEAGAAPGGDAGAGADAASGSSDAGDDVIDAEFTETK

SEQ ID NO: 35006 - protein, 295 aa, Synechococcus sp. WH 7805
MDYVLPNELVDGMIAAGGKKSSVSVKDLLLRGFYSGAILGLAVILALTVGITVKAPFVGSLLFPFGFASIVLFGMELVTGNFALLPMATWAGRCTWGATFRNWTWVWIGNWIGTAVVALIMAISLTSGTMDGAADNVGAPIWDLVAQKIMALNKINVEKKYEALGSMGFFLAFLRGVVANWLVCLGVTMALVSKSVPGKILACWLPITAFQSMGMEHIVVNQFLHTAGPILGSGVPYTKVIFWNFLPVTLGNIVGGMVFIGMLFYSTHRTTMDNVLPKEHDEKLERELAAELGAR

SEQ ID NO: 35007 - protein, 513 aa, Synechococcus sp. WH 7805
MTISSPSRPYLDGKKLNKIEQNKAAKDGLLVGPEIEKFAEIGWEQVDETDLQLRLKWYGMFWRPKTPGQFMLRLRVPNGVLSAQQLRVVASIVERYGESGSCDITTRQNLQLRGVLLNDLPEILKRLKEAGLSSIQSGFDNPRNVTGNPLAGIDPNEIVDTRPYTTELQNFLTNSCQGNPDYSNLPRKWNTAVAGAKDNFLLHNDIVFHPVERDGEMGFGVWVGGILSSQMNAYAIPLNAWVRPDEICRITDAVISLWRDNGERDKRPRGRFRFYLDALGIDAFRSKVETLFGPLTPDPGSVFATTPRSHYGIHPQKQEGLSFAGLHVPVGRLTAQDLQDFAAASLEYGSGEVRLTEDQNVIMVGLPDGAIPAFKADPLLQRFPLEPGSIAAGTVSCTGNTYCSFGLTNTKDQALKIAQELDQELNLSEEVKIHWTGCPNTCGQAFMGAIGLTGTKAKNSDGVMGEGYMLTTGGSQGENPTVGEVKQKAIPADQIKTVLKNLLVEQFGATAKS

SEQ ID NO: 35008 - protein, 674 aa, Synechococcus sp. WH 7805
MCGIGGVFLADRRQTLDRQLLVNMAAIQSHRGPDGFGVECIDAAGVGFCHARLSIIDLNESRARQPFLSDDRQVLMAHNGEFYDFQRIRADLTAQGVRFSTKSDSEILLRLYQRQGLESTLPLLRGEFAFALFDAVDDCLYLVRDRFGIKPQYWTMTPEGVVFGSELKVLFAHPLVERRFTSEGLFHQLMQTMVPGTTAFAGVHQVQPGHVLKVQRRGDRLEVSESTYWDVDFPRLDQRDSTLTEADHIANVRAALLEAVEMRMVADVPVGCYLSGGIDSCSILGLASAVSQGPVKAFTIGFDDARYDETPIAAEMAEATGAEQDVMRLSGRELYGHMEQTLWHTERTIYNTLAVAKYLMSRHVNNVDYKVVMTGEGSDELFGGYPAFRRDMFLHGLDDLPQSDRQDWESLLQTNNSLVQGAMLAADQVDDPDLDAVVGFTPSCLQPWLACAPLVPDLLAEEHRQALAEYSPGKAIAEQLNPQQLEGRHALDKAQYVWIKTMLEGQILTWGGDRVDMANSMEARPAFLDHHLAAAAVQVPPELRIKGKTEKYVLREAMAGLLPEVLYKREKFAFMAPPAHTEPEKWAQMKQLADDYLSDEAIDAAGLLSKEGVRTLFARHDDPVTTDAERVQMDAVINHLLGVQMLHRMFVAADVPAQAREQADHLGWRVLMPV

SEQ ID NO: 35009 - protein, 375 aa, Synechococcus sp. WH 7805
MIQAFQRRRWSLVLVWVLIVAVVVAAPAVLPVFRLNLLGRFLSLAIVALGIDLIWGFTGLLSLGQGIFFALGGYGAAMYLQLNSSASHPNGIPEFFSLYGVDRLPFFWEPFYNPLFTLIAIWLVPALLAALLGNMVFRNRIKGVYFSILTQAALLVFFNFFNGQQKLINGTNGLKTDVTKLFGQMVGSPEMQRWFFWITAVIVILAWLFVRWLVRGRFGDVLIAIRDDEPRLRFTGYNPTLFKTIVFAIAGGLAGIGGALFTVQSGIVSPQYMAVPFSIEMVIWVAVGGRGTLVGAILGAVSIMYAKSLVSEAMPQSWLFIQGGLFILVVTALPEGVIGWFRTDGPRNLLSRLGLGRRIATYPQLEIDGQEEVQP

SEQ ID NO: 35010 - protein, 294 aa, Synechococcus sp. WH 7805
MKTNGLDTFAAEELFDQDGGIFMGARRDPSGCQVGVFGVPYDGTTSFRPGTRFGPAAIREVSPGLETYCPQLDRDLDTLDYADLGTLNIAFGAPEPVVEAVKRATSEILALGLKPLMLGGEHSISSGAVAAVAKDHPDLVLVQLDAHADLRQSWLGASHSHACAMRRCLDVLPSGDLLQIAIRSGTAEEFSELHRSGRLIPLHQMSQKLSDLRGRPIYLTVDLDWFDPAVMPGTGTPEPGGFTWADFAVLINELQHHHLVGADVVELAPQLDPSGISSVLAAKVTRSLLLLMAQ

SEQ ID NO: 35011 - protein, 563 aa, Synechococcus sp. WH 7805
MTYVLDRLADLGIGHVFGVPGDYSFPLNDAVEVHPRLQWVPSANELNAAYAADGYARRRGAGIVCTTYGVGELSALNGVMGAMAERVPVFHLVGTPSVRIVRQGLICHHTLGDTRYDRFEAISAAAGCVSARLTPENVVVELERVIDKALEDSRPAYLTVPMDLALMPITGTPIQGTPMGAVDQHASVAVELEAVLDLVMGRLAEAARPLVMPTVTLKRFGLVETFAAFLEASGLAYATTPMDKSLLSEGHPAFLGMYNGARSTPAALQGVVEDADLLIDFGGLVMEDLNTGLWSGHLDASRVISLHADWVQAGDQVFTSVSISEVLAGLIKRFQATGSRPSHWGEQRPVQPEPLLPLRGEGDQPTGSASFYGRLQRFLRPTDLLVTDTGTCMLKLNAMRLPDGVAIESQTLWGSIGWATPAALGCALADSERRVVLVTGDGAHQLTVQEIGVMGFTGAKPVVIVLNNGLYGVEALLSETGHAYNDLPPWRYAQLPEAFGCQGWWSGRVSTVAELEQALVAINAHDGGAYLEVMIPPEESQPLAETLIETMHQTATPHPEAAE

SEQ ID NO: 35012 - protein, 393 aa, Synechococcus sp. WH 7805
MLPTTTDDLIPGDLIQLDHQATTPCHPLVVQAMEPWWQQEWGNASSRQHRLGLTAAAAVASARHRLASHLGVEDDELIFTSGATEANNLALLGHARARAKAEGHCGHVITVATEHHAVLDPMHQLQREGFELTVLRPQDNGLINANALSGVLRDDTQLVSVMAANNEIGVIQPLQALSDVCKSRGITLHTDAAQAFGHVRLIRSDLGCDLISLSAHKLNGPKGIGALVKRRGVSIQPLLWGGSQEQELRPGTLPVPLIVGFAAAADLAHADLETRQHQLSVLTNQLWRGLKSRHPQLLMNGAHQPRLAHNLNITVPDVSGNRLHRCLKRSLACSSGSACSRGKPSHVLQAIGRSRVEAEASLRLSLGRTTTATDINRAVEVIAACISQLDGSQ

SEQ ID NO: 35013 - protein, 600 aa, Synechococcus sp. WH 7805
MALLVQKFGGTSVGSVERIQAVAQRIAACKEDGNDLVIVVSAMGHTTDELTAKARAINSNPPQREMDMLLATGEQVSIALLSMALHALGVPAVSMTGSQVGIVTESAHGRARILDVRTDRLRSRLAEGQVVVVAGFQGTSLSSGGTAEITTLGRGGSDTSAVALAAALGADACEIYTDVPGVLTTDPRKVVDAQLMPEVSCDEMLELASLGAAVLHPRAVEIARNYGVTMVVRSSWSDDAGTTLTSRSAQPIGREGLELGRPVDGAELVEEQAVLALSHVPDQPGVAAQLFESLSKGGVNVDLIIQSTHENNSNDITFTVAESELDKARCICNAQLQTLGGDLVAEAGMSKLSISGAGIMGRPGIAAGLFQTLSRVGINLRLIATSEVKVSCVIEASAGAKALQATQEAFELDSALISLNPLPSGEGEPEVRGVALDRDQAQVSVRHVPNKPGTAGALCHALADAGISLDGIVQSERQHADGSRDISFTLKRDDRAAADRALRGLLAQWPGALLEDGPAIARVSAVGAGMPATAGTAGRMFRYLADAGLNIEMIATSEIRTSCVVAESDGIAALRAVHTGFQLGGSTHHEAQGTESPLEK

SEQ ID NO: 35014 - protein, 69 aa, Pseudoalteromonas tunicata D2
MSTTTTGSVKWFNEAKGFGFIEQASGPDVFAHFSAISGDGFKTLAEGQRVQFSVSQGQKGPQADNIVCI

SEQ ID NO: 35015 - protein, 69 aa, Pseudoalteromonas tunicata D2
MSTTTTGSVKWFNEAKGFGFIEQASGPDVFAHFSAISGDGFKTLAEGQRVQFTVSQGQKGPQADNIVCI

SEQ ID NO: 35016 - protein, 309 aa, Pseudoalteromonas tunicata D2
MSNIFQREETSLFSNPMTFLRQPLQQNPLAVDADIVVLGLPFDMATSGRSGARMGPDAIRRASVNLAWEHKRFPWNFALTDHTKIIDAGDLIYPPGDAEGFTAIVEEAATQLINQGKTLLSLGGDHFVTLPLLRAHAKKHGKMALIHFDAHTDTYSNGSRYDHGTMFFHAPNEGIIDKHKSVQIGIRTEYTQDNHGFNVINAMQANDLTPEQIVEQIKATIGDLPVYFTFDIDAIDPAFAPGTGTPVCGGLTTDKVLKIIRLLDGINIVGMDVVEVAPAYDHAELTALAGASIALEMMYMWTKHNKKIG

SEQ ID NO: 35017 - protein, 353 aa, Pseudoalteromonas tunicata D2
MSFPYLFIDRDGTLIYEPIEDKQVDSVAKVKLEPGVIPALLQLQAAGYRLVIVSNQDGLGTDSFPEANYHVAQNHMMDIFTSQGVKFEDVLICPHFSEDNCACRKPKTGLMTGYLRSGKVDLSRSFVIGDRQTDIGLAENIGCEGILYQGDWQSITTRLLTPNRCALIERNTKETQIALRLNLDSPAKGSIETGLGFFDHMLDQIRTHANIELDIKASGDLYIDEHHLVEDIGIALGQAIKTALGTKSQIARYGFALPMDECKAEAQIDLSGRASLVLNANFSREKVGDMDVQMVEHFFKSLTDNSALSLILSISDGNCHHQVEGLFKAFSRALRMAIAKDATQVLASSKGML

SEQ ID NO: 35018 - protein, 574 aa, Pseudoalteromonas tunicata D2
MEQEIMSGAALVVRALKELEVKYVFGYPGGSVLDIYDALYVQNDVEHILVRHEQAATHMADGFSRATGQVGVVLATSGPGATNCVTGIATAYMDSIPMVVLAGQVPSNLIGDDAFQETDIVGCSRPIVKHSFNCRSAVEIPEILAKAFYIAKTGRPGPVVVELPKDILNPALEFPFIMPKDISLRSYNPSKKGHSKQIRKAVQAILNAKRLVVYSGGGIILSDTSEQLTQLVESLNAPITNTLMGLGGISGTHPNFIGMLGMHGNLEANKAMANADVILALGARFDDRVTNNVKKFCPNATIVHVDVDPTSISKTISAHIPVVGDLATVFEQLQIEIDKSELQIDRAAQEDWWRTINNWREQKCLSYTKVEGKIKPQTVIETLYKVTQGKAYISSDVGQHQMFAAQYYPFDKPRQWINSGGLGTMGFGLPAAMGVKLAFPDKESVCVTGDGSIQMNIQELSTCMQYGLAVKIISLNNRSLGMVRQWQDMIYSGRHSSSYMDSLPDFVKLAESYGHVGIRVDYPEQLEDALATAMAITDRLVFVDVCIDESEHVYPMQIRLGAIDEMWLKKGVKA

SEQ ID NO: 35019 - protein, 640 aa, Pseudoalteromonas tunicata D2
MGKIIGIDLGTTNSCVSVLEGGKPRVIENSEGDRTTPSIIAYTADGETLVGQPAKRQAVTNPQNTLFAIKRLIGRRFEDEEVQRDIAIMPFKIVKADNGDAWVEARGEKRAAPQISAEVLKKMKKTAEDYLGEPVTEAVITVPAYFNDSQRQATKDAGRIAGLEVKRIINEPTAAALAYGIERKQGDNVVAVYDLGGGTFDISIIEIDDVEGEQTFEVLATNGDTHLGGEDFDNRVINYLVTEFKKDQGIDLKNDPLAMQRVKEAAEKAKIELSSAQSTEVNLPYVTADATGPKHMNVKLSRAKLESLVEDLVLKSLEPLKKALADADLSVSEVNDIILVGGQTRMPMVQKAVADFFGKEPRKDVNPDEAVAMGAAVQGGVLAGEVKDVLLLDVCPLSLGIETMGQVMTALIEKNTTIPTKKSQTFSTAEDNQSAVTIHVLQGERKRSSDNKSLGQFNLEGIRPAQRGAPQIEVTFDVDADGILHVSAKDKDTGKEQKITIQANSGLSDDEVEAMIRDAEANAEADKKFAELVGIRNQADALVHGTRKQVEEAGDDLPAADKEVIEAAVVELETAIKSDNKEEIEAKTQALMEKSQKLMEIAQAKAQGQQAGGAEQQQKSSAKQDDDVVDAEFEEVKDDK

SEQ ID NO: 35020 - protein, 369 aa, Pseudoalteromonas tunicata D2
MKRNWQEVKTKFSQCLCPPGNGVFTVNTAQERKAALHQTLFGQTDNIQALWLDSLDTLPQSTHKAVMLGISSDCGGGILRGANWGPLFLRSTLMEQQPNSVSFDLGDIRVIPHLLHDKYLNDATIENCQKALYQSTDAAYPVSPLSITEDICDDFYDQFPEKGIFGIGGDHSISYPLTKAYLKAKRERGIRTAIIHFDAHTDLLVERLGIDLCFGSWCTHILEYLPAPQYLIQFGIRSSGKPKAHWESTFGIKQHWANEIRERGAAAIVAQVITQLKADKVDELYVSFDIDALDASFASATGTPEYDGMTPDEALLILAELAKEFPITGADMMEIAPFTDSSLQGKVSSDNTLREGAKISAFLIDAMNK

SEQ ID NO: 35021 - protein, 69 aa, Pseudoalteromonas tunicata D2
MSTTTTGTVKWFNESKGFGFIEQENGPDVFAHFRAITGTGFKTLVEGQKVQFKVTQGQKGPQAEEIVVL

SEQ ID NO: 35022 - protein, 364 aa, Pseudoalteromonas tunicata D2
MKLLEKVINKAAHLLLHTESFKGYLEPLVQQFKPAWRAGFYRAKVIKIITLPANCISLELRPERSWPSHQAGQHVLLSCQFNGRLMTRTFSISSSQGQAERGNHIRLTIKTAKNGAFTSQLANELAVGDFVNLSEPMGEFLLPSCEPNSTDELFFIAAGSGITPFMAMLHTLAERDHIRTQNIYLCYFAKQGEHLFIDELTELKRFIPRLNVMFLVRKQGDSLASALKNVMPTSQVLICGPQQFKQDVDAVLNHFGHLSLNRQAEFFQTPLSNENNADIQQVTVLRHGQVTELLLTGNENLLNGLEQQGLSPNFGCRIGVCHQCQCIKKCGIVKNLRTGEQSDTGEQLIQLCISQAITPLELEL

SEQ ID NO: 35023 - protein, 1485 aa, Pseudoalteromonas tunicata D2
MLYDSKLEKDNCGFGLIAHIAGTASHKLVRTAITGLDRMQHRGGIAADGKTGDGCGLLLQKPDNFFRSIAQEQNWHLGKNYAVGMIFLNPDPELAQKTRQIVNQELEKETLTIVGWRDVPTDPASLGPIAIEQLPQFQQIFVSAPEGWRPKDLERRLYIARRRIEQRIINDDYFYICSLSGLVTVYKGLVMPADLPNFYLDLADIRMESAICVFHQRFSTNTQPRWPLAQPFRYLAHNGEINTIEGNRQWARARAYKFSSPLLPDLQTAAPFVNETGSDSSSLDNMLELFLAGGMDIFRAMRMLVPPAWQKNKAMDEDLRAFYDFNSMHMEPWDGPAGIVMSDGRFAACNLDRNGLRPARYVVTKDGLITLASEVGIWDYTPDEVQEKGRVGPGELLVIDTLHGKIWHSNEIDNDLKNRHPYKSWLEQNVQRLTPFEDLAQELTGQRELDDDLLAVYHKQYAYSFEELDQVIRVMGAIGQEATGSMGDDTPFAVLSSKERPIYDYFRQKFAQVTNPPIDPLRENHVMSLATCIGREQNVFNETTGHAKRLQFSSPVLMFSDMTQLLLADQAHYNSCTINLNYLIEEGLAAAVSRVCDEAQAQAESGVVLIVLSDKGLTPAHLPIPAAMAVGAVHQRLVKNNLRCDANIIVETASCRDPHQFAVLLGFGATAIYPYLAYETLTQMSDKGTIKQSYCQVTSSYRNAINKGLYKIMSKMGISTVASYRCSMLFEAVGLADEVVATCFEGVVNRIKGADFSDFHQELLNLSRKAWVKRKPIDHGGLLKYVHGGEYHAYNPDVIQTLQVAVRSGEYQDYLRYADLVNNRPITTLRDLLQLQAGDGAISIDEVEPAEALYKRFDSAAMSIGALSPEAHEALAIAMNRLGGCSNSGEGGEDVLRYGTEKNSRIKQVASGRFGVTPHYLVNADVIQIKVAQGAKPGEGGQLPGEKVTPYIAKLRYSVPGVTLISPPPHHDIYSIEDLAQLIFDLKQVNPKAMISVKLVSEPGVGTIATGVAKAYADLITIAGYDGGTGASPLTSVKYAGSPWELGLAETQQALVENGLRHRIRLQTDGGLKTGLDIIKAAILGAESFGFGTGPMVALGCKYLRICHLNNCATGVATQDEKLRQNHYHGLPEMAMNYFKFIAQEAREIMASLGIRQLVDLIGRTDLLVAIEGKTAKQSKLDLSGLLYRPNNKSGQTLFCSTANTSHYQGRLNETLLAKSQPAIDEKLGKVIRSKINNTDRSVGALLSGYIAERHGNQGMAADPIQIELTGTAGQSFGVWNAGGLEMSLVGDANDYVGKGMAGGKLSIAPPPGSSFACHQASIIGNTCLYGATGGKLFAAGRAGERFAVRNSGAIAVIEGAGDNACEYMTGGVVCILGKTGINFGAGMTGGFAYVLDEAQDFEKRINSELVELIAMDDLVIHHEHLRGLIIEHLEATKSCWAETILADFENYLAKFRLIKPKSSDVKSLLGHRARSSAELRVQAQ

SEQ ID NO: 35024 - protein, 114 aa, Pseudoalteromonas tunicata D2
METIDKIKQQISENSILLYMKGSPKLPNCGFSSQASQALMSCGEPFAYVDILLNPDIRAELPHYANWPTFPQLWIEGELIGGCDIIIEMFQRGELQPLIAEAAARNKPAEEAAE

SEQ ID NO: 35025 - protein, 860 aa, Pseudoalteromonas tunicata D2
MRLDRLTSKFQAAISDAQSLALGRDHQFIEPVHLMYALLQQTGSSVRALLAKAGVNSSEMNGKVSQAMEKLFKVEGIGGDVQLSPNMVNLLNLCDKYAQKRKDKFISSEIFILAACEDKGPLGEIFKTFGLNATKVETAIQAIRGGQKVEDASAEDSRQSLEKYTVDLTERAELGKLDPVIGRDDEIRRTIQVLQRRTKNNPVLIGEPGVGKTAIAEGLAQRIINGEVPEGLKDKRVLSLDLGALVAGAKYRGEFEERLKAVLNELAKEEGRVILFIDEIHTIVGAGKSDGAMDAGNMLKPALSRGELHCVGATTLDEYRQYIEKDAALERRFQKVLVEEPTVEDTIAILRGLKERYELHHSVEITDPAIVAAATLSHRYISDRQLPDKAIDLIDEAGSSLRMQIDSKPEVLDKLERKIIQLKLEDNALAKEKDEASLQRQQDIKQQILVLDKQYNELDEVWIAEKASLQGTQVIKTELEQARLDLEIARRASDLQRMSELQYGRIPELERKLDLASQVEMQDMRLLRNKVGENEIAEILSRWTGIPVTKMLQGERSKLLKMEENLHTQVIGQDEAVTAVANAIRRSRAGLSDPNRPIGSFLFLGPTGVGKTELTKALATFLFDTEDAMVRIDMSEFMEKHSVARLVGAPPGYVGYEEGGYLTEAVRRKPYSVILLDEIEKAHPDVFNILLQVLDDGRLTDGQGRTVDFKNTVIIMTSNLGSDVIQEHAVNSDYERLKAMLMDVLTTQFRPEFINRIDDTVVFHPLSTEHIKHIADIQLAKLKQRLVDNGYTMRLTDEALSQLALAGFDPVFGARPLKRAIQHYIENPLAQKLLEGDYAAGSCFVIALVDGQFSITVDAQ

SEQ ID NO: 35026 - protein, 496 aa, Pseudoalteromonas tunicata D2
MAIGTLISLAIYFIVMLGIGFYAYRKSTSDVSGYMLGGRSLSPSVTALSAGASDMSGWMLMGLPGAMYITGISSTWIAVGLVIGALLNYLIVAPRLRTFTEVANDSITLPDFFENRFADNSHMLRLVSSVVIIVFFTLYTSSGVVAGGKLFESSFGLSYELGLYVTAGVVVVYTLFGGFLAVSLTDFVQGCIMFLALILVPLVTLFEIGGIEELNNTVAAINPEMLNLVSGTSLVGIISAMAWGLGYFGQPHIIVRFMAIRSVEDVPTARNIGMSWMIVSIIGAVATGFVGIAYVAKTGMTLDDPETIFIVLSQLLFHPLIAGFLLAAILAAIMSTISSQLLVTSSSLTEDFYKIFLNANASDKEQVLVGRISVLLVALVAIFLAYDRDSSILSLVSNAWAGFGAAFGPLVILSLYWRNMTAWGALSGMLVGAATVLFWIYAPLSVDGQSLSAWLYEIVPGFILSTIAIVVVSRLTTIDDPKVEQQFEQMLAKHGK

SEQ ID NO: 35027 - protein, 299 aa, Pseudoalteromonas tunicata D2
MNPKTHCGMIAIVGRPNVGKSTILNEIVGQKVSITSRKAQTTRHRIMGIHTEGDYQAVYVDTPGLHIEEKRAINRLMNRAAASSISDVELIIFVVEGTHWTADDDMVLHKVKQTGRPVLLVINKVDQVKEKEELFPHLQWLGEQADFVAILPVSATQAKNIDLIKDQVRKYLQPSEFIFPEDYVTDRSTRFLAAEIVREKLMRFMGEELPYSVTVEIEQFKWQENGVWHINALILVERESQKRMVIGNKGEKLKVIGREARKDMEEMLDNKVFLELWVKVKSGWADDERALRSLGYGED

SEQ ID NO: 35028 - protein, 410 aa, Pseudoalteromonas tunicata D2
MENTVIELKFALDTFYFLVSGILVMWMAAGFAMLEAGLVRSKNTTEILTKNVALYAIACTMFLLVGYNIMYVNNPEGGILPTLGGLIGSQASDANHSLESDFFFQVVFVATAMSIVSGAVAERMKLWAFLAFCVVMTGFIYPLEGYWTWGGGFLSKLGFVDFAGSGIVHMAGASAALAGVLLLGARKGKYGKNGEIYPIPGSNLPLATLGTFILWMGWFGFNGGSQLLLSDAENSTAIGKIMVNTNAAAAAGAIAALFVCKILWRKADLTMVLNGALAGLVVITADPASPSPVLALLLGALGGSLVVFSIVFLDKMKIDDPVGAISVHGVCGVLGLMLVPLSNTDATVVKQLIGTVTIFSFVFIASLITWSILKSVMGIRVSEEEEINGMDQHDCGVDAYPEFVTVRSNI

SEQ ID NO: 35029 - protein, 410 aa, Pseudoalteromonas tunicata D2
MSNKVSLAKDKIKILLLEGLHQSAVETLKRHGYSNIEYVKTSLAEEELIERISDVHFIGIRSRTHLTEKVLNAAEKLIAVGCFCIGTNQVELDAAKARGIAVFNAPFSNTRSVAELVLGEILLLLRRIPQKNAQAHRGIWDKSAHGSFEARGKTLGIIGYGHIGTQLGIMAENIGMNVQYYDIEDKLSLGNATQVHHLTQLLQTSDVISLHVPETPQTKNLIGAAELEIIKHGAILINASRGTVVDIDALASSLRENKLSGAAIDVFPTEPTSNDEEFISPLREFDNVILTPHIGGSTQEAQENIGIEVAGKLAKYSDNGSTLSAVNFPEVSLPELAGRSRLLHVHHNRPGILTQINQAFAQHGINIAAQYLQTNETIGYVVIDVDTDDSEIALKELRAVEGTIKARILH

SEQ ID NO: 35030 - protein, 182 aa, Pseudoalteromonas tunicata D2
MNKAIFLDRDGVINVDHAYVHKIDQFEFVAGVFEACRHFVALGYKLVVVTNQSGIGRGYYSESDFATLTDWMTLQFEREGAPLAGVYFCPHHPKNAQGMYQTDCECRKPAPGMLAQAISEHQIDVTQSIMIGDKWSDIEAGQRAGVARCILIQSQYSSDEQAIAQPDIEIWSSLAQGVDKIS

SEQ ID NO: 35031 - protein, 402 aa, Pseudoalteromonas tunicata D2
MSSIKKVVLAYSGGLDTSAIVPWLKENYHCEVIAFVADVGQGAEELEGVEAKAIASGASECYIVDLKEEMVAEYIYPTLKTGAIYEGTYLLGTSMARPIIAKAQVEIARKVGADALAHGCTGKGNDQVRFEGCFAALAPDLKVIAPWREWDLTSRESLLDYLAERNIPCAASATKIYSRDANAWHISHEGGELENPWNQPSEQVWMWTNSPEQAPNEAQYVTLSVEKGQVVAVNGESLSPYQCVVKLNEIASVHGVGRVDIVENRLVGMKSRGCYETPGGTVIMAALQAIDELVLDKASRKWKATLGGEFSHLVYDGRWFTPLKDSVLAGAEALAQCATGEVVLKLYKGQVTAVQKQSPNSLYSEAFATFGADDVYDQSHAEGFIRLYSLASRISALNKSTK

SEQ ID NO: 35032 - protein, 404 aa, Pseudoalteromonas tunicata D2
MKLPIYLDYAATTPVDPRVAEKMMQCLTMDGNFGNPASRSHRFGWHAEEAIDQARHDIAALINADPREIVFTSGATESNNLAIKGAANFYSKKGKHIITAKTEHKAVLDTCRELERQGFEVTYMDVEENGLLDLDKLAATMRDDTVLVSIMHVNNELGVVQDIATIGEMCRERKIMFHVDGAQSAGKVEVDLQALKVDFMSFSAHKIYGPKGIGALYVRRKPRARLEAQMHGGGHERGMRSGTLPTHQIVGMGEAFRIAKEDFSADHARIEKLRQRLIDGVMDIEEVYFNGTREQSVPGIINISFNYIEGESLLMALKDIAVSSGSACTSASLEPSYVLRALGRNDELAHSSIRFSIGRFTTEEEIDYTVTLIKESIGRLREMSPLWEMFKDGIDLDSVEWAAH

SEQ ID NO: 35033 - protein, 462 aa, Pseudoalteromonas tunicata D2
MKTVWLVDDDASIRFVLEKALSRAGFQTESFASAESVLSALEYNQPMVLISDVRMPGMDGMTLLEGICKEHPELPVIIMTAHSDLDSAVQAFQKGAFEYLAKPFDLNEAVNLVESACRANAKTKTKPAQAEQKAQDIIGEAPAMQEVFRAIGKLSASSMSVLINGESGTGKELVAGALHNHSPRKEKEFIALNMAAIPKELVESELFGHEKGAFTGADSVRKGRFEQANGGTLFLDEIGDMPLDVQTRLLRVLADGEFYRVGGHQSIKVDVRIIAATHQNLEELVSAGKFRDDLFHRLNVVRLKLPALRERTEDIEKLANYFLTKSAKELKVESKILAPDATKKLKAFHWPGNVRQLENTCRWITVMAPGQIVTEADLPSEVFVSAVKTTQSTDWLEQFQVWFDNELKQGRENIWPDIQAEIEVRLINTALNHCHGHKQDAAVKIGWGRNTLTRKLKERNLN

SEQ ID NO: 35034 - protein, 549 aa, Pseudoalteromonas tunicata D2
MTGAQLLIELLAKHGVNEVFGYPGGAIMPIYDALYGAPIKHYLTRHEQGAGFAAVGFARSTGKLGVCFATSGPGATNLITSLADAMMDSVPLLAITGQVPTAAIGSDAFQEIDVLGMSLSCTKHSYLVERPEDLAEILQEAMHVAQSGRPGPVLVDIPKDIQLAQVPFHPWLAVDDYKPQVSNDEVLKANQLLAHAKRPVAYVGGGVQAADAQQHLMDFLNATQMPAVSTLKALGSVLPEYQHDLGMLGMHGGQAANLAVQECDLLVCIGARFDDRVTGNLAKFAAKAKVIHLDIDAAEVGKRKPVAASLVADLKDSLPKLNGPLTTADWLDHCSAMKQQYAWRYDYPGEKVYAPYLLNQLSQLMPKNGVVCCDVGQHQMWVAQHMKFRHPSNHLSSGGAGTMGFGLPAAIGAQVARLNDFVITVSGDGSIMMNIQELATIRRNNLPVKILILDNQRLGMVRQWQQLFFEGRYSETDLSDNPDFVALAAVFGIPGQTITHANEVDAALVKLVSATGPYILHACIDDKENVWPLVPPGAGNEQMLTEVVS

SEQ ID NO: 35035 - protein, 384 aa, Pseudoalteromonas tunicata D2
MKFVDEVEVRAEAGDGGSGAVSFRREKFIPEGGPDGGDGGDGGSVYFEADENLNTLIDYQFERFHRAERGTNGRGAKCTGKKGDDLVLKVPVGTRVSDVETAESMGDLTRHGQRLLVAKGGFHGLGNTRFKSSTNRAPRQKTLGTKGEIRNLRLELLLLADVGLLGMPNAGKSTFIRSVSAAKPKVADYPFTTLVPNLGVVRPDVNKSFVIADIPGLIEGAADGAGLGIRFLKHLERCRVLLHIIDIMPADGSDPVENANAIVGELERYSPELASKPRWIVFNKIDLLPADEVDTLCSEIAAALDVQENIFKISAVSKLNTKELCFNVMDLLDSMPKDKFESEVQKEVEFKWDTYHQEVILDELDDDDDDWDEDDYDVEVVYQR

SEQ ID NO: 35036 - protein, 394 aa, Pseudoalteromonas tunicata D2
MSVQDPIVIVAASRTPMGGFMGALSDVHTTDLGATAIAHAVAQSGVSVNDIDEVIMGCVLPAGVGQAPARQAMLKAQLPLGTGATTINKVCGSGLKAAMFAHDLISAGSINIAVAGGMENMSASPYFLPKARGGFRMGHGEIKDHMMADGLEDAYDKKAMGCFAQETANEYGITRADMDAFAINSLQKAQAAIASGAFIGEVAPVTYATRSGDVVVSIDEQPGNAKVDKIPTLRPAFAKEGTITAANSSSISDGAAALVLMKASDAQAKGLTPLCKIVAHATHSQKPAEFTVAPVGAMNKVLIKAGWSTEQVDLWEINEAFAMVTMLAINEMKLDSAKVNVNGGACALGHPIGASGARILVTLIHALKNRNLKTGVASLCIGGGEAVAMAIELI

SEQ ID NO: 35037 - protein, 558 aa, Pseudoalteromonas tunicata D2
MCSIFGVLDIKSDPIQLRSQAIEMSKLLRHRGPDWSGVYSSEKAILVHERLAIVGVTSGAQPLYNPEQTNILAVNGEIYNHKELAKNLKVDFEFQTESDCEVILALYKEKGPEFLDDLNGIFAFCLYDEEQDAYLIGRDHIGIIPLYTGTDEHGNFYVASELKALSPICNHIKEFPPGHYLWSQDGELRPYYQRDWTSFDAVKDNSATAQDVKVALEAAVKRQLMCDVPYGVLLSGGLDSSVISAITQRFAAKRIEDNDNSNAWWPQLHSFSVGLAGSPDLAAAQKVADMIGTVHHPIIFTVQQGIDALKEVIYHLETYDVTTIRASTPMYLMARQIKAMGIKMVLSGEGADELFGGYLYFHKAPDEKEFHEELNRKVSKLHLFDCLRANKSMAAWGVEARVPFLDKEFVDVAMRVNPIAKMCGKNGKIEKHILRQAFEGYLPHEVLWRQKEQFSDGVGYSWIDSLKEYVAEQVTDQMLASAAFKFPINTPDSKEAYFYRCIFAEHFPGDAAALCVPFGKSVACSTPQALAWDASFANNADPSGRAAGVHNDAYNKTK

SEQ ID NO: 35038 - protein, 69 aa, Pseudoalteromonas tunicata D2
MSNTTTGTVKWFNEAKGFGFIEQASGPDVFAHFSAISGDGFKTLAEGQKVQFVVTKGQKGPQAENIVVL

SEQ ID NO: 35039 - protein, 482 aa, Pseudoalteromonas tunicata D2
MKWELLLAFLGYLGFMIWFGWWVSRNTKGGDDFLLGGRNLPFFLTLGTTVATMVGTGSSMGAVGFAYLNGWAGMIYGLGGACGILLLAKVFAPVREHQFMTMSEEVSYYVGAHPIVKNTIAVFIFIASIGWLGAHILGGGMYLAWLTGLSPFSAKLIIALGFSIYVVIGGYVAVVWTDSIQAVVLFVGFFLMAGVALYEVGGVAEMASAQPVLNQSFLSLDKVGVLPGLSLFFAVLVGVLVAPSFRQRIYSGKHVKSIRQSFYTSGGLYLLFAIVPAIIGMAAFKLNPDLENSAFSFPYMAMELLPFGLAALVIIAGLSATISSASSDAIAAVSVLIRDLYCLVFNRMPHANEVVMLSRFGLVLTIGIALLLALLTNDVIGYITNMIATLMSGLCVSVLFGHFWSRFNWQGVMTALFVSLLVSFAIILTPDWLAYWSNPIIPATTISAILAAVVTLLTPVQTRTSMEALAILKAQREEMQHD

SEQ ID NO: 35040 - protein, 749 aa, Pseudoalteromonas tunicata D2
MPNNIQLQLDNNQIYLDANATTAVLPQIAEVVSHAMKVCFGNPSSSHITGIKAKHLMEQTRLLAKTVIGAKTGQVLFTSGATEGIQTAIVSALLSQKNHSIKKPVLLYGATEHKAVPNTLKHWNAVLEINAEILAIPVNPDGLLDLTFIAEHVPNALMICTMAVNNETGVFQDLEKLEHAIRNNNSTVAWMVDCVQALGKTSLKLSDTSIDYAPFSGHKLYAPKGIGFLYIRENSAYTPFIAGGGQESGMRSGTENLPGIAGLNCLFNLLLDEQQTVFKSYSQLLAYREQLSQVLQFVFPEIVFNHDFNKSVPTTINFAVKNVSSKEIMDLFDAAGIRVSAGSACSSGASRSYVLDAMSVPNWQSENAIRLSFGPAATQIEIDLACKRISQLKSVLASACLIVSDREPLGDKEVCSLGLSQFRHQGACSWLFVTDEKQAVVIDPVLELMPRLINVIQGQKLELVAVLASHQHPEQESMIELFYQMAQLEPLAAMNHLGWPVGVQSLRLGQYELSAIATPGHISDSVSYLLKNNGVTELCFCGDLILTGGLGRTNLEQGDAGIMYQSIQALSEQVTANTLMCSSHDYSQSFATDWQTQIRTNHLLEQVVNGIITQNDFITQKVKIDETLAQQNEYFCGAVLNVATDPLIEQSLEDAIEMVSDNVAVLIDIRESYEHNASLPQKMFGINASQVINIPLNRISDAIWQGKLSKNQSYVLLCRSGNRSRQACLNLKQLGFEHVFNIKGGMALA

SEQ ID NO: 35041 - protein, 187 aa, Pseudoalteromonas tunicata D2
MTLNDFITRFQLHPPVGNQGYPHNAKQSAVLLPLCELEGELHILFCKRPSYLKHHPAEICFPGGKFELADGDLRTTALRESNEELNLAAQHINLIGELDAYWTLTGFEIKPYVGIITDLTAIQPAEDEVEKIFYIPFSALRTPQNWQPLPFVRQNKPRILQGFYTEHGLLWGATAQIVRNLVKQVSV

SEQ ID NO: 35042 - protein, 406 aa, Pseudoalteromonas tunicata D2
MPIIKKSNKLEGVCYDIRGPVLKQARRMEDEGQKVLKLNIGNPAAFGFDMPEDMHKDIIRNLSSAQGYCDAKGLYSARVAIYQHYQQKNFFNLDVDNIYIGNGVSELIQLSTQALLNDGDEVLIPAPDYPLWTAAVRLASGTPVHYLCDEQQDWFPDINDIRSKITSKTKAIVLINPNNPTGAVYDVAMIQDLIGVAREHKLLIFSDEIYEKILYDGVTFTSVGSLCDDLPIITFNGLAKTYRAAGLRMGWMVLSGKLASMHDYIQGLDMLASMRLCANVPAQYAIQQALGGVQSIDDLIRPTGRLYQQRDIVYQGLNAIDGISCVKPKGALYAFAKFDRAKFNVHDDEKLIYDLLMQEKILLVHGRAFNWPEPDHFRLVFLPHQDQLKPALAQMARFFDNYKQDR

SEQ ID NO: 35043 - protein, 715 aa, Pseudoalteromonas tunicata D2
MSHRIMLIPVSTGVGLTSVSVGIVRALEQKAVRVNFFKPIAQPRAGESGPEKSTEIVKLGSNIKPPMPIELKYAEQMIGDGKGDILLEEVIARFEESVHDGEVAIIEGMVPTRKQPYAGRLNREIAQALGAEIVFVLTPGNDPLDQIEHRLEIAASFYGGVENERVLGCIFNKVNAPLDEEGRARADLAEQFDPENLVAEQNRLAAMPLFRKHPFKLLGSVPWDFELVAPRVSDLARYLKAEILNEGDFAHRRLRSVTFCARTVSNILCHFTPGVLLVTPGDRSDVLVAACLSAMNGTKIGAILLTGGFIPEDRIMKLCEQAMATGLPILSTQADTWRTSLLLHNFNMEVPIDDEQRIERVKDHNAAHLDADWLQSLTKGVEKTRKMSPPAFRHLLTTKARLANKTIVLPEGTEPRTIKAAAICGERGIAKTVLLGEREEILRIAEQQGVQLNDAVTIIDPVDVRENYVAPLVELRKNKGMTEVIAQEQLLDNTVLATMMLAQGQVDGLVSGAVNTTANTIRPPLQLVKTAPGSSLVSSIFFMLLPDQVLVYGDCAINPDPTAEQLADIAIQSADSAIAFGIDAKVAMISYSTGTSGVGADVEKVRLATELAQAKRPDLIIDGPLQYDAAIMESVARKKAPNSLVAGKATVFIFPDLNTGNTTYKAVQRSAKLISIGPMLQGMRKPVNDLSRGALVDDIVYTIALTAIQATQVTH

SEQ ID NO: 35044 - protein, 399 aa, Pseudoalteromonas tunicata D2
MSQQHVLVLNCGSSSLKFAILNPHTATVVLSGLAECLGSDTARLSYRFNNIKTAINLAPKASHQQAIATLVDIIKENDLAQHLVAVGHRVVHGGEHFTRSVIIDAAIKKVIAQTANLAPLHNPANLIGIEAAELAFANLPQIAVFDTAFHQTMSAEAYLYALPYSLYEKEGVRRYGFHGTSHFYVAQQAATMLKKSITDSYLISAHLGNGCSVCAIKQGQSVDTSMGLTPLEGVVMGTRSGDIDPGLFSFLTQQLGYSAVTIDTLLNKESGLLGLSQLSNDCRTLEEAHYAGNLQATLALDVFCYRLAKQIAAYVVPLGELDAIIFTGGIGENSSLIREKVLTLLRFFGFTLDNDANLAARFGQSGVITANEGPCALVIPTNEELVIAQDAAQLIKEAN

SEQ ID NO: 35045 - protein, 72 aa, Pseudoalteromonas tunicata D2
MACGKVKWFNNAKGFGFIVADGREEDIFAHFSTIVMDGYKTLKAGQDVTFELQAGPKGLHATNIEPNGDLLQ

SEQ ID NO: 35046 - protein, 372 aa, Pseudoalteromonas tunicata D2
MIIGVPKEIKNHEYRVGMVPGSVRELINHGHKVFVEHNAGIGIGFTDDDYQAVGAEILATAAEVFASAEMIVKVKEPQAVERAMLREDQILFTYLHLAPDLPQTEDLVKSKAICIAYETVTDARGGLPLLAPMSEVAGRMAIQAGAQALEKSNNGRGMLLGGVPGVEPAKVVVIGGGMVGANAAQIAVGMGADVVILDRNVDVLRRLDAQFGNKIKAVYSTADALEKHVLEADLVIGGVLIPGAAAPKLVTADHIKRMKPGSAIVDVAIDQGGCIATSKATTHAEPTFIVDDVVHYCVANMPGAVPLTSTFALNNATLPFIINLANKGYKKALLDDVHFRNGLNVYKGHVTFKEVAEGFNMPYVTALDALNA

SEQ ID NO: 35047 - protein, 581 aa, Pseudoalteromonas tunicata D2
MTPNPSQIYKRLFSYIGEFKFVAVFAVIGMLGYSAMDALFVRLMKPFIDEGLNQQNADVLSAAPYVVIALVLFRGVFNFISSYCLSYVGSQVVTKLRQNLFEHILNLPVAFHDNHSSGNLISKITYDTEQVQQAITKALLVLIREGAYVVFLLFVMFEASWKLSLIFLLVTPFVAIVVSVVSKRFRKISKTIQSAMGDVTRSSEQMLKGHKVIHGFGGQQQEISRFAVINNHNRRQRVKMDSTKALSVSVIQILAASSMAVILAVIAMPSMINSISSGTFVALISSMMLMLRPLKQIANVNSDLQRGVAAAQSVFEILDTELEKDQGTVALTRAKGHIEVKNLTFTYPLKEEAVLHNMSLSIAAGQSVAFVGRSGSGKSTLSNLLPRYYDIADPEAICLDGLPLPDYTLKDLRNQFALVSQQVVLFNDTIRNNICYGQTKPIDDETLIEIAKKAHVWEFVKDLPDGLDTMVGENGVMMSGGQRQRIAIARAIVKDAPILILDEATSALDTESEKLIQLALEDLMKNKTSIVIAHRLSTIEAVDCIYVIDNGRVLEHGNHQTLLAKEGAYASLVKMQVGESM

SEQ ID NO: 35048 - protein, 551 aa, Pseudoalteromonas tunicata D2
MAEIEHRPSNFIRTIIDKDLASGKHTSTYTRFPPEPNGYLHIGHAKSICLNFGIAQDYQGKCNLRFDDTNPEKEDIDFVNSIQEDVKWLGFQWDGDIQYSSNYFDKLYGYAVELITKGLAYVCFLTPEQAREYRGTLTEPGKNSPYRDTSVEENLALFAKMKEGGFKEGECVLRAKIDMASSFMVLRDPIIYRIRFAHHHQTGDKWCIYPMYDFTHCISDALEGITHSLCTLEFQDNRRLYDWVLDNISIDCHPQQIEFSRLNLEYTLMSKRKLQSLVEDKHVDGWDDPRMPTIAGLRRRGYPASSLREFSKRIGITKQENMVEMGMLEACVREDLNESAGRAMAVLNPVKVVIENYPADQVEMLTAANHPNKEEMGHRELPFTQTLFIEADDFKVEANKQFKRLVLGKEVRLRNAYVIKAERIEQDEQGNITTIFCSYDPETLGKNPADGRKVKGVIHWVSASHGINAEVRLYDRLFNVPNPATAEDYATVINPSSLVIVKNAVLEPSLALAAKEQSYQFERTGYFCRDNKSDELVFNQTVGLRDTWENN

SEQ ID NO: 35049 - protein, 69 aa, Pseudoalteromonas tunicata D2
MSTTTTGTVKWFNEAKGFGFIAQENGPDVFAHFGNIVGEGFKTLTEGQKVEFIVTQGQKGPQAEKIVAL

SEQ ID NO: 35050 - protein, 387 aa, Pseudoalteromonas tunicata D2
MKTPVIVDCIRTPMGRSRNGIFRHTRAEDLSAHLMKGLLDRNPALNPAQIDDIYWGCVQQTLEQGFNIARNAALLAGIPHTVPAVTVNRLCGSSMQAIHDAARAIMTGAGDVYIVGGVEHMGHVPMSHGVDFHAGLSKSVAQAAGMMGLTAEYLATLHGISRQQQDEFAVRSHQRAYAATVEGRFKREILPTLGHDEDGTLISIDTDEVIRPETTLEGLAQLRPAFNPASGTVTAGTSSALSDGASAMLMMSEEKALELGLPIRARVKAMAVAGCDPSIMGYGPVPASKKALQAAGITIDDIGVAELNEAFAAQALPVLKDLGLSEVVDEKVNLNGGAISLGHPLGCSGTRISTTLLHLMEDKNAQYGLATMCIGLGQGIATIFERP

SEQ ID NO: 35051 - protein, 394 aa, Pseudoalteromonas tunicata D2
MLNDMQLQLIKSTLGVLESAGPKLTAHFYQRLFHHHPELQHIFNMSNQKSGRQQVALFEAIAAYAKNIENVAVLVNAVERIAQKHTSMNIQAAHYAVVGMHLLATLEELAPEVFNTEVLAAWAAAYQILADIFIAREAQLYQERADANGGWQATRQFVVAEKIVESELVTSFVFTAKDERAVLAYLPGQYIGLQVRPTHSEYNEIRQYSLSQASNGKNYRISVKREQSPFVGVVSNYLHDEVNLGDEVSLYPPAGDFYWQDRASPVVLISAGVGITPMFAMLETLAKQGYGYEVSFLHACENQAQHSFASQSEALCQRLNAQRFTWYREGVTQLPIFSGQMELAPLASNLPLHDGHFYLCGPIGFMQAIFRQLIALGVVAEQIHYEVFGPHQGM

SEQ ID NO: 35052 - protein, 271 aa, Pseudoalteromonas tunicata D2
MKQKTRAFLKWAGGKYSLVDEITARLPEAETLVEPFVGAGSVFLNTDYSHYVLNDINADLINLYKELKHAPDEFISDAKKLFVDLNNYSDAYYQYRVQFNASQDAYERAVLFLYLNRHGYNGLCRYNLKGIFNVPFGKYKKPYFPEKELYFFAEKSQKATFTCKGYADVFNDLPRSSVVYCDPPYVPLSKTASFTAYAKGGFDLDDQAQLANFAERAAFEQGIPVLISNHDTVWTRKIYTQASLDMIQVKRTISPKGGSRNKVGELMALYR

SEQ ID NO: 35053 - protein, 781 aa, Pseudoalteromonas tunicata D2
MTRSVHKFGGSSLSSAKRYHAVTNIILQQAALGDVVVVSAAGKTTDTLVKLWQSYRQADQQAISDVLALLSANQFELIADLLTDSYKDSALELLDAELISIGEKIASQHLQEAHLLAHGELWSARLLGLYLQQLNVAAQSFDARELLTLAQGVLQHEKNVIACGQFSATKYNVVTGFIASDEQGQTITLGRNGSDYSATLFARYICAESVSIWTDTQGVFSTDPRKVKQAIRYGKICRGQANLLARLGNPVLHAKTLTPLKDTDIKLVVRSSFDSSSAATEIVKEGFAKQKRFITNLDHYDLLKVADLHEGEVGELSRIVQHALHHFVEKDEVYLLVPAALGHQVLTLLAGRCNLVESNVSGIALVCQHGDGHQLAQSAKVILAENNVNLRFIYSHEDYCILLCEQQLDTDRLTILHDKLVSVSQELAVVVAGLGNVGTVFLEQLKEQLSRLNQLLPVKLVGLIRSEQMLFNPTGIDVQNWQAAWQTHAVSYHEAELLSHLAELDYEHKLVIDITASEQFSQLYPQFVAHNCHLICANKYAGTAPLAWYEQLQQSLKQRNLQWRYNTSVGAGLPINFALNDLQNSGDKVQRLSGVFSGTLSWLCSQYTAEVPFSELVMQAKAMGYSEPDPREDLSGRDVQRKLLILARELGLNLELDDIVLSPLMPEALSNGDWEFFVDNLALLDTYVSELAAKAALEDKVLRYVAELVLSDDKVTAQVGLQGVAKQDSLATLKPGDNIFVINSRWYQDNPLVIQGPGAGKEVTAAGVHSDLYWLCVSLAK

SEQ ID NO: 35054 - protein, 241 aa, Pseudoalteromonas tunicata D2
MTIGHETTKILVVDDDMRLRSLLERYLVEQGYIVRSAANSEQMDRLLERENFHLLVLDLMLPGEDGLSICRRLRQKENDIPIVMLTAKGDEVDRIIGLELGADDYIPKPFNPRELLARIKAILRRRSKDVPGAPTAEENQITFGQFTLNLATREMAKGDEVISLTSGEFAVLKALVTHPREPLSRDKLMNLARGRDYSALERSIDVQVSRLRRMVEVDPATPRYIQTVWGLGYVFVPDGDK

SEQ ID NO: 35055 - protein, 331 aa, Pseudoalteromonas tunicata D2
MASQYIQTQQQISKAKALFATQLESKLGLIEVQAPLLAQVGNGIQDNLSGHEQAVAVKIKTMPDAQYEVVHSLAKWKRKTLADHGFSVGEGLYTNMKALRPDEDKLTPIHSVYVDQWDWEKVICIETERSLSFLKTTVETIYQSIKATELQLATLYGLTPFLPQHIQFVHAEQLARDYPALSGKEREQKVAKEFGAVFLIGIGGQLSDGAIHDVRAPDYDDWSTATCEQFSGLNGDILVWNPILNDVFEISSMGIRVDAKALQHQLAITGDEDRLAFAWHQQLLADKLPQTIGGGIGQSRLVMLLLQKQHIGEVQVGIWPDEVLAHYSAIL

SEQ ID NO: 35056 - protein, 323 aa, Pseudoalteromonas tunicata D2
MLQPEFIASATRVLAIEKQAIEQLNQYIDAHFAHACQIMFNCQGRIIVIGMGKSGHIGNKIAATLASTGSPAFFVHPGEASHGDLGMITKDDVVLLISNSGETSEVLGIVPVLKRLGAKMIAMTGNTQSSLATHSDVHICIKVEQEACPLGLAPTASTTATLVMGDALAVALLEAKGFTADDFALSHPGGSLGRRLLLTLKDIMHTGDAMPKVSSDAIIRDALIEMSAKGLGMTTIVDSDNRLLGLFTDGDLRRILEQKIDIHTTSIQAVMTKNCTTASCDMLAAEALNIMERKRINGLLIVNQQNQAIGALNMQDLLRAGVI

SEQ ID NO: 35057 - protein, 387 aa, Pseudoalteromonas tunicata D2
MSKGVKVFQSKLPSLGTSIFTQMSMLANQYQAINLSQGFPEFDTPDFLKQQITHAISVGLNQYSPSNGIAPLQQQIAGLIARRYGHALEPSAAITVTSGATEALFVAIHTLVRPGDEVIIFDPAYDSYQPAIELAGGLCQRIALTAPNYAIDWQYVTSKMHSNVRAIIINSPHNPTGKVLKEHDLQALKALLAQYPNCYLISDEVYEHMTFDGHQHLSILSVPELFKRAFVISSFGKTFHCTGWKIGYCVAPEQLTAEFRKIHQYVTFSSFTPAQHGLAAMLQHYPEHVDQLADFYQQKRDLLVSHLASSRFKVLPSEGTYFVLLDYSAISDLNDVDFCHWLTAEVGVAAIPLSVFYQDAPADKVVRLCFAKNDATLIAAAEKLCRL

SEQ ID NO: 35058 - protein, 293 aa, Pseudoalteromonas tunicata D2
MSIKVAFIGLGVMGFPMAGHLKKAGYDVTVFNRTSAKAEQWAHQYQGLFALTPAQAAKEADIVFVCVGNDDDLRAVTIEHDGVLAGMKQGAILVDHTTTSADVAKEVATAAKKQEIEFLDAPVSGGQAGAENGVLTIMVGGDEAVFNKVQPIMASYARFSQLLGPVGSGQLCKMVNQICIAGVVQGLAEGLHFARSAGLDGEKVIETISKGAAGSWQMENRYKTMWAGDYNFGFAVDWMRKDLGIALDEARKNGSTLALTTLVDQFYAEVQAMGGNRFDTSSLFARLEKDRTK

SEQ ID NO: 35059 - protein, 448 aa, Pseudoalteromonas tunicata D2
MSSSFIVAKFGGTSLADFDAMFRCAQIIHDDNNVRVVAVSASAGVTNHLVALSHKDISDAVRQSHIDGVLAIQNNILAKLTLDADLATLFSQTLADFEQCAALTSTSEQHNDELLSFGERLSSCLFTQVLRDLGIKAERFDVRSVLKTDAHFGKATPNVAQTRAAALEHLVPLLNETVVVTQGFIGSDQHGRTTTLGRGGSDYSAALLAEAIDACSVHIWTDVVGIFSTDPRLCQKAKPIPKLSFDEAAEMATFGAKVLHPATILPASRAGISVFVGSSRAPEQGGTWIEKEKSQHPGIRAVTQRKNQILLTLKSPEMLLASGFLARVFTILSEYNISVDLVTTSEISVALTLDNAPNASRPELDQACLQRLSEFCHVTVENNLTLVALVGSEIQLRQHEMNLMQVLADFNIRMICHGASKHNLCFLVEQSESDAVVQSIHRRLLEVC

SEQ ID NO: 35060 - protein, 312 aa, Pseudoalteromonas tunicata D2
MKLFAGNATPELALKVAKRLYIELGNADVGRFSDGEISVQINENVRGSDVFIIQSTCAPTNDNLMELIVMVDALRRASAGRITAVIPYFGYSRQDRRVRSARVPITAKVVADFLSSVGVDRVLTVDLHAEQIQGFFDVPVDNVFGSPVLLEDMKARNFEDVVVVSPDIGGVVRARAIAKLLNDTDLAIIDKRRPRANVSQVMHIIGDVEGRDCIIVDDMIDTGGTLCKAAEALKEHGAKRVFAYATHPILSGNAAENIRNSVIDQVIVTDSVPLSAELLAIDKIKVLTLADMLAETIRRISNEESISAMFEH

SEQ ID NO: 35061 - protein, 604 aa, Pseudoalteromonas tunicata D2
MLLSQLSAVTSPLTQEQVQKLQGLVAELNPIQQAWVSGYLAATANSAALGGLAIPATTQAAEAATLTILYGSQTGNAKGVASKLKEQAQARGLAVNLVNMADYKPNSLKKEKFLTIVVSTYGEGEPPEDAENLHEFLGSKKAPKLDGVKVAVLGLGDSSYEFFCQTAIDFETRLQNLGATAIVSRADLDVDYDSLAADWINTALDAFEPDLKAQSSNSAQVIPMTTFGSTATTSQYTKQNPFNAELALVQKITGRDSTKDVRHVEISLEDSGITYTAGDSLGVYFLNDEALVDELLVLTGNDAETQVSVGDETLPLRQALIEKLELTQSYPGFVEKYALATNNAELLALAADKAAMREFIEPRQIFDIVRQYPATIAAQTLADCARKLQARLYSIASSQSEVEEEVHLTVGIVEFEAFGSQHLGGCSGYLAHRAEAGSKVKVFIEHNDNFRLPANPDTAVIMVGPGTGIAPFRAFLQERDSQGASGKNWLFFGNPHFTQDFLYQVEIQAYLKSGLLTHCDVAFSRDQAEKVYVQDKLRLQGAQVFAWLEQGAHFYICGDANRMAKDVHQALIEIIQTHGGQSAEEAEQYLKTLRSANRYQKDVY

SEQ ID NO: 35062 - protein, 900 aa, Zygosaccharomyces rouxii
MVNSGHRRQRIINCVAQLPYKIQLGETNDEWNIVPATGSSSLYSSIEYLNSEEKAKDYEQHVLGWTGEIGRESLPSRLFNSKNRDKSENGEKGENDLHAKEEREKEEDPLYLTNDQIDGITKDLRRHGKSDDHYNVDNVHPVWLLRRDQKRWRGFAENVLWPTFHYILKFSSDSGEKENLSWYDYVRFNEAYAMKIGEIYEKGDIIWIHDYYLLLLPQLLRMKFNDQDLTIAYFHHSPWPSNEYFRVLPRRKQILDGLMGADRGWFQNEGFARHFVSSCKRLLDSTSRKSKNRLGMEQYQISAYGGDIVVDSLPIGINRVKLLEDTFTKDIAQKVLAIKDAFQGKKIIVGRDRLDSVRGVVQKLRAFETFLSMYPEWRDQVVLIQVSVPSMKGGTNQLIRLEQQVNELVTSINMQYGSLNFSPVHHYYMRIPKDVYLSLLRVADLCVIASVRDGTNTTALEYVTVKSHMSNYNCYGNPLILSEFSGTSTILKDAMIINPWDSVAVAKSINRALSLSRDEKRALEDKIWPQVPTIQKWTDQFLSTLSDIVDEAHNTTDRKMTPALNRPALLEHYRQSKRRLFLFDYDGTLTPIVQDPAAAIPSARLISILQKLASDPCNQIWIISGRDQAFLNKWLGSRLPQLGLSAEHGCFYKDVDEENWINLTEKFDMSWQEKVGSIMEEFTRRTPGSFIERKKVALTWHYRRADPELGEFYASELKKELDKICADYDLDVMEGKANIEVRPKFVNKGEIVKRLVWHHHGRRQDMLNTKKEELPISEMPDFTLCLGDDFTDEDMFNQLNDIEAVWKKQYEDEVNQWGGFGLYPCTVGSASKKTVAKAHLTDPQQVLDTLGLLVGDVSLFQSAGTVELDSRGHVKHSDSSIRSEQASARYAMKRQQSYKN

SEQ ID NO: 35063 - protein, 227 aa, Phalaenopsis hybrid cultivar
IKRIENTTNRQVTFCKRRNGLLKKAYELSVLCEAEIALIVFSSRGRVYEYSNNSIKATIEKYKKTCAGSSNPGSLVEVNSHQYYQQESAKMRHQIQLLQNSNRHLMGDGLSSLNLKELKQLENRLERGITRVRSKKHELLFAEIEYMQKREVELQNDNMYLRAKIADNERAQQANIVQAGVDFESIPSFDSRNYYHINMLESASHYSHHQDQTALHLGYETKADQSA

SEQ ID NO: 35064 - protein, 408 aa, Phaeosphaeria nodorum
MLNKLHGQPDSYDRKSRYRFGKTLGAGTYGIVREADCPEGKVAVKIILKKNVKGNEQMVYDELEMLQRMKHPHIVKFHDWFESRDKYYIVTQLATGGELFDRICEKGKFTEKDAAETIRQVLEAVNYLHENNVVHRDLKPENLLYLTRDAHSSLVLADFGIAKMLDSKSEVLTTMAGSFGYAAPEVMLKKGHGKPVDMWSMGVITYTLLCGYSPFRSENLADLIEECKNGRVVFHERYWKEVSKEAKEFITLLLQPDPNKRPTSKDALKHVWLSGATASDHNLLPEIRAYVAKARLKRGIELVKLANRIEALKMQEDEEEDAPGQADMPANAREAAGEAVAAHHPDKVPAAKEETPDAGTGKGPGRLSRIAKGAIFREVVLAKVREMKEAEARAEFEKKATESGTKKA

SEQ ID NO: 35065 - protein, 394 aa, Phaeosphaeria nodorum
MASNGASGAQTPQTQAQVQPCRYKTGKTLGAGSYSVVKECVHIDTGRYYAAKVINKRLMAGREHMVRNEIAVLKRVSMGHRNILTLVDYFETMNNLYLVTDLALGGELFDRICRKGNYYESDAADLIRATLSAVAYLHDHGIVHRDLKPENLLFRTPEDNADLLIADFGLSRIMDEEQFHVLTTTCGTPGYMAPEIFRKTGHGKPVDIWAIGVITYFLLCGYTPFDRDSNLEEMQAILVADYSFTPLEYWRGVSLTAREFIRRCLTVDPASRMTSHEALSHPWVADLGRPGEGEEDLLPTVKKNFNARRTLHAAIDTIRAINQLRAGGGAAMMDGLRSNEPRRGAPPANIPQPAEDEDPMEIDSRGNGHGQTEEMIKEQERRIRETQQGLWSKR

SEQ ID NO: 35066 - protein, 233 aa, Pinus taeda
MGRTPCCEKAHTNKGAWTQEEDARLVAHIQAHGEGGWRSLPKAAGLLRCGKSCRLRWINYLRPDLKRGNFSEQEDELIIKFHSRLGNKWSLIARILPGRTDNEIKNHWNTHIKKKLVRMGLDPKSHLPLGEPRDSNTTYTVLASPKHKIPPFQSPRTPDIADFFQYDRSGSSTMELVASKAEEHPELNLDLSISLPSHSTPATTRASTVHRTVDSNSNSGSGLWCLTGMEAIS

SEQ ID NO: 35067 - protein, 1513 aa, Oceanicola granulosus HTCC2516
MTRQYDDAWAAREEAKRKWMAENGLFREDDEKSNCGVGLVVSIDGSRSRQVVENGIKALKAIWHRGAVDADGRTGDGAGIHVQIPVDFFHDQIRRTGHEPRADQLMAVGQVFLPRTDFGAQETCRTIVESEVLRMGYYIYGWRHVPVNIAVLGDKANATRPEIEQILISNSKGVDEETFERELYVIRRRIEKAAAAAQVGQLYIASLSCRSIIYKGMMLAQDVAEFYPDLLDERFESAFAIYHQRYSTNTFPQWWLAQPFRMLAHNGEINTLKGNLNWMKSHEIRMASATFGDMAGDIKPIVSQGSSDSAALDAVFEVLVRSGRNAPMAKTLLVPESWSKQAEELPQAWRDMYAYCNAVMEPWDGPAALAMTDGRWVCGGLDRNGLRPMRYVVTGDGLLIAGSEVGMVPTDEATVKEKGALGPGQMIAVDMQEGGLFHDVEIKDKLAAGQPFGEWVGKIIELDTELASATEAPLFTGAELRRRQIAAGYTIEELEQILAPMAEDAKEAIASMGDDTPPAVLSDRYRPISHYFRQNFSQVTNPPIDSLREYRVMSLKTRFGNLKNVLDEDGSQTEIIVLDSPFVGNAQWEKLKASFSATCTEIDCTFPADGGPEALRNALTRIREEAEDAVRSGAGHLVLTDQFQGEAKVAVPMILATSAIHSWLTRKGLRTFCSLNVRSAECVDPHYFAVLIGCGATTVNAYLAEDSLADRIERGLLDCSLTEAVARYRKAIDAGLLKIMSKMGISVISSYRGGLNFEAVGLSRAMVAEFFPGMHSRISGIGVSGIQKKVEEVHAKGFAGGTDILPIGGFYKARKQGETHAWGATTMHMMQAACDRASYELWTQYSRSMQAMPPIHLRDLLAIKPMGEAVPIEEVESITSIRKRFVTPGMSLGALSPEAHKTLNVAMNRIGAKSDSGEGGEDPAHFVPESNGDNPSAKIKQVASGRFGVTAEYLNQCEELEIKVAQGAKPGEGGQLPGMKVTDLIARLRHSTKGVTLISPPPHHDIYSIEDLAQLIYDLKQINPRCKVTVKLVASSGVGTIAAGVAKAKADVILISGHNGGTGASPATSIKYAGLPWEMGLTEAHQVLAMNNLRERVTLRTDGGLRTGRDIVMAAMMGAEEYGIGTAALIAMGCIMVRQCQSNTCPVGVCTQDEKLREKFTGNADKVVNLITFYATEVREVLASIGARSLDEVIGRADLLTQVSRGAAHLDDLDLNPLLITVDGADHIVYDRTKPRNEVMDTLDAEIIKDAARFLKDGEKMQLQYAVQNTLRTIGTRTSSHIVQRFGMRNDLQPDHLTVKLTGSAGQSLGAFAAPGLKIEVSGDANDYVGKGLSGGTIVVRPPMSSPLVAADNTIIGNTVLYGATGGHLFAAGRAGERFAVRNSGATVVIEGCGSNGCEYMTGGTAVILGPIGANFGAGMTGGMAYLYDPLGSTSALINHETLVTCGVTEEYWHGQLHELVQRHLAETGSRRAADLLQHWEEERGNFLQVCPREMLDKLPHPIGIEETRIPAE

SEQ ID NO: 35068 - protein, 395 aa, Oceanicola granulosus HTCC2516
MSEQLSDIVILSAVRTAIGGFGGSLAAVPPTALAETVTAAALARAGIAPGQVGQVVFGHVLNTEPRDLYLARVAALAAGMPDGVPAMNVNRLCGSGAQAIVSAAQALLLGDADIALAGGAESMSRAPFTVPAQRWGAKMGDVAVQDMMLGALNCPFGTGHMGVTAENVADEHAVSRADQDAFALESQSRAARAIAEGRFAGQIVAVEQQTRQSSVSFDTDEHPKATSAEALAGLRPAFRKDGSVTAGNASGINDGAAALVLARAGAAEAAGAEPLARLTGYALAGVRPEVMGLGPIPAVRRLLEKTGLAIDDFDVIESNEAFAAQALAVSRALGLDPERVNPNGGAIALGHPVGATGAILTVKAVHELARTGGRRALVTMCIGGGQGIALALERV

SEQ ID NO: 35069 - protein, 322 aa, Oceanicola granulosus HTCC2516
MADRDALLAAARRVVATEAEALSILAESLGPGLAEALELVLAARGRVVVSGMGKSGHIARKVAATLASTGTPAQFVHPAEASHGDLGMLTRGDVVLVLSNSGETTELADLIAYTRRFGIPLIGVAARAASTLMRQADVRLVLPEAREACGTGVVPTTSTTMMLALGDAIAVALMEHRRFTPEMFRDFHPGGRLGARLSKVSDLMHSGDALPLAGQATPMSDALLTISQKGFGVLGVTGANGHLAGIVTDGDLRRHMDGLLERSAGDVMTPEPRTIGPGALAEEAVRVMNAQQITCLFVVDPPGSGRVVGLIHIHDCLRAGIV

SEQ ID NO: 35070 - protein, 640 aa, Oceanicola granulosus HTCC2516
MAKVIGIDLGTTNSCVAIMDGSQPRVIENSEGARTTPSIVAFTENERLVGQPAKRQAVTNPDNTIFGVKRLIGRRLNDSDLAKDKKNLPYDIVDGGQGDAWVEARDEKYSPAQISAFILQKMKETAESYLGEDVNQAVITVPAYFNDAQRQATKDAGKIAGLEVLRIINEPTAAALAYGLDKKETRTIAVYDLGGGTFDVTILEIDDGLFEVKSTNGDTFLGGEDFDMRIVNYLADEFKKEHGVDLTKDKMALQRLKEAAEKAKIELSSSSQTEINQPFISMDGATGQPLHMVMKLTRAKLESLVGDLIKASMKPCQAALKDAGLSTTDIDEVVLVGGMTRMPKVVEEVTKFFGKEPHKGVNPDEVVALGAAIQAGVLQGDVKDVVLLDVTPLSLGIETLGGVFTRLIDRNTTIPTKKSQIFSTAEDNQNAVTIRVFQGEREMAADNKMLGQFNLEDIPPAPRGMPQIEVTFDIDANGIVSVSAKDKGTNKEQKITIQASGGLSDDEIEQMVKDAESNAEADKERRELVEAKNQAESLIHSTEKSMEEHADKVDPTTIEAIELAIAALKDDLEGDSAEKIRSGIQNVTESAMKLGEAIYKSSQAEGGDEQPEADAERQSGGDDDDIVDADFEDLDDNKRA

SEQ ID NO: 35071 - protein, 753 aa, Oceanicola granulosus HTCC2516
MAKARFTPEDALAFHMEPSPGKWEVQPTVPMTTQRDLSLAYSPGVAVPCEAIAANPELAYDYTNKGNLVAVISNGTAVLGLGNLGALGGKPVMEGKSVLFKRFADVNSIDIELDTEDPDAFCDAVRLMGPTFGGINLEDIKAPECFIIEQRLKEEMDIPVFHDDQHGTAVICAAGLINALHISNKKIEDVKIVLNGAGAAGIACIELLKSMGARPENCIVCDTKGVIYQGRTEGMNQWKSAHAVKTDLRSLEEAMDGADVFLGVSAKGAVTEKMVASMADNPVIFAMANPDPEITPEEAHAVRVDAIVATGRSDYPNQVNNVLGFPYLFRGALDIHARAINDEMKIACAEALAALAREDVPDEVGVAYGRKLAFGRDYIIPTPFDPRLIYRIPPAVARAGMETGVARRPIIDMDGYETALKGRMDPTASILRGIYARARAAQGTVLFAEGDDPRVLKAAVLYQRSGYGRSLVVGRESDVKTKLEAEGLADAARELTIVNAANTDHLETYKRFLYERLQRKGHDQQDVHRLAARDRHVFASLMLAHGHADAMVTGATRKSAHVLELINHVFDAGPHDGAVGVSAVLARGRIVLIADTLVHEWPDETDLAVIAERGAAVARTLGLVPRVAFVSFSTFGYPVSERATKMHQAPRVLDARGVDFEYEGEMTVDVALNTRAAEHYPFSRLTGPANVLVVPARHSASISVKLLQEMGGATVIGPILAGVHKPIQICSTVSTVTDILNMAVIAASKVDDR

SEQ ID NO: 35072 - protein, 406 aa, Oceanicola granulosus HTCC2516
MPAPKKVVLAYSGGLDTSIILKWLQTEYGCEVVTFTADLGQGEELEPARKKAEMMGASSIHIEDLREEFVRDFVFPMFRANALYEGLYLLGTSIARPLISKRLVEIAAAEGADAVAHGATGKGNDQVRFELAAYALDPDIKVIAPWREWDLSSRTRLIEFAEKHQIPIAKDKRGEAPFSVDANLLHTSSEGKVLENPADEAPDYVYQRTVNPEDAPDTPEMVEITFEKGDAVAIDGEQLSPATILTRLNELGGKHGIGRLDLVENRFVGMKSRGVYETPGGTILLEAHRGIEQITLDSGAGHLKDSIMPRYAELIYNGFWFSPEREMLQALIDRSQELVSGTVRLKLYKGAARTVARWSDNSLYSEAHVTFEDDLGAYDQTDAAGFIQLNALRLKLVAARKRRLKG

SEQ ID NO: 35073 - protein, 193 aa, Oceanicola granulosus HTCC2516
MSRLRERLADALAKPSDGSSDYDLNPDTVLPAGRELRPAGVLMAITPAETVLLTVRSPKLKHHPGQVSFPGGKQEPTDPAPVDAALRESEEEIGLPHGRVEILGALPVHETVTGFAVSPFVGLVDGEFEPRPEAGEVAEVFEVPFAVLTDLGRYRVECRAWRGLVRRYWVVPFGPYYIWGATARMLRGLAVRL

SEQ ID NO: 35074 - protein, 557 aa, Oceanicola granulosus HTCC2516
MYTYSEFDEAFVRERVAQFRGQVERRVDGSLTEDEFKPLRLMNGLYLQLHAYMLRVAIPYGTLNPDQMRQLAMIAERWDRGYGHFTTRQNIQYNWPKLADVPDMLDALADVGMHAIQTSGNTIRNVTADHFAGAAADELLDPRPVAELLRQWSTDHPEFQFLPRKFKIAVTGAPNDRAVVKSHDIGLQMVERDGETGVQVIVGGGLGRTPMIGKVVREFLPLEDLLPYCEAIVSVWNLIGRRDNKYKARIKITVHEHGIDEIRRMVEERFAEIRPGFTGVDQQLLAELTGAFAPPAFKTAPTDAYEAARAADPVFRAWADTNLAAHKAEGYAIVTVSLKAHGATPGDASAEQMRLLADLAERFGHQELRISHEQNVILPHVHKADLPELHAALKSAGLATANIGLVSDIIACPGMDYCALATARSIPIAQEIATRIDELKIEHEVGHMKIKISGCINACGHHHVGHIGILGLDRAGVENYQITLGGDGTETASIGERAGPGFPAEGVVPAIERLIFAYLDVRESADETFLQAYRRLGPDPFKAALYPADDKGRANAA

SEQ ID NO: 35075 - protein, 456 aa, Oceanicola granulosus HTCC2516
MSQQGRLIVVSNRIPTEAAPSGGLVVALHEALESRGGIWIGSSGQVVDEPGGLKTLADDKYTRLAFDLTKAEHEGFYLGYANSVLWPLFHHRADLIDVDQGDRDQYMGVNARVAQLIAEVIEPNDVLWIHDYHFLPLAAELRKLGLDNRMGYFLHIPFPNPSDIAALPDRKQLPHWIAAYDLIGLQTQRDVSACLEWLRGDTAAEFTLRGRMKLDTRHFEVRSFPIGIDVDAFRDAAERADITITDLPTNQKLILGVDRLDYSKGLPNRFEAFGKYLSMRDKNLPHATMIQVAPPSREDVEAYKDIRVQLESMAGSVNGEHAELDWTPIRYLRRPLPRDVVAGLYRRADVCLVTPLADGMNLVAKEYVAAQDGADPGVLILSHFAGAAEQLDGALMVNPYDTVSMAEAIDQALKMDLHERRARWLSMMQVIRETDIDWWTNSFLRSLQNQPQMRVA

SEQ ID NO: 35076 - protein, 635 aa, Oceanicola granulosus HTCC2516
MGNARNLAFWVVLFLLILALFNLFSGGQGTMQSTSRSYSDFVRAVENDGVSSVTIDGEQIRYRGADGRDYVTIKPEDAAVTDLLIDNDIPVTAKSQEQNGFTTFLVGLLPFLLLIGVWIYFMNRMQGGGRGGAMGFGKSRAKLLTEKHGRVTFDDVAGIDEAKDELEEIVEFLRNPQKFSRLGGKIPKGALLVGPPGTGKTLLARAIAGEAGVPFFTISGSDFVEMFVGVGASRVRDMFEQAKKNAPCIVFIDEIDAVGRSRGVGYGGGNDEREQTLNQLLVEMDGFEANEGIIIVAATNRPDVLDPALLRPGRFDRQVQVPNPDIKGREKILGVHARKVPLGPDVDLRIIARGTPGFSGADLANLVNEAALMAARVGRRFVTMLDFENAKDKVMMGSERRSMVMTEEEKKLTAYHEAGHAIVGLNVPQHDPIHKATIIPRGRALGLVLSLPERDQLSVTLTKYKSKIAMAMGGRVAEELIFGRENATSGAASDIQQVSKIARAMVTQFGFAEELGYVDYANEQQSYLGSYGGGASHSADTQKLIDDKVKEIIDEGYETAKRILTEKRDDLERLAQGLLEYETLTGNEITKVIAGEALNRGDDADDTPPSSGSSVTAIPKTTKKPRGDSLPEPSA

SEQ ID NO: 35077 - protein, 597 aa, Oceanicola granulosus HTCC2516
MDDQNKNLILATALSFIVILIWFVLFPPPEQAPGLTNAEGEVVAQDDTALRDEMSPDGAIDGTAAGTPVATLEQDAPVEAARVAIETPRLVGSINTAGGRIDDLKLTAYHETLDPDSPLVRLLSPGGEEAQYYALHGWIALSGASADEVPGDSTVWEIEEGETLTPDSPVVLRWENGAGLVFRKTIAVDDNYLFTVTQSVENTTGDAVELRPYGQVRRHGLPDSRQFFILHEGVVRMADGELEEIDYDDLPDLTAEESRIEVAEDGWVGFTDKYWMTTLVPASGTPFRSVAREVNGIYLTESIYPPVAVAAGETVSAESHVFAGAKEWETIRAYEAAGIDRFVDSIDWGWFFFLTKPIFALLHWLNGVIGNMGWSIIVLTLIIKAVLFPLAYKSYASMAKMKELQPEMEKLKERAGDDRQALQKGMMELYKTNKVNPASGCLPILLQIPIFFSLYKVIFVTLELRHAPWIGWIRDLSAPDPSSILNLFGLLPWDTPDPGSIFFIFSLGVLPILLGISMWLQQKLNPAPPDPTQRMIFAWMPWVFMFMLGSFASGLVIYWIANNMITFTQQYLIMRSHGYKPDILGNIRGKGAAAAKK

SEQ ID NO: 35078 - protein, 280 aa, Oceanicola granulosus HTCC2516
MGFPMAGHLAAAGHEVTVYNRTEAKAQAWVEKHGGTLAPTPAEAAKGQDFVMACVGNDDDLRAVCLGADGALGAMEAGAVFVDHTTVSADVTLEMAAAAAERGVAFVDAPVSGGQAGAENGQLVVMCGGDESAYGRAEPVIDAYAKLCRRLGDSGAGQFCKMANQICIAGLVQGLSEGLNFAARAGLDGRAVVEVIGGGAAGSWQMQNRYETMIDDVFEHGFAVDWMRKDLGICLAAADDVGASLPVTALVDQFYKDVQAMGGGRWDTSSLIARLRKLDG

SEQ ID NO: 35079 - protein, 369 aa, Oceanicola granulosus HTCC2516
MAVIGGGIGGLAAALAFARHGAEVAVFEQAEALREVGAGIQITPNGARVLDALGLGDAVRARGLALDALLPMDGVGGRPVARFDLTGLGGPRYRAFHRADLIELLAEGCRAAGVALHLGRRVEDIAADGSFTAGTRIRPGLTVGADGLRATSRAVLNGAQAPFFTGQVAWRAVIEAEQPAEARIWMAPGRHVVSYPLPGGRLNIVAVEERAAWVEESWHRAADPAALARAFSGMAAPVRALLRRVETVHEWGLFRHPVAGSWSNGRLALLGDAAHPTLPFLAQGANLALEDAWSLAAHWARGDLAGYGPVRRPRVARAIASAERNAVNYHLRGPRRAAAHVALRTLSKVAPRAFLGRMDWLYGHDVTAG

SEQ ID NO: 35080 - protein, 316 aa, Oceanicola granulosus HTCC2516
MEDEMADVAAVGGYEGEDRAALEAMGAVFYDDLGALGDAGEDARGAVRVVAYKHHQPFDGEIMDRLPQLGLIANNGVGYDAIDVDAAKARGVRVTNTPDVLNDDVADLAVAMLLMQARDLCAGDAWVRQGKWAEEGAMPLARKVAGKRAGICGLGRIGREIADRLAAFKLEIHYHSRHEKETPAGWTYHADPVSLAGAVDFFVIALVGGPDTENYVDAGVIEALGPEGVIVNISRGTVIDESAMLDALEAGRLAGAGLDVFRGEPQVDARFARLGNVVLQPHVGSATGETRAAMGALQRRNVAAFLAGEELPTPVV

SEQ ID NO: 35081 - protein, 488 aa, Oceanicola granulosus HTCC2516
MIDKIAHRGPDEVHVTTLADAPVTMAHCRLSIIGTEDGAQPIRQAGNMLVANGEIYNHADLRAILGEAAFETASDSETILHLFRSGRSRWIDRLDGMFAFVLATKDRIIATRDPLGIKPLYVANMGGGAIFASELKAFDGVPVDGIEAIPPGHLIDSRDGWRQWYRTPQGAASAEPGFDIGRASRELRLVLEAAVAKWMVADVEVGSFLSGGLDSSIIAAIAQKVRLAQGLGPLKTFAVGTDGSPDLRAARAVAAHIGADHHEAVFTAQDVVGALPHVIYHLESADVDLVRSALPTLFAARLARAQVKAVLTGEGADELFAGYTYHHGYADDPRALADELTRSLGTMHNINLQRVDRVTMSESLEARTPFLDRDLIDFAQSIPAELKMRHTDPEARDATGPTTEKWILRKACEDLLPADLVWRKKAQFDEGSGTVDALSGALASLIDGPVNRQSEGALYERILGETYADPDRILAAAGTWEADRVLGG

SEQ ID NO: 35082 - protein, 759 aa, Oceanicola granulosus HTCC2516
MSDQVKDSARQAALDYHRLPKPGKLEVRATKPLANGRDLSRAYSPGVAEACLEIKGDPQTASDFTARGNLVAVVSNGTAVLGLGDIGALASKPVMEGKAVLFKKFANIDCFDIELDERDPEKLAEIVCALEPTFGAINLEDIKAPDCFIVEKICRERMGIPVFHDDQHGTAIVVGAATTNALRVAGKRFEDIKVVSTGGGAAGIACLNMLLKLGVKRENVWLCDIAGLVHEGREEEMTPQKAEFAQGTEPRQLGDVIDGADLFLGLSGPNVLKPEMVAKMAGTPIIFALANPTPEIMPDAAREVAPDAIIATGRSDFPNQVNNVLCFPFIFRGALDVGATEINDAMQIACIEGIAALARATTSAEAAAAYHGEQLTFGADYLIPKPFDPRLMGVVASAVARAAIEAGVAARPLADMDAYKRKLDSSVFKSALLMRPVFDAAATAARRIVFAEGEDERVLRCAQAVLEETPETPILIGRPEVIATRCERLGLTIRPERDFNIVNPENDPRYRDYWGTYHELMARKGVTPDLAKAVMRTNTTAIGAVMVHREEADSLICGTFGQYLWHLNYVTQVLGTEALRPVGALSMMILEDGPLFIADTQVHAEPTPEQIAETAIGAARHVRRFGLAPAIALCSHSQFGNLDNETGRRMRAAVALLDSEPRDFCYEGEMNVDAALDRELRDRVFPDSRMTGAANVLIFANSDAASGVRNILKMKGGGLEVGPILMGLGNRAHIVTPSITARGLLNMSAIAGTPVSHYG

SEQ ID NO: 35083 - protein, 404 aa, Oceanicola granulosus HTCC2516
MSPAPFRRAERLAGIEISEIVQLSERAAELRRAGQDVVALTTGEPDFPTPPHVVAAAHAAAEAGQTRYPPTAGTPELRAAIARQAGAEAAEVLVSTGAKQVLANAMLATLDPGDEVLIPAPFWTSYGDIVALAGGRPVRLPCPAADGFKLRPEALAAAITPRTRWLMLNSPSNPTGAVYGPGELAALAAVLADHPQVWVLSDEIYSHLAYVPAPSLRDAAPGLAERTLVVDGVSKAFAMTGWRLGWGIGPRALIGAMAAVQGQVTSGACSISQAAALAALTGPQELLADRRAAFRARRDRVCAALAAIPGISCVPPDGAFYAFPDVTGLILGGGFADDAALCRWLLDEVGLALVPGRAFGMPGHVRLSFAYAEREIDDALDRLATAAARLAARPFQASKEQVTT

SEQ ID NO: 35084 - protein, 252 aa, Oceanicola granulosus HTCC2516
MLLDIKGLEVKLEEEDKQILKGVDLEVEAGKVHAIMGPNGSGKSTLSYVLSGRDGYEVTGGSARLDGVDLLELEPEERAAAGLFLAFQYPVEIPGVGNMTFLRTSLNAQKKARGEPEVSSADFLKLVREKAKSLQIDPDMLKRPVNMGFSGGEKKRNEILQMAILEPRMCILDETDSGLDVDAMKLVSDGVNALRDAGRGFLVITHYQRLLNHITPDVVHIMSDGRIVKTGGPELALEVEENGYGDILGEVA

SEQ ID NO: 35085 - protein, 360 aa, Oceanicola granulosus HTCC2516
MTRVYLDHNATASLRDEARAAMVAAMDVVGNPSSVHAEGRAAKGLVEAARADLAEALGAQGFDIVFTSGATEAAALALSAGWSRVLGSAVEHDAVAAWADRVAWETLPVGRDGRVGAVAAAPGELVAVQAANSETGVLQALELDTGGALRLVDLVQLVGRVPVALSWLPPALYMISAHKFGGPKGVGALLVPQGTDLPALLVGGGQEMGRRSGTENVVGIAGMAAAARAAMAELAGGAQERIGQFRNILESAIAAGAPETIFVGKDSDRLPNTSCLVTPGWKGETQVMAMDLAGFAVSAGSACSSGKVRASRVLGAMGYDDEAAASAIRVSLGPETTEDEVLRFAETWTAKLKRHRARAA

SEQ ID NO: 35086 - protein, 338 aa, Oceanicola granulosus HTCC2516
MPTITEPKLIAGNANRPLANAVARRMSMHRGMNVGLVDARVERFNDAEIFVEVYENVRGEDMFIIQPTSRPANDNLMELLIIADALRRSSAARTTAVIPYFGYARQDRRTKARTPISAKLIANLIAQSGIERVLTMDLHAAQIQGFFDIPVDNLYASPIFALDIRHHFGDLDDVMVVSPDVGGVARARELAQRIAAPLAIVDKRREKAGEVAEMTVIGEVTGKRCIIVDDICDTAGTLCKAAEVLIENGATEVHAYTTHGVLSGPAIDRVSTSVLKSLVITDSIEATPETKGCPNIRIVPTAPMFAQAIINIWNGTSVSSLFDHETLTPIYEGLYSGG

SEQ ID NO: 35087 - protein, 301 aa, Oceanicola granulosus HTCC2516
MTTRAGFVALIGEPNAGKSTLTNRLVGAKVSIVTHKVQTTRARIRGVALEGDAQIVLVDTPGLFRPRRRLDRAMVAAAWGGAADADIVVLLVEAHRGVTKGVEAILERLDEIGTGRTVALAINKIDRVKSEALLALAADLNERHAFAETFMISAERGHGCDDLKRWLGAHLPEGPWLYPEDQIADLPLRMIAAETTREKLTLRLHQELPYQLTVETESWQEREDGSVRIDQIVYVARDGHKGIVLGRKGETAKAVSTAARAELEEFLDRRVHLFLQVKVRPGWLDEAERYSEMGLDIKDAK

SEQ ID NO: 35088 - protein, 598 aa, Oceanicola granulosus HTCC2516
MADDQPRDRTSERAPSRRLGVLRELWPFVAPYKLMLAGALGALVLTAMVSLVLPLAVRRVVDNFNSANADIVDQYFAAAIAIAALLAVGTALRYYLVTRLGERVVADIRKAVFDRMIGMSPAFYERVMTGEIISRITTDTTLILSVIGSSVSVALRNVLILFGGILLMLATSVKMALMVLWPIPVIVLPIILLGRRVRALSKENQDWIATSSADASERLLSAQTVQAFTNERASRGRFGEVTERSFVAARRRIGTRALLTAIVIFIVFSAVVGFLWMGAHDVRQGELTAGELIQFMIYAVMVAGAVGALTEIWSELQRAAGATQRLAELLEAEDSVPDPAAPAEVPAQIAGRIDFEAVSFAYPARPGIAALDGVSLAVAPGETVALVGPSGAGKTTIIQLLLRFYDPQAGAVKIDGIDLRDVRKADFRRHVALVPQDPVIFADSARENIRFGRPDATDAEIEAAARAAAAHDFLSRLPEGYDSQLGERGVMLSGGQKQRVAIARAILRDAPILLLDEATSALDAESERAVQAAVDELAESRTTIVVAHRLATVKKADRILVFDEGRIVAQGTHDELVAGGGLYARLARLQFVEGQAAE

SEQ ID NO: 35089 - protein, 581 aa, Oceanicola granulosus HTCC2516
MIDTEYEIGQDNIERKIGPFGFDIHNPVFLVSGLSIIAFVIYALAFPGQAEGVFADIFSFVTKGFDWFFLGSANIFVLFCIALIVLPVGKVRLGGAEATPDYTYTGWFAMLFAAGMGIGLMFYGVSEPLTHYSTAAGGTTYSVSFTGEDPGEGAFPEGFGSREEFDAATGLTAPDRAALDAAIASSVPEAARDAFIASETRTDWSPLGASSDDEQEAVRLGMAATIFHWGLHPWAIYAVVALALALFSYNKGLPLSIRSAFYPILGERVWGWWGHVIDILAVFATLFGLATSLGLGATQASAGLNELFGIPMGRTTEVVLICAITAVALVSVLRGLDGGVKKLSEINMGLALLLLLFVLIAGPTLALLTGFADSLIAYGQYLPALSNPVGREDVNFTQGWTSFYWAWWISWSPFVGMFIARVSRGRTVREFVTCVLLIPSLVCVFWMTVFGGTAIDQVLNEGYTAAQDAPLELQLFKMLDGLPLAAITSFIGIVLVIVFFVTSSDSGSLVIDTITAGGKIDAPVPQRVFWCIFEGLVAVVLLVGGGLGALQAMVISTGLPFTLVLLVMCFAIWRGLRAEPR

SEQ ID NO: 35090 - protein, 354 aa, Oceanicola granulosus HTCC2516
MGAMTPTLAFWDDTEALECVSRLPEAPEVVTFTFQSPSGALFRFKPGQFVTLELPVPGGPLMRTYTISSSPSRPTSLTITVKAQAGSLGTRWMLDHLRPGMRLKAAGPGGGFSHLNHPAEKYLFISAGSGITPLMSMTTWMYDAGREPDLVFINCARRPSGIIFRERLEHMASRMPGIELAWVVSDTDRYHPWSGYRGRLNQLLLGLAAPDYLDREVFCCGPEPFMTSVREALAGLGYDMDRYHQESFHAPVGATGAVPDDVTLDEAAKAQVEFAASGVTVECAETETLLGAARSAGLFIPSGCTFGVCGTCKVRKTEGQVHMVHNGGITDDDIAAGYILACCSNPIGRVTLEA

SEQ ID NO: 35091 - protein, 217 aa, Oceanicola granulosus HTCC2516
MKFFVDTADIDAIKELHALGMVDGVTTNPSLIMKSGRDIKEVTKEICDLVDGPVSAETVALDAEGMIREGLELKKIADNIAIKVPLTWDGLKACKALTDEGHMVNVTLCFSANQALLAAKAGATFISPFIGRLDDLNLDGMELIHDIREIYDNYGFETQILAASIRSANHMSEAAKIGADVATAPPKVIHAMANHVLTDKGLDAFLEDWKKTGQTIV

SEQ ID NO: 35092 - protein, 379 aa, Oceanicola granulosus HTCC2516
MNVGSSSVSFAAYPPDAPSEPELSGQLDETTDTGVVLQDGDGNDLPPLPLPDQPDRRALVSALAARVRERLPGPLVVGHRVVHSGGRFRAPVPLDAETEAALRGFAPLAPLHQGANLDSAAWLRAEDPELAQFAVFDDAFHATLPEVARRLPLPDDVARGLRRHGFHGLSYASVARQMRALSSARRVVALHLSGGASLCAMQDGRSVDTSMGLTPLDGVMMGTRSGALDPGALLYLMKRDGRTPEEMEELLYRHAGLKGVSGISADMRDLFASDAPGAARALDLYCHLLLRQLGAMVASLGGVDALVFTGGAGVGQPGLRERLCARLDWLGVGLDAEANARSAPLISTPASAVEVRVLPAREEAEIARAVAAHLDGSDR

SEQ ID NO: 35093 - protein, 365 aa, Oceanicola granulosus HTCC2516
MKFLDLARVHIRSGSGGNGCVSFRREKFVEYGGPNGGDGGTGGDVWAEAVEGLNTLIDFRYQQHFFARNGQAGMGRGMTGKDGDDIVLRVPVGTEILDEDEETLIADLTEVGQRVLLAKGGNGGWGNLHFKSATNQAPRRANAGQPGVERTLWLRLKLIADVGLLGLPNAGKSTFLAATSNARPKVADYPFTTLVPNLGVVGVDGVEFVVADIPGLIAGASEGKGLGDVFLGHVERSAVLLHLVDGTSGDPGGDWRTIVEEIEAYGEGLADKPRLTVLNKIDTLDEEERAFLLDELKEAGAGEVLAMSGVSGEGVTEVLRALRAEIDDNRLRFRIADAEAEAAEAAEEAGTDAADGGQEAPKWQP

SEQ ID NO: 35094 - protein, 232 aa, Oceanicola granulosus HTCC2516
MKTGGKQYKVASGDVLRVEKLAADAGETVQFNDVLMIGSTVGAPFVEGAGVQAEVIDQIKGEKTINFVRRRRKHSSKRTKGHRQQLTLVRVTELLESGADKSGVKAAVGAGSVSSAAMAAAAPAAAAKPEKKAAAPKAKKAEAKADDALAGQKPGNLLDAARDGKPDDLKKIGGVGPKLEKLLHENGVFHFDQIAAWGPEEVDYMDDKLSFKGRIARDNWIDQASKYAAEKE

SEQ ID NO: 35095 - protein, 412 aa, Oceanicola granulosus HTCC2516
MPILVMKFGGTSVATLDRIRRAAKRVGREVANGYDVIVIVSAMSGKTNELVGWVSETSPLYDAREYDAVVSSGENVTAGLMALTLQEMDVPARSWQGWQVPLRTSSAHGSARIEEIPPANILRKFDEGMKVAVVAGFQGISPEGRITTLGRGGSDTTAVAFAAAFGAERCDIYTDVDGVYTTDPRICDKARKLDRIAFEEMLELASLGAKVLQTRSVELAMRYGVRLRVLSSFEDNDADAGTLVCAEEDIVESNVVAGVAYSRDEAKMTLISVADRPGIAAAIFGPLAEAGVNVDMIVQNISEDGRTDMTFSCPVDQVKRAEAAMEAAKESGAINYHDLVADTGVCKVSVVGIGMRSHAGVAAQMFQALKDENINIKVITTSEIKISVLIDRKYMELAVQALHDTFGLEKAA

SEQ ID NO: 35096 - protein, 231 aa, Oceanicola granulosus HTCC2516
MDEAHILIVDDDERIRGLLQKFLLRNGFLVSVARDGAHARRLLDGLEFDLIVLDVMMPGEDGVSLCRDLRGRLKTPILLLTAKGETTDRIAGLEAGADDYLAKPFEPKELLLRINAILRRVPAAEPAPVTPKVLLLGPCRYDIERGEMWCGEELVRLTATENHLMRIFSARPGEALSRNMLVEELGRAGGQAQERAVDVQITRLRRKLEADPKQPRYLQTVRGAGYMLAPD

SEQ ID NO: 35097 - protein, 313 aa, Oceanicola granulosus HTCC2516
MDKHIILIGAPVDSGKRNQGCRMGPDALRVAGLAAAAEALGYGVTDLGNLTPEAADVAPVGNPAVHSLAETVGWTRTLAAEAQRAAETGMPVFLGGDHALSLGSVSGMAAYAKAQGKPLFVLWLDAHSDFHTLDTTDSGNLHGTPVAYVTGRPSFTPPFPAPEAVVPGENVCMIGLRSVDPAERDALEQTDITVVDMRAIDESGIVAPLRAFLERVEAAGGLLHVSLDVDFLEPAIAPAVGTTVPGGATFREAHLVAELLHDSGLVRSLDLVELNPFLDERGRTASLMVDLAASLLGKRIFDRPTRPFTGSLK

SEQ ID NO: 35098 - protein, 530 aa, Oceanicola granulosus HTCC2516
MAPRVLISDKLSEAAVQIFRDRGIDVDFQPDLGKDKDKLLEVIGQYDGLAIRSATKVTEKVIAAADNLRVIGRAGIGVDNVDIPHASKKGIIVMNTPFGNMITTAEHAIAMMFAVARQIPEASASTHAGKWEKSRFMGVELTGKTLGVIGAGNIGGIVCTRAVGLRMKVVAYDPFLSEERATELGVEKVGLDALLARADFITLHVPLTEQTKNILSRENLAKTKKGVRIINCARGGLVDEQALADALKDGHVAGAAFDVFAEEPAKENPLFGLPNVVVTPHLGAATTEAQENVALQVAEQMADYLITGAVQNALNMPSVTAEEAKIMGPWIKLSGHLGNFIGQMTDEPIKAINILYDGAASQMNLSALTSAVVAGIMKAGNPDVNMVSAPVIAKERGIQISTTKQDQSGAFEGYIKVTVVTEKRERSIAGTVFSDGKPRFIQIKGINIDAEIGQHMLYTTNEDVPGIIGTLGTTMGSNGVNIANFTLGRSAAKGEAIALLYVDEEVPAKALDALKQTGMFRQVKTLQFEV

SEQ ID NO: 35099 - protein, 391 aa, Oceanicola granulosus HTCC2516
MTNVVIASAARTAVGSFLGSFANTPAHELGTAVLEALVERAGVDKGEVSETILGQVLTAAQGQNPARQAHINAGLPKEAAAWGINQVCGSGLRAVALGAQHIMLGDASIVCAGGQENMSMAPHAANLRQGHKMGDVTYIDTMIRDGLWDAFNGYHMGSTAENVAEQWQIGREQQDEFALASQNKAEAAQKAGKFDDEVIPYTIKTRKGETVVDKDEYIRHGATLEGMQKLRPAFARDGSVTAGNASGLNDGAAGALLMSADEAERRGIEPLARIASYATAGLDPSIMGVGPVYASRKALEKAGWKVEDLDLVEANEAFAAQACAVNKDMGWDPSIVNVNGGAIAIGHPIGASGARVLNTLLYEMKRRDAKKGLATLCIGGGMGVAMCIERD

SEQ ID NO: 35100 - protein, 372 aa, Oceanicola granulosus HTCC2516
MLIGVPKEIKNHEYRVGLTPESVAELVGRGHEVIVETSAGAGIGAEDEAYAQAGAEIVGDAATVFARAEMVVKVKEPQAGERAMLREGQILYTYLHLAPDPEQTRDLVESGAVCIAYETVTDASGGLPLLKPMSQVAGRMSIQAGATALEKAHGGRGVLLGGVPGVAPAKVVVIGGGVVGFNAAQMAVGMQADVTILDRSPAVLERLQTHFESRARVIYSTGAALEAEVRAADLVIGAVLIPGAAAPKLVSKALIGEMQPGAVVVDVAIDQGGCFETSRATTHADPTYMVGDVVHYCVANMPGAVARTSTYALNNVTLPHALAIADKGWKAALAANEHLANGLNVAFGKVTYGAVAKDLGYEHEPTERVLAA

SEQ ID NO: 35101 - protein, 320 aa, Oceanicola granulosus HTCC2516
MTNLNQPLGGNEMPRFGGPATMMRLPAADSAAGLDACFVGIPMDIGTSNRPGTRLGPRQIRDESRMLRPYNMATGAAPFEHLQVADIGDVAINTFDLRDSVRRIEAHYDTVLATGALPLTLGGDHTLTWPILRAMRKIHGPVALIHVDAHADINEHMFGETVAHGCPFRRAWEDDCLLNEHVFQIGLRGTGYSPDDFDWGRQQGWTVIQAEEIWYKSLAPLMERVRAAIGDRPVYLSFDIDSLDPAFAPGTGTVEPGGLSTWQALEIVRGCAGLNLVGCDLVEVSPPFDPSGNTALIGANLLYEMLCVLPGVPQTNDRKD

SEQ ID NO: 35102 - protein, 549 aa, Oceanicola granulosus HTCC2516
MRTGAQCIVDGLGQLGVERVFGVPGESFLGVLDALVDAPGIEFVTTRHESGAGFMAVADGKLTGRPGVAFVTRGPGAMNAAIALHVAQQDSVPMVMFVGQIATDTRGREAFQEMDYRAVFGSVAKWVTEIDDAARVPELLARAFATATAGRPGPVVLALPEDMQTQEVAAPATLAPALRPEIAAPEPLVAEAAALLAQAERPLVVVGGGRWSQEAAHELRALAERCGLPVAAEFRCQDHIDNNAACYAGDMGLGMAPYLRAAVAEADVVLALGARLGEVPSDGYSLFDIPTPRQALIHVLPEPAEIGRVYAPRLGIVADATTFLGQLAPRLEGMAADPARMHELHRQSVAGRDFPPAPGSLDMSDVVRAIDADHAGRAIVANGAGNYSVWVHKLFTYASYPSQLAPVSGAMGFGVPAAIAAAFRAPDRPVFCFAGDGCFLMTGQELATAVRHRLRVVFLVVNNGMLGTIRMHQERHFPGRVSATELTNPDFADYARAFGAAGEVVERTEQAAPAIEAALRRDGPTVIELRVDPEALTPRQTLSAVRGTS

SEQ ID NO: 35103 - protein, 116 aa, Oceanicola granulosus HTCC2516
MIETGAGLRAGFTDAAYEAAGVEIAASAEALWDVADIVAKVRPPTPDELGRTREGQLVISFFYRAQNGDLLDLAKDKGASVIAMDMVPRISRAQKMDALSSMANIAGYRAVIEAGN

SEQ ID NO: 35104 - protein, 315 aa, Oceanicola granulosus HTCC2516
MKTLFISRTPLDPVVEAARESFDVTLGDAVLDEAGATRVLETYDVAIPTIGDAFTAAAFDAAGEIRCRMLANFGVGYSHIDVEAARRHGVTVSNTPDVLTDATADIGLTLLLATARRAGEGERLLRAGKWGGFGPQATLGTHVTGKVVGIVGMGRIGQAVARRCHYGFGMEVLYHNRSPKDAGLPARQVGSLAELMGAADFVVVTVPGGAATTGLIDAAALAAMKPEGILVNIARGEVVDEDALIDALERGAIAGAGLDVYTHEPHVPERLRALENCVLLPHLGSATRETRIAMGLMAVDNARAFAEGRDPPQAV

SEQ ID NO: 35105 - protein, 321 aa, Oceanicola granulosus HTCC2516
MTTGDQAFRREDLLGRWPEMTYGGALSFLRRRYTRQLEGVDVVVSGVPFDSAVTNRPGCRLGPRAIREASTQLAELKAFPFGFDPFEHLAVTDWGDCMIDPHHPAGVVPSIEAHADAILATGARMLTLGGDHSISYPLLRAHARHHGPVALVQFDAHCDTWADDGAQLDHGTMFARAAAEGIVDVARSTQVGLRTFNDSDHGFEILTAPWIHRHGIDAALEIVRARAGEAPVYLSFDIDGLDPACAPGTGTPVPGGLASWQGLEFVRGLAGLRLVGMDVVEVSPPYDHAEVTAIAAATVAHDWLCLLAEEKGAQRKAVGRL

SEQ ID NO: 35106 - protein, 482 aa, Oceanicola granulosus HTCC2516
MTFMKTWLAAFFIALIAMTAAPEAAWAQDDTVAVETAEDPAGDVATIAETETEAAPVAEMTPPNEEIGYILTTFMFLVTGILVMWMAAGFTMLEAGLVRQKNTTMQLMKNISLFSIAAIMYYVVGYNLMYPGDGWVMSGYVGAFGVSVLEAVGLMDGDVAVETDLTYASVGSDFFFQLMFCATTASIVSGALAERIKLWPFLIFVVVLTGFIYPIQASWKWGGGFLAPGVDGVTDFLDFAGSTVVHSTGGWAALAGALILGPRLGKYRDGRVNPMPGANLPLATLGTFILWMGWFGFNGGSQLYMDTAGNVADISRIMANTNTAAAGGAIAALILTQMLYKKSDLTMVLNGALAGLVSITAEPLTPSLGAATLIGAVGGVIVVFAVPFLDKLKIDDVVGAIPVHLFAGIWGTLAVVLTNPDATLGKQLYSIVVVGVFVFVVSAVVWLILRAVMGIRVSEEDEINGLDTAELGMEAYPEFAKG

SEQ ID NO: 35107 - protein, 68 aa, Oceanicola granulosus HTCC2516
MAKGTVKWFNSTKGFGFIAPETGGKDVFVHISAVERAGLTGLADDQKVTYDVEAGRDGRESAVNIQLA

SEQ ID NO: 35108 - protein, 572 aa, Oceanicola granulosus HTCC2516
MSSSLANLAPIPELYVSYESAQKMKGEAAQLTSFDLTPRQICDLELLMNGGFNPLKGFLSQEDYDGVVENMRLADGTLWPIPITLDVSEKFADSLEIGQDIALRDQEGVILATMTVTDRWAPDKAREAEKVFGADDSAHPAVNYLHNQAGKIYLGGPVTGIQQPVHYDFRARRDTPNELRAFFRKMGWRRVVAFQTRNPLHRAHQELTFRAAKEAQANLLIHPVVGMTKPGDVDHFTRVRCYEAVLDKYPSSTTSMSLLNLAMRMAGPREAVWHGIIRRNHGCTHMIVGRDHAGPGKNSAGEDFYGPYDAQELFREHQAEIGIEMVDFKHMVYVQERAQYEPADEIADKDDVTILNISGTELRRRLAEGLEIPEWFSFPEVVSELRKTRPPRAKQGFTVFFTGFSGSGKSTIANALMVKLMEMGGRPVTLLDGDIVRKNLSSELGFSKEHRDLNIRRIGYVASEITKNGGIAICAPIAPYATTRRAVREDIEQFGAFIEVHVATSIEECERRDRKGLYKLAREGKIKEFTGISDPYDVPETPELRVETEGTDVDNCAHQVILKLESMGLIAA

SEQ ID NO: 35109 - protein, 586 aa, Oceanicola granulosus HTCC2516
MRPLSSFFPVLDWGRRYDRHALTGDLVAAVIVTIMLIPQSLAYALLAGMPPEAGIYASIAPIILYALFGTSRALAVGPVAVVSLMTAAAVGEIAAQGTAGYVAAALTLAMLSGLMLLALGLFRLGAFANFLSHPVIAGFITASGILIAASQLRHVLGIPGGGHTLPQIAASLWRNLPEINLPTLVIGGGSIAFLFWVRSGLKPLLRRAGLGPRAADIGARTGPVLAIAASILAVVLFDLDAHGVAIVGDVPRSLPPLTLPSFSPDLISQLFVPALLISIIGFVESISVARTLAAKKRQRIDPDQELIGLGAANLGAAFTGGFPVTGGFARSVVNRDAGAETPAAGAYTAVGLALAALFLTPLIHDLPKATLAATIIVAVLSLVDLSILRRAWSFSRADFGAVVTTIALTLLIGVEAGVMAGVLVSILIHLYKTSRPHMAVVGRVPGTEHYRNVLRHEVETQPHVLALRVDESLYFPNTHFLEDRLAELIAERPALTDVVLMFPAVNDIDLSALESLEAINARLRDADLRLHLSEVKGPVMDRLERSHFLDELTGGVFLSHHAATRALARPGNGGNDGVEEHGLYVI

SEQ ID NO: 35110 - protein, 122 aa, Oceanicola granulosus HTCC2516
MTTATAEDQIRDTVTSNDVVLFMKGTKTMPQCGFSSRVAGVLNYMGIDYADVNVLADDAIRQGIKDYSDWPTIPQLYVKGEFIGGCDIITEMTLSGELDQLFEAKGVAFDKDAADKIREANG

SEQ ID NO: 35111 - protein, 400 aa, Oceanicola granulosus HTCC2516
MQLLSATLDRVKPSPTVAMSGRALELKAAGRDVIGLAAGEPDFDTPPHVAAAGIRAIEEGRTRYTAVDGTAELKRAICAKFARDNGLDYGPAEISVGTGGKQVLYNALMATLNPGDEVVIPAPYWVSYPDMVRLAGATPVIVEAPLSAGFKITPAQLEAAITGRTRWLILNSPSNPTGAAYSEAELKGLTDVLLRHPHVWVLSDDIYEHLVYDGFRFTTPAQVEPRLKARTLTVNGVSKAYAMTGWRIGYAAGPEALIAGMRKVQSQSTSNPCSISQFAALAALEGPHDFLAERNAAFLRRRDMVVARLNEIDGIDCPVPEGAFYVYPSIKGLIGKVSAGGTEIADDEAFAMALLDEAEVAVVFGAAFGLSPAFRISYALADETLAQACDRIARFCAGLR

SEQ ID NO: 35112 - protein, 433 aa, Oceanicola granulosus HTCC2516
MSNLARILLLAAVVAVLIVGTGYVQGWNSALLILNMGLVSAIMALGVNLQWGFAGLFNVGVMGFVALGGLASVLVTMDPVPEAWAAGGAGVLAALALGAATIAAAIWLHRRLSGAARVWALLALLVVGFIAYRAVFYPARDAVEAINPAATGYLGGLGLPVLLAWPVGGLLAAGAAWIIGKTALGLRSDYLAIATLGIAEIIIAVLKNEDWLSRGVKNVSGLPRPLPYEIDLQQDPAFLERAAGWGVDPVTASTIYVKLGYGVLFAVVLVLLLVLAQLALNSPWGRMMRAIRDNETAAEAMGKDVTRRHLQIFILGSAVCGIAGAMMTTLDGQLTPASYQPLRFTFLVWVMVIVGGSGNNFGAVLGGMLIWWLWVQVEPIGLALMSGIAALMPEGSALAGHLLDSAAHMRLLTMGVILLLVLRFSPRGLVPER

SEQ ID NO: 35113 - protein, 262 aa, Oceanicola granulosus HTCC2516
MIETGAGLRAGFTDAAYEAAGVEIAASAEALWDVADIVAKVRPPTPDELGRTREGQLVISFFYPAQNGDLLDLAKDKGASVIAMDMVPRISRAQKMDALSSMANIAGYRAVIEAGNNFGRFFTGQVTAAGKVPPAKVLVVGAGVAGLAAIGTSTSLGAITYAFDVRPEVAEQIESMGAEFVYLDFEQNQDGAATGGYAAPSSPEFREKQLEKFRELAPEMDIVITTALIPGRDAPVLWTKDMVEAMKPGSVIVDLAAERGGN

SEQ ID NO: 35114 - protein, 169 aa, Oceanicola granulosus HTCC2516
MKTGGKQYKVASGDVLRVEKLAADAGETVQFNDVLMIGSTVGAPFVEGAGVQAEVIDQIKGEKTINFVRRRRKHSSKRTKGHRQQLTLVRVTELLESGADKSGVKAAVGAGSVSSAAMAAAAPAAAAKPEKKAAAPKARSRGQGRRRAGRAEAGQPARRRPRRQARRSQ

SEQ ID NO: 35115 - protein, 593 aa, Photobacterium sp. SKA34
MQQKSTQKISLSQAYVKSAGINLDRRFMIALTDGSMITSRRYPQLLLITTTIESNGLLFNYPNKTPLSLSFEQLALLATSTAVWNDNCEAYTTSNDADQWVSEIIGQPAQLLYNGVESQRMGGKAQVKVSFADNFPVMIVSEASLNELNDRTQEIHSMDKFRANLVVSGVNAFAEDSWKRIRIGEVELEIKAPCSRCVLVNYDPNSSKKADNNEPLATLMTFRSDKVIPTNVNFGMNAIVVKEGIVRQGDQVEVLEHRTPETYPDQRVALTCVKREIIAKDFVSFSFKAQKDTALAPYLPGQYLPIRIAINGNVVERCYTLSSSPLEQEYTISVKRIEQGTVSNWLHDNLQVGDTIWSEKPSGQFYLEPHKQQNTLLLSAGSGVTPMMSMLRSLISERNTQGLTFYHYCKTQADIPFADELAEIQRHHPEISIHICLTQDNDTSHAYHGRICAEHFANIDVKDNCHVYVCGSSGFNQIAQELFSNQGLPTDRFHQEQFNKALTKPEQEQSLNIQYKQQQFTGNNQTSLLDQIEAAELPIKSGCRAGLCGRCKVKVTEGNVLQQDSAALSEEEKQQGVILACCSIPTSNITIEQ

SEQ ID NO: 35116 - protein, 401 aa, Photobacterium sp. SKA34
MSNSLVLVINSGSSSLKFALIDTVNGEATLSGLGECFGLPEAVVSWKVNGEKHEYKLDGLENHHQQSIDRIVDLVEELGLKENIVAVGHRVVQGGNLFDRTVKIDEKVIADIESLSDLAPLHNPAHVIGMRAASKAFPTLSQYAIFDTAFHQTMPEKAYTYAISQEVSKEYNIRRYGFHGTSHFYVTREAAKVVNKPADESSFISVHLGNGASVCVVKNGESIDTSMGFTPLAGLMMGTRCGDIDPSVLEYLLKKGWSEERLEKELINNSGFLGVSGFTSDCRGILEAMEDESHPHFHGAKLAFELFTYRVAKYIASYMVALDELDGIIFTGGIGENAMQIRSEILRLMKIFGYQEDVEGNTAARFGAQGIISKPNTPLAMVIPTNEEWVIANESMALLHA

SEQ ID NO: 35117 - protein, 486 aa, Photobacterium sp. SKA34
MAPKPLFLNRSSGFYFLSWVGNIMAIKGLMQLIKKSYGVSLSALLFGALTVNASPLVLGEPEKEELKLGFIKLTDMAPLAIAYEKGYFEDEGLYVSLEAQANWKVLLDRVIDGELDGAHMLAGQPLGATIGIGTKAPIITAFSMDLNGNAITVSNEVWQQIKPQLPVDENGKVIHPIKAEALKPVLEHYKDTGKPFQMGMVFPVSTHNYELRYWLAAAGINPGFYAPEKGDNSGQREAEILLNVTPPPQMPATMEAGTIQGYSVGEPWNQQAVAKKIGVPIIADNDIWKNNPEKVFGVTESWAKENPNTHIRLVKALIRAAAWLDHNGNENRAEASKILARSEYVGADEKVIANSMTGSFEYEAGDIRPAPDFNVFFRYNATYPYYSDAVWSLTQMRRWGQIPQAKPDSWYIDIAKQVYRPDIYRLAVNALISDGLMKQSDFSDVDNETGFRPPHNHFIDNITYDGRSPNAYLEQFSIGLKGDQQI

SEQ ID NO: 35118 - protein, 876 aa, Photobacterium sp. SKA34
MIRIELPVLINKLNAQTKIALEQASSLCMSRENNEVTIEHLLFSILENPLSDIRVLLEQVNLKTDVVKQLCGDAMPHDKGNDTYPSFSPLLVELLQDAWLLASTEMNEAELRSGLIFLAALIRPDRYLSFSLVKAFENINREALRKEFTSLVANSAETPVINSGETKAPLNVNSGDSALNRFCSNVTEQARQGKLDPVLCRDNEINLMIDILCRRRKNNPIVVGDAGVGKSAVIEGLASRIESGKVPEQLQNVELWLLDLGLMQAGASVKGEFEKRLKSVIDEVKNSPVKIILFIDEAHTLIGAGNQEGGGDAANLLKPALARGELCTIAATTWKEYKKYFEKDPALTRRFQLVKLDEPTTEQAVDIMRGLHCVYENAHNVLISDDALRAAAELSARYVSGRQLPDKAIDVLDTACARIAINLTAPPRRISEIESGTYQRQLEIQMINRQQLLGKAVDEERLSALLEKDLEEQVECESLYKDWQQQKELVTEIIETRQQILSPMTDLLPEQKDDDESCLSVDELQNRLVDLYSQLALIPHDELLIYPEVDAAQIAQVIADWTGVPVDQMNTDELAKITELPSILSAMIKGQDIALASIHRHLLTARADLRRPGRPQGAFLLVGPSGVGKTETVVQLAEQLYGGQQFLTTINMSEYQEKHTVSRLIGSPPGYVGFGEGGVLTESIRKMPYSIVLLDEVEKAHPEVLNLFYQAFDKGELADGEGRLIDCQNILFFLTSNLGYQTIVDYAEQPELIEEKMYPELANFFKPALLARMEVVPYLPLNKDVLAQIVRGKLSRLEKLLTSRYKAEVVIESCLVEEILERATRSENGARMLEAIIEGQMLPPVSLALLNKLAHREAITRICLTVENGEFCSEVE

SEQ ID NO: 35119 - protein, 401 aa, Photobacterium sp. SKA34
MARVFIVAAKRTPIGSFNGALKSVTAAELGAAAIKGALAETSVPVEAIDEVIFGNVIGAGQGMGPGRQASLKAGIPNEVPAYTLNMVCGSGMKAVMDAAAHIKAGDADIVVAAGAENMSQIPFCASSKIRDGQKMGNLELSDLLIADGLTDVFNNYHMGVTAENVVEKVGLTREQQDNFALASQQKAVAAIEQGKFVDEITPVEVVGRRATVVVDTDEYPKQDASIEGLAKLRPAFKRDGSVTAGNASGINDGGSAIIVVSEAAVNKYNLTPLAEIESYAQAGIAPEIMGLGPVPAVLKALDKAQLSIDKIERLEFNEAFAGQALGVLYEVAKETNSKVEDLVERANVNGGAIALGHPLGASGNRILVSLLHEMRRREDQYGIATLCVGGGMGTAVILKRV

SEQ ID NO: 35120 - protein, 639 aa, Photobacterium sp. SKA34
MNTIQKNFKLIDKPTFFGALAMLISVVVPLILFPKEGAIWIATAKTFMTDKLGFLYLALGLAAVFFMVYIIFSDIGQIKLGDADEEPEFKTASWAAMLFCGGIGASILYWGAIEWAYYYQSPPFQLTPGSEEAVRWAATYGVFHWGPVAWAIYLVPAVPIAYFFYVRKQPVLKVSAALMPVIGEARSYGWTGKVIDVLFIFGLLGGGATTLGLAAPLITEGANYLFGTPKNTETQIFVLLICTVIFGYSAYAGMEKGIKILSNINFWGALGLLAFILAVGPTIFMLETGLDSLGRMLSNFFVMATWAEPFGGYGSFEDTHFPQDWTIFYWAWWLVFAPSMGLFIARISRGRTIKQMVAGSIFFGSMGCFLFFMVLGNFGLSLQLSGQLDVVSILNAEGATKAIFSILEQLPFSTLVITVFTLLCLIFTATTFDSISYILASVVQNDVTEEPMRWNRLFWAFAMSFMPSVLMFMGGLATLQTAAIVGGLPLLLITVMLMISAVKAATLDLSHQEGYEDPVINIEDLPDVDPWSKEGMALAKFEQLKDVAIEAADAERDALNAIWKIKKTIRAEALARGDSGADMGEVPAELAEELHRLTTEAMAAKETKLEASAQAQEARVVFNDLMKEKEQAAITEATA

SEQ ID NO: 35121 - protein, 372 aa, Photobacterium sp. SKA34
MILGVPKEIKPHEYRVGMTPTAVKELTAYGHHVYIETLAGKGIGFNDQDYIDAGGFISPTAEHVFSTAEMIIKVKEPQTSERKLLRGGQILFAYLHLAPDLAQTKDLIKSKAICIAYETVTDHNNKLPLLAPMSEVAGRMSIQAGAFALEKSRGGQGILLGGVPGVNAANVVIIGGGVVGSNAAQMAIGLKANVTIIDRDINVLRQLDIQFNGKINTIYATNTAIEDHVIRADLVIGGVLIAGAAAPKLITKAMIEKMKSGSAIVDVAIDQGGCVETSHPTTHDDPTYIIDDVVHYCVANMPGAVARTSTVALNNATLPYIIALANKGYKQALLDDKHLRDGLNIYQGDITCKNVALSLHLPYIEAEKKLNE

SEQ ID NO: 35122 - protein, 69 aa, Photobacterium sp. SKA34
MSKSTGIVKWFNEEKGFGFITQDNGGADVFVHFRAIASEGFKTLAEGQKVSFEVEQGQKGLQAANVVAL

SEQ ID NO: 35123 - protein, 365 aa, Photobacterium sp. SKA34
MIPRSITSPKKFIIGQDLLSQLDAFIKDFGNNALLICDDFILDRVQQEAVPCLELAGIKTYCEKFQYECSDNEIERLRKIVTAQNANVVVGIGGGKTMDVAKAVAHYSNASVVIFPTIASSDAPCTAVSVIYKESGEFDRYLLLPQNPDVVLADTRIIAQAPEKYFAAGIGDALATFFETRACCYAAGLNLVQKRVSRTGLGMALMCYELIVDNVEMAMEAVRRQEVTPALEEMVEAIVYLSGVAAESGGIACAHAICNGMSSLEKFKHIQHGEKVTFGLLVQLVLEKADIEEIENVIYVIKMAGLPLTLADFGINEWVEDDWRQIVDIACSPSNSMSNMPVTVSAEQVYQAVIAANELAQRYHD

SEQ ID NO: 35124 - protein, 637 aa, Photobacterium sp. SKA34
MGKIIGIDLGTTNSCVAVLDGDKPRVIENAEGERTTASVVAYTQDGETLVGQPAKRQAVTNPENTLFAIKRLIGRRFEDEEVQRDIEIMPYKIVKADNGDAWVEAKGQKMAAPQVSAEILKKMKKTAEDYLGESVTGAVITVPAYFNDAQRQATKDAGRIAGLDVKRIINEPTAAALAYGLDKQGGDRTIAVYDLGGGTFDISIIEIDEVEGEKTFEVLATNGDTHLGGEDFDTRLINYLVEEFKKEQGINLKTDPLAMQRLKEAAEKAKIELSSAQQTDVNLPYITADATGPKHMNIKVTRAKLESLVEDLVQRSLDPLKVALADADLTVGDITDVILVGGQTRMPMVQAKVTEFFGKEPRKDVNPDEAVAVGAAVQGGVLAGDVKDVLLLDVTPLSLGIETMGGVMTKLIEKNTTIPTKANQVFSTAEDNQSAVTIHVIQGERKQASFNKSLGQFNLEGIQAAPRGMPQIEVTFDLDADGILNVSAKDKTTGKEQKITIQASGGLSDADIEKMVQEAEANKENDKKFEELVTARNQADQLIHGTRKQIEEAGDALPADEKAKIEAAVAELEEARKGEDKEAIDAKVQAVVAASQKLMEIAQQKAQAQQADGAGEQQAKQDDDVVDAEFEEVKDNK

SEQ ID NO: 35125 - protein, 404 aa, Photobacterium sp. SKA34
MKLPIYFDYSATCPVDPRVAEKMMQCLTIEGNFGNPASRSHRYGWQAEEAVDTARENIADLVNADPREIVFTSGATESDNLAIKGAAHFYSKKGKHVITCKTEHKAVLDPCRQLEREGFEVTYLEPESNGLIDLAKLRDAMREDTVLVSIMHVNNEIGVVQDIAAIGELCRENKTVFHVDAAQSAGKLPIDVQAMKVDIISFSAHKAYGPKGIGALYVRRKPRIRLEAQMHGGGHERGFRSGTLPTHQIVGMGEAFRIAKEEMDQDYQHALKLRDRLLMRLEGIEEMSINGDLEQRVPHNLNISFAFVEGESLLMALKDLAVSSGSACTSASLEPSYVLRALGLNDELAHSSIRFSFGRFTTEEEIDYAAIQIKGAVDKLREMSPLWDMHKEGIDLNTVEWAHH

SEQ ID NO: 35126 - protein, 715 aa, Photobacterium sp. SKA34
MSRTIMLVPVGAGVGLTSVSLGVLRAMERKGVRVSFFKPIAQPRKGGDQPDLTTTIISANSDMKIAESFSMASAEELIRNDKTDVLLEDIVARFKAATADADVTLIEGLVATRKHPFANQINFEIAKTLDAEIVFVVSPGTDNPAQLKERIEVACSNFGGIKNKQISGVIVNKLNAPVDAEGRTRPDLSEIFDDAEGTVPSNVEIMQVFNSSPIRVLGCAPWSAELIATRATDIAQHLNAEIINAGDIETRRIKSITFCARSIPNMVEHFRPGSLLVTSADRPDVIVAACLAAMNGVELGALLLTGGYDLPKPVMDLCERAFSTGLPVMTAQGNTWQTSLNLQSFTLEVPADDKERVELVNEYMASHIDGNWIESLTEGSNRERRLSPPAFRYQLTELARKAAKRIVLPEGDEPRTVKAAAICAERGIAECVLLGNPDEIRRVAEQQGVVLGTGVTIINSDEVRENYVARLVELRGAKGMTDVVAREKLQDSVFLGTMMLENNEVDGLVSGAVHTTANTIVPPFQIIKTAPDASIVSSVFFMLLPDQVLVYGDCAINPDPTAEQLAEIAIQSADSAKAFGIDPRVAMISYSTGESGKGADVDKVREATKIAQEKRPDLVIDGPLQYDAAIMENVAASKAPNSPVAGKATVFVFPDLNTGNTTYKAVQRSADLVSIGPMLQGMRKPVNDLSRGALVDDIVYTVALTAIQAEQATEK

SEQ ID NO: 35127 - protein, 398 aa, Photobacterium sp. SKA34
MSKLVLVLNCGSSSLKFAIIDPVSGDEHLSGLAECLGLPEARIKWKLDGKHEAQLGEGAAHEEALAFMVDTILASKPELKENLGAIGHRIVHGGEQFSASALIDDVVLQGIVDASDFAPLHNPAHVVGIEAAKHNFADLKNVAVFDTAFHQTMPEEAFLYAIPYNLYKENGIRRYGAHGTSHRFIARETANLLDKPLDELNIINCHLGNGASVCAIKGGKSVDISMGLTPLEGLVMGTRCGDLDPAVMFHLHDRLGMSVAEINTMFTKESGLLGLTGVTSDCRFVEENYGEKEEATRAMNVFCHRLAKYVASYAANMDGRLDAIVFTGGIGENSAPIREEVLKRLSIFGIEVDSEANLKARFGKEGVITSANSRIPAMVVSTNEELVIAEDTALLAEI

SEQ ID NO: 35128 - protein, 424 aa, Photobacterium sp. SKA34
MMSDEINVLIVDDDQDVLDAYQELLELSGYNVATVQDSSKVINMLNHNWSGVIVTDMYMPGLDGMELLEKVQDFDNEIPVIIVTGHGDIPMAVDALKKGAIDFLQKPLQPKELIKLLEKHLPQRKQIIEQRKTLHNTATELLLGESPLIVKIREQLKLVVNSTKDVLVEGENGTGRHTVAKILHKNSPLHQGPFIEIDGSSITCTPDLQRSMISARSGCLCLSNPHIMPIESQQWLCRFLLEQERQGKKEVRLLALFTGSPEPSVESEQFLPELFYFLSQVRFSLPTLRQRSSDITFIFKHYLKQSCKKLNKALPAIDKAYINTLCRYEWPGNVLELKNVAELYAIGIVKLAGQERSKPLEQMSSPLDDLVDGYEKQVIEDALYLFAGRINEVSSYLQIPRKKLYLRMKKHGLDKAEYKVRPSH

SEQ ID NO: 35129 - protein, 288 aa, Photobacterium sp. SKA34
MENNPFDSLMPPAMAKKAEEVGVYKATKHPLQSFFLAITAGVFISIAFVFYTTVTTGAGDMPWGMAKFVGALAFSLGLILVVICGGELFTSSVLTTVARASNRITTGQLLKNWIVVYIGNFIGASFFVICIWIAKQHLGDNGQWGITAMKIAQHKLHHTFGQAVVLGMLCNLMVCLSVWMTFSCRSATDKIMVMLLPVAMFVACGFEHCIANMFMIPMGIVIHHFATPEFWTMTGVNPSEFADLTVNHFIMNNLIPVTIGNIIGGGFLVGLTYWVIHRRSELKGNNQH

SEQ ID NO: 35130 - protein, 424 aa, Photobacterium sp. SKA34
MSKDILIVAAKRTPIGSFQGDLRNFSASQLGSIVIEAALRDVKRAQPTDTTLEHSSAMEYEHIAQLIDEVFMGCVLTAGVGQAPARQAALMAKIPVSVSCTTINKVCGSGLKSILLACDMIKAGAIRTAVAGGMESMTNAPYLLTDSRSGMRIGHNAVLDHLYLDGLQDAFDGHLMGVYGQQTATKYDISREIMDEWAIGSVNKARKADNSQAFHAEIVPITAQSKKALVTVEKDQHPNEVNPKKIPNLPPIFSQHGEHGTITAASSSAIGDGAAAIVLMEAEQVRRQGLYPLASIKGYASHSRSPDEFTIAPIHAISQLLDDLNWSTDDVDLWEINEAFAVVTIVAIEELGIDAGKVNVNGGACALGHPIGATGTRVVVTLTHALRQKAQMLSGTKTKTLKGVAAVCVGGGEALAIAIEVDVK

SEQ ID NO: 35131 - protein, 270 aa, Photobacterium sp. SKA34
MKRFFAVLITALTLLLSASHALAAEKSTLEQVKERGTLRVGLSTFVPWAMRDKQGELIGFEVDVAKRLAKDAGVKIEFIPTAWDGIIPALLAGKFDVIIGGMSITPQRNLSVLFTTPYSHSGVQLAASKELAGDKLSIADYNKRSVTLAVRRGAVTVQTAKKYFPKAKLRQFDDESQAFQEVLNGNAQAVLASTPKPEQMTLQYKDKLFLPFKERLSQGSEGFAIRQGDFNLLNFFNNWILLRTQDGWLKERYDYWFTTVDWQNQVKEGQ

SEQ ID NO: 35132 - protein, 523 aa, Photobacterium sp. SKA34
MSKHDKYSINNTDYTIGQDNVQKWGFDVHNAVFGVSAGLIVLFLAAILISDPATAKATLDSVKSAIVNKFDSMFILAGNFFVIFCLGLIISPYGRIRLGGKDAEAEHSTMSWLAMLFAAGMGIGLMFWSVAEPAGYYTGSGGSPLGVTPDTPEAFKVAMGATMYHWGLHPWAIYGVVALSMAFFAYNKGLPLSIRSVFYPILGDRTWGWAGHIIDILAVLATLFGLATSLGLGAQQAASGINHIFGTHGGLELQIGIIIGVTIITIYSVAQGIDSGVKLLSNINMLVALILLVFVGAVGFSVSMHTIPTTIVGYVENFIPLSNPFGRTDQDWLHAWTVVYWAWWISWSPFVGSFIARISKGRTIREFLVAVLIVPTLVTTVWMSVFGGQAIHQIIDKIGSLGQNGVNETSLAMFQMFDALPLGTILSVIGVCLVLVFFITSSDSGSLVIDSITAGGKVDNPVTQRVFWAVIEGLIAIALLWVGGTQAIQALQAGTISTALPFTIILLLMCVSLLLGFRTEKYK

SEQ ID NO: 35133 - protein, 408 aa, Photobacterium sp. SKA34
MNTTIQINELESLLIAIIVLFLGYFINSKVAILRKYNIPEPIVGGLVVAVIITIFHFQGFDISFKLSMQNALMEMFFSTVGLAASYKLLAKGGSRVFLFLALATVFIVIQNAVGVSLSKLLGLDPLLGLVVGSITLSGGHGTGAAWAHTFSTDYGINTLELSMACATFGLVMGGIIGGPVAQRLINKYNLKSDFGESGNHHIDHPDLVTYSDKEEDRITSKNTIEVLFILLVCVAGASHAKEFVDSFGINALRIPEFVYALFIGVFITNFCEGTKCYKINKETVDALGTISLSLFLAMALMSLHLWELMDLALPMLVILFVQTIVLALFTYFVTFRVMGKNYDAAIIAGGHCGFGMGATPTAVMNMGALVSRNGPSPQAFMVVPIVGAFFIDITNLLVLQGYMSFLGH

SEQ ID NO: 35134 - protein, 315 aa, Photobacterium sp. SKA34
MPDMKLFAGNATPELAQRIADRLYISLGDATVNRFSDGEVCVQINENVRGSDVFIIQSTCAPTNDNLMELVVMIDALRRASAGRITAVIPYFGYARQDRRVRSARVPITAKVVADFLSNVGVDRVLTVDLHAEQIQGFFDVPVDNVFGSPVLLEDMLAKDLQDPVVVSPDIGGVVRARAIAKLLDDTDIAIIDKRRPRANVSQVMHLIGDVEGRDCIIVDDMIDTGGTLCKAAEALKERGAKRVFAYATHPVFSGSALENIRESVIDEIIVTDSITLTKEIEATGKVSVLTLSGMLAEAIRRISNEESISAMFEH

SEQ ID NO: 35135 - protein, 404 aa, Photobacterium sp. SKA34
MQKFGMSSKLNNVCYDIRGPVLKHAKRMEEEGQKILKLNIGNPAPFGFDAPDEILVDVIRNLPTSQGYCDSKGIYSARKAVVQHYQKRGLLDLDVEDVYIGNGVSELIVMAMQALLNHKDEILVPSPDYPLWTAAVSLSGGTPVHYTCDEQSDWYPDLDDIKKKITPNTRGIVLINPNNPTGAVYSRDFLIEVVEVARQHDLIIFADEIYDKILYDGAQHTSIAPLAEDVVCVTFNGLSKSYRVCGFRAGWMIISGPRHRAKGYIEGLEMLSSMRLCANVPMQHAIQTALGGYQSINELILPGGRLLEQRNKAYDLLTQIPGVSCVKPKGALYLFPKLDQKKFNIQDDQKMAMDFLLQEKVLVVHGTGFNWKQPDHFRIVTLPHVDDLELAMGRLERFLHSYRQ

SEQ ID NO: 35136 - protein, 371 aa, Photobacterium sp. SKA34
MIIGIPKEIKTHEYRVGMVPASVKEVVSHGHRVYVETNAGTGIGFSDQDYIDAGAQILATASDVFAEAEMIVKVKEPQAVERAMLREGQILFTYLHLAPDPEQTHDLINSKAVCIAYETVTDKNGRLPLLAPMSEVAGRMSIQAGAFALEKSRGGCGMLLGGVPGVEPAKVVIIGGGVVGANAAQMALGLQADVTVIDRNIDVLRQLDAQFNGQLKTVYSTNDSIEKHVLEADLVIGGVLVVGAAAPKLVTAEMIKKMKPGAAIVDVAIDQGGCVETSHATTHSEPTYIVDDVVHYCVANMPGAVARTSAVALNNVTLPYIVNLANKGYKKALQDDKHLLNGLNVYRGQITCESVAASLDLPYVDADSAIA

SEQ ID NO: 35137 - protein, 549 aa, Photobacterium sp. SKA34
MNNNLELKPKRKMGLVSLTMTGIGSIIGSGWLFGAYHAAKIAGPASLVSWVIGGIAVLVVALTYTEVATLFPKSGGPVRFLELTHGSIVGYMAAWATWLSIVTVIPIEAEASVQYMHSWQWEWAKPITSTIFNTQTQSLSFVGLLIAAGLMLIYFLLNYWSVSLFSKSQTSITIFKIAIPIFSVASIVAAGFHPQNFTAVNHSFAPYGWAGSLTAVATAGIVFAYNGFQSPMHFAGESKNPGKDLPRAIILTLIIAVFLYLGLQAAFIGGVEPSELAIKGWSLDFSSPFAQLAIALNLNLVVMLLYVDAFVSPSGTGITYMGTTTRMLFAMSEYGHLPKSWSKLHPKYHIPRAALWVNLFVGFIFLYLFRGWGQLAGIISAATVVTYIVGPMAAMSLRKLAPDAERPVRLKALQIIAPLGFAISSEVLYWSRWPLTGKVIFILLLGFVIYAYFQNKRGWKNIKQHVKSSAWLLGYFVTMVVLSFIGSDQFGGINIIPFGYDMAVVAIVSLFFFYWGVNSAWLTPKLEHELAQLEVKSEPAKELLVKHSI

SEQ ID NO: 35138 - protein, 112 aa, Photobacterium sp. SKA34
METIDKIKQQIAENPILLYMKGSPKLPSCGFSSQASQALMGCGEKFAYVDILQNPDIRAELPIYAQWPTFPQLWVDGELIGGCDIILEMFQKGELQPLLKEVAERRDAASAE

SEQ ID NO: 35139 - protein, 73 aa, Photobacterium sp. SKA34
MATGTVKWFNNAKGFGFICPEDGEDDIFAHYSTIQMEGYRTLKAGQQVNYEVQTGPKGYHASEIILAEGDEAK

SEQ ID NO: 35140 - protein, 556 aa, Photobacterium sp. SKA34
MCSVFGILDIKSDAAALRPIALEMSKKLRHRGPDWSGIYASEHAILAHERLAIVGLNSGAQPIYSPDKKLILAVNGEIYNHKEIRARYEGKYDFQTDSDCEVILALYQDMGEELLEELNGIFAFVLYDEEKDTYLVGRDHIGIIPLYQGSDENGNYYVASEMKALVPVCKTVSEFPPGSYYGSADAEPQRYYNRDWNEYAAVQGNSTSKEELTEALEAAIKRQLMTDVPYGVLLSGGLDSSITSAVAKRFAAMRIEDNDQSEAWWPQLHSFAVGLEGAPDLKAAREVADKIGTVHHEMTYTIQEGLDAIRDVIYHIETYDVTTIRASTPMFLMGRKIKAMGIKMVLSGEGADEIFGGYLYFHKAPNAKEFHEETVRKLLALNMFDCARANKSLAAWGVEGRVPFLDKEFIDVAMRLNPEDKMCGNGKMEKHILRECFEHYLPESIAWRQKEQFSDGVGYNWIDTLKEVAEEKVTDQQLETAAYRFPYNTPTTKEAYAYREIFEELFPLESAAKCVPGGPSIACSSAKAIEWDESFKNAADPSGRAIAAVHNEAYKK

SEQ ID NO: 35141 - protein, 554 aa, Photobacterium sp. SKA34
MSESEARPTNFIRQIIDADLASGKHTSVHTRFPPEPNGYLHIGHAKSICLNFGIAQDYQGQCNLRFDDTNPEKEDIEYVESIKNDVNWLGFEWSDEICYSSNYFDKLYGFAIELINKGLAYVDELSPEQMREYRGTLTEPGKHSPYRDRSVEENLALFEKMKNGEVEEGKMCLRAKIDMASAFMVMRDPVIYRVRFATHHQTGDKWCIYPMYDFTHCISDALEGITHSICTLEFMDNRRLYDWVLENITIDCTPHQYEFSRLNLEYTVMSKRKLNQLVTDKLVNGWDDPRMPTISGLRRRGFTPASMREFCKRIGVTKQDNTIEISSLESCIRDDLNENASRAMAVLDPVKVVIENFDGETEMLTVANHPNKPEMGSREVPFSRELYIEREDFREEANKKYKRLVLGKEVRLRGAYVIQADRIEKDAEGNITTIFCSYDKDTLGKNPADGRKVKGVIHWVSAEAGIPAEIRLYDRLFTVPNPGAADDFVSVINPDSLTVVNGFVEPSLGAAEAEKAYQFERMGYFCADNKDSSPEHLVFNRTVGLRDTWAKIGD

SEQ ID NO: 35142 - protein, 517 aa, Photobacterium sp. SKA34
MQIGVPREVLAHETRVAATPKTVEQILKMGFSVVVEQGAGRLASFDDAAYEAAGATIVSTDVVWQSDLIFKVNAPQVNPETGEDEFELIKEGASLVSFIWPAQNPELLEKLSSKNINIMAMDSVPRISRAQALDALSSMANIAGYRAVVEAAHEFGRFFTGQITAAGKVPPAKVLVAGAGVAGLAAIGAAGSLGAIVRSFDVRPEVKEQVESMGAEFLEVDYKEDTSTGDGYAKEMSDEFNKAAERLYAEQAKDVDIIITTALIPGRPAPKLITKEMVDSMKSGSVIVDLAAANGGNCAYTEADKVVTTPNGVKVIGYTDMVGRLPTQSSQLYGTNLVNLLKLLCKEKDGNIDINFDDEVLRGLTIVKAGELTWPAPPIKVSAAAQQPKATAKVEPKIPEPTSPFKKFGLIGLGIALFAWVANYAPAEFLAHFTVFVLACVVGYYVVWNVSHSLHTPLMSVTNAISGIIIVGALLQIGQGDGVVSFLAFIAVLIASINIFGGFTVTKRMLEMFRKDK

SEQ ID NO: 35143 - protein, 70 aa, Photobacterium sp. SKA34
MSNKTLGLVKWFNEEKGFGFLTQDNGGADVFVHFRAIASEGFKTLTEGQKVSFDVEQGQKGLQAANVIAL

SEQ ID NO: 35144 - protein, 67 aa, Photobacterium sp. SKA34
MSTGIVKWFNEEKGFGFITQDNGGADVFVHFRAIASEGFKTLAEGQKVSFEVEQGQKGLQAANVVAL

SEQ ID NO: 35145 - protein, 409 aa, Photobacterium sp. SKA34
MELSTTVIELRYALDTFFFLISGALVMWMAAGFAMLEAGLVRSKNTTEILTKNICLYAIACTMYLLVGYNIMYVDNSAGGWLPSFGALIGTQAEGADHSLESDFFFQVVFVATAMSVVSGAVAERMKLWSFLIFSVVLTAVIYPVEGYWTWGGGFLSEAGFSDFAGSGIVHMAGASAALAGVILLGARKGKYGKNGEIYPIPGSNMPLATLGTFILWFGWFGFNGGSQLMVSDFENATAVGQIFLNTNAAAAAGAIAALAVCKTTWGKADLTMVLNGALAGLVAITADPLSPSPVAAVIIGVVAGALVVFSIIVLDKVKIDDPVGAISVHGVCGLFGLMVVPFSNADASFMTQLFGAAVIFGWVFAASLAVWGVLKATIGIRVTEEEELEGMDSHDCGVDAYPEFVSVK

SEQ ID NO: 35146 - protein, 523 aa, Photobacterium sp. SKA34
MPSNACQIADSNNTSLNSDSSRFEAKLVPILTIGFISLFIFAALADMSSFTALIQTSFESAANTFGYSWQILMLVNFLIALVIAFSPLGKKVMGTVTKPTIGTFRWLAMIMCTLLAGGGVFWSAAEPIYHFITPPPIFGGVAGSTQQAVDPALGQAFLHWGFLAWAVLGTLATIVLMYAHHEHGVKFRPRALLFPIFGKKLEEHWLGSVIDACSIIAVAAGTIGPIGFLASQLGYSLELLTGFENNVQSQLMILAVVVSIYSISAASGMDKGLQWLSRLNVIGAFGLLLAMLFLGPTKFILTEFGSAFGDYIHHFGELSLANDKPSWNVWWTWFFWGWFIGFAPMMAIFIARISEGRSIRGLVLAVAIGAPIVTNFWFAVLGGTGIFLELQTPGVISGPLNDGGLPAVLLASLSNLPFSSILLPAFLVLTTTFVVTTGDSMAYSIAMVVSGDNEPDSKHRLFWAIIMGVVAAVLLLAGDGGLNALQSFIVITAVPVSILIAFTLISGPIAAYRMTCAKKQVAA

SEQ ID NO: 35147 - protein, 291 aa, Photobacterium sp. SKA34
MTTSIAFIGLGVMGFPMARHLFKAGFDTTVYNRTTSKAQQWALEFSGQYSETPREAAQNRDVVALCVGNDNDVRSVVFGADGILAGMKAGSTLVDHTTTSAELAEELAKTCLAQGINFIDAPVSGGQAGAENGALTIMCGGEQAVFDSVLPILNSYAKQAVLVGGYGQGQRCKMVNQICIAGVLQGLSEALTLAQKSNLDIEQVVSVLKHGAAGSWQMENRATTMAEDKFDFGFAIDWMRKDLGFCLDEAKKHDLELPLTDAVDKRYGLLQNEGLGRMDTSVLIKAFNKTV

SEQ ID NO: 35148 - protein, 69 aa, Photobacterium sp. SKA34
MSKATGIVKWFNDEKGFGFITQDNGGADVFVHFRAIAGEGFKSLAEGQKVSFDVEQGQKGPQAANVERI

SEQ ID NO: 35149 - protein, 69 aa, Photobacterium sp. SKA34
MSKATGTVKWFNEEKGFGFITQDNGGADVFVHFRAITGDGFKTLTEGQKVSYETEQGPKGLQAANVEKA

SEQ ID NO: 35150 - protein, 586 aa, Photobacterium sp. SKA34
MSNNNNKRLSILLKLNTYITPYKWRVVAALAALLTTASLTLSIGYGVRILIDQGFAQQSLTDLRHAIQFIIGVTICIAIGTYFRFYLVSSVGERVSADIRLAVFNHVISLHPSYFETNSSGDIMSRLTTDTALLQSIIGSSFSMAMRSALLCLGAIIMLFATNFKLTFIVLASVPFVLIPILFFGRRVRALSRKSQDTMADIGSYAGEAIEHIKTVQSFSAEQHEKQAFADEVEKAYDVGRQRVKQRAILIAVVIAIVFSAIAGMLYVGGSDVINGEMSAGDLGAFVFYAIMVASSMANISEVLGELQRAAGATERLIEILQVKSDICTPDDHESIDCSHPSDIRFNNVSFHYPSRLNHPAINQLNLVAEQGKVLALVGPSGAGKTTLFELLQRFYDPQQGQVLVGNKDIRQFAPNELRQHMALVPQQPALFSNDVFYNIRYGNPDATDEEVIDAAKKAHAHEFIEKLPNGYHSFLGERGVRLSGGQKQRIAIARAILKNPKILLLDEATSALDSESEHYVQQALEELMKDRTTLIIAHRLSTIQHADKIAVLEGGELIDEGDHESLLKSCELYQRLVHLQFKHLE

SEQ ID NO: 35151 - protein, 629 aa, Photobacterium sp. SKA34
MSKIIGIDLGTTNSCVSVLDGDMPRVIENAEGERTTASVIAYTDGETLVGQPAKRQAVTNPENTLFAIKRLIGRRFEDEEIQRDLSVMPYKIVKADNGDAWVEAKGQKMAAPQVSAEVLKKMKKTAEEYLGEKVTAAVITVPAYFNDAQRQATKDAGRIAGLEVKRIINEPTAAALAYGLDKKGGDRTIAVYDLGGGTFDISIIEIDNVDGEQTFEVLATNGDTHLGGEDFDTRMINYLVDEFKKDQGIDLRNDPLAMQRVKESAEKAKIELSSAQQTDVNLPYVTADATGPKHMNVKITRAKLESLVDELVQGTLNPVKSALKDANLNVNDITDVILVGGQTRMPLVQKTVADFFGKEPRKDVNPDEAVAMGAAIQGGILAGDVKDVLLLDVTPLSFGIETMGGVMTSLINKNTTIPTKAEQVFSTAEDNQNAVTIHVLQGERKQAMHNKSLGQFNLEGIQAAPRGMPQIEVTFDLDADGILNVSATDKATGKAQKITIQASGGLTEAEIEKMVQEAEANKEADIQFEQLVTARNQADQLIHSTRKQLTEAGDNLPAADKEGVEVAISSLEDVKSGDDKNAIEQHTQALMTAAKKLMELAQANNQHQAETQNEAKSDDVVYAEFEEVK

SEQ ID NO: 35152 - protein, 858 aa, Photobacterium sp. SKA34
MRLDRFTSKFQSAISDAQSLALGRDHQYIEPAHLMVALLNQDGSTVRPLLTLLNIDITQLRSRLAELLDRMPKVTGIGGEVQLSHGMGVLLNMCDKLAQKRKDKFISSELFILAAAEDKGPLGELFKELGLTAKNIEQAIDQVRGGQKVDDPNAEENRQALEKYTVDLTERAEQGKLDPVIGRDDEIRRTIQVLQRRTKNNPVIIGEPGVGKTAIVEGLAQRIVNGEVPEGLRDKRVLSLDMGSLIAGAKFRGEFEERLKAVLNELSQEDGRVILFIDEIHTMVGAGKGEGSMDAGNMLKPALARGELHCVGATTLDEYRQYIEKDAALERRFQKVLVDEPSVEDTIAILRGLKERYELHHHVEITDPAIVAAATLSHRYISDRQLPDKAIDLIDEAASSIRMQIDSKPESLDRLERRIIQLKIEQQALEKEDDAASNKRLSDLLEELDLKEREYAELEEVWNAEKAALSGTQHIKAELEQARTDVEIARRAGDLNRMSELQYGRIPELEKQLDLAAQAEMQEMTLLKNKVTDTEIADVLSKATGIPVSKMLEGERDKLLRMEDELHHRVIGQDEAVVAVANAIRRSRAGLADPQRPIGSFLFLGPTGVGKTELCKSLANFMFDSEEAMVRIDMSEFMEKHSVARLVGAPPGYVGYEEGGYLTEAVRRRPYSVVLLDEVEKAHPDVFNILLQVLDDGRLTDGQGRTVDFRNTVIIMTSNLGSDRIQEHFGNLDYEGIKALVMDVVGQHFRPEFINRVDETVVFHPLGKENIKNIASIQLERLKKRLAENDFRLDVEDSALDMIAEAGFDPVYGARPLKRAIQQYIENPLAQDLLSGKFVPGKVITLSVKDDVIVAEQI

SEQ ID NO: 35153 - protein, 301 aa, Photobacterium sp. SKA34
MTDKQHCGFIAIVGRPNVGKSTLLNRLVGQKLSITSRKPQTTRHRIMGVDTRDGYQAVYVDTPGLHIEEKRTINRLMNRAASSSLTDVELVLFLVDGTMWTADDEMVLNKLAKSQLPTVLLVNKVDNVKDKHELFPHLQELASKMEFVDVIPVSAKHGTNIDAVEKIVRQHLPECEYYFPEEYVTDRSQRFMASEIIREKLMRFTGDELPYAVTVEIERFDYNPETDGFDINGLILVERKGQKKMVIGKGGDKIKVIGREARLDMEDLFERKVYLELWVKVKSGWADDERALRSLGYIDDL

SEQ ID NO: 35154 - protein, 804 aa, Photobacterium sp. SKA34
MTKALRQLHKFGGSSLADPECYHRVADILAEYSNNEDLIVVSAAGKTTNQLISWLAQLEKDGRQAHETLLSVRSYQQQLIESLLSLPTAERLIALLHDDLSTIARYGESTISPALRGTIQGYGEIWSARLLAALLCQRDLPAKDLDSRLFLRAEHAAQPEVDSRSSKPLLQQQFAQHSHHRLVITGFMAQNGQGETVLLGRNGSDYSATIIGALADVYRVTIWSDVAGVYSADPRKVSDACLLPLLRLDEANELARLAAPVLHSRTLQPVAQSAIDLTLRCSHQPESGSTRVERVLASGRGAKIVSSLDDVCLIEVDVPRGMDVQHVREDVERLLSRHQLAPLAQSLEQSKGRIMLAYTREVVNDVLNLLQDSGTPAELRLREGFSMVAAVGAGVINNPVHCHGFYQQLKGLPVEFMTEADSGLSLVAVLRHVETESLVSDIHQALFQAQKRVGLVLCGKGNIGTRWLELFDREKLALEKRHGLSFTLIGILDSRRGWMNFTGIDPSLALTQFEQEAIEYQESALFSHLANADYDDVIVLDVTASSELSKRYAEIAEHGLHLISANKVAGSASSKDYHAVIDAFAKSSRHWLYNATVGAGLPVNHTVRDLRESGDQIIAVSGIFSGTLSWLFQQYDGSVPFSELVEQAWQQGLTEPDPRHDLDGSDVMRKLVILARESGLDIEPEQVKVESLVPSDLATLSVEQFFEQTQVLDEILAERLESAREEEKVLRYVARLDRHGNAYVGVEALPQEHALANLLPCDNIFAIESHWYRDNPLVIRGPGAGRDVTAGALLSDINRLACLL

SEQ ID NO: 35155 - protein, 402 aa, Photobacterium sp. SKA34
MSKINKVVLAYSGGLDTSAIIPWLKENYDCEVVAFVADVGQGEEELVGIEEKALASGASSCYIADLKEEMVKDYIYPSLKTGAVYEGKYLLGTSMARPIIAKAQVECALEFGADALCHGCTGKGNDQVRFEGAFAALAPQLKVIAPWREWDLRSREALLDYLAERDIPCTASLEKIYSRDANAWHVSTEGGVLEDTWNAPNDLCWVWTKDPEQAPDQAETVTLLIEQGEVVAVDGEAMTPYNVLTYLNEKGIDHGVGRIDIVENRLVGMKSRGCYETPGGTIMMEALRAVEQLVLDKESFDFRQTLGLKASHLIYDGRWFTPLCQSLIAAADELAKDVSGEVVVKLYKGQATVTQKRSTNSLYSEEFATFGEDDVYDHSHAGGFIRLYSLASRIRALNSQKK

SEQ ID NO: 35156 - protein, 285 aa, Photobacterium sp. SKA34
MKKHRAFLKWAGGKYSLVEDIKRHLPPARKLVEPFVGAGSVFLNTDYDHYLLADINPDLINLYNILKHEPERYVEDARKLFTPEYNNKEAYLKIREEFNASDDPYLRSLYFLYMNRHGFNGLCRYNKKGGFNVPFGSYKKPYFPEAEMYYFSEKAKRATFVCEGYLQTFSRARKGCVVYCDPPYAPLSSTANFTSYSGNGFSLDDQATLADVAEKAAAERDIAVLISNHDTALTRRLYTGADLSVVKVKRTISRNGSGRNKVDELLALFSVSNTEQTPVFSSEEE

SEQ ID NO: 35157 - protein, 323 aa, Photobacterium sp. SKA34
MSRSFDFCSHGKKVLNIEIQALQNISRYIDDSFNKACQLVLDCEGKVIVMGMGKSGHIGRKLAATLASTGTPAFFVHPGEASHGDLGMIKHEDVVIAISNSGEASEILALLPVIKRLGIPMISMTGKPTSSMAKMAIINLQITVEKEACPLNLAPTSSTTATLVMGDALAISVMEARGFTADDFALSHPGGALGRKLLMRIADVMHTGKMLPIIEETASIKDALLEISQKGLGMTAIVNNKQQLSGIFTDGDLRRLLDNHVDIHNTNIGNVMSCNPQTISPQLLAAEGLKIMEDRKINGLLVTENSQLVGALNMHDLLKAGVM

SEQ ID NO: 35158 - protein, 456 aa, Photobacterium sp. SKA34
MDKATTHLDSLTVAKFGGTSVADYSAMSRSAAIVTANPETKIVLISACSGVTNILVELANGVSDSTTRQQRIQTLTQTHQDVLEQLQHPENIQDAIYGLLDNIATLAEHAASATSAQLTDQIVSHGELLSTHLFSQILVELNAPAVRVDIRPIMRTDDQFGKAIPQPDTIKQLATEQLLPLLDNNIVVSQGFIGSNSQGVTTTLGRGGSDYSAALIAEAVNASTLEIWTDVPGLYTTDPRITSAAKPIKEISFSEASEMANFGAKILHPSTLVPAVRQQIPVFVGSSKAPAQGGTWIRQSVEDAPLFRALALRANQTMVTLTSLNMFHAYGFLAEVFRILAEHKISVDLITTSEVSVSLTLDQTDTGGGAPTLPLQVVEELSQLCVVDVEQGLSLVALIGNQMSDTKGSAKDIFGALEDHNLRMICYGASPHNLCFLINEDEAKDVVRTLHASLLE

SEQ ID NO: 35159 - protein, 485 aa, Photobacterium sp. SKA34
MNSQLIIPIVLYLAAVFAMALYTRRFQSKGHFLTEYLVGGRSMGGFVLAMTLAATYASASTFIGGPGAAYKMGLGWVLLAMIQLPAAWLTLGVLGKKFAIEARRHNALTLNDILYARYKNRGVVIFASLSLLIAFFGTMVVQFVGGARLLQTVTGLSYMHGLMIFAITVGLYTTIGGFRAVVMTDTLQGLMMIIGTIALLVGIVHAGGSIGALVTKLHDIDPALITPYGPNHFLSQPFMLSFWILVCFGVIGLPHAAVRCMSYKDSNSLHKGMVLSTIMVALLMFGMHLAGALGRAIVPDIASPDQIMPTLMVTVLPPVVAGVFLAGPMAAIMSTIDSQLIQASATLLKDLYINYINPSIANHEYAEKRLPKLSLLVTGIFSGLVFIAAMNPPDMIIWLNLLAFGSLQAVFLWPLVLGLYWKKASATGAFSSMIVGLSSYIILSFSKPDMNSVHAIVPTLLLGLIAFIIGSYAKPTKVETPQLSD

SEQ ID NO: 35160 - protein, 184 aa, Photobacterium sp. SKA34
MAKPAVFIDRDGVINVDHGYVHTVDDFEYIEGVFEACKKFKEMGYLLVLVTNQSGIARGMFSEDEFTSLTEWMDWNFVDNGVEFDGIYYCPHHASKGQGDYLQDCDCRKPKPGMFISARDFLKIDMSQSVMIGDKADDMKAAIAADVALKVLVRTGKPVTDEGEALANVVLDSIADVPEWLMTQ

SEQ ID NO: 35161 - protein, 459 aa, Photobacterium sp. SKA34
MNQTRVLVVEDDEGLREALVDTLALAGYQWIEAESAEHALVIMKSETVDIVVSDVQMAGMDGLALLRSIKLNWPKIPVLLMTAYANIEDAVAAMREGAIDYMAKPFAPEVLLNMVGRYAPIKKQSSKTVVADPKSIKLLALADKVAKTEANVMVLGPSGSGKEVLSRYIHDNSERKGGPFIAINCAAIPENMLEATLFGYEKGAFTGAIQACPGKFEQAQGGTLLLDEISEMDLGLQAKLLRVLQEREVERLGGRKSIKLDVRILATSNRELKTYVAEGHFREDLYYRLNVFPIAWPALAERQGDILPLATLFAERHSIKQGNVVPSISQTAQDKLVHYPWPGNVRELDNVIQRALILCDNNHIQQHDILLEHFDWLDTEIPQSVPEPEPCVVAVRPKPTATGEGLGSELREQEFSIILDTLIACEGSRKDVAEQLGISPRTLRYKLAKMRDAGIEIPA

SEQ ID NO: 35162 - protein, 389 aa, Photobacterium sp. SKA34
MKFIDEATIKVDAGDGGNGVVSFRTEKYIPKGGPDGGDGGDGGDVYLFADENFNTLIDYRFERFHAAERGENGRGGNCTGKRGADKILTVPVGTRAVDDDTGEVIADLTEHGMKVMVAKGGFHGLGNTRFKSSVNRAPRQKTMGSLGEVRHLRLELLLLADVGMLGLPNAGKSTFIRSVSAAKPKVADYPFTTLVPSLGVVRVDAERNFVVADIPGLIEGAADGAGLGIRFLKHLERCRVLLHMIDLLPADGSDPVENAFTIINELEQYSDRLGNKPRWIVFNKADLLDEEEAQEKMTEVLEALAWEDKYYSISALNRTGTKELTYDLMEAIDAMPKIKYEPEEKEDKVDFKWDDYHAEQIKKAQDEDDDDDWDDWNEDDYDVEIIYKP

SEQ ID NO: 35163 - protein, 572 aa, Photobacterium sp. SKA34
MEMLSGADMIVRSMIDQGVKHIFGYPGGSVLDIYDALHEKSDIEHVLVRHEQAAVHMADGYARATGDVGVVLVTSGPGATNAITGIATAYMDSIPMVVLSGQVMSSLIGNDAFQECDMVGISRPVVKHSFLVTKPEDIPEIIKKAFYIASTGRPGPVVVDIPKDMLNPAEAYPYQYPESISLRSYNPTTQGHKGQIKRGVKALLSAKKPVLYVGGGAIMSSCSEQLIELAESLNIPVVNTLMGLGAFPGSHKQCLGMLGMHGTYEANMAMHNADLIFGIGVRFDDRTTNNLEKYCPDATIMHIDIDPSSISKTVSADIPIVGSADTVLNSMLKLLKEHEVKNDQQEIAQWWQSIESWRERECLSYDTDSDRIKPQQVIEVLHRLTNGEAYVSSDVGQHQMFAALYYPFDKPRRWINSGGLGTMGFGLPAAMGVKFALPDAEVVCVTGDGSIQMNIQELSTALQYDIPVKIINLNNRFLGMVKQWQDMIYQGRHSHSYMDSVPDFAAIAEAYGHVGVRISDPNKLESELEKALALKDKLVFIDISVDETEHVYPMLIRGGAMNEMWLSKTERT

SEQ ID NO: 35164 - protein, 530 aa, Photobacterium sp. SKA34
MNTSTDKVSSKYSIDTTDYQVGQDNIQRWGFDIHKPVFGISAILILLFIAVMLIVDPATAKAALNNTRNGIMEQFDSYFMWAVNTFAVFCIFLMLSPLGKIRIGGKEAKPEHSTLSWSSMLFAAGIASGIMFFGVAEPTAYFTDWFGTPFNVEAMTPEAKQLAMAGSVFHWGISAWSIYAVAALALAFFAYNKNLPLSIRSLLFPIFGDRAWGWLGHAVDILAVVSTLFGLVTSLGLGAKQAASGINYVFGTHGGLGLQFGIIAFVTSIAIFSVIRGIDGGVKLLSNINIVIAFGLLVLVAILGFDIVKHSLPDTFMAYAKNFFALSNPIGRTDDTWRHGWTIFYWAWWISYAPFVGIFIARVSKGRTVRQFIFAVLFIPTLVTMTWFSVFGGIAVEQVATKVGELGLHGLQDLSLTLFYVFDAMPMSLLLSVISIVLILVFFVTSSDSASLVIDSITAGGKLDAPVPQRIFWATIEGVIAAILLWVGGAQALEALQSGVVITALPFSFILVITCVSLWKGLMSERHLYS

SEQ ID NO: 35165 - protein, 356 aa, Photobacterium sp. SKA34
MSKEKILFIDRDGTLIVEPPVDFQVDRLDKLKFEPNVIPALLALQNAGYKLVMVTNQDGLGTDSYPQADFDAPHNMMMEIFESQGVVFSDVLICPHFDNEGCSCRKPKLGLVKEYLQQGRVDFETSAVIGDRITDLQLAENMAIRGIQYNPETMNWMQILTDLTTQPRIAEVVRTTKETDIRVKVNLDQTGGNTISTGLGFFDHMLDQIATHGGFQMTLTVDGDLHIDDHHSVEDAALALGEALKKALGDKRGIGRFGFSLPMDECLAQCALDLSGRPYLKFDAQFSRDQVGDLSTEMVPHFFRSLTDTLACTLHLSSTGNNDHHIVESLFKAFGRTLRQAIKVEGNELPSSKGVL

SEQ ID NO: 35166 - protein, 585 aa, Photobacterium sp. SKA34
MTQLTEKSSSETYKRLWPYISFYKAGLAVAIIALIINAVGDTLMLSMIKPLLDESFGGLDKIDSDFLAMMPIYLIGLMILRGLSGFVSTYCLSWVSGNVVMSLRRQLFQHFMKMPVAFFDKESSGALLSRITYDSEQVASATSSALVSIVREGASIIGLMALMFWNSWQLSAILIVIAPVVAISIRIVSKRFRKISRDMQDAMGSVTSSAEQMLKGHKVVLSYGGQQVEKKRFDNVSNQMRRQTMKLVSAQAIANPVIQIIASVALVVVLILANTPSLRAELTPGTFAVVFGAMFGLMRPLKALTGVTSQFQRGMAACHTLFELMDLETENDNGKVEVKRVKGDVEVKNVTFTYPTKDTPALRDVSFTLPAGKTLALVGRSGSGKSTIANLLTRFYDIDSGEINLDGAEIRDYKLANLRDQVAVVSQNVHLFNDTIANNIAYASDNAYSREDIERAAELAYAMDFIKGMDNGLDTIIGENGVSLSGGQRQRLAIARALLRDAPVLILDEATSALDTESERAIQSALDELQKDRTVLVIAHRLSTIENADQILVVDDGEIVERGTHAELISNDGAYAQLHRIQFGD

SEQ ID NO: 35167 - protein, 201 aa, Photobacterium sp. SKA34
MVGQQQILSRFLLAPSLQYDQNHQDRIRQHWEDSYRFKQAAVLIPLVHRENGFNVVLTRRAKHLKHHPGQIAFPGGRFEPTDEDLIATAIRETFEETNITCYRNDVHGCLSTLPTISGYMVTPFIATIDPDYIPIADPNEVEHIFEVPLIHLLNPSNIRQHQFLINGKNHHVYNIPYKNYSIWGATAQMIKLLSNQIWHDS

SEQ ID NO: 35168 - protein, 310 aa, Photobacterium sp. SKA34
MTTLANYPDYSLYANAFGFLRQPLNFSPVESDADVVITGVPFDMATTGRSGSRMGPGAIRQISTNLAWEGKRWPWTFNLFKTIKVADCGDLVFDCGDAAQMCERLEAHATGLLEQGKAMLSFGGDHFVTLPLLRAHAKQFGKMALIHFDAHTDTYDQGSKFDHGTMFYHAPKEGLIDPQHSVQIGIRTEHSDKLGFNVIDAGQANDWSVDQIVSMIKEKVGDMPVYLTFDIDCLDPAFAPGTGTPVCGGMTSDKALKVIRALAGINLVGMDVVEVAPSYDHADMTSLAAATIATDMLHLWALTHKKADIK

SEQ ID NO: 35169 - protein, 70 aa, Photobacterium sp. SKA34
MSNKTTGLVKWFNEEKGFGFITQDNGGADVFVHFRAIASEGFKTLAEGQKVSFEVEQGQKGLQAANVVAI

SEQ ID NO: 35170 - protein, 68 aa, Photobacterium sp. SKA34
MSKLTGTVKWFNDDKGFGFISGTDGKDVFVHFSAIQAQGRRTLREGQSVEFIVTDGQKGPQASEVIAL

SEQ ID NO: 35171 - protein, 400 aa, Photobacterium sp. SKA34
MLSQKTIDIVKTTAPVIAEAGPMVTQHFYQRMFNHNPELKNVFNMSHQKNGANNGPSSQQEALFNAICAYANNIENLAVLLPAVEKIAHKHTSFMITAEQYNIVGSHLIATIDELLAPGQDVLDAWTEAYGLLANIFINREEEIYQENANKVGGWRGTREFVVTNKQQDSEFITSFTFKPTDDGKVASYKPGQYLGIYLNADELENQEIRQYSLSSAPQDDQYRISVKRESHGKVSNYLHNNINIGDKVMLAAPAGDFFLDVEANTPVTLLSAGVGLTPTLSMLESLTDHQAPVNWLHATENGAHHAYKKQVKALAQQHNHIQDITWYNAPLDSDLPAEDYDYQGLMDLSAIKSQLSDNNMHFYFCGPVAFMQYVAKQLLALGVSEDRIHYECFGPHKVL

SEQ ID NO: 35172 - protein, 503 aa, Photobacterium sp. SKA34
MNSTLFLTGFGVYVCFLIWLGWFVSRNQKSGEDFLLGGRGLPLFLVLGTTVATMVGTGSSMGAVGFGYANGWAGALYGIGGAFGILLLALWFAPVRKLNFMTMSEELAYYVGANRIVKNVVGLLIFIASIGWLGAHILGGGMYLAWIADIDLNLAKIIIAAAFTIYVVIGGYTAVVWTDTIQAIILFAGFILMAVMSVNYIGGMDNLYAAMEPAATSFLAIDKLGILPAVSLAVVIGVGVLATPSFRQRIYSGKDVSTIRRSFVASGVLYLFFSIIPAVIGMAALAINPTLDNPNFSFPYIAVSVLPVGVGMIVLIAGLSATMSSASSDAIAGVSILLRDVYVMFTGRVPNKESMMNYSRLALVVVIGFALLFALTSNDIIGYITKMISTVMSGMFVCGMLGKFWKRYNWQGALATLLGASVVSFVVMLNADYTAFWGNPVIPSCLFALVAGVAVSLVTPANQVTPEMAKTILDEERALMEMDISKAGGLGEASSQRPVSQTS

SEQ ID NO: 35173 - protein, 610 aa, Photobacterium sp. SKA34
MSTPLETPQLSQLNVFPVKSIAGISQSKVWVEKQGISFDRRFMVATLSGDMITARKSPKMVKVKAALIADGIVLSYEDKACLVLKYAQFDMAEASSTVWGDTFIAYTTTEQANSWFSDVLGQPVQLLFTGEQSNRLRPKISQNVSFADGYPLLVISEASLQALNERSSEHHTMDQFRTNLVVSNTEAFAEDGWKRIRIGEVEFEAVKPCARCILTTVDPKSATFSESKEPLVTMAKFRADEKGNVYFGQNLVARNEGIISVGDTIEILETKPKEIYADNSEQKLQLTCVEREDIAQDFTTFWLESHQENQALPTYLPGQHLPIQLEVNGEYISRRYTLSSSPSRPGRYAISVKRVDDGRISNWLHEHFQVGDTLVSESPSGDFHLGVHTDKLLLLSGGSGVTPMMSMLRYLSDHDLVRDVVFYHQCRTEADIPYLEELRAIEEKHPSLDLRIVLTQPKRDWQGESGRLSIGHLAMMSDLDKRQVFVCGPDEFMSSAKKLLLNMGMAPSRYHQEAFGPIRHTLEEKKTVELSIDGQLFQGNNQATLLEQAETAGINMDYSCRAGFCGACKVTVKSGEVEQPEVPALSAKERAEGKVLACCCVPRSDLEIIK

SEQ ID NO: 35174 - protein, 69 aa, Photobacterium sp. SKA34
MSKSTGIVKWFNEEKGFGFITQDNGGADVFVHFRAITGEGFKTLAEGQKVAFDIEQGQKGPQAANVEKA

SEQ ID NO: 35175 - protein, 176 aa, Photobacterium sp. SKA34
MMAIFIARISRGRTIRQIITTISIVAPLTTCFWFTIVGGSGLAFEIANPGSVSSAFEGFNLPGALLAVTQQLPMPMLISILFLVLTTIFIVTTGDSMTYTISVVISGETEPNAFIRAFWGVAMGVTALILISLGSGGISALQSFIVITAVPVSLILLPSLWNAPQIAIKMAKEQGV

SEQ ID NO: 35176 - protein, 333 aa, Photobacterium sp. SKA34
MSNPTNSTKASSLSVSSKKPQAKHNDISAKEKTTDKLGLSNPALWYSGGFIALFVAIALYDGELLSMLVNTGFAWSVKILGPYWQLLLLLTFLIGLGLAAGRTGKVILGGTTKPELDGFRWVAIIFCTLLAGGGVFWAAAEPIAHFVSPPPLYGAQDDPYKSAVNALSQSFMHWGFLAWSIVGSLTSIVVMHLHYDKGLPLKPRILLYPVLGERALKGQIGALIDACCIIAVAAGTIGPIGFLGLQVSYALNVLFDIPDGFTTQLIIILFAIVLYTVSALSGLNRGMQMLSRYNVILAVALMAYILLFGPTGFIFNVYIQGVGTMLDNGDLPR

SEQ ID NO: 35177 - protein, 189 aa, Boechera stricta
NMLKTLDRYQKCSYGSIEVNNKPAKELENSYREYLKLKGRYENLQRQQRNLLGEDLGPLDSKELEQLERQLDGSLKQVRSIKTQYMLDQLSDLHNKEQMLLETNRALAMKLEDMIGVRSHHMGGGGWEGGEQNITYAHHQAQSQGLYQPLECNPTLQIGYDNPVCSEQITATTQAQAQPGNGYIPGWML

SEQ ID NO: 35178 - protein, 251 aa, Boechera stricta
MGRGRVELKRIENKINRQVTFAKRRNGLLKKAYELSVLCDAEVSLIVFSNRGKLYEFCSTSNMLKTLERYQKCSYGSIEVNNKPAKELENSYREYLKLKGRYENLQRQQRNLLGEDLGPLNSKELEQLERQLDGSLKQVRCIKTQYMLDQLSDLQGKEHILLEANRALSMKLEDMTIGVRHHHIVGAWEGGDQQNVAYGHHQAQSQGLYQSLECDPTLQIGYGHPVCSEQMTVTTQVQTQPGNGYIPGWML

SEQ ID NO: 35179 - protein, 235 aa, Neptuniibacter caesariensis
SDKQRLLMVDDDVELCELIGDYLRHEGYLIEFAHNADEACEQLKRSERFALMILDVMMPGRTGLELLQQIRPKVQIPVIMLTGRGEDIDRILGLEMGADDYLSKPCNPRELLARIRAVLRRAEPQQRTTLFPDSLVEHAGVTLDPGLREVRINGELLELTGTEFNVLAYLIANAGSVLEKEQLTELVLHRKLAAYDRAIDVHVSRVRQKLAKHLSDAELIKTIRGVGYQFVKDAL

SEQ ID NO: 35180 - protein, 418 aa, Neptuniibacter caesariensis
MEELLNSTAADVTQLKYALDTFYFLVCGALVMWMAAGFAMLEAGLVRAKNTTEILTKNIALYAISCIMYLVCGYAIMYGGDYLLSGITGDGFTGAEEPATYAPSADFFFQVVFVATAMSIVSGAVAERMKLWAFLAFAVVMTGIIYPMEGSWTWGGNSVFGMYTLGDLGFSDFAGSGIVHMAGAAAALAGVLVLGARKGKYSKDGAVNAIPGANLPLATLGTFVLWLGWFGFNGGSVLATSDVENSNAVAVVFMNTNAAAAGGVVAALIVARMLFGKADLTMALNGALAGLVAITAEPSTPSALQATLFGAMGGALVVFSILTLDKLKIDDPVGAISVHGVVGLLGLLLVPVTNDGSSFSGQIIGALTIFVWVFGTSLVVWLALKAVMGIRVSEEEEYEGVDISECGMEAYPEFTSAK

SEQ ID NO: 35181 - protein, 382 aa, Neptuniibacter caesariensis
MDYPSSKLPSVGLTIFSQMTALANQQKAINLSQGFPDFDGPKPLLDAVGRFIAEGKNQYAPMAGLPELCQAVSDKVFRCYGRKLEAESEVTITSGATEAIFAAISATVNAGDEVIVFDPAYDSYEPAVTLNGGTTVHIPLLPPQFAIDFQRLQDAITLRTRMIIFNSPHNPTGSVMSSEDLLQLEQLLEGTNILLLSDEVYEHIIFDNQVHQSFNRSPMLAERSFIVSSFGKTYHVTGWKVGYCVAPEALMKEFRKVHQYLTFSTSTPMQAAIAEYMQSDAEHDQNLPVFYQQKRDLMNERLSSSRFGIMPSPGTYFQLLDYTAISDLSDQEFVLWLLKEAGVATIPLSPFYKDGTQTGMVRLCFAKSSDTLEKAAEQLCRI

SEQ ID NO: 35182 - protein, 369 aa, Neptuniibacter caesariensis
MLIGVPTEIKTREYRVGLTPSGVKELCSQGHDVIIQKGAGEKIGFFDAEYQTSGAEIVETAGELWSRAQMIIKVKEPQPEETARLKPEHLLFTYLHLAAERHLTESLQNSGCTAIAYETITDHLGHLPLLAPMSEVAGRMSVQAGAHCLEIAQQGRGVLLGGVPGVAPGKVIILGGGVVGTNAAQMATGLGAEVTIFDKSPQRLRELDSQFHGRIKTCYSTTDNVQQAIAEADLIIGAVLIPGAAAPKLVTKADLGSMQKGSVIVDVAIDQGGCFETSRPTTHDDPTFIEQGIVHYCVANMPGAVARTSTLALTNATLPYICRLANAPWQTMLKQDPLFAKGLNVHRGDIFCEGVAKAFDLDFRPIDSL

SEQ ID NO: 35183 - protein, 597 aa, Neptuniibacter caesariensis
MTEPTLPETGMKIYLRLLTYVRPYLIAFFLGIAGFILYASTQTGFAMLMEYLVDAIGEEKKDAYIYGPLALMGIALARGVGTFTGNYFTSYVARNVVHQLRLVMFDKLLVLPMQYFHDNSSGHIISKISYNVEQVTEAATDSLKISIREGATVIGLLGYLIFLNWKLTLIFAAVSPVIAVVVIVASKRFRRLGHRIQDSMGDVTHVASENVDAVQVVRVFGGTDSEKSRFSAASKQNLRQSMKMAVTEALSTPVVQLIVSGALALLIFFALHPVMNTGMSAGEFIAFITAAGLIAKPLRSLTEVNGAIQRGIAAAQSIFELVDQTSEPEAGDFKNQECKGRIEMKDLHFSYIQDKPVLKGLDLVVEPGQTVALVGRSGSGKSTMANLLPRFYEPSSGAILLDGKPLSAYELKNLRDKIALVTQNVVLFAGSIRDNIAYGATSGASDEEVIAAAEAAHVMEFVSRLPQGLDTEIGEKGTKLSGGQRQRIAIARAILKNAPVLILDEATSALDTESERHIQAALENVMQGRTTLVIAHRLSTIENADQIVVMDQGKIVEQGSHTQLLALNGAYSALHNMQLSEEKEQPNSAVERQEISE

SEQ ID NO: 35184 - protein, 643 aa, Neptuniibacter caesariensis
MGKIIGIDLGTTNSCVSILDGDSAKVIENAEGDRTTPSIIAYADEGEILVGQPAKRQAVTNPDNTLFAIKRLIGRRFKDDVVQKDIKMVPYKIIEADNGDAWVEVKGDKLAAPQISAEILKKMKKTAEDYLGEEISEAVVTVPAYFNDAQRQATKDAGKIAGLEVKRIINEPTAAALAYGMDKSKGDKTIAVYDLGGGTFDISIIEIAEVDGEHQFEVLSTNGDTFLGGEDFDLRLIEFLADEFKKDTGIDLHNDPLALQRLKEGAEKAKVELSSAQQTDVNLPYITADATGPKHLNVKITRAKLESLVEELVQRSLEPCKIALQDSDLSASEIDEVILVGGQTRMPMVQEKVAEFFGKEARKDVNPDEAVAMGAAIQGAVLAGDVKDVLLLDVTPLTLGIETMGGVATPVIEKNTTIPTKKSQIFSTADDNQSAVTIHVVQGERKQAAQNKSLGRFDLAEIPPAPRGVPQIEVTFDLDANGILNVSAQDKATGKQQSIVIKASSGLSDDEIEQMVNDAEAHAEEDKKFEELTAARNQGDAMVHSAKKTMEEAGDKATDEEKAAVEAATAELEEVLKGDDKDAIEAKTTALTEAISGVAQKMYAEAAQQAEAEQAAGGAEQQQAGGNDDAVDAEFEEVKDDKK

SEQ ID NO: 35185 - protein, 202 aa, Neptuniibacter caesariensis
MLKKIRDRLKDFQPRSFPSNQPKAGVLIALTDHDDPRVILTKRASHLSTHSGEIAFPGGKHDDTDPDLLFTALREAHEEVGLQPDSVEVVGPLGQVISKHGLQVTPWVGIISSELELVANPGELDEVFEVPLSFFLADQRYATDEIRFKGKNLYVPAWEYQGHVIWGLTAYMLVELLNEGCDARIPMKPRPEHKVRRFSNDS

SEQ ID NO: 35186 - protein, 573 aa, Neptuniibacter caesariensis
MRPLAEYFPLLGWLKDYQRETFISDLMAGVIVAILLIPQAMAYALLAGLPAEYGLYASIVPLYLYSLLGSSRSLAVGPVAIASLMVSTAISQVAEQGSADYLNAAINLSFLVGIILLVLRSLRLGSVVNFISHSVLSGFTSAAAIVIAVSQLKHIAGLDTPRASTLDQNIENLLQHSQDTNLTTVLLAGFAFFTLWYCKNSLCCHLQRMAMPDWLVQPICKAGPMFAVLFGTLIVWQLDLKTQAGVTTVGMIPQGLPGLKGIHLDLELWKQLFTPALLIALIGFLESVSVGTALASKRQERIDPNKELIALGAANIGSALSGTYPVAGGFGRSMVNHSAGAQSTVASLVSATLVAITVAFFTPLFYYLPNTVLAAIIIMAVIPLVDLQAFKTSWTFNKADALTLSTTFLMVLFLGVELGILMGIAISIALLLYRSSQPHIAVVGRVGASEHFRNVTRHDVVTDTSTLALRVDESLYFANTRFVEEFILKHCADNPEIKHVVLICTAVNFIDASALETLEQLVKNLRDDEVVLHLSEVKGPVMDQLNSTRFVEQMGQGKIYFTTDQAMRELAGI

SEQ ID NO: 35187 - protein, 280 aa, Neptuniibacter caesariensis
MAYLEPSEFATKMVDAGEQKIFMSTKDTYIRAFMAGAILALAAFFAITVITKTGSALLGAVLFPVGFIMLYLMKFDLLTGVFTLVPLAIIDKRPGCTMNQLWRNWGLVFLGNLSGALMVAFFASFILTYGYQIDGGAVADKVSTIGESRTLGYKEQGVLGWFTIFIRGMLCNWMVSMGVVGAMISTSAGSKMAAMWMPIMLFFYMAFEHSIVNMFLFPFSMIMGGDFTIMEYLIWNEIPTALGNLFGGFLLVGLPLYLTHVKESKARKAATGSAKTVAAL

SEQ ID NO: 35188 - protein, 411 aa, Neptuniibacter caesariensis
MALYVQKYGGTSVGTVDRIEAVADKVAGFKAEGHDIVVVVSAMSGETNRLIGLAKDIQSAPNPREMDVLVSTGEQVTIALLSMALDKRGISARSYTGSQVKILTDTAHMKARIQDIEVSSMQSDLEAGRVVVVAGFQGVDDQGNITTLGRGGSDTTGVALAAALKADECQIYTDVDGVYTTDPRVVEGAQRLEQITFEEMLEMASLGSKVLQIRAVEFAGKYKVPLRVLSSFEDGPGTLITTEDDSTMEKPVISGIAFNRDEAKLTVVGVPDVPGVASRILGSISRENIEVDVIVQNVAADNTTDFTFTVHRNDYDAAEKVLQKVAEELGAREVAGDNKIAKVSIVGVGMRSHAGVASKMFDALAAENINIQMISTSEIKVSVVIAEKYLELAVRALHSAFELDADDTVSE

SEQ ID NO: 35189 - protein, 391 aa, Neptuniibacter caesariensis
MSLKPTDVVIVDGVRTPMGKSRNGSFRNVRAEALSAAVMKALLERNPSLKPAAIEDIMWGCVNQTKEQGFNIGRNAAVLAGIPHTVAAQTINRLCGSSMAALHAAAQAIMTGNGDIFIAGGVEHMGHVSIMHGVDVNPEMSKQVAKAAMMMGVTAEMLGKMNGISREMQDEFAARSHRLAHQAHLDGLWDNEIIPVEGHDENGFKSLLEADEVIRPETTVETLSTLKPVFVPKVGTVTAGTSSAFSDGASAMLVMSAAKAEELGLTPRARIVSMAVAGCDPSIMGYGPVPATQKALKRAGLTIDDIDYVELNEAFAAQGLSVLKGLNLLDKMDDKVNLKGGAIALGHPLGCSGTRITNTLMNVLEQKDATLGLATMCIGMGQGISTVIERV

SEQ ID NO: 35190 - protein, 496 aa, Neptuniibacter caesariensis
MNDQVTSFAINFIAFVGIAFLVVFVIALFAAIVLYQIDKHQTAQTIRRNYPLIGRFRYLFEHIGEFFRQYFFAMDREEMPFNRAQRSWVYRAAKNVDSTIAFGSSRDLRIPGTYYFLNCPFPTLKEDAVKTQALRIGPYCQHPYDAPSFFNISGMSYGAMSKPAIQALAQGAKKAGCWMNTGEGGVSPFHLEAGCDIVYQIGTAKYGLRDENGNFTDEKLKEKGDLPQVKMFEIKLSQGAKPGKGGILPAEKVTPEIAAVRGIPVGEDSLSPNRHPDIASVDDLLDMIERVRRVTGKPCGFKLVMGDSEWLDDFCEAVNKRGVESAPDFITLDSADGGTGAAPMPLMDSVGLPLRESLPILVNKLMAHNLRDRVRVIASGKLINPTDVGAALCMGADFAVTGRGFMFALGCIQALQCNKNTCPTGITTHDPDLQRGLVPEVKADRVANYHNHLVHEVEMIAHSCGVTEPRKLKRKHCAIVVEGSRSIPLNILYPEY

SEQ ID NO: 35191 - protein, 545 aa, Neptuniibacter caesariensis
MDVQRIILIGALCLISYMLVLQWNQDYGQQPEAQQATTSVSAYDTQPVATDLPKAEDTAQTGDVPGTAEQAQQAQLITVKTDVLDIIIDTKGGDIIQAALPQYKAALGSELPFVLLKQNTNRTYVSQSGLVGKNGPDASPEGRPTYAVTKNEYLLGDQDTLAVDLTFTDKQGVQITKRYTFTKGSYEINLEFIVNNQSEQQWAGNLFGQIKRDRSDDPTQSTDMGMQSYLGGVFSTAEDPYEKIDFDDMDDGQFKKSSPDGYVAMSQHYFLSAWIPAPGAEYSYQSRKLNGNYIVGFLSPDFLVNAGEDKKVSATFYVGPKDQEIMELAQENLPLTVDYGWLWWIASPLYMLLKWIYGLVGNWGLAIIGITIVVKAALFHLNAKAFKSMAKMRKFGPEMTRLKELYGDDRQKMSQEMMKLYQKEKINPLGGCLPILAQMPIFIALYWVLMESVDLRHAEFLYLADLSVKDPYFILPIIMGVSMFIQQMLNPTPPDPMQAKIMKMLPIMFTFFFLWFPAGLTLYWVVNNILSIAQQYVINKQIENS

SEQ ID NO: 35192 - protein, 185 aa, Neptuniibacter caesariensis
MPAKIDPKKLIILDRDGVINQDSDDYVKSAEEWIPIPGSIEAIAKLYKNGYTICIATNQSGLARGYFSTSTLDAMHAKLNGLVEAAGGRIHSIEFCPHGPDDNCECRKPLPGMFKSIADKFNLADLTGVYTVGDSLRDLQAGKQLNCSTVLVKTGKGVRTIQSGKQLPEGTAIYNDLSEFVSAMV

SEQ ID NO: 35193 - protein, 393 aa, Neptuniibacter caesariensis
MSQDAVVIVSAARTPMGGMMGSLSDVRAPDLCATAIKAAVERAGIQAADVDEVVMGCVLPAGLGQAPARQASRAAGIPDAAGCTTINKMCGSGMKAVMLAHDQILAGSADIMVAGGMENMSQSPYILPKARAGMRMGHGQVIDHMFFDGLEDAYEGGLMGTYAQKSADAYNVTRESMDDFAIGSLEKAISAIEKGEFVEEIAPVTIKTRKGEVVVDTDEQPGNARIDKIRSLKPAFKKDGTVTAANSSSISDGGSALVLMKESEAKAKGLQPLARIVSHSTHAQLPAEFTIAPIGSIQKALDKAGWSKDDVDLFEINEAFAVVSMLAINELGLDADKVNVRGGACALGHPIGSSGSRIMVTLLHALKQKGLKKGVASLCIGGGEATAVAVEML

SEQ ID NO: 35194 - protein, 439 aa, Neptuniibacter caesariensis
MNPAILLVDDDSSLLKLLSMRLEASGYKVTCADSAERALELINDQFDLLITDLRMEGMDGMALFNQVQRLYPQLPVVIITAHGSIPEAVTATQQGVFGFLTKPIDRDQLLQTISAALASTSRSLGKWRENIISRSSIMENLLAEAEQIAGSDVSVLVTGPSGSGKELMANAIHNASPRHKKPFVAINCGALPEQLLESELFGHTKGAFTGAVNKHEGLFQAANGGTLFLDEIGDMPMPLQVKLLRVLQERQIRPVGSTETVPVDVRIISATHRNLEEAMLNNDFREDLFYRLNVVNLHLPPLSERPEDIPPLARHFVDKAAQRHNPKVKNISSAALHELAQSAWPGNVRQLENIIEKVTALSTTPIISDSAVKRALANQEQVIPNFNEARAEFEKRYLIKVLQITEGNVSQAAKIAGRNRTDFYKLLKKHELEAANFKG

SEQ ID NO: 35195 - protein, 393 aa, Neptuniibacter caesariensis
MTKEVVVLSAVRSAIGAFGGSLSTMEPAELAGQVMKEAVNRSGVDPEKINYVTVGNCIPTESRYAYVARVASIQAGLPMESVAMSVNRLCSSGLQGIVTTAQQIMLGDCDYGVGGGVEVMSRGAYLSTAMRSGARMGETTMLDSMVSVLTDPFGAGHMGITAENLAEKWDISREEQDEFAAESQRRAAVAIEEGRFKSQIVPIVQKTRKGEVVFDTDEHGKPGTTAEKLAGMRPAFKKDGTVTAGNASGINDGAAFFVLASAEAAEAAGQKPIAKIKGYAVAGVSNEIMGEGPIPASKLALEKAGLTLDDIDVIESNEAFAAQAIAVAKGLGLDMAKTNPNGGAIALGHPVGCSGAFIATKAIYELERIEGKYALVTMCIGGGQGIAVVFERV

SEQ ID NO: 35196 - protein, 626 aa, Neptuniibacter caesariensis
MSEVTLSSINVFPIKSLGGLNLSDVFVSEQGLSFDRRFMLSNPDGELLSARQIPSLLQYSVLLRDDGIEVIAPDGDHLSIKYPELFQNYKQVTVWGTEINAQHCGIGFDEWFTEKLGRDCHLLFFGEQSERFTSRRPEKPVAFADGYPILVISQASLDDLNSRSSTPITMDHFRTNLVVDGCEPFAEDSWKRIRIGEVEFEAVKPCSRCVMTTFNPSTGEKIPQGEPINTLAKYRLGADNEVYFGQNLIPLNEGKISTTDRVEVLETQASETYPNNAPIIRSNDSSIEENSWQAGQEVTLQCLQRVDETRDVVTFRFALPKGLRAEYIAGQFITLNLMIDDSPVSRCYTLSSSPSRPQDIAITVKRVTDGKISNWLHKNLQPGDQIQALAPIGEFNEAVTGNGSLLLLSAGSGITPMLSAVRQLTDTHSERDIVFYHQARTEADLICEDELLWLTRQNPKLRLIFSLSQPEPDWLGIKGRISREQLIHHIPDLPQRTVMCCGPEGFMSHAKDYCRQLGLAEQRWFEESFGAPPGIDPTADSHSVQVTLNGDSFTGDNQQTLLEQAEENGFSIPAGCRSGVCGACKVQLIAGDAHRSSEIPLTEEEKAKGIVLACSCTPETDVVIEY

SEQ ID NO: 35197 - protein, 552 aa, Neptuniibacter caesariensis
MYQYNEVDQKLVDERVEQFRDQTRRFLAGELSEDDFLALRLMNGLYVQRHAPMLRVAGPYNMYNSAQFRKLAHIARTYDKGYAHFTTRTNLQFNWPKLEEVPDILAELATVQMHSIQTSGNCIRNTTTDQFAGVIAEEVEDSRPYCEIIRQWSSLHPEFAYLPRKFKIAISAAPDDRAATQVHDIGLHIIKNEAGEVGFEVIVGGGLGRTPMIGKQINPFLAKEDLLSYLEAIIRVYNMNGRRDNKYKARIKILVQAMGIDKFREEVEAEWAHIRDTDLKLPQEEIDRVKAFFKPFDYDESAAQDNSLEAKLAEDEAFNTWYERNTVAHKVDGYRIAYVSLKPYLKPAGDITADQLDLVADLADRYSFGEIRATHNQNLVLADVKKADLYAVWQVLAEAGLARPNMGTITDMTVCPGGDFCALANARTIGVADQINEKFESLDYLHDLGELKLNMSGCMNACSHHHVGHIGILGVDKKGEEWYQITLGGDDGSDAALGKVIGRAVASDQVANTLEKVVEVYVEKRLEGERFIDTFHRIGMAPFKEYVYAPAN

SEQ ID NO: 35198 - protein, 427 aa, Neptuniibacter caesariensis
MSASSFAELALCPELQFTLKNLGYEQPTPIQSQAIPLVLRGDDLLAEAQTGTGKTASFALPIIEKLSKNPIDGYRPVRALVLAPTRELAIQVADNTLEYGRDLGMRVISVYGGVPVENQIKRLKRGTDILVATPGRLLDLLRQKAISLEKLEYLVLDEADRMLDLGFIDPIQKIMDYAADDRQTLLFTATADESVEVLAEFYLNNPTKIKVTPRNSTAKQIRQFAYQVDYGQKADILSYLITEGKWGQTLVFVRTKKRVDELTQYLCKEGINAAAIHGEKSQRERVRMLNEFIAGDLHVLVATDVAARGLDIESLPYVVNYDLPNQPEAYVHRIGRTGRAGETGEAVSLVAPAEREFLQRIEKLIKQKIKLRPVPRIEDGKRLEIDDFADKPMKRKPAKAKQQKRKKVESYQPDKSKKAIRPSLFNK

SEQ ID NO: 35199 - protein, 483 aa, Neptuniibacter caesariensis
MPVPSANRILLVEDDVSMAAVYRSYLTGMAYQIHHEETGQGALAAMSSEQFDGILLDLSLPDMNGLEILQKVNDQELQIEVIVTTGDCSMTTAIEAMQLGARDYLVKPFSKDRLLTTLKNTFDNQKLKRIVETYKEEIDRHNFCGFIGSSLPMQRVYQVIDSAASSKATIFITGESGTGKEVCAEAVHQRSERQKAPFIALNCGAIPKDLIESEIFGHVKGSFTGAVKDRDGAAKAAQGGTLFLDEICEMELALQSKLLRFLQTGTLQKVGSDKTEKVDVRIICASNKDPLAEVQAGNFREDLYYRLHVLPIHLPPLRERENDVIEIATSFLKQYAKEEAKDFKGFDVECELILSNYDWPGNVRQLQNVVRNIVVLHNGKEVTQSMLPAPLDGFSQSAKPISSTVLKPVTPQQAPIQTDVDLTAGEQLSQLIRPMPEVEREVIERAIDLCGGNIPTAAHYLQVSAATIYRKRNSWKEADQNKD

SEQ ID NO: 35200 - protein, 70 aa, Neptuniibacter caesariensis
MQTGKVKWFNNSKGYGFILSDEHAEDLFAHYSAIDVDGYKSLKAGQAVEFETKPGPKGTHAVQIKPLETQ

SEQ ID NO: 35201 - protein, 459 aa, Neptuniibacter caesariensis
MLKKKKALLSKVISSAVLAASLVTVPAWAAIGEPEKEDLKFGFIKLTDMAPLAIAYEKGFFEDEGLYVTLEAQANWKVLLDRVIDGQLDGAHMLAGQPLGATIGFGTQSHIITAFSMDLNGNAITVSNDIWSQMKQHVPMGADGKPVHPIKADALKPVVEKYQDEGKPFNMGMVFPVSTHNYELRYWLAAGGIHPGYYAPHKGDTSGTIDADALLSVTPPPQMPATMEAGTIYGYCVGEPWNQQAVFKGIGVPVVTDYEIWKDNPEKVFGVSKTWADENPNTHLRVVKAMIRAAKWLDDNNNGNRPEAVEILSRSEYVGADYDVIANSMTGTFEYEKGDKREVPDFNVFFRYNATYPYYSDAIWYLTQMRRWGQIAEPKSDRWFMDIAKKVYRPDIYAEAAKELIEEGKMTADMFPDFATEDGFKSPQTHFIDGITYDGSKPNEYLKKFEIGLKPEDKI

SEQ ID NO: 35202 - protein, 341 aa, Neptuniibacter caesariensis
MTAPTELEKTKLTLGFVALLDCAPLVVAREKGFFNKYGLSVVLSKESSWATIRDKVSFGILDGAQMLAPMPLAATLGLNGNKTPMVTALALSQNGTAITLGKELFLALSQHVTDWDNDETVGSQFKALIKSMGRKPVIATVYPYSNHHYQLRYWLKKHNISFADDVELVAIPPTKMLENLSNGLIDGYCVGEPWNSLALINQSGGLLTTGYRIWGTQIEKVLGVTAQWADENPLTHQALVRAIYEACEWLSQSENKDELIELLSLPPYLDRSANLIKGFTPPYSMEQRFFGNEVNLPGQQQGQFLLEQMQACGQLSDEQIDLFSISKQVFREDLYREWCTN

SEQ ID NO: 35203 - protein, 69 aa, Neptuniibacter caesariensis
MSNTTTGTVKWFNDEKGFGFIEQQSGPDVFAHFSAIAGDGFKSLQEGQQVEFTVAQGQKGPQAENIRPL

SEQ ID NO: 35204 - protein, 67 aa, Neptuniibacter caesariensis
MSTTGTVKWFNEEKGFGFIEQENGPDVFVHFSAIQGDGFKTLAEGQKVEFSVTQGQKGPQAENVTKA

SEQ ID NO: 35205 - protein, 417 aa, Neptuniibacter caesariensis
MSFVSLGLSDFFTSTLSSLGYKEPTAIQDKAIPAVLKGHDLIAAAETGSGKTAGFVLPLLEKLHSIPAPGNNLTHALVLVPTRELAVQVSQSVDRYSENCPRKIRSVAIYGGAAINPQMQSLSKGCDIVVATPGRLLDLMRKNALDLRGLKALVLDEADRMLDLGFADELDDILDQTPGNVQTLLFSATFPDKVKELTEELLRNPVEISVKQEATLPDQLHQRAIEVDRNNRTMLLKHLIKQEKWQQLLIFVGSKRTANNIELKLYRSGIQSSTLHGDLTQKERLGALEDFSKGRCKILIATDLAARGIDIPSLPCVLNYDLPRATSDYVHRAGRTARAGEAGLAISFVDHESDAHFKLIEKRIRMKIPREQIPGFERAQEPPKEVTQKKGQAPVKGKRKSKKDKLREAAALAAKNS

SEQ ID NO: 35206 - protein, 322 aa, Neptuniibacter caesariensis
MKAEHNSYSKLAHFPAAFFAMVMGLTGLTLAWEKASQVFSSSILIPKTLLIISACSFLIIVLIYLFKIVRHPQAVTAEFNHPIKMSFFPAFSIGLILLSVATLQISASLSEYIWILGASIHLIFTLYVLGQWLHHPKFQVNHSTPAWFIPVVGNILVPISGVEHGYIEVSWFFFSIGLVYWILLKTLIFNRMFFHDPLPEKLLPTLFILIAPPAVGFISYTKLNGELDNFGRILFYAAMFLVMLLLSQLPKFTRIKFFMSWWAYSFPLAASSVAAMLMYQLTPSAFLYGLSIGLLALSTTVITILFARTMLAIYRNEICKPE

SEQ ID NO: 35207 - protein, 67 aa, Neptuniibacter caesariensis
MATTGTVKWFNDEKGFGFIEQENGPDVFAHFSAIQGDGFKSLAEGQKVEFTITQGQKGPQAENIVKV

SEQ ID NO: 35208 - protein, 144 aa, Neptuniibacter caesariensis
MLQTFLKCKLHRVTVTHAELHYEGSCAIDGVLLDKSGIREYELIHIYNINNGERFSTYAIRAEENSGIISVNGAAAHKASKGDLLIIASYVQLDEKEADEHQPTLCYFENAKADGGVGASDEELHQRNVLTGMKQAIPVQPKDI

SEQ ID NO: 35209 - protein, 404 aa, Neptuniibacter caesariensis
MPVIRKSNKLINVCYDIRGPVLQEAKRLEEEGQRILKLNIGNPAPWGFEAPEEIVQDVILNLPASQGYCDSKGLFSARKAVMQECQKNGIKNVGIEDIYIGNGVSELIVMAMQGLLNDTDEMLIPAPDYPLWTAAVSLSGGNPIHYHCDEEKDWAPDIEDMRSKITERTKGIVVINPNNPTGAVYPKPVLEQIIELAREHNLIVFADEIYDKILYDEAEHTSMASLADDVLCISFNGLSKSYRAAGFRSGWMIVSGPKHNARDYIEGLEMLSSMRLCSNVPTQHAIQTALGGYQSVNELIVPGGRLYEQRNLAWEMLNEIPGVSCTKPEGALYMFPKLDPDVYPIKNDEKMALDLLLQQKVLIVQGSGFNLPDTQHFRLVILPREDELRDAIERIATFLKTYEQ

SEQ ID NO: 35210 - protein, 418 aa, Neptuniibacter caesariensis
MTNKFYNALFASGIAFILTCLMVGIKLDTEGTQLAIKGASAEQWTWIGLGIALVFLSQLFSDKIDAIFSKVPKPKLSNMLPKEQKMATLKPWLLALLIVGMLVWPFMVSRGSVDLATLALIYIMLGLGLNIVVGLAGLLDLGFVAFYAVGAYTYALLSQYFGMSFWACLPISAGLAALFGFILGFPVLRLRGDYLAIVTLGFGEIIRILLNNWTAVTGGPNGISGIDKPTLFGLEFSRRAKEEDTVLFHEFFGIDYSSSYKVIFLYLIAVILTIFVVYVINRLMRMPVGRAWEALREDEIACRSLGLNRTVIKLSAFTLGATTAGFAGAFFAARQGFISPESFIFIESAIILAIVVLGGMGSQVGVILAAIIMTILPELAREFSEYRMLLFGFLMVIMMRWRPQGLVPMKRPHLELNR

SEQ ID NO: 35211 - protein, 1483 aa, Neptuniibacter caesariensis
MSKGLFRPGEFKDNCGFGLMAHMQGQASHDLLDKAIEALACMTHRGGIAADGKTGDGCGLLMQKPDSFLRTVAKDELGVELGEHYAVGMIFLPRDADKAEAARAAVNKAAEAQGLEVAGWRVVPTDESCLGPIAKDTLPLIEQVFIQAKGQSERELAISLFVARRNAEIAMAADEDFYICSFSDKVISYKGLTMPVDLPVFYQDLADKRLETAVCTYHQRFSTNTAPRWPLAQPFRFLAHNGEINTVEGNRNWAKARASKFSTELLPDLDALQPIVNTTGSDSSSMDNMLEFLLVGGMDIYRAVRMIVPPAWQNVDTMDADLRAFYDYNSMHMEPWDGPAGMVMTDGRFAVCMLDRNGLRPSRWVMTKDGYICTASEIGVFTYEPKDIVAQGRVGPGQILAIDTQTGDVLHTQDVDNHLKSAKPYKKWLRENALRLEQTMNLEEESRSFPEMSADEIKTHMKMFQVTFEERDQILRPLGESGMEAIGSMGDDKPMAVLSHRVRSLYDYFRQQFAQVTNPPIDPLREAIVMSLETCIGAERNVFEETPEHARRVILTTPVLSASKFNRLRDNDEPGFEVAQIDLNYNPDQTDLKAAIESIADQAEKCVRDGKVILVLSDANIARGHLPVHAALATGAVHHRLVDKGLRCDANIVVESGTVRDPHHFAVLFGFGATAVYPYLAYRVLNDLCASGELQLQPLDSHENYRKGINKGLMKILSKMGISTVASYRGAQLFEAIGLSSEIVDLCFKGVTSRIEGARFEDFQFEQGLLAKEAWIARKPIQAGGLLKYKHDGEYHAYNPDVVRTIHEAVETGSQEAYSRYAELVNNRGYATLRDMMGLRKDVQSISIDEVEPVENIFPRFDSAAMSLGALSPEAHEALAVAMNELGGRSNSGEGGEDEARHGTIKRSKIKQVASGRFGVTPEYLSNAEVMQIKVAQGAKPGEGGQLPGGKVNSLIARLRYSVPGVTLISPPPHHDIYSIEDLAQLIFDLKQVNPEALVSVKLVSRPGVGTIACGVAKAYADLITISGYDGGTAASPMTSIHYAGSPWELGLADAHQSLRGNHLRGSVRLQTDGGLKTGLDVVKGAILGAESFGFGTMPMVALGCKYLRICHLNNCATGVATQNDKLREDHFRGTVEMVKNFFRFVAEETRQIMAQLGVRSMEELVGRVDLLEILDGETPRQKNLDLTPILTSAGDEFPNTCQVERNEPYDLAELNSKMLALAEQAIADKTGGEYELVITNCDRSVGARTSGAIAKKHGNLGMADQPITFNFKGHAGQSFGVWNAGGQNLYLEGDANDYVGKGMAGGKIVIRPFDEVTFKSNETSIMGNTCLYGATGGKLFAAGQAGERFAVRNSGVHAVVEGAGDHCCEYMTGGLVTVLGPTGYNFGAGMTGGFAYVLDMDNSFVDKYNHELVEIQRVHTENMEAYKNHLRSVIIEFTKETGSAWGQEIVDNLDDYIGRFWLVKPKAASLNDLLTSIRTRPE

SEQ ID NO: 35212 - protein, 573 aa, Neptuniibacter caesariensis
MELLSGAEMVVRALRDEGVKYIYGYPGGALLHIYDAIFTQEEVEHVLVRHEQAATHMADAYARATGKAGVALVTSGPGATNAVTGIATAYMDSIPMVVITGQVMSHLIGEDAFQETDMIGVSRPIVKHSFSVQRPEEIPEIIKKAFHIAESGRPGPVVVDIPKDMTTPTERYEYEYPKSVKMRSYNPISKGHTGQIKKAVDMLLAAKRPVIYTGGGVIMGNASQELTALAQELGYPVTNTLMGLGGYPGTDKQFIGMLGMHGSYEANMAMHHSDMILAVGARFDDRVTNGTDKFCPTAKIVHIDIDPASISKTIKADVPIVGPAQAVLKEMLEQVQAAKKAPCADSMKLWWEQIEEWRARHGGRYKTDDSELMKPQQVIEMLSKVTNGDAYVCSDVGQHQMFAAQYYKFNKPNRWINSGGLGTMGFGLPAAMGVKMNFPEEEVVCVTGEGSIQMNIQELSTISQYDIPVKVICLNNQSLGMVRQWQDMNYESRHSQSYMKSLPDFMKLVESYGHVGIKVERYEDLEGAMREAFAMKDRMVFMDIAVDPFEHVYPMQVPRGSMRDMWLSKTERT

SEQ ID NO: 35213 - protein, 399 aa, Neptuniibacter caesariensis
MKFVDEAVITVEAGKGGNGCMSFRREKYIPKGGPDGGDGGDGGSVFLQADENLNTLIDYRFTRHYKAENGQSGMGRNCTGAKGEDVILRVPVGTTVIDTDTDEILVDLTEIGQTEKIAQGGFHGLGNTRFKSSVNRAPRQTTKGSMGETRNVKLELKVLADVGLLGLPNAGKSTLIRAVSAAKPKVANYPFTTLVPNLGVVRIEKHRSFVIADIPGIIEGAAEGAGLGIRFLKHLARNRILLHLVDMAPWDEVTPEEAAAVAVNELEKFSPTLADQPRWLVLNKLDMVPEEEREERCQAVLDALDWDGPVYRISAISQQGTEEMMRDIQAFLDQRLDAIEEDPSILEREQGVREQVDAEARQRIEQMRTEMRARREKDDLDDDDFDDDDYDVEVEWVRE

SEQ ID NO: 35214 - protein, 103 aa, Neptuniibacter caesariensis
MYAVIVSGGKQYRVQEGETLKLEKLQAEAGANVEFDRVLLVGNGDDIKIGEPVVDGAKVTAEVVQHGRAKKVEIIKFKRRKHHMKRQGHRQWFTEVKITGISA

SEQ ID NO: 35215 - protein, 323 aa, Neptuniibacter caesariensis
MTNPDFLGSARRTIKLEAEAVSDLLDFLDDSFNQACKIMLNCSGRVIVTGMGKSGHIGKKIAATLASTGTPAFFVHPGEASHGDLGMITPNDVVIALSNSGETAEVVTIIPLLKRMNTPLISITANPASTLSSAGDANLHIGVEKEACPLDLAPTSSTTAQLVLGDALAIALLEAKGFSAEDFAFSHPGGSLGRRLLLKVSDIMHADQDIPKVLSGTPLKDALIEVTRKRLGMTTIVDQNNVLQGIFTDGDLRRALDQNVDLQTTSIDAVMTPDGTTVTAEMLAAECLQIMEQRKINALIVTDQDNHPVGALNMHDLLKAGVI

SEQ ID NO: 35216 - protein, 567 aa, Neptuniibacter caesariensis
MSNHNFVDELISILGEKNVLTGENQTEHYRTGFRSGQGSALAVVFPTTLLDQWKVLNACVKADKIVIMQAANTGLTEGSTPSGEDYDREIVVINTTRMDKIYLLDEGNQIISFPGATLFTLEKMLKPINRAPHSVIGSSCIGASIVGGIANNSGGALVQRGPAYTELSLFAQLNDAGELELVNHLGIDLGETPEEILTNLEQRNFADTDVKASTEKASANDYPEIVRDVDADTPARYNADTSRLYESSGCAGKVGVFAVRLDTFPVANKEQVYYIGTNDPQELTDIRRHILQHFENLPEVAEYMHKDIYDIAEKYGKDTFMMINYFGTDPLPKLFAIKGKIAAYLNKISFLPKDIPDRVMQFACKLWPNIIPKRMRDFREKYDHYLVLKMSDGGIKEADKFLKQFFAASDKGDYFECDADEAKKAYLHRFAAAGAAIRYQIIHQNEVEDILALDIALRRNDPDWVENLPEEISQHIVHSLYYGHFMCHVFHQDYILKKGADGKAVKKMMLDLLKEKGAKYPAEHNVGHLYEAEEGLQNFYFDLDPTNSFNPGIGKTQKTRCGCGTPH

SEQ ID NO: 35217 - protein, 592 aa, Neptuniibacter caesariensis
MNSEDQLSFAELGIAEPVLKVLDEIGYETPSPIQAASIPHLLEGRDLLGIAQTGTGKTAAFSLPLLSRLNLKSRNTQLLILAPTRELAIQVAEACQTYARNLPDFHVLPIYGGQAYDSQLRQLKRGAQVVVGTPGRVMDHMRRGSLKLDKLQALVLDEADEMLRMGFIDDVNWVLEHTPEDRQIALFSATMPAQIKSVAEAHLNDPAEVRIKAKTATATTITQKYLRVSGNQKLDAVTRILEMQAFDAMLVFVRTKSATVELAEKLSARGYACEALNGDISQNLRERTIDKLKRGQIDILIATDVVARGLDVERISHVLNYDIPYDTESYIHRIGRTGRAGREGEAILFVSPREQRMLKSIERATRQKIESMQLPSTDDINEKRVQRFVDRISQTIDGQDLDFFRNLLTEYQQEHDADPIVIASALAHLLQGETPLLMKEQERPPRREREGRDGRDNRDKRPPKGMSTKAKALKDHPDVEMKRYLINVGHDNDVAPKNIVGAIANEADLDANFIGSIEIFDDCSTVDLPAGMPKSVLQQLRKVVVCGQRLNIKEAAGGGGGQRRGGGNHRGKGGNHRGKPRRNKDSRKSKES

SEQ ID NO: 35218 - protein, 408 aa, Neptuniibacter caesariensis
MNAEIVLGVVMFTAVVLVLVAVILAARSKLVSSGNVTISINNDPEKSVTVPAGGKLLQTLADQGIFIPSACGGGGTCAQCACEVHSGGGSMLPTEESHFTMREAKEGWRLSCQVAVKQDMEIELEEEIFGVKKWECTVESNPNVATFIKELTLRLPEGENVDFRAGGYVQLECPPHVVNYKDFDIQEEYRGDWDQFNMWQYVSTVTEPTIRAYSMANYPEERGVVKFNIRIASPPPGTDFPPGIMSSYVFNLKEGDKITVYGPFGEFFATDNDSEMVFIGGGAGMAPMRSHIFDQLKRLNSTRKISFWYGARSMRESFYDDEYDMLAAENDNFDWHLALSDPQPEDNWDGLTGFIHNVLYENYLKDHEAPEDCEYYMCGPPMMNSAVIQMLLDLGVERENIFLDDFGG

SEQ ID NO: 35219 - protein, 311 aa, Neptuniibacter caesariensis
MAEDLMHLLEPQNPDQRCGFVAIVGRPNVGKSTLMNHILGQKLSITSKKPQTTRHQIMGIKTEGDLQIVYVDTPGLHKDDGKKALNRYMNKAASDALRDVDLIVFIVDRTAWTEEDQMVLDKVKHARCPVILAVNKVDQLKDKASLLPQMQSHSERMEFAEMIPLSAKQGHNVEQLEELIASYMPKGMHHFPDDQLTDKSSRFMAAEMVREKLMRNLGDEVPYGTTVEIEEFKYAENGVLHISALILVERDGQKRIVIGDKGDRIKTIGRDARLDMQRMFDSKVMLNLWVKVRRGWADDERALRSLGYNDN

SEQ ID NO: 35220 - protein, 391 aa, Neptuniibacter caesariensis
MQTILTVNGGSSSLKCALFERVDDRLNLLYSFKLGNILNTASFRAFDSNGNLLSHCEPDFSTISKEKRHQASLQTVLNWISEQESTTSISAIGHRVVHGGGKYNAPRLITDQLMDELRKFIPLAPLHQPFNLKLIEACHALEPNLPQVACFDTMFHAKQSPLEQHYAIPRKYTEEGIKRYGFHGLSYEFILRKLTEQQSDSLNTIVCHLGAGASMCAIKNKQSIASSMGFTAVDGLPMGSRCGSIDPGVMLYLQRHHQMSADDLERFIYKESGWYGVSGISSDMLELHQSDQPEAEEAIDMFCYRAALEIGRLSAALEGLQQLVFTGGVGENDADVRSRILTRCHWLGIKFAKQANDAGSAVISQDDSSVIVRVIPTNEEAMIATHVTELT

SEQ ID NO: 35221 - protein, 112 aa, Neptuniibacter caesariensis
MSVIDTIKEQIDNNDILLYMKGTPRFPQCGFSSRASEAVMGCGERFAFVNILENPEIRAELPKYANWPTFPQLWVKGELIGGCDIICEMAANGELAELIKEASAGSEEQSAE

SEQ ID NO: 35222 - protein, 408 aa, Neptuniibacter caesariensis
MSEIKKVVLAYSGGLDTSVIVRWLQDEYNAEVVTFTADLGQGEEVEPARAKAEALGVKEIYIEDLREEFVRDFVFPMFRANTIYEGEYLLGTSIARPLIAKRLIEIANETGADAISHGATGKGNDQVRFELGAYALKPGVHVIAPWREWDLTSRETLMKYCEDHNIPVDFSSSKKKSPYSMDANLLHISYEGDILEDPWQEAEEDMWRWSVSPEQAPDEPTYLELTYEKGDIVAINGEKMSPATVLEYLNKVGGENGIGRLDIVENRFVGMKSRGCYETPGGTIMLRAHRAIESITLDREAAHLKDELMPRYAKVIYNGFWWSEERKMLQKMIDESQQVVNGDVRLKLYKGNVVVVGRRSEDSLFDENIATFEDDAGSYDQKDAAGFIKLNALRMRIAAGKGRNLLDD

SEQ ID NO: 35223 - protein, 320 aa, Neptuniibacter caesariensis
MTDTNQNTTVADADMPLYGALGMTFMQFPLLQNLQSSTAEVVVSGVPYDMSTSGRSGARFGPEGVRAASANLVWEGARWPWNFALDDHLKVEDAGNVLFKHGEPQTLVDNLEAHISNIMEADKTALTFGGDHFITLPVLRAYAKKHGPLAIIHFDAHTDTYSGGTKYDHGTLFHHAVEEGLVDTEHSLQIGIRTAYETDGHPFEVLDAAWVNGNGPEATLERIKQRVGDKKVYVSFDIDGLDPSVAPGTGTPVSAGLSIDTALKVIRGLRGLNLIGMDVVEVAPAYDHADITSLAGATLALEYLYVLAANKGAGGDYLSR

SEQ ID NO: 35224 - protein, 527 aa, Neptuniibacter caesariensis
MSDTLQAAVPETQLKNQEEANMSDSKYLAGVDLPVLFISGGALLLFAIFALYDIEMVSGWVNTAFATSTKYFGAYWQVLLLLTFVIGLFLTVGRTGSVVLGGIKTPEMPTFQWISVIMCTLLAGGGVFWAAAEPMAHFTSSPPLFAGTEAGTPEAAYNALAQSFMHWGFLAWAILGSLTGIVFMYLHYEKGLPLKPRTLLYPVFGDKVMTGPLGAIVDASCVLAVVAGTVGPIGFLGLQVSFGLEKLFGIANTYTTQLAILGVLIGIYTISAVSGVTKGIQILSRANVFLAFCLMAFILFFGPTGFIIDGYLHGFGIYLDQFIPMATFRANPGWLDWWTVFFWGWFLGYGPLMAMFVARISKGRTIREMVLLISIVAPIITCFWFTIVGGSGLAFELANPGVISEPFTGFNLPAALLAITEQLPLGFVISVLFLILTTIFVATTGDSMTYAVSMVMTGTDHPKSSVRVFWGVMMGVVAALLISIGSGGISALQSFIVVTAVPVSLVLLPSLWTAPQIARKMADDQGL

SEQ ID NO: 35225 - protein, 248 aa, Neptuniibacter caesariensis
MLMNTATSLTLIDKKYLSPRSLELSYQSDKPLKYLAGQFYSLRFPCGDGFKSRSYSVVNNKRADQNEEFTLSFVITLVEGGAASEYFRSAKPGSEIEASGPFGNLVLPRSNPKRFILIATGAGVAPYRSMLDELTNRLHAEPELKTELILGVRNREELLYGEEFKALSAREERFGFNAVFSRENNNLAEGEFSGHVTELYTLLEASPNDDMIYLCGHPQMIDDSVSFFENLGFSAANLKREKYLFSAI

SEQ ID NO: 35226 - protein, 332 aa, Neptuniibacter caesariensis
MNGSRSTDSEQITIEKVHAVSKMMVFTGNANPDLARKVVDRLDIPMGKANVGRFSDGEVSVEIQENVRGKDVFIIQSTCAPTNDNLMELIVLADALRRASASRITAVVPYFGYARQDRRPRSARVPITAKVVADMMTAIGIDRVLTVDLHADQIQGFFSVPVDNVYGSPVLLDDIADQEYENTMIVSPDVGGVVRARAVAKQLDCDLAIIDKRRERANESDVMNIIGDVEGRTCVLVDDMCDTAGTLCKAAKALKAQGAERVVAYATHAVLSGPAITNITNSDLDEFVVTDTIPLSESAQACSKIRQLTLAPLLAEAVRRVCNEESISAMFR

SEQ ID NO: 35227 - protein, 402 aa, Neptuniibacter caesariensis
MTDAYICDAIRTPFGRYGGGLAPVRPDDLGAIPLKALMERNPQVDWASVEDVIYGNANQAGEDNRNVARMSSLLAGLPTSVPGTTVNRLCGSGIDAIGMAARAIKAGETDLMIAGGCESMSRAPFVMGKAESAFSRNPNGLFDTTIGWRFINKKMKAEFGVDSMPETAENVAEDFNISREDQDLFAFRSQQKTAAAMEAGVFKEEIVPVVIPQRKGDDVVVDTDEHPRASTTLEGLAKLKAPFREGGSVTAGNASGVNDGACALLIASKEAAEKNGLTPKARIVGMATAGLEPRIMGFGPAPATKKVLEKTGLTLDQMDVIELNEAFASQGLAVMRDLGLPDDAAHVNPNGGAISLGHPLGASGARLVTTAMYQLHRTGGRYALCTMCIGVGQGIAIIIERV

SEQ ID NO: 35228 - protein, 366 aa, Neptuniibacter caesariensis
MSDTNFYTLKIAEVQPETDTAIAVSFAVPAELQDKFNFIQGQFLTLRAEIDGEDVRRSYSICSGVNDGHMRVGIKRVKDGKFSNYANDNFKPGMSVEVMPPQGSFFTEVKADQKKNYMCIAAGSGITPMISIMKTVLSTEPESKVTLIYGNRRSNTVMFKDELNFVKNRYLDRFQWINIMDYEDQGADLLNGRIDNAKGYALQKSGLINIKEVDEAFICGPEAMMSEVSRGFRMEGLTDEHIHYELFASSATDSKAMLEKAAARKEQFGEEKMSKVTVMADGRSVMFDLATVGENILDAGIENGMDLPYSCKGGVCSTCKCKLVKGEVDMDISHGLEQHEIDAGYVLSCQAHPISDEVVLDFDARS

SEQ ID NO: 35229 - protein, 389 aa, Neptuniibacter caesariensis
MKMVFRPSQRVAEIESFKVMDLLKRAKQLDAEGFDVIHMEAGEPDFATAAPIAEAAKAAIDKGLTQYTPAAGIPELRTAISQWYKTKYNLEISPERIIVTTGASSALLMVFSLLADAGQSFMMADPGYPCNRQFLQFLDAKSQLVAVNAEQNFQLNAQLIRDNWCPETAGALLASPANPTGAVVHKDELRAISNQIKQLGGHLVVDELYHGLTYGDDAPSVLEVDPDAFVINSFSKYFGMTGWRLGWLVAPEAAAPELEKLAQNLMISPHTVSQYAALAAFKPESLAIFEERKAQFELRRDLLVSGLRELKFDLPISPEGAFYVYAGAQHLTDNTYDYCWSMLEEDHIATTPGLDFGRHRCNEFIRFSYTTGYDRIELMLDRLQKRIHG

SEQ ID NO: 35230 - protein, 393 aa, Neptuniibacter caesariensis
MRDVVIVAAGRTAVGTFGGSLSKVPASDLGAAVIKGLLEKVDLDPAKVDEVILGQVLTAGCGQNPARQATLNGGLPIEVPAITINKVCGSGLKAVQMATQAIRCGDADIIIAGGQENMSLSAHVVPNSRNGARMGDWKMVDTMIKDGLWDAFNDYHMGITTENIVEKYGFTREEQDAFAAASQNKAEAAVTSGRFKDEIIPVSIPQRKGDPIVFDTDEQPRFGCTAEALGKLRPAFKKDGTVTAGNASTINDGAAAVIVCSEEKAKELGLPILARIKAYGNAGIDPAIMGTGPICATQKALEKAGWTVDDLELVEANEAFAAQAMSVNKDLGWNTDIVNVNGGAIALGHPIGASGCRVFVSLIHEMNKRDAKKGLATLCIGGGMGTALAIERD

SEQ ID NO: 35231 - protein, 402 aa, Neptuniibacter caesariensis
MENVNSAVETLIQSSNTLFILMGAIMVFAMHAGFAFLEVGTVRHKNQVNALVKILTDFGFSAMAYFFVGYWVAYGVTFFSPAAELAANNGYELVKFFFLMTFAAAIPAIVSGGIAERGKFWPFLIASALIVAFVYPFFEGIIWNGNYGFQAWLEESFGAGFHDFAGSVVVHGVGGWLALVAVLMLGIRNGRYKGGRLVAFPPSNIPFLALGAWILCIGWFGFNVMSAQTMDGISGLVAVNTLMAMVGGIITALIFGKNDPGFIHNGPLAGLVAVCAGSDVMHPMGSLVVGAVAGAIFVVLFTIQQNKWKIDDVLGVWPLHGVCGAWGAIACGIFGTEALGGLGGVSLMSQIIGTVAGIAVAVIGGVIVYGGVKAVCGLRLSQEEEYNGADLSIHKIESTCDN

SEQ ID NO: 35232 - protein, 555 aa, Neptuniibacter caesariensis
MSNTENTKPTNFIHQVIEQDLEQGTNGGKVVTRFPPEPNGYLHIGHAKSICLNFGTAEKYNGECNLRFDDTNPTKEDQEYVDAIKSDVEWLGFKWAGEVRYASNYFDQFYEWAQHLVREGKAYVCDLSPEEAKEYRGWATEPGKDSPYRDRTPEENLDLLERMRKGEFDEGSCVLRAKIDMASSNMNLRDPILYRIRKESHHQTGDKWCIYPSYDFAHGQEDAIEGVTHSICTLEFADHRPLYEWFIENLPVPSQPRQYEFGRLNLNYTVTSKRKLKQLVDEGHVSGWNDPRMPTISGLRRRGYSPQAIRNFCDSLAVAKTDGTVDMAQFEYFVREDLDKNAPRAMCVVRPLKVTVTNYPEDQEEWFELPNHPKDESMGMRKVPFSRNLIIEQEDFAEVPPRKWKRLTQGVAVRLRGSYVITCEEVIKDAEGNVIELKCTYDPATKGANPEGYKAKGVVHWLSADNSVPCEVREYDRLFAEENPDGDKERDFLEFINPESLVLVEGSRCEVGLANAAVESRFQFERTGYFCVDSESSEDKLVFNRTVGLRDSWGK
